United States Patent Application Publication US 2024/0327476 A1 - sequence listing, part 77

SEQ ID NO: 145348 - DNA, 1689 bp, synthetic construct
  misc_feature 1..1689: note = Description of Artificial Sequence: Synthetic coding sequence
  source 1..1689: mol_type = other DNA
atggctgtgagccgccacctgacccggggcaggaagatggcccacgtgattgctgcctgcctgtacctggtgtgcaggacagagggcaccccccacatgctgctggacctgagtgacctgctgcaggtgaatgtgtatgtgctgggcaagaccttcctgctgctggcccgggagctgtgcatcaatgccccagccatcgacccctgcctgtacatccccaggtttgcccacctgctggagtttggagagaagaaccacgaggtgtccatgacagccctgcggctgctgcagaggatgaagagggactggatgcacacaggccggcggcccagcggcctgtgtggggccgccctgctggtggccgccaggatgcatgacttccggaggacagtgaaggaggtgatctctgtggtgaaggtgtgtgagagcaccctgaggaagaggctgacagaatttgaggacacccccaccagccagctgaccattgatgagttcatgaagattgacctggaggaggagtgtgacccccccagctacacagctggccagaggaagctgaggatgaagcagctggagcaggtgctgagcaagaagctggaggaggtggagggggagatcagcagctaccaggatgccattgaaattgagctggagaacagccggcccaaggccaagggcggcctggccagcctggccaaggatggcagcacagaggacacagccagcagcctgtgtggggaggaggacacagaagatgaggagctggaggccgccgccagccacctgaacaaggacctgtaccgggagctgctgggcggggcccctggcagcagcgaggccgccggcagccctgagtggggcggccggcccccagccctgggcagcctgctggaccccctgcccacagctgccagcctgggcatcagtgacagcatccgggagtgcatcagcagccagagcagtgaccccaaggatgccagcggagatggagagctggacctgtctggaattgatgacctggagattgaccgctacatcctgaatgaaagtgaggcccgggtgaaggccgagctgtggatgagagaaaatgctgagtacctgcgggagcagcgggagaaggaggccagaattgccaaggagaaggagctgggcatctacaaggagcacaagcccaagaagagctgcaagagaagagagcccatccaggccagcacagcccgggaggccatcgagaagatgctggagcagaagaagatcagcagcaagatcaactacagcgtgctgcggggcctgagcagcgctgggggcggcagcccccaccgggaggatgcccagcctgagcacagcgccagcgccaggaagctgagcagaagaaggaccccagccagccgctctggagctgaccctgtgacctctgtgggcaagaggctgcggcccctggtgtccacccagcctgccaagaaggtggccactggagaggccctgctgcccagcagccccaccctgggcgctgagcccgcccggccccaggccgtgctggtggagagcggccctgtgtcctaccacgcagatgaggaggctgatgaggaggagccagatgaagaagatggagagccctgtgtgtctgccctgcagatgatgggcagcaatgactatggctgtgatggagatgaagatgatggctactag

SEQ ID NO: 145349 - DNA, 408 bp, synthetic construct
  misc_feature 1..408: note = Description of Artificial Sequence: Synthetic coding sequence
  source 1..408: mol_type = other DNA
atgacagccctgcggctgctgcagaggatgaagagggactggatgcacactggaagaagacccagcggcctgtgtggggccgccctgctggtggccgccaggatgcatgacttcagaagaacagtgaaggaggtgatctctgtggtgaaggtgtgtgagagcaccctgaggaagaggctgacagaatttgaggacacccccaccagccagctgaccattgatgagttcatgaagattgacctggaggaggagtgtgaccccccacccatcgaggagggcggccagacagaggcccgggagcccccccaggccagctcctgggagggccccagcaccaccaggagaagaagccagctgtggcacggctgccccggctgcggccggggcggcttcaccctgtgcccctag

SEQ ID NO: 145350 - DNA, 723 bp, synthetic construct
  misc_feature 1..723: note = Description of Artificial Sequence: Synthetic coding sequence
  source 1..723: mol_type = other DNA
atgacaggccgggtgtgccggggctgcggcggcacagacatcgagctggatgctgcccggggagatgctgtgtgcacagcctgtggctctgtgctggaggacaacatcatcgtgtctgaggtgcagtttgtggagagcagcggcggcggcagcagcgctgtgggccagtttgtgtccctggatggagctgggaagacccccaccctgggcggcggcttccacgtgaacctgggcaaggagagccgggcccagaccctgcagaatggccgccgccacatccaccacctgggcaaccagctgcagctgaaccagcactgcctggacacagccttcaacttcttcaagatggctgtgagccgccacctgacccggggcaggaagatggcccacgtgattgctgcctgcctgtacctggtgtgcaggacagagggcaccccccacatgctgctggacctgagtgacctgctgcaggtggacagcctgcggcctgccagcttccccacctggggctgtgacctgggcgtggtgaccagggtggtgactggagtgtacccccgctgcccccgcatctctgtggccggcctgtgctgcctgcccagccaggaggtgctggtgtgcaggatgaggggcctgcatgacatgggcgtgacagtgcgggacctgtgggagtgtggcagcccctggcaggagcacctgcccatgctgggcaccgtgggctgctag

SEQ ID NO: 145351 - DNA, 555 bp, synthetic construct
  misc_feature 1..555: note = Description of Artificial Sequence: Synthetic coding sequence
  source 1..555: mol_type = other DNA
atgacagccctgcggctgctgcagaggatgaagagggactggatgcacactggaagaagacccagcggcctgtgtggggccgccctgctggtggccgccaggatgcatgacttcagaagaacagtgaaggaggtgatctctgtggtgaaggtgtgtgagagcaccctgaggaagaggctgacagaatttgaggacacccccaccagccagctgaccattgatgagttcatgaagattgacctggaggaggagtgtgaccccccatcctacacagctggccagaggaagctgaggatgaagcagctggagcaggtgctgagcaagaagctggaggaggtggagggggagatcagcagctaccaggatgccatcgagattgagctggagaacagcccccccagcagaagagagggcagaagaagacctgagagcctgccccggcccctgcggggcaaggcccctgtgcccctggtgggcggcctgagcagcggcatggccgccccagatgtggccgagggcgccagcccctgtgtgctgcggcggggctggccctag

SEQ ID NO: 145352 - DNA, 1953 bp, synthetic construct
  misc_feature 1..1953: note = Description of Artificial Sequence: Synthetic coding sequence
  source 1..1953: mol_type = other DNA
atgacaggccgggtgtgccggggctgcggcggcacagacatcgagctggatgctgcccggggagatgctgtgtgcacagcctgtggctctgtgctggaggacaacatcatcgtgtctgaggtgcagtttgtggagagcagcggcggcggcagcagcgctgtgggccagtttgtgtccctggatggaagaagacacatccaccacctgggcaaccagctgcagctgaaccagcactgcctggacacagccttcaacttcttcaagatggctgtgagccgccacctgacccggggcaggaagatggcccacgtgattgctgcctgcctgtacctggtgtgcaggacagagggcaccccccacatgctgctggacctgagtgacctgctgcaggtgaatgtgtatgtgctgggcaagaccttcctgctgctggcccgggagctgtgcatcaatgccccagccatcgacccctgcctgtacatccccaggtttgcccacctgctggagtttggagagaagaaccacgaggtgtccatgacagccctgcggctgctgcagaggatgaagagggactggatgcacacaggccggcggcccagcggcctgtgtggggccgccctgctggtggccgccaggatgcatgacttccggaggacagtgaaggaggtgatctctgtggtgaaggtgtgtgagagcaccctgaggaagaggctgacagaatttgaggacacccccaccagccagctgaccattgatgagttcatgaagattgacctggaggaggagtgtgacccccccagctacacagctggccagaggaagctgaggatgaagcagctggagcaggtgctgagcaagaagctggaggaggtggagggggagatcagcagctaccaggatgccattgaaattgagctggagaacagccggcccaaggccaagggcggcctggccagcctggccaaggatggcagcacagaggacacagccagcagcctgtgtggggaggaggacacagaagatgaggagctggaggccgccgccagccacctgaacaaggacctgtaccgggagctgctgggcggggcccctggcagcagcgaggccgccggcagccctgagtggggcggccggcccccagccctgggcagcctgctggaccccctgcccacagctgccagcctgggcatcagtgacagcatccgggagtgcatcagcagccagagcagtgaccccaaggatgccagcggagatggagagctggacctgtctggaattgatgacctggagattgaccgctacatcctgaatgaaagtgaggcccgggtgaaggccgagctgtggatgagagaaaatgctgagtacctgcgggagcagcgggagaaggaggccagaattgccaaggagaaggagctgggcatctacaaggagcacaagcccaagaagagctgcaagagaagagagcccatccaggccagcacagcccgggaggccatcgagaagatgctggagcagaagaagatcagcagcaagatcaactacagcgtgctgcggggcctgagcagcgctgggggcggcagcccccaccgggaggatgcccagcctgagcacagcgccagcgccaggaagctgagcagaagaaggaccccagccagccgctctggagctgaccctgtgacctctgtgggcaagaggctgcggcccctggtgtccacccagcctgccaagaaggtggccactggagaggccctgctgcccagcagccccaccctgggcgctgagcccgcccggccccaggccgtgctggtggagagcggccctgtgtcctaccacgcagatgaggaggctgatgaggaggagccagatgaagaagatggagagccctgtgtgtctgccctgcagatgatgggcagcaatgactatggctgtgatggagatgaagatgatggctactag

SEQ ID NO: 145353 - DNA, 1422 bp, synthetic construct
  misc_feature 1..1422: note = Description of Artificial Sequence: Synthetic coding sequence
  source 1..1422: mol_type = other DNA
atgacagccctgcggctgctgcagaggatgaagagggactggatgcacactggaagaagacccagcggcctgtgtggggccgccctgctggtggccgccaggatgcatgacttcagaagaacagtgaaggaggtgatctctgtggtgaaggtgtgtgagagcaccctgaggaagaggctgacagaatttgaggacacccccaccagccagctgaccattgatgagttcatgaagattgacctggaggaggagtgtgaccccccatcctacacagctggccagaggaagctgaggatgaagcagctggagcaggtgctgagcaagaagctggaggaggtggagggggagatcagcagctaccaggatgccatcgagattgagctggagaacagccggcccaaggccaagggcggcctggccagcctggccaaggatggcagcacagaggacacagccagcagcctgtgtggggaggaggacacagaagatgaggagctggaggccgccgccagccacctgaacaaggacctgtaccgggagctgctgggcggggcccctggcagcagcgaggccgccggcagccctgagtggggcggccggcccccagccctgggcagcctgctggaccccctgcccacagctgccagcctgggcatcagtgacagcatccgggagtgcatcagcagccagagcagtgaccccaaggatgccagcggagatggagagctggacctgagcggcattgatgacctggagattgaccgctacatcctgaatgaaagtgaggcccgggtgaaggccgagctgtggatgagagaaaatgctgagtacctgcgggagcagcgggagaaggaggcccgcatcgccaaggagaaggagctgggcatctacaaggagcacaagcccaagaagagctgcaagaggcgggagcccatccaggccagcacagcccgggaggccatcgagaagatgctggagcagaagaagatcagcagcaagatcaactacagcgtgctgcggggcctgagcagcgctgggggcggcagcccccacagagaagatgcccagcctgagcacagcgccagcgccaggaagctgagcagaagaaggaccccagccagccgcagcggggctgaccctgtgacctctgtgggcaagaggctgcggcccctggtgtccacccagcctgccaagaaggtggccaccggggaggccctgctgcccagcagccccaccctgggcgctgagcccgcccggccccaggccgtgctggtggagagcggccctgtgtcctaccacgcagatgaggaggctgatgaggaggagccagatgaggaggatggagagccctgtgtgtctgccctgcagatgatgggcagcaatgactatggctgtgatggagatgaagatgatggctactag

SEQ ID NO: 145354 - DNA, 1755 bp, synthetic construct
  misc_feature 1..1755: note = Description of Artificial Sequence: Synthetic coding sequence
  source 1..1755: mol_type = other DNA
atggctgtgagccgccacctgacccggggcaggaagatggcccacgtgattgctgcctgcctgtacctggtgtgcaggacagagggcaccccccacatgctgctggacctgagtgacctgctgcaggtgaatgtgtatgtgctgggcaagaccttcctgctgctggcccgggagctgtgcatcaatgccccagccatcgacccctgcctgtacatccccaggtttgcccacctgctggagtttggagagaagaaccacgaggtgtccatgacagccctgcggctgctgcagaggatgaagagggactggatgcacacaggccggcggcccagcggcctgtgtggggccgccctgctggtggccgccaggatgcatgacttccggaggacagtgaaggaggtgatctctgtggtgaaggtgtgtgagagcaccctgaggaagaggctgacagaatttgaggacacccccaccagccagctgaccattgatgagttcatgaagattgacctggaggaggagtgtgacccccccagctacacagctggccagaggaagctgaggatgaagcagctggagcaggtgctgagcaagaagctggaggaggtggagggggagatcagcagctaccaggatgccattgaaattgagctggagaacagccggcccaaggccaagggcggcctggccagcctggccaaggatggcagcacagaggacacagccagcagcctgtgtggggaggaggacacagaagatgaggagctggaggccgccgccagccacctgaacaaggacctgtaccgggagctgctgggcggggcccctggcagcagcgaggccgccggcagccctgagtggggcggccggcccccagccctgggcagcctgctggaccccctgcccacagctgccagcctgggcatcagtgacagcatccgggagtgcatcagcagccagagcagtgaccccaaggatgccagcggagatggagagctggacctgtctggaattgatgacctggagattgaccggcgggacctgtccatgccccgctgtgccaaggccaagagccagccccacttccctgtgctggcccagtacatcctgaatgaaagtgaggcccgggtgaaggccgagctgtggatgagagaaaatgctgagtacctgcgggagcagcgggagaaggaggccagaattgccaaggagaaggagctgggcatctacaaggagcacaagcccaagaagagctgcaagagaagagagcccatccaggccagcacagcccgggaggccatcgagaagatgctggagcagaagaagatcagcagcaagatcaactacagcgtgctgcggggcctgagcagcgctgggggcggcagcccccaccgggaggatgcccagcctgagcacagcgccagcgccaggaagctgagcagaagaaggaccccagccagccgctctggagctgaccctgtgacctctgtgggcaagaggctgcggcccctggtgtccacccagcctgccaagaaggtggccactggagaggccctgctgcccagcagccccaccctgggcgctgagcccgcccggccccaggccgtgctggtggagagcggccctgtgtcctaccacgcagatgaggaggctgatgaggaggagccagatgaagaagatggagagccctgtgtgtctgccctgcagatgatgggcagcaatgactatggctgtgatggagatgaagatgatggctactag

SEQ ID NO: 145355 - DNA, 1320 bp, synthetic construct
  misc_feature 1..1320: note = Description of Artificial Sequence: Synthetic coding sequence
  source 1..1320: mol_type = other DNA
atgcatgacttcagaagaacagtgaaggaggtgatctctgtggtgaaggtgtgtgagagcaccctgaggaagaggctgacagaatttgaggacacccccaccagccagctgaccattgatgagttcatgaagattgacctggaggaggagtgtgaccccccatcctacacagctggccagaggaagctgaggatgaagcagctggagcaggtgctgagcaagaagctggaggaggtggagggggagatcagcagctaccaggatgccatcgagattgagctggagaacagccggcccaaggccaagggcggcctggccagcctggccaaggatggcagcacagaggacacagccagcagcctgtgtggggaggaggacacagaagatgaggagctggaggccgccgccagccacctgaacaaggacctgtaccgggagctgctgggcggggcccctggcagcagcgaggccgccggcagccctgagtggggcggccggcccccagccctgggcagcctgctggaccccctgcccacagctgccagcctgggcatcagtgacagcatccgggagtgcatcagcagccagagcagtgaccccaaggatgccagcggagatggagagctggacctgagcggcattgatgacctggagattgaccgctacatcctgaatgaaagtgaggcccgggtgaaggccgagctgtggatgagagaaaatgctgagtacctgcgggagcagcgggagaaggaggcccgcatcgccaaggagaaggagctgggcatctacaaggagcacaagcccaagaagagctgcaagaggcgggagcccatccaggccagcacagcccgggaggccatcgagaagatgctggagcagaagaagatcagcagcaagatcaactacagcgtgctgcggggcctgagcagcgctgggggcggcagcccccacagagaagatgcccagcctgagcacagcgccagcgccaggaagctgagcagaagaaggaccccagccagccgcagcggggctgaccctgtgacctctgtgggcaagaggctgcggcccctggtgtccacccagcctgccaagaaggtggccaccggggaggccctgctgcccagcagccccaccctgggcgctgagcccgcccggccccaggccgtgctggtggagagcggccctgtgtcctaccacgcagatgaggaggctgatgaggaggagccagatgaggaggatggagagccctgtgtgtctgccctgcagatgatgggcagcaatgactatggctgtgatggagatgaagatgatggctactag

SEQ ID NO: 145356 - DNA, 2034 bp, synthetic construct
  misc_feature 1..2034: note = Description of Artificial Sequence: Synthetic coding sequence
  source 1..2034: mol_type = other DNA
atgacaggccgggtgtgccggggctgcggcggcacagacatcgagctggatgctgcccggggagatgctgtgtgcacagcctgtggctctgtgctggaggacaacatcatcgtgtctgaggtgcagtttgtggagagcagcggcggcggcagcagcgctgtgggccagtttgtgtccctggatggagctgggaagacccccaccctgggcggcggcttccacgtgaacctgggcaaggagagccgggcccagaccctgcagaatggccgccgccacatccaccacctgggcaaccagctgcagctgaaccagcactgcctggacacagccttcaacttcttcaagatggctgtgagccgccacctgacccggggcaggaagatggcccacgtgattgctgcctgcctgtacctggtgtgcaggacagagggcaccccccacatgctgctggacctgagtgacctgctgcaggtgaatgtgtatgtgctgggcaagaccttcctgctgctggcccgggagctgtgcatcaatgccccagccatcgacccctgcctgtacatccccaggtttgcccacctgctggagtttggagagaagaaccacgaggtgtccatgacagccctgcggctgctgcagaggatgaagagggactggatgcacactggaagaagacccagcggcctgtgtggggccgccctgctggtggccgccaggatgcatgacttcagaagaacagtgaaggaggtgatctctgtggtgaaggtgtgtgagagcaccctgaggaagaggctgacagaatttgaggacacccccaccagccagctgaccattgatgagttcatgaagattgacctggaggaggagtgtgaccccccatcctacacagctggccagaggaagctgaggatgaagcagctggagcaggtgctgagcaagaagctggaggaggtggagggggagatcagcagctaccaggatgccatcgagattgagctggagaacagccggcccaaggccaagggcggcctggccagcctggccaaggatggcagcacagaggacacagccagcagcctgtgtggggaggaggacacagaagatgaggagctggaggccgccgccagccacctgaacaaggacctgtaccgggagctgctgggcggggcccctggcagcagcgaggccgccggcagccctgagtggggcggccggcccccagccctgggcagcctgctggaccccctgcccacagctgccagcctgggcatcagtgacagcatccgggagtgcatcagcagccagagcagtgaccccaaggatgccagcggagatggagagctggacctgagcggcattgatgacctggagattgaccgctacatcctgaatgaaagtgaggcccgggtgaaggccgagctgtggatgagagaaaatgctgagtacctgcgggagcagcgggagaaggaggcccgcatcgccaaggagaaggagctgggcatctacaaggagcacaagcccaagaagagctgcaagaggcgggagcccatccaggccagcacagcccgggaggccatcgagaagatgctggagcagaagaagatcagcagcaagatcaactacagcgtgctgcggggcctgagcagcgctgggggcggcagcccccacagagaagatgcccagcctgagcacagcgccagcgccaggaagctgagcagaagaaggaccccagccagccgcagcggggctgaccctgtgacctctgtgggcaagaggctgcggcccctggtgtccacccagcctgccaagaaggtggccaccggggaggccctgctgcccagcagccccaccctgggcgctgagcccgcccggccccaggccgtgctggtggagagcggccctgtgtcctaccacgcagatgaggaggctgatgaggaggagccagatgaggaggatggagagccctgtgtgtctgccctgcagatgatgggcagcaatgactatggctgtgatggagatgaagatgatggctactag

SEQ ID NO: 145357 - DNA, 612 bp, synthetic construct
  misc_feature 1..612: note = Description of Artificial Sequence: Synthetic coding sequence
  source 1..612: mol_type = other DNA
atgagagaaaatgctgagtacctgcgggagcagcgggagaaggaggcccgcatcgccaaggagaaggagctgggcatctacaaggagcacaagcccaagaagagctgcaagaggcgggagcccatccaggccagcacagcccgggaggccatcgagaagatgctggagcagaagaagatcagcagcaagatcaactacagcgtgctgcggggcctgagcagcgctgggggcggcagcccccacagagaagatgcccagcctgagcacagcgccagcgccaggaagctgagcagaagaaggaccccagccagccgcagcggggctgaccctgtgacctctgtgggcaagaggctgcggcccctggtgtccacccagcctgccaagaaggtggccaccggggaggccctgctgcccagcagccccaccctgggcgctgagcccgcccggccccaggccgtgctggtggagagcggccctgtgtcctaccacgcagatgaggaggctgatgaggaggagccagatgaggaggatggagagccctgtgtgtctgccctgcagatgatgggcagcaatgactatggctgtgatggagatgaagatgatggctactag

SEQ ID NO: 145358 - DNA, 714 bp, synthetic construct
  misc_feature 1..714: note = Description of Artificial Sequence: Synthetic coding sequence
  source 1..714: mol_type = other DNA
atgacagccctgcggctgctgcagaggatgaagagggactggatgcacactggaagaagacccagcggcctgtgtggggccgccctgctggtggccgccaggatgcatgacttcagaagaacagtgaaggaggtgatctctgtggtgaaggtgtgtgagagcaccctgaggaagaggctgacagaatttgaggacacccccaccagccagctgaccattgatgagttcatgaagattgacctggaggaggagtgtgaccccccatcctacacagctggccagaggaagctgaggatgaagcagctggagcaggtgctgagcaagaagctggaggaggtggagggggagatcagcagctaccaggatgccatcgagattgagctggagaacagccggcccaaggccaagggcggcctggccagcctggccaaggatggcagcacagaggacacagccagcagcctgtgtggggaggaggacacagaagatgaggagctggaggccgccgccagccacctgaacaaggacctgtaccgggagctgctgggcggggcccctggcagcagcgaggccgccggcagccctgagtggggcggccggcccccagccctgggcagcctgctggaccccctgcccacagctgccagcctgggcatcagtgacagcatccgggagtgcatcagcagccagagcagtgaccccagcgagttctag

SEQ ID NO: 145359 - DNA, 138 bp, synthetic construct
  misc_feature 1..138: note = Description of Artificial Sequence: Synthetic coding sequence
  source 1..138: mol_type = other DNA
atgacagccctgcggctgctgcagaggatgaagagggactggatgcacactggaagaagacccagcggcctgtgtggggccgccctgctggtggccgccaggatgcatgacttcagaagaacagtgaaggaggtgtag

SEQ ID NO: 145360 - DNA, 45 bp, synthetic construct
  misc_feature 1..45: note = Description of Artificial Sequence: Synthetic coding sequence
  source 1..45: mol_type = other DNA
atgacagccctgcggctgctgcagaggatgaagagggactggtag

SEQ ID NO: 145361 - DNA, 468 bp, synthetic construct
  misc_feature 1..468: note = Description of Artificial Sequence: Synthetic coding sequence
  source 1..468: mol_type = other DNA
atgacagccctgcggctgctgcagaggatgaagagggactggatgcacactggaagaagacccagcggcctgtgtggggccgccctgctggtggccgccaggatgcatgacttcagaagaacagtgaaggaggtgatctctgtggtgaaggtgtgtgagagcaccctgaggaagaggctgacagaatttgaggacacccccaccagccagctgaccattgatgagttcatgaagattgacctggaggaggagtgtgaccccccatcctacacagctggccagaggaagctgaggatgaagcagctggagcaggtgctgagcaagaagctggaggaggtggagggggagatcagcagctaccaggatgccatcgagattgagctggagaacagccggcccaaggccaagggcggcctggccagcctggccaaggatggcagcacagaggacacagccagcagcctgtag

SEQ ID NO: 145362 - DNA, 8307 bp, synthetic construct
  misc_feature 1..8307: note = Description of Artificial Sequence: Synthetic coding sequence
  source 1..8307: mol_type = other DNA
atggccctggtgctggagatcttcaccctgctggccagcatctgctgggtgtctgccaacatctttgagtaccaggtggatgcccagcccctgcggccctgtgagctgcagcgggagacagccttcctgaagcaggccgactatgtgccccagtgtgccgaggatggcagcttccagacagtgcagtgccagaatgatggccgcagctgctggtgtgtgggcgccaacggcagcgaggtgctgggcagccggcagcccggccggcctgtggcctgcctgtccttctgccagctgcagaagcagcagatcctgctgagcggctacatcaacagcacagacaccagctacctgccccagtgccaggacagcggggactatgcccctgtgcagtgtgatgtgcagcaggtgcagtgctggtgtgtggatgctgagggcatggaggtgtatggcacccggcagctgggccggcccaagcgctgccccaggagctgtgagatccggaacagaaggctgctgcatggagtgggggacaagagccccccccagtgcagcgctgagggggagttcatgcctgtgcagtgcaagtttgtgaacaccacagacatgatgatctttgacctggtgcacagctacaaccgcttcccagatgcctttgtgaccttcagcagcttccagaggcgcttccctgaggtgtctggctactgccactgtgccgacagccagggccgggagctggccgagaccggcctggagctgctgctggatgagatctatgacaccatctttgctggcctggacctgcccagcaccttcacagagaccaccctgtaccgcatcctgcagaggcgcttcctggccgtgcagagcgtcatcagcggccgcttccgctgccccaccaagtgtgaggtggagcgcttcaccgccaccagctttggccacccctacgtgcccagctgcagaagaaatggagactaccaggccgtgcagtgccagacagagggcccctgctggtgtgtggatgcccagggcaaggagatgcacggcacccggcagcagggcgagccccccagctgtgccgagggccagagctgtgccagcgagcggcagcaggccctgagccggctgtacttcggcaccagcggctacttcagccagcacgacctcttcagcagccctgagaagcgctgggccagcccccgggtggccaggtttgccaccagctgcccccccaccatcaaggagctgtttgtggacagcggcctgctgcggcccatggtggagggccagagccagcagttctctgtgtctgagaacctgctgaaggaggccatccgggccatcttccccagccggggcctggcccggctggccctgcagttcaccaccaaccccaagaggctgcagcagaacctgtttggaggcaagttcctggtgaatgtgggccagttcaacctgagcggggccctgggcacccggggcaccttcaacttcagccagttcttccagcagctgggcctggccagcttcctgaatggaggccggcaggaggacctggccaagcccctgtctgtgggcctggacagcaacagcagcacaggcaccccagaggccgccaagaaggatggcaccatgaacaagcccaccgtgggcagctttggatttgagatcaacctgcaggagaaccagaatgccctgaagttcctggccagcctgctggagctgcctgagttcctgctcttcctgcagcacgccatctctgtgcctgaagatgtggcccgggacctgggagatgtgatggagaccgtgctgagcagccagacctgtgagcagaccccagagcggctgtttgtgcccagctgcaccacagagggcagctatgaagatgtgcagtgcttctctggagagtgctggtgtgtgaacagctggggcaaggagctgcccggcagccgggtgcggggcggccagccccgctgccccacagactgtgagaagcagagggccaggatgcagagcctgatgggcagccagcctgctggcagcaccctgtttgtgcctgcctgcaccagcgagggccacttcctgcctgtgcagtgcttcaacagcgagtgctactgtgtggatgctgagggccaggccatccctggcaccaggtctgccatcggcaagcccaagaagtgccccaccccctgccagctgcagagcgagcaggccttcctgaggacagtgcaggccctgctgagcaacagctccatgctgcccaccctgagtgacacctacatcccccagtgcagcacagatggccagtggaggcaggtgcagtgcaatggacctcctgagcaggtgtttgagctgtaccagcgctgggaggcccagaacaagggccaggacctgaccccagccaagctgctggtgaagatcatgagctaccgggaggccgccagcggcaacttcagcctcttcatccagagcctgtatgaagctggccagcaggatgtgtttcctgtgctgagccagtaccccagcctgcaggatgtgcccctggccgccctggagggcaagaggccccagccccgggagaacatcctgctggagccctacctgttctggcagatcctgaatggccagctgagccagtacccaggcagctacagcgacttcagcacccccctggcccactttgacctgaggaactgctggtgtgtggatgaggccggccaggagctggagggcatgaggtctgagcccagcaagctgcccacctgccccggcagctgtgaggaggccaagctgcgggtgctgcagttcatccgggagacagaggagatcgtgtctgccagcaacagcagccgcttccccctgggggagagcttcctggtggccaagggcatccggctgagaaatgaagacctgggcctgcccccactcttccccccccgggaggcctttgctgagcagttcctgcggggcagtgactatgccatccggctggccgcccagagcaccctgtccttctaccagaggcggcgcttctccccagatgattctgctggggccagcgccctgctgcggagcggcccctacatgccccagtgtgatgccttcggctcctgggagcctgtgcagtgccacgccggcaccggccactgctggtgtgtggatgagaagggcggcttcatccctggcagcctgacagcccggagcctgcagatcccccagtgccccaccacctgtgagaagagcaggaccagcggcctgctgagctcctggaagcaggcccggagccaggagaaccccagccccaaggacctgtttgtgcctgcctgcctggagactggagaatatgcccggctgcaggccagcggggccggcacctggtgtgtggaccctgccagcggggaggagctgcggcccggcagcagcagcagcgcccagtgccccagcctgtgcaatgtgctgaagagcggcgtgctgagcagaagagtgtccccaggctacgtgcctgcctgcagagcagaagatggcggcttcagccctgtgcagtgtgaccaggcccagggcagctgctggtgtgtgatggacagcggggaggaggtgcccggcaccagggtgactggaggccagcctgcctgtgagagcccccgctgccccctgcccttcaatgccagcgaggtggtgggcggcaccatcctgtgtgagaccatcagcggccccaccggcagcgccatgcagcagtgccagctgctgtgccggcagggctcctggagcgtcttccccccaggccccctcatctgcagcctggagagcggccgctgggagagccagctgccccagccccgggcctgccagaggccccagctgtggcagaccatccagacccagggccacttccagctgcagctgcccccaggcaagatgtgcagcgctgactatgctgacctgctgcagaccttccaggtgttcatcctggatgagctgacagcccggggcttctgccagatccaggtgaagaccttcggcaccctggtgtccatccctgtgtgcaacaacagctctgtgcaggtgggctgcctgacccgggagcggctgggcgtgaatgtgacctggaagagccggctggaggacatccctgtggccagcctgcctgacctgcatgacatcgagcgggccctggtgggcaaggacctgctgggccgcttcacagacctgatccagagcggcagcttccagctgcacctggacagcaagaccttccctgctgagaccatccgcttcctgcagggcgaccacttcggcaccagccccaggacctggtttggctgcagcgagggcttctaccaggtgctgaccagcgaggccagccaggacggcctgggctgtgtgaagtgcccagagggcagctacagccaggatgaggagtgcatcccctgccctgtgggcttctaccaggagcaggccggcagcctggcctgtgtgccctgccctgtgggccgcaccaccatctctgctggggccttcagccagacccactgtgtgacagactgccagagaaatgaagctggcctgcagtgtgaccagaatggccagtaccgggccagccagaaggaccggggcagcggcaaggccttctgtgtggatggagagggccgccgcctgccctggtgggagacagaggcccccctggaggacagccagtgcctgatgatgcagaagtttgagaaggtgcctgagagcaaggtgatctttgatgccaatgcccctgtggccgtgcgcagcaaggtgcctgacagcgagttccctgtgatgcagtgcctgacagactgcacagaagatgaggcctgcagcttcttcaccgtgtccaccacagagcctgagatcagctgtgacttctacgcctggaccagtgacaacgtggcctgcatgaccagtgaccagaagagagatgccctgggcaacagcaaggccaccagctttggcagcctgcgctgccaggtgaaggtgcgcagccacggccaggacagccctgctgtgtacctgaagaagggccagggcagcaccaccaccctgcagaagagatttgagcccaccggcttccagaacatgctgagcggcctgtacaaccccatcgtgttttctgccagcggggccaacctgacagatgcccacctgttctgcctgctggcctgtgaccgggacctgtgctgtgatggctttgtgctgacccaggtgcagggcggggccatcatctgtggcctgctgagcagccccagcgtgctgctgtgcaatgtgaaggactggatggaccccagcgaggcctgggccaatgccacctgccctggggtgacctatgaccaggagagccaccaggtgatcctgcggctgggggaccaggagttcatcaagagcctgacccccctggagggcacccaggacaccttcaccaacttccagcaggtgtacctgtggaaggacagcgacatgggcagcaggcctgagagcatgggctgcaggaaggacacagtgcccaggcctgccagccccacagaagctggcctgaccacagagctgttcagccctgtggacctgaaccaggtgattgtgaatggaaaccagagcctgagcagccagaagcactggctgttcaagcacctgttcagcgcccagcaggccaacctgtggtgcctgagccgctgtgtgcaggagcacagcttctgccagctggccgagatcacagagagcgccagcctgtacttcacctgcaccctgtacccagaggcccaggtgtgtgatgacatcatggagagcaatgcccagggctgccgcctcatcctgccccagatgcccaaggccctcttcaggaagaaggtgatcctggaggacaaggtgaagaacttctacacccggctgcccttccagaagctgatgggcatcagcatccggaacaaggtgcccatgtctgagaagagcatcagcaatggcttctttgaatgtgagcggcgctgtgatgctgacccctgctgcaccggcttcggcttcctgaatgtgtcccagctgaagggcggggaggtgacctgcctgaccctgaacagcctgggcatccagatgtgcagcgaggagaatggaggagcctggaggatcctggactgtggcagcccagacatcgaggtgcacacctaccccttcggctggtaccagaagcccatcgcccagaacaatgcccccagcttctgccccctggtggtgctgcccagcctgacagagaaggtgtccctggacagctggcagagcctggccctgagctctgtggtggtggaccccagcatccgccactttgatgtggcccacgtgtccacagctgccaccagcaacttctctgctgtgcgggacctgtgcctgtctgaatgttcccagcacgaggcctgcctgatcaccaccctgcagacccagcctggagctgtgcgctgcatgttttatgctgacacccagagctgcacccacagcctgcagggccagaactgccgcctgctgctgcgggaggaggccacccacatctacaggaagccaggcatcagcctgctgtcctatgaggcctctgtgcccagcgtgcccatcagcacccacggccgcctgctgggccgcagccaggccatccaggtgggcacctcctggaagcaggtggaccagttcctgggcgtgccctatgctgccccacccctggccgagcggcgcttccaggcccctgagcccctgaactggacaggctcctgggatgccagcaagccccgggccagctgctggcagcccggcaccaggaccagcaccagccctggggtgtctgaggactgcctgtacctgaatgtgttcatcccccagaatgtggccccaaatgcctctgtgctggtgttcttccacaacaccatggaccgggaggagagcgagggctggccagccattgatggcagcttcctggccgctgtgggcaacctgattgtggtgacagccagctacagagtgggcgtgtttggcttcctgagcagcggcagcggggaggtgtctggcaactggggcctgctggaccaggtggccgccctgacctgggtgcagacccacatccggggctttggaggagacccccggcgggtgtccctggccgctgacagaggaggagcagatgtggccagcatccacctgctgacagcccgggccaccaacagccagctgttccggcgggctgtgctgatgggcggcagcgccctgagccctgctgctgtgatcagccatgagcgggcccagcagcaggccatcgccctggccaaggaggtgtcctgccccatgagcagcagccaggaggtggtgtcctgcctgcggcagaagccagccaacgtgctgaatgatgcccagaccaagctgctggccgtgtctggccccttccactactggggccctgtgattgatggccacttcctgcgggagcccccagcccgggccctgaagaggagcctgtgggtggaggtggacctgctgattggcagcagccaggatgatggcctcatcaacagagccaaggctgtgaagcagtttgaggagagccggggccgcaccagcagcaagacagccttctaccaggccctgcagaacagcctgggcggggaggacagtgatgcccgggtggaggccgccgccacctggtactacagcctggagcacagcacagatgattatgccagcttcagccgggccctggagaatgccacccgggactacttcatcatctgccccatcatcgacatggccagcgcctgggccaagagggcccggggaaatgtgttcatgtaccacgccccagaaaattatggccacggcagcctggagctgctggctgatgtgcagtttgccctgggcctgcccttctacccagcctatgagggccagttcagcctggaggagaagagcctgagcctgaagatcatgcagtacttcagccacttcatccgcagcggcaaccccaactacccctatgagttcagcaggaaggtgcccacctttgccaccccctggccagactttgtgcccagggctggaggagagaactacaaggagttcagcgagctgctgcccaaccggcagggcctgaagaaggctgactgcagcttctggagcaagtacatcagcagcctgaagaccagcgcagatggagccaagggcggccagagcgctgagagcgaggaggaggagctgacagctggcagcggcctgcgggaggacctgctgagcctgcaggagcccggcagcaagacctacagcaagtag

SEQ ID NO: 145363 - DNA, 1191 bp, synthetic construct
  misc_feature 1..1191: note = Description of Artificial Sequence: Synthetic coding sequence
  source 1..1191: mol_type = other DNA
atgcctggccggggccgctgcccagactgtgtggtgacagaaggagtgctgaccaccaccttcagtgatgagggcaacctgcgggaggtgacctacagccgcagcactggagaaaatgagcaggtgagccgcagccagcagaggggcctgcggcgggtgcgggacctgtgccgggtgctgcagctgccccccacctttgaggacacagctgtggcctactaccagcaggcctaccgccacagcggcatccgggccgcccggctgcagaagaaggaggtgctggtgggctgctgcgtgctgatcacctgccggcagcacaactggcccctgaccatgggcgccatctgcaccctgctgtatgctgacctggatgtgttcagcagcacctacatgcagatcgtgaagctgctgggcctggatgtgcccagcctgtgcctggccgagctggtgaagacctactgcagcagcttcaagctgttccaggccagccccagcgtgcctgccaagtatgtggaggacaaggagaagatgctgagcaggaccatgcagctggtggagctggccaatgagacctggctggtgacaggccgccaccccctgcctgtgatcacagctgccaccttcctggcctggcagagcctgcagcctgctgaccggctgagctgcagcctggcccgcttctgcaagctggccaacgtggacctgccctacccagccagcagccggctgcaggagctgctggccgtgctgctgaggatggccgagcagctggcctggctgcgggtgctgcggctggacaagaggtctgtggtgaagcacatcggggacctgctgcagcaccggcagagcctggtgcgcagcgccttcagagatggaacagctgaggtggagacccgggagaaggagcccccaggctggggccagggccagggcgagggggaggtgggcaacaacagcctgggcctgccccagggcaagaggcctgccagccctgccctgctgctgcccccctgcatgctgaagagccccaagaggatctgccctgtgccccctgtgtccacagtgactggagatgagaacatcagtgacagcgagattgagcagtacctgcggaccccccaggaggtgcgggacttccagagggcccaggccgcccggcaggccgccacctctgtgcccaaccccccatag

SEQ ID NO: 145364 - DNA, 1698 bp, synthetic construct
  misc_feature 1..1698: note = Description of Artificial Sequence: Synthetic coding sequence
  source 1..1698: mol_type = other DNA
atggccgagggcaaggccggcggggccgccggcctgtttgccaagcaggtgcagaagaagttcagccgggcccaggagaaggtgctgcagaagctgggcaaggctgtggagaccaaggatgaaagatttgagcagagcgccagcaacttctaccagcagcaggccgagggccacaagctgtacaaggacctgaagaacttcctgtctgctgtgaaggtgatgcatgagagcagcaagagggtgtctgagaccctgcaggagatctacagcagcgagtgggatggccacgaggagctgaaggccatcgtgtggaacaatgacctgctgtgggaggactatgaggagaagctggccgaccaggccgtgaggaccatggagatctacgtggcccagttcagcgagatcaaggagagaattgccaagaggggcaggaagctggtggactatgattctgcccggcaccacctggaggccgtgcagaatgccaagaagaaggatgaggccaagacagccaaggccgaggaggagttcaacaaggcccagacagtgtttgaggacctgaaccaggagctgctggaggagctgcccatcctgtacaacagcagaattggctgctacgtgaccatcttccagaacatcagcaacctgagagatgtgttctaccgggagatgagcaagctgaaccacaacctgtatgaggtgatgagcaagctggagaagcagcacagcaacaaggtgtttgtggtgaagggcctgagcagcagcagcagaagaagcctggtgatcagcccccctgtgaggacagccaccgtgagcagccccctgaccagccccaccagccccagcaccctgagcctgaagtctgagagcgagagcgtgtctgccacagaggacctggccccagatgctgcccagggcgaggacaacagcgagatcaaggagctgctggaggaggaggagattgagaaggagggcagcgaggccagcagcagtgaagaagatgagcccctgcctgcctgcaatggacctgcccaggcccagcccagccccaccacagagcgggccaagagccaggaggaggtgctgcccagcagcaccacccccagccctgggggcgccctgagccccagcggccagcccagcagcagcgccacagaggtggtgctgcggaccaggacagccagcgagggcagcgagcagcccaagaagagggccagcatccagaggaccagcgccccacccagcaggcctcctccaccccgggccacagccagcccccggcccagcagcggcaacatccccagcagccccacagccagcggcggcggcagccccaccagcccccgggccagcctgggcaccggcacagccagccccaggaccagcctggaggtgagccccaaccctgagcccccagagaagcctgtgaggaccccagaggccaaggaaaatgaaaacatccacaaccagaaccctgaggagctgtgcaccagccccaccctgatgaccagccaggtggccagcgagcccggggaggccaagaagatggaggacaaggagaaggacaacaagctgatcagcgccaacagcagcgagggccaggaccagctgcaggtgtccatggtgcctgagaacaacaacctgacagcccctgagccccaggaggaggtgtccaccagcgagaacccccagctgtag

SEQ ID NO: 145365 - DNA, 1602 bp, synthetic construct
  misc_feature 1..1602: note = Description of Artificial Sequence: Synthetic coding sequence
  source 1..1602: mol_type = other DNA
atggccgagggcaaggccggcggggccgccggcctgtttgccaagcaggtgcagaagaagttcagccgggcccaggagaaggtgctgcagaagctgggcaaggctgtggagaccaaggatgaaagatttgagcagagcgccagcaacttctaccagcagcaggccgagggccacaagctgtacaaggacctgaagaacttcctgtctgctgtgaaggtgatgcatgagagcagcaagagggtgtctgagaccctgcaggagatctacagcagcgagtgggatggccacgaggagctgaaggccatcgtgtgggagagaattgccaagaggggcaggaagctggtggactatgattctgcccggcaccacctggaggccgtgcagaatgccaagaagaaggatgaggccaagacagccaaggccgaggaggagttcaacaaggcccagacagtgtttgaggacctgaaccaggagctgctggaggagctgcccatcctgtacaacagcagaattggctgctacgtgaccatcttccagaacatcagcaacctgagagatgtgttctaccgggagatgagcaagctgaaccacaacctgtatgaggtgatgagcaagctggagaagcagcacagcaacaaggtgtttgtggtgaagggcctgagcagcagcagcagaagaagcctggtgatcagcccccctgtgaggacagccaccgtgagcagccccctgaccagccccaccagccccagcaccctgagcctgaagtctgagagcgagagcgtgtctgccacagaggacctggccccagatgctgcccagggcgaggacaacagcgagatcaaggagctgctggaggaggaggagattgagaaggagggcagcgaggccagcagcagtgaagaagatgagcccctgcctgcctgcaatggacctgcccaggcccagcccagccccaccacagagcgggccaagagccaggaggaggtgctgcccagcagcaccacccccagccctgggggcgccctgagccccagcggccagcccagcagcagcgccacagaggtggtgctgcggaccaggacagccagcgagggcagcgagcagcccaagaagagggccagcatccagaggaccagcgccccacccagcaggcctcctccaccccgggccacagccagcccccggcccagcagcggcaacatccccagcagccccacagccagcggcggcggcagccccaccagcccccgggccagcctgggcaccggcacagccagccccaggaccagcctggaggtgagccccaaccctgagcccccagagaagcctgtgaggaccccagaggccaaggaaaatgaaaacatccacaaccagaaccctgaggagctgtgcaccagccccaccctgatgaccagccaggtggccagcgagcccggggaggccaagaagatggaggacaaggagaaggacaacaagctgatcagcgccaacagcagcgagggccaggaccagctgcaggtgtccatggtgcctgagaacaacaacctgacagcccctgagccccaggaggaggtgtccaccagcgagaacccccagctgtag

SEQ ID NO: 145366 - DNA, 1620 bp, synthetic construct
  misc_feature 1..1620: note = Description of Artificial Sequence: Synthetic coding sequence
  source 1..1620: mol_type = other DNA
atggtgctgcagaagctgggcaaggctgtggagaccaaggatgaaagatttgagcagagcgccagcaacttctaccagcagcaggccgagggccacaagctgtacaaggacctgaagaacttcctgtctgctgtgaaggtgatgcatgagagcagcaagagggtgtctgagaccctgcaggagatctacagcagcgagtgggatggccacgaggagctgaaggccatcgtgtggaacaatgacctgctgtgggaggactatgaggagaagctggccgaccaggccgtgaggaccatggagatctacgtggcccagttcagcgagatcaaggagagaattgccaagaggggcaggaagctggtggactatgattctgcccggcaccacctggaggccgtgcagaatgccaagaagaaggatgaggccaagacagccaaggccgaggaggagttcaacaaggcccagacagtgtttgaggacctgaaccaggagctgctggaggagctgcccatcctgtacaacagcagaattggctgctacgtgaccatcttccagaacatcagcaacctgagagatgtgttctaccgggagatgagcaagctgaaccacaacctgtatgaggtgatgagcaagctggagaagcagcacagcaacaaggtgtttgtggtgaagggcctgagcagcagcagcagaagaagcctggtgatcagcccccctgtgaggacagccaccgtgagcagccccctgaccagccccaccagccccagcaccctgagcctgaagtctgagagcgagagcgtgtctgccacagaggacctggccccagatgctgcccagggcgaggacaacagcgagatcaaggagctgctggaggaggaggagattgagaaggagggcagcgaggccagcagcagtgaagaagatgagcccctgcctgcctgcaatggacctgcccaggcccagcccagccccaccacagagcgggccaagagccaggaggaggtgctgcccagcagcaccacccccagccctgggggcgccctgagccccagcggccagcccagcagcagcgccacagaggtggtgctgcggaccaggacagccagcgagggcagcgagcagcccaagaagagggccagcatccagaggaccagcgccccacccagcaggcctcctccaccccgggccacagccagcccccggcccagcagcggcaacatccccagcagccccacagccagcggcggcggcagccccaccagcccccgggccagcctgggcaccggcacagccagccccaggaccagcctggaggtgagccccaaccctgagcccccagagaagcctgtgaggaccccagaggccaaggaaaatgaaaacatccacaaccagaaccctgaggagctgtgcaccagccccaccctgatgaccagccaggtggccagcgagcccggggaggccaagaagatggaggacaaggagaaggacaacaagctgatcagcgccaacagcagcgagggccaggaccagctgcaggtgtccatggtgcctgagaacaacaacctgacagcccctgagccccaggaggaggtgtccaccagcgagaacccccagctgtag

SEQ ID NO: 145367 - DNA, 762 bp, synthetic construct
  misc_feature 1..762: note = Description of Artificial Sequence: Synthetic coding sequence
  source 1..762: mol_type = other DNA
atgtcctggatccccttcaagattggccagcccaagaagcagatcgtgcccaagacagtggagcgggactttgagcgggagtatggcaagctgcagcagctggaggagcagacccggcggctgcagaaggacatgaagaagagcacagatgctgacctggccatgagcaagtctgctgtgaagatcagcctggacctgctgagcaaccccctgtgtgagcaggaccaggacctgctgaacatggtgacagccctggacacagccatgaagaggatggatgccttcaaccaggagaaggtgaaccagatccagaagacagtcatcgagcccctgaagaagtttggcagcgtcttccccagcctgaacatggctgtgaagagaagagagcaggccctgcaggactaccgccgcctgcaggccaaggtggagaagtatgaggagaaggagaagacaggccctgtgctggccaagctgcaccaggcccgggaggagctgcggcctgtgcgggaggactttgaggccaagaaccggcagctgctggaggagatgccccgcttctacggcagccggctggactacttccagcccagctttgagagcctcatccgggcccaggtggtgtactacagcgagatgcacaagatctttggagacctgagccaccagctggaccagcccggccacagtgatgagcagcgggagcgggagaatgaggccaagctgtctgagctgcgggccctgagcatcgtggctgatgactag

SEQ ID NO: 145368 - DNA, 600 bp, synthetic construct
  misc_feature 1..600: note = Description of Artificial Sequence: Synthetic coding sequence
  source 1..600: mol_type = other DNA
atgagcaagtctgctgtgaagatcagcctggacctgctgagcaaccccctgtgtgagcaggaccaggacctgctgaacatggtgacagccctggacacagccatgaagaggatggatgccttcaaccaggagaaggtgaaccagatccagaagacagtcatcgagcccctgaagaagtttggcagcgtcttccccagcctgaacatggctgtgaagagaagagagcaggccctgcaggactaccgccgcctgcaggccaaggtggagaagtatgaggagaaggagaagacaggccctgtgctggccaagctgcaccaggcccgggaggagctgcggcctgtgcgggaggactttgaggccaagaaccggcagctgctggaggagatgccccgcttctacggcagccggctggactacttccagcccagctttgagagcctcatccgggcccaggtggtgtactacagcgagatgcacaagatctttggagacctgagccaccagctggaccagcccggccacagtgatgagcagcgggagcgggagaatgaggccaagctgtctgagctgcgggccctgagcatcgtggctgatgactag

SEQ ID NO: 145369 - DNA, 2343 bp, synthetic construct
  misc_feature 1..2343: note = Description of Artificial Sequence: Synthetic coding sequence
  source 1..2343: mol_type = other DNA
atgacccacaccaggaggaagagcctgcccatgctgagcagcggcctgactggaagaagagagcccctgcagatggaggacagcaacatggagcagggcgtggagggcgtggagcccggcatgcctgagagccctggccacctgactggaagaaggaagaactaccccctgaggaagaggcccctggtgcctgagaagcccaaggcctgcaaggtgctgctgacccggctggagaatgtggccggccccaggtctgcagatgaagcagatgagctgcccccagacctgcccaagccacccagccctgcccccagcagtgaagatcctggcctggcccagcccaggaagaggcggctggccagcctgaatgctgaggccctgaacaacctgctgctggagcgggaggacaccagcagcctggccggcacccggcgcagccgggccggggacccccacaggagccgggaccgggaccgggccactggaggctggagcagcagcaagaagaggccccggctgggggacctgggcggcggcagccgggacctgagccctgagcccgccccagatgagggccccaggagagatggagaccctgcccccaagaggctggccagcctgaatgctgctgccttcctgaagctgagccaggagcgggagctgcccctgcggctgccccgggcccacgccgaggtggatggccgcagcacagagcccccagcccccaaggccccccggcccaagtggcccaaggtgaatggcaagaactaccccaaggcctggcagggcgccagcagcggggaggccgccggccccccaggctggcagggctgcccagatgagccctggcccagcgccaccccctgtggccccagcgtgcagcccagccaccagcccctgagcaaggccctggagagccccctgggcctgcggccccacctgcccctgctgatgggcggccaggccgccctgaagccagagcccggccggcctggagaggagagccctgcccccaagcaggagctgcaccagcccagcttccccaccccccagctgagccccctgcccatgcctggcaacccagctgactacaacggcctgtgtgtgggccctgagctgacagccctgggcagcttctacctgtactgcggccaggagggcctgcagtgtggcggctacagcccctgccccatgctgcctgagggcaagctgagccctgtggccgcccctcatgaggagggcctgctgctggcccccagctctgtgcccagcggcacccccttccagcaccccccctggggcagcagccgctactgcagcagcgaggacaccggggtgaatggctacagcatctgtggggtgctgcccctgtctgtgacccacgccggcaccacctgtggcggctgcccctacaagatgccctttgctgctgagggctgccgcagcctgggccagctggagttccccctgcctgaggccggccacccagccagccctgcccaccccctgctgggctgccctgtgcccagcgtgcccccagctgctgagcctgtgccccacctgcagacccccaccagcgagccccagacagtggcccgggcctgcccccagagcgccaagcccccatctggcagcaagagcggcctgaggacaggcagcagctgccgccacacagcccggagcaaggccgcccggcggcccagccaccccaagcagccccgggtgcagaggccccggcccaggagaagaagaagaagaaggaccaacggctgggtgcctgtgggcgccgcctgtgagaaggctgtgtatgtgctggatgagcctgagcccgccatcaggaagagctaccaggccgtggagcggcacggggagaccatccgggtgcgggacacagtgctgctgaagagcggccccaggaagaccagcaccccctacgtggccaagatcagcgccctgtgggagaaccctgagagcggggagctgatgatgagcctgctgtggtactacagacctgagcacctgcagggcggccgcagccccagcatgcatgagcccctgcagaatgaggtgtttgccagccgccaccaggaccagaacagcgtggcctgcatcgaggagaagtgctacgtgctgacctttgctgagtactgccgcttctgtgccatggccaagagaagaggagagggcctgcccagcaggaagacagccctggtgcccccatctgctgactacagcaccccaccccacaggacagtgcctgaggacacagatcctgagctggtgttcctgtgccgccacgtgtatgacttccgccacggccgcatcctgaagaacccccagtag

SEQ ID NO: 145370 - DNA, 2340 bp, synthetic construct
  misc_feature 1..2340: note = Description of Artificial Sequence: Synthetic coding sequence
  source 1..2340: mol_type = other DNA
atgacccacaccaggaggaagagcctgcccatgctgagcagcggcctgactggaagaagagagcccctgcagatggaggacagcaacatggagcagggcgtggagggcgtggagcccggcatgcctgagagccctggccacctgactggaagaaggaagaactaccccctgaggaagaggcccctggtgcctgagaagcccaaggcctgcaaggtgctgctgacccggctggagaatgtggccggccccaggtctgcagatgaagcagatgagctgcccccagacctgcccaagccacccagccctgcccccagcagtgaagatcctggcctggcccagcccaggaagaggcggctggccagcctgaatgctgaggccctgaacaacctgctgctggagcgggaggacaccagcagcctggccggcacccggcgcagccgggccggggacccccacaggagccgggaccgggaccgggccactggaggctggagcagcagcaagaagaggccccggctgggggacctgggcggcggcagccgggacctgagccctgagcccgccccagatgagggccccaggagagatggagaccctgcccccaagaggctggccagcctgaatgctgctgccttcctgaagctgagccaggagcgggagctgcccctgcggctgccccgggcccacgccgaggtggatggccgcagcacagagcccccagcccccaaggccccccggcccaagtggcccaaggtgaatggcaagaactaccccaaggcctggcagggcgccagcagcggggaggccgccggccccccaggctggcagggctgcccagatgagccctggcccagcgccaccccctgtggccccagcgtgcagcccagccaccagcccctgagcaaggccctggagagccccctgggcctgcggccccacctgcccctgctgatgggcggccaggccgccctgaagccagagcccggccggcctggagaggagagccctgcccccaagcaggagctgcaccagcccagcttccccaccccccagctgagccccctgcccatgcctggcaacccagctgactacaacggcctgtgtgtgggccctgagctgacagccctgggcagcttctacctgtactgcggccaggagggcctgcagtgtggcggctacagcccctgccccatgctgcctgagggcaagctgagccctgtggccgcccctcatgaggagggcctgctgctggcccccagctctgtgcccagcggcacccccttccagcaccccccctggggcagcagccgctactgcagcagcgaggacaccggggtgaatggctacagcatctgtggggtgctgcccctgtctgtgacccacgccggcaccacctgtggcggctgcccctacaagatgccctttgctgctggctgccgcagcctgggccagctggagttccccctgcctgaggccggccacccagccagccctgcccaccccctgctgggctgccctgtgcccagcgtgcccccagctgctgagcctgtgccccacctgcagacccccaccagcgagccccagacagtggcccgggcctgcccccagagcgccaagccacccagcggcagcaagagcggcctgaggacaggcagcagctgccgccacacagcccggagcaaggccgcccggcggcccagccaccccaagcagccccgggtgcagaggccccggcccaggagaagaagaagaagaaggaccaacggctgggtgcctgtgggcgccgcctgtgagaaggctgtgtatgtgctggatgagcctgagcccgccatcaggaagagctaccaggccgtggagagacatggagagaccatccgggtgcgggacacagtgctgctgaagagcggccccaggaagaccagcaccccctacgtggccaagatcagcgccctgtgggagaaccctgagagcggggagctgatgatgagcctgctgtggtactacagacctgagcacctgcagggcggccgcagccccagcatgcatgagcccctgcagaatgaggtgtttgccagccgccaccaggaccagaacagcgtggcctgcatcgaggagaagtgctacgtgctgacctttgctgagtactgccgcttctgtgccatggccaagagaagaggagagggcctgcccagcaggaagacagccctggtgccccccagcgctgactacagcaccccaccccacaggacagtgcctgaggacacagatcctgagctggtgttcctgtgcagacatgtgtatgacttcagacatggccgcatcctgaagaacccccagtag

SEQ ID NO: 145371 - DNA, 4575 bp, synthetic construct
  misc_feature 1..4575: note = Description of Artificial Sequence: Synthetic coding sequence
  source 1..4575: mol_type = other DNA
atgcccctgctgcacaggaagccctttgtgcggcagaagcccccagctgacctgcggccagatgaggaggtgttctactgcaaggtgaccaatgagatcttccgccactatgatgacttctttgagaggaccatcctgtgcaacagcctggtgtggagctgtgctgtgacaggccggcccggcctgacctaccaggaggccctggagagcgagaagaaggcccggcagaacctgcagagcttccctgagcccctcatcatccctgtgctgtacctgaccagcctgacccacaggagccggctgcacgagatctgtgatgacatctttgcctacgtgaaggaccgctactttgtggaggagaccgtggaggtgatccggaacaacggggcccggctgcagtgccgcatcctggaggtgctgccccccagccaccagaatggatttgccaacggccacgtgaacagcgtggatggagagaccatcatcatcagtgacagtgatgattctgagacccagagctgcagcttccagaatggcaagaagaaggatgccatcgaccccctgctcttcaagtacaaggtgcagcccaccaagaaggagctgcacgagagcgccatcgtgaaggccacccagatcagcaggaggaagcacctgttcagccgggacaagctgaagctgttcctgaagcagcactgtgagccccaggatggagtcatcaagatcaaggccagcagcctgagcacctacaagattgctgagcaggacttctcctacttcttcccagatgacccccccaccttcatcttctccccagccaacagaagaagaggccggccccccaagaggatccacatcagccaggaggacaacgtggccaacaagcagaccctggccagctaccgcagcaaggccaccaaggagcgggacaagctgctgaagcaggaggagatgaagagcctggcctttgagaaggccaagctgaagcgggagaaggcagatgccctggaggccaagaagaaggagaaggaggacaaggagaagaagcgggaggagctgaagaagatcgtggaggaggagcggctgaagaagaaggaggagaaggagcggctgaaggtggagcgggagaaggagcgggagaagctgcgggaggagaagaggaaatatgtggagtacctgaagcagtggagcaagccccgggaggacatggagtgtgatgacctgaaggagctgcctgagcccacccctgtgaagacccggctgcccccagagatctttggagatgccctgatggtgctggagttcctgaatgccttcggggagctgtttgacctgcaggatgagttcccagatggagtgaccctggaggtgctggaggaggccctggtgggcaatgacagcgagggccccctgtgtgagctgctcttcttcttcctgacagccatcttccaggccatcgccgaggaggaggaggaggtggccaaggagcagctgacagatgctgacaccaagggctgcagcctgaagagcctggacctggacagctgcaccctgtctgagatcctgcggctgcacatcctggccagcggggctgatgtgaccagcgccaatgccaagtaccgctaccagaagagaggaggctttgatgccacagatgatgcctgcatggagctgcggctgagcaaccccagcctggtgaagaagctgagcagcacctctgtgtatgacctgaccccaggagagaagatgaagatcctgcacgccctgtgtgggaagctgctgaccctggtgtccacccgggacttcattgaagattatgtggacatcctgcggcaggccaagcaggagttccgggagctgaaggccgagcagcacaggaaggagcgggaggaggccgccgcccgcatcaggaagaggaaggaggagaagctgaaggagcaggagcagaagatgaaggagaagcaggagaagctgaaggaggatgagcagaggaacagcacagctgacatcagcattggagaggaggagagagaagattttgacaccagcattgagagcaaggacacagagcagaaggagctggaccaggacatggtgacagaagatgaagatgatcctggcagccacaagaggggccggcggggcaagaggggccagaatggcttcaaggagttcacccggcaggagcagatcaactgtgtgacccgggagcccctgacagcagatgaggaggaggccctgaagcaggagcaccagaggaaggagaaggagctgctggagaagatccagagcgccatcgcctgcaccaacatcttccccctgggccgggacaggatgtaccgccgctactggatcttccccagcatccctggcctcttcatcgaggaggactacagcggcctgacagaggacatgctgctgccccggcccagcagcttccagaacaacgtgcagagccaggacccccaggtgtccaccaagacaggagagcccctgatgtctgagagcaccagcaacatcgaccagggcccccgggaccacagcgtgcagctgcccaagcctgtgcacaagcccaaccgctggtgcttctacagcagctgtgagcagctggaccagctgattgaggccctgaacagccggggccaccgggagagcgccctgaaggagaccctgctgcaggagaagagccgcatctgtgcccagctggcccgcttcagcgaggagaagttccacttcagtgacaagccccagcctgacagcaagcccacctacagccggggccgcagcagcaatgcctatgaccccagccagatgtgtgccgagaagcagctggagctgcggctgcgggacttcctgctggacattgaagatcgcatctaccagggcaccctgggcgccatcaaggtgacagacagacacatctggaggtctgccctggagagcggccgctatgagctgctgtctgaggagaacaaggaaaatggcatcatcaagacagtgaatgaagatgtggaggagatggagattgatgagcagaccaaggtgattgtgaaggaccggctgctgggcatcaagacagagacccccagcacagtgtccaccaatgccagcaccccccagagcgtgtcctctgtggtgcactacctggccatggccctcttccagatcgagcagggcattgaaagacgcttcctgaaggcccccctggatgccagtgacagcggccgcagctacaagacagtgctggaccgctggagggagagcctgctgagcagcgccagcctgagccaggtgttcctgcacctgagcaccctggacagaagtgtcatctggagcaagagcatcctgaatgcccgctgcaagatctgcaggaagaagggagatgctgagaacatggtgctgtgtgatggctgtgaccggggccaccacacctactgtgtgcggcccaagctgaagacagtgcctgagggggactggttctgcccagagtgccggcccaagcagaggagccggcggctgagcagccggcagaggcccagcctggagagtgatgaagatgtggaggacagcatgggaggagaagatgatgaggtggatggagatgaggaggagggccagagcgaggaggaggagtatgaggtggagcaggatgaagatgacagccaggaggaggaggaggtgtccctgcccaagaggggccggccccaggtgcggctgcctgtgaagacccggggcaagctgagcagcagcttcagcagccggggccagcagcaggagcccggccgctaccccagccgcagccagcagagcacccccaagaccaccgtgagcagcaagacaggccgcagcctgaggaagatcaacagcgccccacccacagagaccaagagcctgagaattgccagccgcagcaccaggcacagccacggccccctgcaggctgatgtgtttgtggagctgctgagccccaggaggaagaggcggggcaggaagagcgccaacaacaccccagagaacagccccaacttccccaacttccgggtcatcgccaccaagagcagcgagcagagccgctctgtgaacatcgccagcaagctgagcctgcaggagagcgagagcaagaggcgctgcaggaagaggcagagccctgagcccagccctgtgaccctgggcagaagaagcagcggccggcagggcggcgtgcatgagctgagcgcctttgagcagctggtggtggagctggtgagacatgatgacagctggcccttcctgaagctggtgtccaagatccaggtgcctgactactatgacatcatcaagaagcccatcgccctgaacatcatccgggagaaggtgaacaagtgtgagtacaagctggccagcgagttcattgatgacatcgagctgatgttcagcaactgctttgagtacaaccccaggaacaccagcgaggccaaggccggcacccggctgcaggccttcttccacatccaggcccagaagctgggcctgcacgtgacccccagcaatgtggaccaggtgtccaccccacctgctgccaagaagagccgcatctag

SEQ ID NO: 145372 - DNA, 4671 bp, synthetic construct
  misc_feature 1..4671: note = Description of Artificial Sequence: Synthetic coding sequence
  source 1..4671: mol_type = other DNA
atgcccctgctgcacaggaagccctttgtgcggcagaagcccccagctgacctgcggccagatgaggaggtgttctactgcaaggtgaccaatgagatcttccgccactatgatgacttctttgagaggaccatcctgtgcaacagcctggtgtggagctgtgctgtgacaggccggcccggcctgacctaccaggaggccctggagagcgagaagaaggcccggcagaacctgcagagcttccctgagcccctcatcatccctgtgctgtacctgaccagcctgacccacaggagccggctgcacgagatctgtgatgacatctttgcctacgtgaaggaccgctactttgtggaggagaccgtggaggtgatccggaacaacggggcccggctgcagtgccgcatcctggaggtgctgccccccagccaccagaatggatttgccaacggccacgtgaacagcgtggatggagagaccatcatcatcagtgacagtgatgattctgagacccagagctgcagcttccagaatggcaagaagaaggatgccatcgaccccctgctcttcaagtacaaggtgcagcccaccaagaaggagctgcacgagagcgccatcgtgaaggccacccagatcagcaggaggaagcacctgttcagccgggacaagctgaagctgttcctgaagcagcactgtgagccccaggatggagtcatcaagatcaaggccagcagcctgagcacctacaagattgctgagcaggacttctcctacttcttcccagatgacccccccaccttcatcttctccccagccaacagaagaagaggccggccccccaagaggatccacatcagccaggaggacaacgtggccaacaagcagaccctggccagctaccgcagcaaggccaccaaggagcgggacaagctgctgaagcaggaggagatgaagagcctggcctttgagaaggccaagctgaagcgggagaaggcagatgccctggaggccaagaagaaggagaaggaggacaaggagaagaagcgggaggagctgaagaagatcgtggaggaggagcggctgaagaagaaggaggagaaggagcggctgaaggtggagcgggagaaggagcgggagaagctgcgggaggagaagaggaaatatgtggagtacctgaagcagtggagcaagccccgggaggacatggagtgtgatgacctgaaggagctgcctgagcccacccctgtgaagacccggctgcccccagagatctttggagatgccctgatggtgctggagttcctgaatgccttcggggagctgtttgacctgcaggatgagttcccagatggagtgaccctggaggtgctggaggaggccctggtgggcaatgacagcgagggccccctgtgtgagctgctcttcttcttcctgacagccatcttccaggccatcgccgaggaggaggaggaggtggccaaggagcagctgacagatgctgacaccaaggacctgacagaggccctggatgaagatgctgaccccaccaagagcgccctgtctgctgtggccagcctggccgccgcctggccccagctgcaccagggctgcagcctgaagagcctggacctggacagctgcaccctgtctgagatcctgcggctgcacatcctggccagcggggctgatgtgaccagcgccaatgccaagtaccgctaccagaagagaggaggctttgatgccacagatgatgcctgcatggagctgcggctgagcaaccccagcctggtgaagaagctgagcagcacctctgtgtatgacctgaccccaggagagaagatgaagatcctgcacgccctgtgtgggaagctgctgaccctggtgtccacccgggacttcattgaagattatgtggacatcctgcggcaggccaagcaggagttccgggagctgaaggccgagcagcacaggaaggagcgggaggaggccgccgcccgcatcaggaagaggaaggaggagaagctgaaggagcaggagcagaagatgaaggagaagcaggagaagctgaaggaggatgagcagaggaacagcacagctgacatcagcattggagaggaggagagagaagattttgacaccagcattgagagcaaggacacagagcagaaggagctggaccaggacatggtgacagaagatgaagatgatcctggcagccacaagaggggccggcggggcaagaggggccagaatggcttcaaggagttcacccggcaggagcagatcaactgtgtgacccgggagcccctgacagcagatgaggaggaggccctgaagcaggagcaccagaggaaggagaaggagctgctggagaagatccagagcgccatcgcctgcaccaacatcttccccctgggccgggacaggatgtaccgccgctactggatcttccccagcatccctggcctcttcatcgaggaggactacagcggcctgacagaggacatgctgctgccccggcccagcagcttccagaacaacgtgcagagccaggacccccaggtgtccaccaagacaggagagcccctgatgtctgagagcaccagcaacatcgaccagggcccccgggaccacagcgtgcagctgcccaagcctgtgcacaagcccaaccgctggtgcttctacagcagctgtgagcagctggaccagctgattgaggccctgaacagccggggccaccgggagagcgccctgaaggagaccctgctgcaggagaagagccgcatctgtgcccagctggcccgcttcagcgaggagaagttccacttcagtgacaagccccagcctgacagcaagcccacctacagccggggccgcagcagcaatgcctatgaccccagccagatgtgtgccgagaagcagctggagctgcggctgcgggacttcctgctggacattgaagatcgcatctaccagggcaccctgggcgccatcaaggtgacagacagacacatctggaggtctgccctggagagcggccgctatgagctgctgtctgaggagaacaaggaaaatggcatcatcaagacagtgaatgaagatgtggaggagatggagattgatgagcagaccaaggtgattgtgaaggaccggctgctgggcatcaagacagagacccccagcacagtgtccaccaatgccagcaccccccagagcgtgtcctctgtggtgcactacctggccatggccctcttccagatcgagcagggcattgaaagacgcttcctgaaggcccccctggatgccagtgacagcggccgcagctacaagacagtgctggaccgctggagggagagcctgctgagcagcgccagcctgagccaggtgttcctgcacctgagcaccctggacagaagtgtcatctggagcaagagcatcctgaatgcccgctgcaagatctgcaggaagaagggagatgctgagaacatggtgctgtgtgatggctgtgaccggggccaccacacctactgtgtgcggcccaagctgaagacagtgcctgagggggactggttctgcccagagtgccggcccaagcagaggagccggcggctgagcagccggcagaggcccagcctggagagtgatgaagatgtggaggacagcatgggaggagaagatgatgaggtggatggagatgaggaggagggccagagcgaggaggaggagtatgaggtggagcaggatgaagatgacagccaggaggaggaggaggtgtccctgcccaagaggggccggccccaggtgcggctgcctgtgaagacccggggcaagctgagcagcagcttcagcagccggggccagcagcaggagcccggccgctaccccagccgcagccagcagagcacccccaagaccaccgtgagcagcaagacaggccgcagcctgaggaagatcaacagcgccccacccacagagaccaagagcctgagaattgccagccgcagcaccaggcacagccacggccccctgcaggctgatgtgtttgtggagctgctgagccccaggaggaagaggcggggcaggaagagcgccaacaacaccccagagaacagccccaacttccccaacttccgggtcatcgccaccaagagcagcgagcagagccgctctgtgaacatcgccagcaagctgagcctgcaggagagcgagagcaagaggcgctgcaggaagaggcagagccctgagcccagccctgtgaccctgggcagaagaagcagcggccggcagggcggcgtgcatgagctgagcgcctttgagcagctggtggtggagctggtgagacatgatgacagctggcccttcctgaagctggtgtccaagatccaggtgcctgactactatgacatcatcaagaagcccatcgccctgaacatcatccgggagaaggtgaacaagtgtgagtacaagctggccagcgagttcattgatgacatcgagctgatgttcagcaactgctttgagtacaaccccaggaacaccagcgaggccaaggccggcacccggctgcaggccttcttccacatccaggcccagaagctgggcctgcacgtgacccccagcaatgtggaccaggtgtccaccccacctgctgccaagaagagccgcatctag

SEQ ID NO: 145373 - DNA, 4671 bp, synthetic construct; identical to SEQ ID NO: 145372
  misc_feature 1..4671: note = Description of Artificial Sequence: Synthetic coding sequence
  source 1..4671: mol_type = other DNA

SEQ ID NO: 145374 - DNA, 3702 bp, synthetic construct
  misc_feature 1..3702: note = Description of Artificial Sequence: Synthetic coding sequence
  source 1..3702: mol_type = other DNA
atgaagagcctggcctttgagaaggccaagctgaagcgggagaaggcagatgccctggaggccaagaagaaggagaaggaggacaaggagaagaagcgggaggagctgaagaagatcgtggaggaggagcggctgaagaagaaggaggagaaggagcggctgaaggtggagcgggagaaggagcgggagaagctgcgggaggagaagaggaaatatgtggagtacctgaagcagtggagcaagccccgggaggacatggagtgtgatgacctgaaggagctgcctgagcccacccctgtgaagacccggctgcccccagagatctttggagatgccctgatggtgctggagttcctgaatgccttcggggagctgtttgacctgcaggatgagttcccagatggagtgaccctggaggtgctggaggaggccctggtgggcaatgacagcgagggccccctgtgtgagctgctcttcttcttcctgacagccatcttccaggccatcgccgaggaggaggaggaggtggccaaggagcagctgacagatgctgacaccaagggctgcagcctgaagagcctggacctggacagctgcaccctgtctgagatcctgcggctgcacatcctggccagcggggctgatgtgaccagcgccaatgccaagtaccgctaccagaagagaggaggctttgatgccacagatgatgcctgcatggagctgcggctgagcaaccccagcctggtgaagaagctgagcagcacctctgtgtatgacctgaccccaggagagaagatgaagatcctgcacgccctgtgtgggaagctgctgaccctggtgtccacccgggacttcattgaagattatgtggacatcctgcggcaggccaagcaggagttccgggagctgaaggccgagcagcacaggaaggagcgggaggaggccgccgcccgcatcaggaagaggaaggaggagaagctgaaggagcaggagcagaagatgaaggagaagcaggagaagctgaaggaggatgagcagaggaacagcacagctgacatcagcattggagaggaggagagagaagattttgacaccagcattgagagcaaggacacagagcagaaggagctggaccaggacatggtgacagaagatgaagatgatcctggcagccacaagaggggccggcggggcaagaggggccagaatggcttcaaggagttcacccggcaggagcagatcaactgtgtgacccgggagcccctgacagcagatgaggaggaggccctgaagcaggagcaccagaggaaggagaaggagctgctggagaagatccagagcgccatcgcctgcaccaacatcttccccctgggccgggacaggatgtaccgccgctactggatcttccccagcatccctggcctcttcatcgaggaggactacagcggcctgacagaggacatgctgctgccccggcccagcagcttccagaacaacgtgcagagccaggacccccaggtgtccaccaagacaggagagcccctgatgtctgagagcaccagcaacatcgaccagggcccccgggaccacagcgtgcagctgcccaagcctgtgcacaagcccaaccgctggtgcttctacagcagctgtgagcagctggaccagctgattgaggccctgaacagccggggccaccgggagagcgccctgaaggagaccctgctgcaggagaagagccgcatctgtgcccagctggcccgcttcagcgaggagaagttccacttcagtgacaagccccagcctgacagcaagcccacctacagccggggccgcagcagcaatgcctatgaccccagccagatgtgtgccgagaagcagctggagctgcggctgcgggacttcctgctggacattgaagatcgcatctaccagggcaccctgggcgccatcaaggtgacagacagacacatctggaggtctgccctggagagcggccgctatgagctgctgtctgaggagaacaaggaaaatggcatcatcaagacagtgaatgaagatgtggaggagatggagattgatgagcagaccaaggtgattgtgaaggaccggctgctgggcatcaagacagagacccccagcacagtgtccaccaatgccagcaccccccagagcgtgtcctctgtggtgcactacctggccatggccctcttccagatcgagcagggcattgaaagacgcttcctgaaggcccccctggatgccagtgacagcggccgcagctacaagacagtgctggaccgctggagggagagcctgctgagcagcgccagcctgagccaggtgttcctgcacctgagcaccctggacagaagtgtcatctggagcaagagcatcctgaatgcccgctgcaagatctgcaggaagaagggagatgctgagaacatggtgctgtgtgatggctgtgaccggggccaccacacctactgtgtgcggcccaagctgaagacagtgcctgagggggactggttctgcccagagtgccggcccaagcagaggagccggcggctgagcagccggcagaggcccagcctggagagtgatgaagatgtggaggacagcatgggaggagaagatgatgaggtggatggagatgaggaggagggccagagcgaggaggaggagtatgaggtggagcaggatgaagatgacagccaggaggaggaggaggtgtccctgcccaagaggggccggccccaggtgcggctgcctgtgaagacccggggcaagctgagcagcagcttcagcagccggggccagcagcaggagcccggccgctaccccagccgcagccagcagagcacccccaagaccaccgtgagcagcaagacaggccgcagcctgaggaagatcaacagcgccccacccacagagaccaagagcctgagaattgccagccgcagcaccaggcacagccacggccccctgcaggctgatgtgtttgtggagctgctgagccccaggaggaagaggcggggcaggaagagcgccaacaacaccccagagaacagccccaacttccccaacttccgggtcatcgccaccaagagcagcgagcagagccgctctgtgaacatcgccagcaagctgagcctgcaggagagcgagagcaagaggcgctgcaggaagaggcagagccctgagcccagccctgtgaccctgggcagaagaagcagcggccggcagggcggcgtgcatgagctgagcgcctttgagcagctggtggtggagctggtgagacatgatgacagctggcccttcctgaagctggtgtccaagatccaggtgcctgactactatgacatcatcaagaagcccatcgccctgaacatcatccgggagaaggtgaacaagtgtgagtacaagctggccagcgagttcattgatgacatcgagctgatgttcagcaactgctttgagtacaaccccaggaacaccagcgaggccaaggccggcacccggctgcaggccttcttcatcttccggctgaagagcctggacagcaccagccaccctgtgatgtggaccaagctggcccaccaccggctgaggaagagccatgaaagtgactttgtgctgctgaaggacatctttgaggagaagcagatcgtgcatgaaaatggcaccctgaaccacgctgtgtag

SEQ ID NO: 145375 - DNA, 4452 bp, synthetic construct
  misc_feature 1..4452: note = Description of Artificial Sequence: Synthetic coding sequence
  source 1..4452: mol_type = other DNA
atggcccccctgctgggcaggaagcccttccccctggtgaagcccctgcctggagaggagcccctcttcaccatcccccacacccaggaggccttccgcacccgggaggagtatgaggcccggctggagcgctacagcgagcgcatctggacctgcaagagcacaggcagcagccagctgacccacaaggaggcctgggaggaggagcaggaggtggccgagctgctgaaggaggagttccctgcctggtatgagaagctggtgctggagatggtgcaccacaacacagccagcctggagaagctggtggacacagcctggctggagatcatgaccaagtatgctgtgggggaggagtgtgactttgaggtgggcaaggagaagatgctgaaggtgaagatcgtgaagatccaccccctggagaaggtggatgaggaggccacagagaagaagagtgatggagcctgtgacagccccagcagtgacaaggagaacagcagccagatcgcccaggaccaccagaagaaggagaccgtggtgaaggaggatgagggccggcgggagagcatcaatgaccgggcccggcgcagccccaggaagctgcccaccagcctgaagaagggggagaggaagtgggccccacccaagttcctgccccacaagtatgatgtgaagctgcagaatgaagacaagatcatcagcaatgtgcctgctgacagcctcatcagaacagagaggcctcccaacaaggagatcgtgcgctacttcatccgccacaatgccctgcgggccggcaccggggagaatgccccctgggtggtggaggatgagctggtgaagaagtacagcctgcccagcaagttcagtgacttcctgctggacccctacaagtacatgaccctgaaccccagcaccaagaggaagaacacaggcagcccagacaggaagcccagcaagaagagcaagacagacaacagcagcctgagcagccccctgaaccccaagctgtggtgccacgtgcacctgaagaagagcctgagcggcagccccctgaaggtgaagaacagcaagaacagcaagagccctgaggagcacctggaggagatgatgaagatgatgagccccaacaagctgcacaccaacttccacatccccaagaagggccccccagccaagaagccaggcaagcacagcgacaagcccctgaaggccaagggccgcagcaagggcatcctgaatggccagaagagcacaggcaacagcaagagccccaagaagggcctgaagacccccaagaccaagatgaagcagatgaccctgctggacatggccaagggcacccagaagatgacccgggcccccagaaattctgggggcacccccaggaccagcagcaagccccacaagcacctgcccccagctgccctgcacctgattgcctactacaaggagaacaaggaccgggaggacaagaggtctgccctgagctgtgtgatcagcaagacagcccggctgctgagcagtgaagatcgggcccggctgcctgaggagctgcggagcctggtgcagaagagatatgagctgctggagcacaagaagcgctgggcctccatgtctgaggagcagaggaaggagtacctgaagaagaagcgggaggagctgaagaagaagctgaaggagaaggccaaggagcggcgggagaaggagatgctggagcggctggagaagcagaagagatatgaggaccaggagctgaccgggaagaacctgcctgccttccggctggtggacaccccagagggcctgcccaacaccctgtttggagatgtggccatggtggtggagttcctgagctgctacagcggcctgctgctgcctgatgcccagtaccccatcacagctgtgtccctgatggaggccctgtctgctgacaagggcggcttcctgtacctgaacagagtgctggtgatcctgctgcagaccctgctgcaggatgaaattgctgaagattatggagagctgggcatgaagctgtctgagatccccctgaccctgcacagcgtgtctgagctggtgcggctgtgcctgcggcggagtgatgtgcaggaggagagcgagggcagtgacacagatgacaacaaggacagcgctgcctttgaggacaatgaggtgcaggatgagttcctggagaagctggagaccagcgagttctttgagctgaccagcgaggagaagctgcagatcctgacagccctgtgccaccgcatcctgatgacctacagcgtgcaggaccacatggagacccggcagcagatgtctgctgagctgtggaaggagcggctggccgtgctgaaggaggagaatgacaagaagagagctgagaagcagaagaggaaggagatggaggccaagaacaaggaaaatggcaaggtggagaatggcctgggcaagacagacaggaagaaggagatcgtgaagtttgagccccaggtggacacagaagctgaggacatgatctctgctgtgaagagccggcggctgctggccatccaggccaagaaggagcgggagatccaggagcgggagatgaaggtgaagctggagcggcaggccgaggaggagcgcatcaggaagcacaaggctgctgctgagaaggccttccaggagggcatcgccaaggccaagctggtgatgaggaggacccccatcggcacagacaggaaccacaaccgctactggctgttcagtgatgaggtgcccggcctcttcatcgagaagggctgggtgcatgacagcattgactaccgcttcaaccaccactgcaaggaccacacagtgtctggagatgaggactactgccccaggagcaagaaggccaacctgggcaagaatgcctccatgaacacccagcacggcacagccacagaggtggccgtggagaccaccacccccaagcagggccagaacctgtggttcctgtgtgacagccagaaggagctggatgagctgctgaactgcctgcacccccagggcatccgggagagccagctgaaggagcggctggagaagcgctaccaggacatcatccacagcatccacctggccaggaagcccaacctgggcctgaagagctgtgatggcaaccaggagctgctgaacttcctgcggagtgacctgattgaggtggccacccggctgcagaagggcggcctgggctacgtggaggagaccagcgagtttgaggcccgggtcatcagcctggagaagctgaaggactttggagaatgtgtgattgccctgcaggccagcgtcatcaagaagttcctgcagggcttcatggcccccaagcagaagaggaggaagctgcagagtgaagattctgccaagacagaggaggtggatgaggagaagaagatggtggaggaggccaaggtggccagcgccctggagaagtggaagacagccatccgggaggcccagaccttcagcaggatgcacgtgctgctgggcatgctggatgcctgcatcaagtgggacatgtctgcagaaaatgcccgctgcaaggtgtgcaggaagaagggagaagatgacaagctgatcctgtgtgatgagtgcaacaaggccttccacctgttctgcctgcggcctgccctgtatgaggtgcctgatggagagtggcagtgcccagcctgccagcctgccacagcccggaggaacagccggggcaggaactacacagaggagagcgccagcgaggacagtgaagatgatgaaagtgatgaggaggaggaggaggaggaggaggaggaggaggaggaggactatgaggtggccggcctgcggctgcggcccaggaagaccatccggggcaagcacagcgtcatccccccagctgcccggtctggaagaagacctgggaagaagccccacagcaccaggaggagccagcccaaggcccctcctgtggatgatgctgaggtggatgagctggtgctgcagaccaagaggagcagccggcggcagagcctggagctgcagaagtgtgaggagatcctgcacaagatcgtgaagtaccgcttctcctggcccttccgggagcctgtgaccagagatgaagctgaggactactatgatgtgatcacccaccccatggacttccagacagtgcagaacaagtgcagctgtggcagctacagatctgtgcaggagttcctgacagacatgaagcaggtgttcaccaatgctgaggtgtacaactgccggggcagccacgtgctgagctgcatggtgaagacagagcagtgcctggtggccctgctgcacaagcacctgcccggccacccctacgtgcggaggaagaggaagaagttcccagaccggctggctgaagatgaaggagacagcgagcctgaggccgtgggccagagccggggccggcggcagaagaagtag

SEQ ID NO: 145376 - DNA, 4452 bp, synthetic construct; identical to SEQ ID NO: 145375
  misc_feature 1..4452: note = Description of Artificial Sequence: Synthetic coding sequence
  source 1..4452: mol_type = other DNA

SEQ ID NO: 145377 - DNA, 5622 bp, synthetic construct
  misc_feature 1..5622: note = Description of Artificial Sequence: Synthetic coding sequence
  source 1..5622: mol_type = other DNA
atggaggccaatgaccacttcaacttcaccggcctgcccccagccccagctgccagcggcctgaagcccagccccagcagtggagagggcctgtacaccaacggcagccccatgaacttcccccagcagggcaagagcctgaatggagatgtgaatgtgaatggcctgagcacagtgagccacaccaccaccagcggcatcctgaacagcgccccccacagcagcagcaccagccacctgcaccaccccagcgtggcctatgactgcctgtggaactacagccagtaccccagcgccaaccctggcagcaacctgaaggacccccccctgctgagccagttcagcggcggccagtaccccctgaatggcatcctgggcggcagccggcagcccagcagccccagccacaacaccaacctgcgggccggcagccaggagttctgggccaacggcacccagagccccatgggcctgaactttgacagccaggagctgtatgacagcttcccagaccagaactttgaggaggtgggcagcggcatccacccagatgaggccgctgagaaggagatgacctctgtggtggctgaaaatggcaccggcctggtgggcagcctggagctggaggaggagcagcctgagctgaagatgtgtggctacaatggatctgtgcccagcgtggagagcctgcaccaggaggtgtctgtgctggtgcctgaccccaccgtgtcctgcctggatgaccccagccacctgcctgaccagctggaggacacccccatcctgtctgaggacagcctggagcccttcaacagcctggcccctgagcctgtgtctgggggcctgtatggaattgatgacacagagctgatgggcgctgaggacaagctgcccctggaggacagccctgtgatcagcgccctggactgccccagcctgaacaatgccacagccttcagcctgctggctgatgacagccagaccagcaccagcatctttgccagccccaccagcccccctgtgctgggggagagcgtgctgcaggacaacagctttgacctgaacaacggcagtgatgctgagcaggaggagatggagacccagagcagtgacttcccccccagcctgacccagcctgccccagaccagagcagcaccatccagctgcacccagccaccagccctgctgtgagccccaccaccagccctgctgtgtccctggtggtgtccccagctgccagccctgagatcagccctgaggtgtgcccagctgccagcacagtggtgtccccagctgtgttttctgtggtgtccccagccagcagcgctgtgctgcctgctgtgtccctggaggtgcccctgacagcctctgtgaccagccccaaggccagccctgtgaccagccctgctgctgccttccccacagccagccctgccaacaaggatgtgtcctccttcctggagaccacagcagatgtggaggagatcactggagagggcctgacagccagcggcagcggagatgtgatgagaagacgcatcgccaccccagaggaggtgcggctgcccctgcagcacggctggaggcgggaggtgcgcatcaagaagggcagccaccgctggcagggcgagacctggtactacggcccctgtgggaagaggatgaagcagtttcctgaggtgatcaagtacctgagcagaaatgtggtgcacagcgtgcggcgggagcacttctccttcagccccaggatgcctgtgggggacttctttgaggagcgggacaccccagagggcctgcagtgggtgcagctgtctgctgaggagatccccagccgcatccaggccatcaccgggaagaggggccggcccaggaacacagagaaggccaagaccaaggaggtgcccaaggtgaagaggggccggggccggccccccaaggtgaagatcacagagctgctgaacaagacagacaaccggcccctgaagaagctggaggcccaggagaccctgaatgaggaggacaaggccaagatcgccaagagcaagaagaagatgaggcagaaggtgcagagaggagagtgccagaccaccatccagggccaggccaggaacaagaggaagcaggagaccaagagcctgaagcagaaggaggccaagaagaagagcaaggccgagaaggagaagggcaagaccaagcaggagaagctgaaggagaaggtgaagcgggagaagaaggagaaggtgaagatgaaggagaaggaggaggtgaccaaggccaagccagcctgcaaggctgacaagaccctggccacccagaggcggctggaggagcggcagaggcagcagatgatcctggaggagatgaagaagcccacagaggacatgtgcctgacagaccaccagcccctgcctgacttcagccgggtgcccggcctgaccctgcccagcggggccttcagtgactgcctgaccatcgtggagttcctgcacagctttgggaaggtgctgggctttgatcctgccaaggatgtgcccagcctgggcgtgctgcaggagggcctgctgtgccagggcgacagcctgggggaggtgcaggacctgctggtgcggctgctgaaggccgccctgcatgaccccggcttccccagctactgccagagcctgaagatcctgggggagaaggtgtctgagatccccctgacccgggacaacgtgtctgagatcctgcgctgcttcctgatggcctacggcgtggagcccgccctgtgtgaccggctgcggacccagcccttccaggcccagcccccccagcagaaggctgctgtgctggccttcctggtgcatgagctgaatggcagcaccctcatcatcaatgaaattgacaagaccctggagagcatgagcagctacaggaagaacaagtggatcgtggagggccgcctgcggcggctgaagacagtgctggccaagaggacaggccgctctgaggtggagatggagggccctgaggagtgcctgggcagaagaagaagcagccgcatcatggaggagaccagcggcatggaggaggaggaggaggaggagagcattgctgctgtgcccggccggcggggcagaagagatggagaggtggatgccacagccagcagcatccctgagctggagcggcagatcgagaagctgagcaagaggcagctgttcttcaggaagaagctgctgcacagcagccagatgctgcgggctgtgtccctgggccaggaccgctacagaagacgctactgggtgctgccctacctggccggcatctttgtggagggcacagagggcaacctggtgcctgaggaggtgatcaagaaggagacagacagcctgaaggtggccgcccacgccagcctgaacccagccctcttctccatgaagatggagctggccggcagcaacaccacagccagcagccctgcccgggcccggggccggcccaggaagaccaagccaggctccatgcagcccaggcacctgaagagccctgtgcggggccaggacagcgagcagccccaggcccagctgcagcctgaggcccagctgcacgccccagcccagccccagccccagctgcagctgcagctgcagagccacaagggcttcctggagcaggagggcagccccctgagcctgggccagagccagcacgacctgagccagagcgccttcctgtcctggctgagccagacccagagccacagcagcctgctgagcagctctgtgctgaccccagacagcagccctgggaagctggaccctgcccccagccagcccccagaggagcctgagccagatgaagctgagagcagcccagacccccaggccctgtggttcaacatcagcgcccagatgccctgcaatgctgcccccaccccacctcctgctgtgtctgaggaccagcccacccccagcccccagcagctggccagcagcaagcccatgaaccggcccagcgctgccaacccctgcagccctgtgcagttcagcagcacccccctggccggcctggcccccaagaggcgggccggggaccctggagagatgccccagagccccaccggcctgggccagcccaagaggcggggccggccccccagcaagttcttcaagcagatggagcagcgctacctgacccagctgacagcccagcctgtgcccccagagatgtgcagcggctggtggtggatccgggaccctgagatgctggatgccatgctgaaggccctgcacccccggggcatccgggagaaggccctgcacaagcacctgaacaagcaccgggacttcctgcaggaggtgtgcctgcggcccagcgctgaccccatctttgagccccggcagctgcctgccttccaggagggcatcatgtcctggagccccaaggagaagacctatgaaacagacctggccgtgctgcagtgggtggaggagctggagcagagggtcatcatgtctgacctgcagatccggggctggacctgccccagcccagacagcacccgggaggacctggcctactgtgagcacctgagtgacagccaggaggacatcacctggaggggccggggccgggagggcctggccccccagaggaagaccaccaaccccctggacctggccgtgatgaggctggccgccctggagcagaatgtggagcggcgctacctgcgggagcccctgtggcccacccatgaggtggtgctggagaaggccctgctgagcaccccaaatggagcccctgagggcaccaccacagagatctcctatgagatcaccccccgcatccgggtgtggaggcagaccctggagcgctgccgctctgctgcccaggtgtgcctgtgcctgggccagctggagaggagcatcgcctgggagaagtctgtgaacaaggtgacctgcctggtgtgcaggaagggggacaatgatgagttcctgctgctgtgtgatggctgtgaccggggctgccacatctactgccaccggcccaagatggaggccgtgcctgagggggactggttctgcaccgtgtgcctggcccagcaggtggagggggagttcacccagaagccaggcttccccaagaggggccagaagaggaagagcggctacagcctgaacttctctgaaggagatggaagaagaagaagagtgctgctgcggggccgggagagccctgctgctggcccccgctacagcgaggagggcctgagccccagcaagagaagaaggctgtccatgaggaaccaccacagcgacctgaccttctgtgagatcatcctgatggagatggagagccatgatgctgcctggcccttcctggagcctgtgaacccccggctggtgtctggctaccgccgcatcatcaagaaccccatggacttcagcaccatgagggagcggctgctgcggggcggctacaccagcagcgaggagtttgctgctgatgccctgctggtgtttgacaactgccagaccttcaatgaagatgattctgaggtgggcaaggccggccacatcatgaggcgcttctttgagagccgctgggaggagttctaccagggcaagcaggccaacctgtag

SEQ ID NO: 145378 - DNA, 2514 bp, synthetic construct
  misc_feature 1..2514: note = Description of Artificial Sequence: Synthetic coding sequence
  source 1..2514: mol_type = other DNA
gtgcccggccggcggggcagaagagatggagaggtggatgccacagccagcagcatccctgagctggagcggcagatcgagaagctgagcaagaggcagctgttcttcaggaagaagctgctgcacagcagccagatgctgcgggctgtgtccctgggccaggaccgctacagaagacgctactgggtgctgccctacctggccggcatctttgtggagggcacagagggcaacctggtgcctgaggaggtgatcaagaaggagacagacagcctgaaggtggccgcccacgccagcctgaacccagccctcttctccatgaagatggagctggccggcagcaacaccacagccagcagccctgcccgggcccggggccggcccaggaagaccaagccaggctccatgcagcccaggcacctgaagagccctgtgcggggccaggacagcgagcagccccaggcccagctgcagcctgaggcccagctgcacgccccagcccagccccagccccagctgcagctgcagctgcagagccacaagggcttcctggagcaggagggcagccccctgagcctgggccagagccagcacgacctgagccagagcgccttcctgtcctggctgagccagacccagagccacagcagcctgctgagcagctctgtgctgaccccagacagcagccctgggaagctggaccctgcccccagccagcccccagaggagcctgagccagatgaagctgagagcagcccagacccccaggccctgtggttcaacatcagcgcccagatgccctgcaatgctgcccccaccccacctcctgctgtgtctgaggaccagcccacccccagcccccagcagctggccagcagcaagcccatgaaccggcccagcgctgccaacccctgcagccctgtgcagttcagcagcacccccctggccggcctggcccccaagaggcgggccggggaccctggagagatgccccagagccccaccggcctgggccagcccaagaggcggggccggccccccagcaagttcttcaagcagatggagcagcgctacctgacccagctgacagcccagcctgtgcccccaggctggtggtggatccgggaccctgagatgctggatgccatgctgaaggccctgcacccccggggcatccgggagaaggccctgcacaagcacctgaacaagcaccgggacttcctgcaggaggtgtgcctgcggcccagcgctgaccccatctttgagccccggcagctgcctgccttccaggagggcatcatgtcctggagccccaaggagaagacctatgaaacagacctggccgtgctgcagtgggtggaggagctggagcagagggtcatcatgtctgacctgcagatccggggctggacctgccccagcccagacagcacccgggaggacctggcctactgtgagcacctgagtgacagccaggaggacatcacctggaggggccggggccgggagggcctggccccccagaggaagaccaccaaccccctggacctggccgtgatgaggctggccgccctggagcagaatgtggagcggcgctacctgcgggagcccctgtggcccacccatgaggtggtgctggagaaggccctgctgagcaccccaaatggagcccctgagggcaccaccacagagatctcctatgagatcaccccccgcatccgggtgtggaggcagaccctggagcgctgccgctctgctgcccaggtgtgcctgtgcctgggccagctggagaggagcatcgcctgggagaagtctgtgaacaaggtgacctgcctggtgtgcaggaagggggacaatgatgagttcctgctgctgtgtgatggctgtgaccggggctgccacatctactgccaccggcccaagatggaggccgtgcctgagggggactggttctgcaccgtgtgcctggcccagcaggtggagggggagttcacccagaagccaggcttccccaagaggggccagaagaggaagagcggctacagcctgaacttctctgaaggagatggaagaagaagaagagtgctgctgcggggccgggagagccctgctgctggcccccgctacagcgaggagggcctgagccccagcaagagaagaaggctgtccatgaggaaccaccacagcgacctgaccttctgtgagatcatcctgatggagatggagagccatgatgctgcctggcccttcctggagcctgtgaacccccggctggtgtctggctaccgccgcatcatcaagaaccccatggacttcagcaccatgagggagcggctgctgcggggcggctacaccagcagcgaggagtttgctgctgatgccctgctggtgtttgacaactgccagaccttcaatgaagatgattctgaggtgggcaaggccggccacatcatgaggcgcttctttgagagccgctgggaggagttctaccagggcaagcaggccaacctgtag

SEQ ID NO: 145379 - DNA, 5718 bp, synthetic construct
  misc_feature 1..5718: note = Description of Artificial Sequence: Synthetic coding sequence
  source 1..5718: mol_type = other DNA
atggagatggaggccaatgaccacttcaacttcaccggcctgcccccagccccagctgccagcggcctgaagcccagccccagcagtggagagggcctgtacaccaacggcagccccatgaacttcccccagcagggcaagagcctgaatggagatgtgaatgtgaatggcctgagcacagtgagccacaccaccaccagcggcatcctgaacagcgccccccacagcagcagcaccagccacctgcaccaccccagcgtggcctatgactgcctgtggaactacagccagtaccccagcgccaaccctggcagcaacctgaaggacccccccctgctgagccagttcagcggcggccagtaccccctgaatggcatcctgggcggcagccggcagcccagcagccccagccacaacaccaacctgcgggccggcagccaggagttctgggccaacggcacccagagccccatgggcctgaactttgacagccaggagctgtatgacagcttcccagaccagaactttgaggtgatgcccaatggacctccttccttcttcaccagcccccagaccagccccatgctgggcagcagcatccagacctttgcccccagccaggaggtgggcagcggcatccacccagatgaggccgctgagaaggagatgacctctgtggtggctgaaaatggcaccggcctggtgggcagcctggagctggaggaggagcagcctgagctgaagatgtgtggctacaatggatctgtgcccagcgtggagagcctgcaccaggaggtgtctgtgctggtgcctgaccccaccgtgtcctgcctggatgaccccagccacctgcctgaccagctggaggacacccccatcctgtctgaggacagcctggagcccttcaacagcctggcccctgagcctgtgtctgggggcctgtatggaattgatgacacagagctgatgggcgctgaggacaagctgcccctggaggacagccctgtgatcagcgccctggactgccccagcctgaacaatgccacagccttcagcctgctggctgatgacagccagaccagcaccagcatctttgccagccccaccagcccccctgtgctgggggagagcgtgctgcaggacaacagctttgacctgaacaacggcagtgatgctgagcaggaggagatggagacccagagcagtgacttcccccccagcctgacccagcctgccccagaccagagcagcaccatccagctgcacccagccaccagccctgctgtgagccccaccaccagccctgctgtgtccctggtggtgtccccagctgccagccctgagatcagccctgaggtgtgcccagctgccagcacagtggtgtccccagctgtgttttctgtggtgtccccagccagcagcgctgtgctgcctgctgtgtccctggaggtgcccctgacagcctctgtgaccagccccaaggccagccctgtgaccagccctgctgctgccttccccacagccagccctgccaacaaggatgtgtcctccttcctggagaccacagcagatgtggaggagatcactggagagggcctgacagccagcggcagcggagatgtgatgagaagacgcatcgccaccccagaggaggtgcggctgcccctgcagcacggctggaggcgggaggtgcgcatcaagaagggcagccaccgctggcagggcgagacctggtactacggcccctgtgggaagaggatgaagcagtttcctgaggtgatcaagtacctgagcagaaatgtggtgcacagcgtgcggcgggagcacttctccttcagccccaggatgcctgtgggggacttctttgaggagcgggacaccccagagggcctgcagtgggtgcagctgtctgctgaggagatccccagccgcatccaggccatcaccgggaagaggggccggcccaggaacacagagaaggccaagaccaaggaggtgcccaaggtgaagaggggccggggccggccccccaaggtgaagatcacagagctgctgaacaagacagacaaccggcccctgaagaagctggaggcccaggagaccctgaatgaggaggacaaggccaagatcgccaagagcaagaagaagatgaggcagaaggtgcagagaggagagtgccagaccaccatccagggccaggccaggaacaagaggaagcaggagaccaagagcctgaagcagaaggaggccaagaagaagagcaaggccgagaaggagaagggcaagaccaagcaggagaagctgaaggagaaggtgaagcgggagaagaaggagaaggtgaagatgaaggagaaggaggaggtgaccaaggccaagccagcctgcaaggctgacaagaccctggccacccagaggcggctggaggagcggcagaggcagcagatgatcctggaggagatgaagaagcccacagaggacatgtgcctgacagaccaccagcccctgcctgacttcagccgggtgcccggcctgaccctgcccagcggggccttcagtgactgcctgaccatcgtggagttcctgcacagctttgggaaggtgctgggctttgatcctgccaaggatgtgcccagcctgggcgtgctgcaggagggcctgctgtgccagggcgacagcctgggggaggtgcaggacctgctggtgcggctgctgaaggccgccctgcatgaccccggcttccccagctactgccagagcctgaagatcctgggggagaaggtgtctgagatccccctgacccgggacaacgtgtctgagatcctgcgctgcttcctgatggcctacggcgtggagcccgccctgtgtgaccggctgcggacccagcccttccaggcccagcccccccagcagaaggctgctgtgctggccttcctggtgcatgagctgaatggcagcaccctcatcatcaatgaaattgacaagaccctggagagcatgagcagctacaggaagaacaagtggatcgtggagggccgcctgcggcggctgaagacagtgctggccaagaggacaggccgctctgaggtggagatggagggccctgaggagtgcctgggcagaagaagaagcagccgcatcatggaggagaccagcggcatggaggaggaggaggaggaggagagcattgctgctgtgcccggccggcggggcagaagagatggagaggtggatgccacagccagcagcatccctgagctggagcggcagatcgagaagctgagcaagaggcagctgttcttcaggaagaagctgctgcacagcagccagatgctgcgggctgtgtccctgggccaggaccgctacagaagacgctactgggtgctgccctacctggccggcatctttgtggagggcacagagggcaacctggtgcctgaggaggtgatcaagaaggagacagacagcctgaaggtggccgcccacgccagcctgaacccagccctcttctccatgaagatggagctggccggcagcaacaccacagccagcagccctgcccgggcccggggccggcccaggaagaccaagccaggctccatgcagcccaggcacctgaagagccctgtgcggggccaggacagcgagcagccccaggcccagctgcagcctgaggcccagctgcacgccccagcccagccccagccccagctgcagctgcagctgcagagccacaagggcttcctggagcaggagggcagccccctgagcctgggccagagccagcacgacctgagccagagcgccttcctgtcctggctgagccagacccagagccacagcagcctgctgagcagctctgtgctgaccccagacagcagccctgggaagctggaccctgcccccagccagcccccagaggagcctgagccagatgaagctgagagcagcccagacccccaggccctgtggttcaacatcagcgcccagatgccctgcaatgctgcccccaccccacctcctgctgtgtctgaggaccagcccacccccagcccccagcagctggccagcagcaagcccatgaaccggcccagcgctgccaacccctgcagccctgtgcagttcagcagcacccccctggccggcctggcccccaagaggcgggccggggaccctggagagatgccccagagccccaccggcctgggccagcccaagaggcggggccggccccccagcaagttcttcaagcagatggagcagcgctacctgacccagctgacagcccagcctgtgcccccagagatgtgcagcggctggtggtggatccgggaccctgagatgctggatgccatgctgaaggccctgcacccccggggcatccgggagaaggccctgcacaagcacctgaacaagcaccgggacttcctgcaggaggtgtgcctgcggcccagcgctgaccccatctttgagccccggcagctgcctgccttccaggagggcatcatgtcctggagccccaaggagaagacctatgaaacagacctggccgtgctgcagtgggtggaggagctggagcagagggtcatcatgtctgacctgcagatccggggctggacctgccccagcccagacagcacccgggaggacctggcctactgtgagcacctgagtgacagccaggaggacatcacctggaggggccggggccgggagggcctggccccccagaggaagaccaccaaccccctggacctggccgtgatgaggctggccgccctggagcagaatgtggagcggcgctacctgcgggagcccctgtggcccacccatgaggtggtgctggagaaggccctgctgagcaccccaaatggagcccctgagggcaccaccacagagatctcctatgagatcaccccccgcatccgggtgtggaggcagaccctggagcgctgccgctctgctgcccaggtgtgcctgtgcctgggccagctggagaggagcatcgcctgggagaagtctgtgaacaaggtgacctgcctggtgtgcaggaagggggacaatgatgagttcctgctgctgtgtgatggctgtgaccggggctgccacatctactgccaccggcccaagatggaggccgtgcctgagggggactggttctgcaccgtgtgcctggcccagcaggtggagggggagttcacccagaagccaggcttccccaagaggggccagaagaggaagagcggctacagcctgaacttctctgaaggagatggaagaagaagaagagtgctgctgcggggccgggagagccctgctgctggcccccgctacagcgaggagggcctgagccccagcaagagaagaaggctgtccatgaggaaccaccacagcgacctgaccttctgtgagatcatcctgatggagatggagagccatgatgctgcctggcccttcctggagcctgtgaacccccggctggtgtctggctaccgccgcatcatcaagaaccccatggacttcagcaccatgagggagcggctgctgcggggcggctacaccagcagcgaggagtttgctgctgatgccctgctggtgtttgacaactgccagaccttcaatgaagatgattctgaggtgggcaaggccggccacatcatgaggcgcttctttgagagccgctgggaggagttctaccagggcaagcaggccaacctgtag

SEQ ID NO: 145380 - DNA, 6207 bp, synthetic construct
  misc_feature 1..6207: note = Description of Artificial Sequence: Synthetic coding sequence
  source 1..6207: mol_type = other DNA
atggagagcggggagcggctgcccagcagcgctgccagcagcaccacccccaccagcagcagcacccccagcgtggcctctgtggtgtccaaaggaggcctgagcactggagtggccagcctgagcagcaccatcaacccctgtggccacctgttcagaacagctggggaccagcccttcaacctgagcacagtgtcctctgccttccccatggtgagccaccctgtgtttggcctgcacagcgccagcagcggccacagcgagtttggaggcctgggcaccctgggcacccccacagccctggccgcccacccccagctggccagcttccctgagtggtggaggaccacagatgcccacaccaggactggagccaccttcttcccccccctgctgggcatcccccccctgtttgcccccccagcccagaaccacgacagcagcagcttccacagcaggaccagcggcaagagcaacagaaatggacctgagaagggcgtgaatggcagcatcaatggcagcaacaccagcagcgtcatcggcatcaacacctctgtgctgagcaccacagccagcagctccatgggccagaccaagagcaccagcagcggcggcggcaacaggaagtgcaaccaggagcagagcaagaaccagcccctggatgcccgggtggacaagatcaaggacaagaagcccaggaagaaggccatggagagcagcagcaacagcgacagcgacagcggcaccagcagtgacaccagcagcgagggcatcagcagcagtgacagtgatgacctggaggaggatgaggaggaggaggaccagagcattgaggagagtgaagatgatgacagcgacagcgagagcgaggcccagcacaagagcaacaaccaggtgctgctgcacggcatcagtgaccccaaggcagatggccagaaggccacagagaaggcccaggagaagaggatccaccagcccctgcccctggccagcgagagccagacccacagcttccagagccagcagaagcagccccaggtgctgagccagcagctgcccttcatcttccagagcagccaggccaaggaggagagcgtgaacaagcacaccagcgtcatccagagcacaggcctggtgtccaatgtgaagcccctgagcctggtgaaccaggccaagaaggagacctacatgaagctgattgtgcccagcccagatgtgctgaaggccggcaacaagaacaccagcgaggagagcagcctgctgaccagcgagctgcggagcaagcgggagcagtacaagcaggccttccccagccagctgaagaagcaggagagcagcaagagcctgaagaaggtgattgctgccctgagcaaccccaaggccaccagcagcagccctgcccaccccaagcagaccctggagaacaaccaccccaaccccttcctgaccaatgccctgctgggcaaccaccagcccaatggagtcatccagagcgtcatccaggaggcccccctggccctgaccaccaagaccaagatgcagagcaagatcaatgaaaatattgctgctgccagcagcacccccttcagcagccctgtgaacctgagcaccagcggccgccgcaccccaggcaaccagacccctgtgatgcccagcgccagccccatcctgcacagccagggcaaggagaaggctgtgagcaacaacgtgaaccctgtgaagacccagcaccacagccacccagccaagagcctggtggagcagttccggggcacagacagcgacatccccagcagcaaggacagcgaggacagcaatgaagatgaggaggaggatgatgaggaggaggatgaagaagatgatgaagatgatgaaagtgatgacagccagagcggcaccagcaagagaagaagagtgacagatgagcgggagctgcgcatccccctggagtatggctggcagcgggagacccgcatccggaactttggaggccgcctgcagggcgaggtggcctactatgccccctgtgggaagaagctgcggcagtacccagaggtgatcaagtacctgagcagaaatggcatcatggacatcagccgggacaacttctccttcagcgccaagatccgggtgggggacttctatgaggccagagatggcccccagggcatgcagtggtgcctgctgaaggaggaggatgtgatcccccgcatccgggccatggagggccggcggggccggccccccaacccagaccggcagagggcccgggaggagagcaggatgagaagaaggaagggccggcccccaaatgtgggcaatgctgagttcctggacaatgctgatgccaagctgctgaggaagctgcaggcccaggagatcgcccggcaggccgcccagatcaagctgctgaggaagctgcagaagcaggagcaggcccgggtggccaaggaggccaagaagcagcaggccatcatggctgctgaggagaagaggaagcagaaggagcagatcaagatcatgaagcagcaggagaagatcaagaggatccagcagatccgcatggagaaggagctgcgggcccagcagatcctggaggccaagaagaagaagaaggaggaggccgccaatgccaagctgctggaggccgagaagaggatcaaggagaaggagatgaggcggcagcaggccgtgctgctgaagcaccaggagcgggagcggcggcggcagcacatgatgctgatgaaggccatggaggccaggaagaaggccgaggagaaggagcggctgaagcaggagaagagagatgagaagaggctgaacaaggagaggaagctggagcagaggcggctggagctggagatggccaaggagctgaagaagcccaatgaagacatgtgcctggccgaccagaagcccctgcctgagctgccccgcatccctggcctggtgctgagcggcagcaccttcagtgactgcctgatggtggtgcagttcctgaggaactttgggaaggtgctgggctttgatgtgaacattgatgtgcccaacctgtctgtgctgcaggagggcctgctgaacatcggggacagcatgggagaggtgcaggacctgctggtgcggctgctgtctgctgctgtgtgtgaccccggcctcatcaccggctacaaggccaagacagccctgggggagcacctgctgaatgtgggcgtgaacagagacaacgtgtctgagatcctgcagatcttcatggaggcccactgcggccagacagagctgacagagagcctgaagaccaaggccttccaggcccacaccccagcccagaaggcctctgtgctggccttcctgatcaatgagctggcctgcagcaagtctgtggtgtctgaaattgacaagaacatcgactacatgagcaacctgcggcgggacaagtgggtggtggagggcaagctgaggaagctgcgcatcatccacgccaagaagacaggcaagagggacaccagcggcggcatcgacctgggggaggagcagcaccccctgggcacccccaccccaggcaggaagagaagaagaaaaggaggagacagcgactatgatgatgatgatgatgatgacagtgatgaccagggagatgaagatgatgaagatgaggaggacaaggaggacaagaagggcaagaagacagacatctgtgaagatgaagatgaaggagaccaggccgcctctgtggaggagctggagaagcagatcgagaagctgagcaagcagcagagccagtacagaaggaagctgtttgatgccagccacagcctgcggtctgtgatgtttggccaggaccgctacagaagacgctactggatcctgccccagtgtggcggcatctttgtggagggcatggagagcggggagggcctggaggagatcgccaaggagcgggagaagctgaagaaggccgagagcgtgcagatcaaggaggagatgtttgagaccagcggggacagcctgaactgcagcaacacagaccactgtgagcagaaggaggacctgaaggagaaggacaacaccaacctcttcctgcagaagccaggcagcttcagcaagctgagcaagctgctggaggtggccaagatgcctcctgagagcgaggtgatgacccccaagcccaatgctggggccaacggctgcaccctgagctaccagaacagcggcaagcacagcctgggctctgtgcagagcacagccacccagagcaatgtggagaaggctgacagcaacaacctcttcaacacaggcagcagcggccctgggaagttctacagccccctgcccaatgaccagctgctgaagaccctgacagagaagaaccggcagtggttcagcctgctgcccaggaccccctgtgatgacaccagcctgacccacgccgacatgagcacagccagcctggtgaccccccagagccagccccccagcaagagccccagccccaccccagcccccctgggcagcagcgcccagaaccctgtgggcctgaacccctttgccctgagccccctgcaggtgaagggcggcgtgtccatgatgggcctgcagttctgtggctggcccaccggggtggtgaccagcaacatccccttcaccagctctgtgcccagcctgggcagcggcctgggcctgtctgagggcaatggaaacagcttcctgaccagcaatgtggccagcagcaagtctgagagccctgtgccccagaatgagaaggccaccagcgcccagcctgctgctgtggaggtggccaagcctgtggacttccccagccccaagcccatccctgaggagatgcagtttggctggtggaggatcatcgaccctgaggacctgaaggccctgctgaaggtgctgcacctgcggggcatccgggagaaggccctgcagaagcagatccagaagcacctggactacatcacccaggcctgcctgaagaacaaggatgtggccatcatcgagctgaatgaaaatgaggagaaccaggtgacccgggacatcgtggagaactggagcgtggaggagcaggccatggagatggacctgtctgtgctgcagcaggtggaggacctggagcggcgggtggccagcgccagcctgcaggtgaagggctggatgtgcccagagcccgccagcgagcgggaggacctggtgtactttgagcacaagagcttcaccaagctgtgcaaggagcatgatggagagttcaccggggaggatgagagcagcgcccacgccctggagaggaagagtgacaaccccctggacattgctgtgacccggctggccgacctggagaggaacatcgagcggcgcatcgaggaggacatcgcccctggcctgcgggtgtggaggcgggccctgtctgaggcccggtctgctgcccaggtggccctgtgcatccagcagctgcagaagagcatcgcctgggagaagagcatcatgaaggtgtactgccagatctgcaggaaaggagacaatgaggagctgctgctgctgtgtgatggctgtgacaagggctgccacacctactgccaccggcccaagatcaccaccatcccagatggagactggttctgcccagcctgcatcgccaaggccagcggccagaccctgaagatcaagaagctgcacgtgaagggcaagaagaccaatgaaagcaagaagggcaagaaggtgaccctgactggagacacagaagatgaagattctgccagcaccagcagcagcctgaagaggggcaacaaggacctgaagaagaggaagatggaggagaacaccagcatcaacctgagcaagcaggagagcttcacctctgtgaagaagcccaagagagatgacagcaaggacctggccctgtgcagcatgatcctgacagagatggagacccatgaagatgcctggcccttcctgctgcctgtgaacctgaagctggtgcccggctacaagaaggtgatcaagaagcccatggacttcagcaccatccgggagaagctgagcagcggccagtaccccaacctggagacctttgccctggatgtgcggctggtgtttgacaactgtgagaccttcaatgaagatgacagcgacatcggccgggccggccacaacatgaggaagtactttgagaagaagtggacagacaccttcaaggtgtcctag

SEQ ID NO: 145381 - DNA, 6405 bp, synthetic construct
  misc_feature 1..6405: note = Description of Artificial Sequence: Synthetic coding sequence
  source 1..6405: mol_type = other DNA
atggagagcggggagcggctgcccagcagcgctgccagcagcaccacccccaccagcagcagcacccccagcgtggcctctgtggtgtccaaaggaggcctgagcactggagtggccagcctgagcagcaccatcaacccctgtggccacctgttcagaacagctggggaccagcccttcaacctgagcacagtgtcctctgccttccccatggtgagccaccctgtgtttggcctgcacagcgccagcagcggccacagcgagtttggaggcctgggcaccctgggcacccccacagccctggccgcccacccccagctggccagcttccctggagctgagtggtggaggaccacagatgcccacaccaggactggagccaccttcttcccccccctgctgggcatcccccccctgtttgcccccccagcccagaaccacgacagcagcagcttccacagcaggaccagcggcaagagcaacagaaatggacctgagaagggcgtgaatggcagcatcaatggcagcaacaccagcagcgtcatcggcatcaacacctctgtgctgagcaccacagccagcagctccatgggccagaccaagagcaccagcagcggcggcggcaacaggaagtgcaaccaggagcagagcaagaaccagcccctggatgcccgggtggacaagatcaaggacaagaagcccaggaagaaggccatggagagcagcagcaacagcgacagcgacagcggcaccagcagtgacaccagcagcgagggcatcagcagcagtgacagtgatgacctggaggaggatgaggaggaggaggaccagagcattgaggagagtgaagatgatgacagcgacagcgagagcgaggcccagcacaagagcaacaaccaggtgctgctgcacggcatcagtgaccccaaggcagatggccagaaggccacagagaaggcccaggagaagaggatccaccagcccctgcccctggccagcgagagccagacccacagcttccagagccagcagaagcagccccaggtgctgagccagcagctgcccttcatcttccagagcagccaggccaaggaggagagcgtgaacaagcacaccagcgtcatccagagcacaggcctggtgtccaatgtgaagcccctgagcctggtgaaccaggccaagaaggagacctacatgaagctgattgtgcccagcccagatgtgctgaaggccggcaacaagaacaccagcgaggagagcagcctgctgaccagcgagctgcggagcaagcgggagcagtacaagcaggccttccccagccagctgaagaagcaggagagcagcaagagcctgaagaaggtgattgctgccctgagcaaccccaaggccaccagcagcagccctgcccaccccaagcagaccctggagaacaaccaccccaaccccttcctgaccaatgccctgctgggcaaccaccagcccaatggagtcatccagagcgtcatccaggaggcccccctggccctgaccaccaagaccaagatgcagagcaagatcaatgaaaatattgctgctgccagcagcacccccttcagcagccctgtgaacctgagcaccagcggccgccgcaccccaggcaaccagacccctgtgatgcccagcgccagccccatcctgcacagccagggcaaggagaaggctgtgagcaacaacgtgaaccctgtgaagacccagcaccacagccacccagccaagagcctggtggagcagttccggggcacagacagcgacatccccagcagcaaggacagcgaggacagcaatgaagatgaggaggaggatgatgaggaggaggatgaagaagatgatgaagatgatgaaagtgatgacagccagagcgagagtgacagcaacagcgagagtgacacagagggcagcgaggaggaggatgatgatgacaaggaccaggatgaaagtgacagcgacacagaaggagagaagacctccatgaagctgaacaagaccaccagctctgtgaagagccccagcatgagcctgaccggccacagcaccccaagaaacctgcacatcgccaaggcccctggcagcgccccagctgccctgtgcagcgagagccagagccctgccttcctgggcaccagcagcagcaccctgaccagcagcccccacagcggcaccagcaagagaagaagagtgacagatgagcgggagctgcgcatccccctggagtatggctggcagcgggagacccgcatccggaactttggaggccgcctgcagggcgaggtggcctactatgccccctgtgggaagaagctgcggcagtacccagaggtgatcaagggcatgcagtggtgcctgctgaaggaggaggatgtgatcccccgcatccgggccatggagggccggcggggccggccccccaacccagaccggcagagggcccgggaggagagcaggatgagaagaaggaagggccggcccccaaatgtgggcaatgctgagttcctggacaatgctgatgccaagctgctgaggaagctgcaggcccaggagatcgcccggcaggccgcccagatcaagctgctgaggaagctgcagaagcaggagcaggcccgggtggccaaggaggccaagaagcagcaggccatcatggctgctgaggagaagaggaagcagaaggagcagatcaagatcatgaagcagcaggagaagatcaagaggatccagcagatccgcatggagaaggagctgcgggcccagcagatcctggaggccaagaagaagaagaaggaggaggccgccaatgccaagctgctggaggccgagaagaggatcaaggagaaggagatgaggcggcagcaggccgtgctgctgaagcaccaggagcgggagcggcggcggcagcacatgatgctgatgaaggccatggaggccaggaagaaggccgaggagaaggagcggctgaagcaggagaagagagatgagaagaggctgaacaaggagaggaagctggagcagaggcggctggagctggagatggccaaggagctgaagaagcccaatgaagacatgtgcctggccgaccagaagcccctgcctgagctgccccgcatccctggcctggtgctgagcggcagcaccttcagtgactgcctgatggtggtgcagttcctgaggaactttgggaaggtgctgggctttgatgtgaacattgatgtgcccaacctgtctgtgctgcaggagggcctgctgaacatcggggacagcatgggagaggtgcaggacctgctggtgcggctgctgtctgctgctgtgtgtgaccccggcctcatcaccggctacaaggccaagacagccctgggggagcacctgctgaatgtgggcgtgaacagagacaacgtgtctgagatcctgcagatcttcatggaggcccactgcggccagacagagctgacagagagcctgaagaccaaggccttccaggcccacaccccagcccagaaggcctctgtgctggccttcctgatcaatgagctggcctgcagcaagtctgtggtgtctgaaattgacaagaacatcgactacatgagcaacctgcggcgggacaagtgggtggtggagggcaagctgaggaagctgcgcatcatccacgccaagaagacaggcaagagggacaccagcggcggcatcgacctgggggaggagcagcaccccctgggcacccccaccccaggcaggaagagaagaagaaaaggaggagacagcgactatgatgatgatgatgatgatgacagtgatgaccagggagatgaagatgatgaagatgaggaggacaaggaggacaagaagggcaagaagacagacatctgtgaagatgaagatgaaggagaccaggccgcctctgtggaggagctggagaagcagatcgagaagctgagcaagcagcagagccagtacagaaggaagctgtttgatgccagccacagcctgcggtctgtgatgtttggccaggaccgctacagaagacgctactggatcctgccccagtgtggcggcatctttgtggagggcatggagagcggggagggcctggaggagatcgccaaggagcgggagaagctgaagaaggccgagagcgtgcagatcaaggaggagatgtttgagaccagcggggacagcctgaactgcagcaacacagaccactgtgagcagaaggaggacctgaaggagaaggacaacaccaacctcttcctgcagaagccaggcagcttcagcaagctgagcaagctgctggaggtggccaagatgcctcctgagagcgaggtgatgacccccaagcccaatgctggggccaacggctgcaccctgagctaccagaacagcggcaagcacagcctgggctctgtgcagagcacagccacccagagcaatgtggagaaggctgacagcaacaacctcttcaacacaggcagcagcggccctgggaagttctacagccccctgcccaatgaccagctgctgaagaccctgacagagaagaaccggcagtggttcagcctgctgcccaggaccccctgtgatgacaccagcctgacccacgccgacatgagcacagccagcctggtgaccccccagagccagccccccagcaagagccccagccccaccccagcccccctgggcagcagcgcccagaaccctgtgggcctgaacccctttgccctgagccccctgcaggtgaagggcggcgtgtccatgatgggcctgcagttctgtggctggcccaccggggtggtgaccagcaacatccccttcaccagctctgtgcccagcctgggcagcggcctgggcctgtctgagggcaatggaaacagcttcctgaccagcaatgtggccagcagcaagtctgagagccctgtgccccagaatgagaaggccaccagcgcccagcctgctgctgtggaggtggccaagcctgtggacttccccagccccaagcccatccctgaggagatgcagtttggctggtggaggatcatcgaccctgaggacctgaaggccctgctgaaggtgctgcacctgcggggcatccgggagaaggccctgcagaagcagatccagaagcacctggactacatcacccaggcctgcctgaagaacaaggatgtggccatcatcgagctgaatgaaaatgaggagaaccaggtgacccgggacatcgtggagaactggagcgtggaggagcaggccatggagatggacctgtctgtgctgcagcaggtggaggacctggagcggcgggtggccagcgccagcctgcaggtgaagggctggatgtgcccagagcccgccagcgagcgggaggacctggtgtactttgagcacaagagcttcaccaagctgtgcaaggagcatgatggagagttcaccggggaggatgagagcagcgcccacgccctggagaggaagagtgacaaccccctggacattgctgtgacccggctggccgacctggagaggaacatcgagcggcgcatcgaggaggacatcgcccctggcctgcgggtgtggaggcgggccctgtctgaggcccggtctgctgcccaggtggccctgtgcatccagcagctgcagaagagcatcgcctgggagaagagcatcatgaaggtgtactgccagatctgcaggaaaggagacaatgaggagctgctgctgctgtgtgatggctgtgacaagggctgccacacctactgccaccggcccaagatcaccaccatcccagatggagactggttctgcccagcctgcatcgccaaggccagcggccagaccctgaagatcaagaagctgcacgtgaagggcaagaagaccaatgaaagcaagaagggcaagaaggtgaccctgactggagacacagaagatgaagattctgccagcaccagcagcagcctgaagaggggcaacaaggacctgaagaagaggaagatggaggagaacaccagcatcaacctgagcaagcaggagagcttcacctctgtgaagaagcccaagagagatgacagcaaggacctggccctgtgcagcatgatcctgacagagatggagacccatgaagatgcctggcccttcctgctgcctgtgaacctgaagctggtgcccggctacaagaaggtgatcaagaagcccatggacttcagcaccatccgggagaagctgagcagcggccagtaccccaacctggagacctttgccctggatgtgcggctggtgtttgacaactgtgagaccttcaatgaagatgacagcgacatcggccgggccggccacaacatgaggaagtactttgagaagaagtggacagacaccttcaaggtgtcctag

SEQ ID NO: 145382 - DNA, 6399 bp, synthetic construct
  misc_feature 1..6399: note = Description of Artificial Sequence: Synthetic coding sequence
  source 1..6399: mol_type = other DNA
atggagagcggggagcggctgcccagcagcgctgccagcagcaccacccccaccagcagcagcacccccagcgtggcctctgtggtgtccaaaggaggcctgagcactggagtggccagcctgagcagcaccatcaacccctgtggccacctgttcagaacagctggggaccagcccttcaacctgagcacagtgtcctctgccttccccatggtgagccaccctgtgtttggcctgcacagcgccagcagcggccacagcgagtttggaggcctgggcaccctgggcacccccacagccctggccgcccacccccagctggccagcttccctgagtggtggaggaccacagatgcccacaccaggactggagccaccttcttcccccccctgctgggcatcccccccctgtttgcccccccagcccagaaccacgacagcagcagcttccacagcaggaccagcggcaagagcaacagaaatggacctgagaagggcgtgaatggcagcatcaatggcagcaacaccagcagcgtcatcggcatcaacacctctgtgctgagcaccacagccagcagctccatgggccagaccaagagcaccagcagcggcggcggcaacaggaagtgcaaccaggagcagagcaagaaccagcccctggatgcccgggtggacaagatcaaggacaagaagcccaggaagaaggccatggagagcagcagcaacagcgacagcgacagcggcaccagcagtgacaccagcagcgagggcatcagcagcagtgacagtgatgacctggaggaggatgaggaggaggaggaccagagcattgaggagagtgaagatgatgacagcgacagcgagagcgaggcccagcacaagagcaacaaccaggtgctgctgcacggcatcagtgaccccaaggcagatggccagaaggccacagagaaggcccaggagaagaggatccaccagcccctgcccctggccagcgagagccagacccacagcttccagagccagcagaagcagccccaggtgctgagccagcagctgcccttcatcttccagagcagccaggccaaggaggagagcgtgaacaagcacaccagcgtcatccagagcacaggcctggtgtccaatgtgaagcccctgagcctggtgaaccaggccaagaaggagacctacatgaagctgattgtgcccagcccagatgtgctgaaggccggcaacaagaacaccagcgaggagagcagcctgctgaccagcgagctgcggagcaagcgggagcagtacaagcaggccttccccagccagctgaagaagcaggagagcagcaagagcctgaagaaggtgattgctgccctgagcaaccccaaggccaccagcagcagccctgcccaccccaagcagaccctggagaacaaccaccccaaccccttcctgaccaatgccctgctgggcaaccaccagcccaatggagtcatccagagcgtcatccaggaggcccccctggccctgaccaccaagaccaagatgcagagcaagatcaatgaaaatattgctgctgccagcagcacccccttcagcagccctgtgaacctgagcaccagcggccgccgcaccccaggcaaccagacccctgtgatgcccagcgccagccccatcctgcacagccagggcaaggagaaggctgtgagcaacaacgtgaaccctgtgaagacccagcaccacagccacccagccaagagcctggtggagcagttccggggcacagacagcgacatccccagcagcaaggacagcgaggacagcaatgaagatgaggaggaggatgatgaggaggaggatgaagaagatgatgaagatgatgaaagtgatgacagccagagcgagagtgacagcaacagcgagagtgacacagagggcagcgaggaggaggatgatgatgacaaggaccaggatgaaagtgacagcgacacagaaggagagaagacctccatgaagctgaacaagaccaccagctctgtgaagagccccagcatgagcctgaccggccacagcaccccaagaaacctgcacatcgccaaggcccctggcagcgccccagctgccctgtgcagcgagagccagagccctgccttcctgggcaccagcagcagcaccctgaccagcagcccccacagcggcaccagcaagagaagaagagtgacagatgagcgggagctgcgcatccccctggagtatggctggcagcgggagacccgcatccggaactttggaggccgcctgcagggcgaggtggcctactatgccccctgtgggaagaagctgcggcagtacccagaggtgatcaagggcatgcagtggtgcctgctgaaggaggaggatgtgatcccccgcatccgggccatggagggccggcggggccggccccccaacccagaccggcagagggcccgggaggagagcaggatgagaagaaggaagggccggcccccaaatgtgggcaatgctgagttcctggacaatgctgatgccaagctgctgaggaagctgcaggcccaggagatcgcccggcaggccgcccagatcaagctgctgaggaagctgcagaagcaggagcaggcccgggtggccaaggaggccaagaagcagcaggccatcatggctgctgaggagaagaggaagcagaaggagcagatcaagatcatgaagcagcaggagaagatcaagaggatccagcagatccgcatggagaaggagctgcgggcccagcagatcctggaggccaagaagaagaagaaggaggaggccgccaatgccaagctgctggaggccgagaagaggatcaaggagaaggagatgaggcggcagcaggccgtgctgctgaagcaccaggagcgggagcggcggcggcagcacatgatgctgatgaaggccatggaggccaggaagaaggccgaggagaaggagcggctgaagcaggagaagagagatgagaagaggctgaacaaggagaggaagctggagcagaggcggctggagctggagatggccaaggagctgaagaagcccaatgaagacatgtgcctggccgaccagaagcccctgcctgagctgccccgcatccctggcctggtgctgagcggcagcaccttcagtgactgcctgatggtggtgcagttcctgaggaactttgggaaggtgctgggctttgatgtgaacattgatgtgcccaacctgtctgtgctgcaggagggcctgctgaacatcggggacagcatgggagaggtgcaggacctgctggtgcggctgctgtctgctgctgtgtgtgaccccggcctcatcaccggctacaaggccaagacagccctgggggagcacctgctgaatgtgggcgtgaacagagacaacgtgtctgagatcctgcagatcttcatggaggcccactgcggccagacagagctgacagagagcctgaagaccaaggccttccaggcccacaccccagcccagaaggcctctgtgctggccttcctgatcaatgagctggcctgcagcaagtctgtggtgtctgaaattgacaagaacatcgactacatgagcaacctgcggcgggacaagtgggtggtggagggcaagctgaggaagctgcgcatcatccacgccaagaagacaggcaagagggacaccagcggcggcatcgacctgggggaggagcagcaccccctgggcacccccaccccaggcaggaagagaagaagaaaaggaggagacagcgactatgatgatgatgatgatgatgacagtgatgaccagggagatgaagatgatgaagatgaggaggacaaggaggacaagaagggcaagaagacagacatctgtgaagatgaagatgaaggagaccaggccgcctctgtggaggagctggagaagcagatcgagaagctgagcaagcagcagagccagtacagaaggaagctgtttgatgccagccacagcctgcggtctgtgatgtttggccaggaccgctacagaagacgctactggatcctgccccagtgtggcggcatctttgtggagggcatggagagcggggagggcctggaggagatcgccaaggagcgggagaagctgaagaaggccgagagcgtgcagatcaaggaggagatgtttgagaccagcggggacagcctgaactgcagcaacacagaccactgtgagcagaaggaggacctgaaggagaaggacaacaccaacctcttcctgcagaagccaggcagcttcagcaagctgagcaagctgctggaggtggccaagatgcctcctgagagcgaggtgatgacccccaagcccaatgctggggccaacggctgcaccctgagctaccagaacagcggcaagcacagcctgggctctgtgcagagcacagccacccagagcaatgtggagaaggctgacagcaacaacctcttcaacacaggcagcagcggccctgggaagttctacagccccctgcccaatgaccagctgctgaagaccctgacagagaagaaccggcagtggttcagcctgctgcccaggaccccctgtgatgacaccagcctgacccacgccgacatgagcacagccagcctggtgaccccccagagccagccccccagcaagagccccagccccaccccagcccccctgggcagcagcgcccagaaccctgtgggcctgaacccctttgccctgagccccctgcaggtgaagggcggcgtgtccatgatgggcctgcagttctgtggctggcccaccggggtggtgaccagcaacatccccttcaccagctctgtgcccagcctgggcagcggcctgggcctgtctgagggcaatggaaacagcttcctgaccagcaatgtggccagcagcaagtctgagagccctgtgccccagaatgagaaggccaccagcgcccagcctgctgctgtggaggtggccaagcctgtggacttccccagccccaagcccatccctgaggagatgcagtttggctggtggaggatcatcgaccctgaggacctgaaggccctgctgaaggtgctgcacctgcggggcatccgggagaaggccctgcagaagcagatccagaagcacctggactacatcacccaggcctgcctgaagaacaaggatgtggccatcatcgagctgaatgaaaatgaggagaaccaggtgacccgggacatcgtggagaactggagcgtggaggagcaggccatggagatggacctgtctgtgctgcagcaggtggaggacctggagcggcgggtggccagcgccagcctgcaggtgaagggctggatgtgcccagagcccgccagcgagcgggaggacctggtgtactttgagcacaagagcttcaccaagctgtgcaaggagcatgatggagagttcaccggggaggatgagagcagcgcccacgccctggagaggaagagtgacaaccccctggacattgctgtgacccggctggccgacctggagaggaacatcgagcggcgcatcgaggaggacatcgcccctggcctgcgggtgtggaggcgggccctgtctgaggcccggtctgctgcccaggtggccctgtgcatccagcagctgcagaagagcatcgcctgggagaagagcatcatgaaggtgtactgccagatctgcaggaaaggagacaatgaggagctgctgctgctgtgtgatggctgtgacaagggctgccacacctactgccaccggcccaagatcaccaccatcccagatggagactggttctgcccagcctgcatcgccaaggccagcggccagaccctgaagatcaagaagctgcacgtgaagggcaagaagaccaatgaaagcaagaagggcaagaaggtgaccctgactggagacacagaagatgaagattctgccagcaccagcagcagcctgaagaggggcaacaaggacctgaagaagaggaagatggaggagaacaccagcatcaacctgagcaagcaggagagcttcacctctgtgaagaagcccaagagagatgacagcaaggacctggccctgtgcagcatgatcctgacagagatggagacccatgaagatgcctggcccttcctgctgcctgtgaacctgaagctggtgcccggctacaagaaggtgatcaagaagcccatggacttcagcaccatccgggagaagctgagcagcggccagtaccccaacctggagacctttgccctggatgtgcggctggtgtttgacaactgtgagaccttcaatgaagatgacagcgacatcggccgggccggccacaacatgaggaagtactttgagaagaagtggacagacaccttcaaggtgtcctag

SEQ ID NO: 145383 - DNA, 6507 bp, synthetic construct
  misc_feature 1..6507: note = Description of Artificial Sequence: Synthetic coding sequence
  source 1..6507: mol_type = other DNA
atggagagcggggagcggctgcccagcagcgctgccagcagcaccacccccaccagcagcagcacccccagcgtggcctctgtggtgtccaaaggaggcctgagcactggagtggccagcctgagcagcaccatcaacccctgtggccacctgttcagaacagctggggaccagcccttcaacctgagcacagtgtcctctgccttccccatggtgagccaccctgtgtttggcctgcacagcgccagcagcggccacagcgagtttggaggcctgggcaccctgggcacccccacagccctggccgcccacccccagctggccagcttccctggagctgagtggtggaggaccacagatgcccacaccaggactggagccaccttcttcccccccctgctgggcatcccccccctgtttgcccccccagcccagaaccacgacagcagcagcttccacagcaggaccagcggcaagagcaacagaaatggacctgagaagggcgtgaatggcagcatcaatggcagcaacaccagcagcgtcatcggcatcaacacctctgtgctgagcaccacagccagcagctccatgggccagaccaagagcaccagcagcggcggcggcaacaggaagtgcaaccaggagcagagcaagaaccagcccctggatgcccgggtggacaagatcaaggacaagaagcccaggaagaaggccatggagagcagcagcaacagcgacagcgacagcggcaccagcagtgacaccagcagcgagggcatcagcagcagtgacagtgatgacctggaggaggatgaggaggaggaggaccagagcattgaggagagtgaagatgatgacagcgacagcgagagcgaggcccagcacaagagcaacaaccaggtgctgctgcacggcatcagtgaccccaaggcagatggccagaaggccacagagaaggcccaggagaagaggatccaccagcccctgcccctggccagcgagagccagacccacagcttccagagccagcagaagcagccccaggtgctgagccagcagctgcccttcatcttccagagcagccaggccaaggaggagagcgtgaacaagcacaccagcgtcatccagagcacaggcctggtgtccaatgtgaagcccctgagcctggtgaaccaggccaagaaggagacctacatgaagctgattgtgcccagcccagatgtgctgaaggccggcaacaagaacaccagcgaggagagcagcctgctgaccagcgagctgcggagcaagcgggagcagtacaagcaggccttccccagccagctgaagaagcaggagagcagcaagagcctgaagaaggtgattgctgccctgagcaaccccaaggccaccagcagcagccctgcccaccccaagcagaccctggagaacaaccaccccaaccccttcctgaccaatgccctgctgggcaaccaccagcccaatggagtcatccagagcgtcatccaggaggcccccctggccctgaccaccaagaccaagatgcagagcaagatcaatgaaaatattgctgctgccagcagcacccccttcagcagccctgtgaacctgagcaccagcggccgccgcaccccaggcaaccagacccctgtgatgcccagcgccagccccatcctgcacagccagggcaaggagaaggctgtgagcaacaacgtgaaccctgtgaagacccagcaccacagccacccagccaagagcctggtggagcagttccggggcacagacagcgacatccccagcagcaaggacagcgaggacagcaatgaagatgaggaggaggatgatgaggaggaggatgaagaagatgatgaagatgatgaaagtgatgacagccagagcgagagtgacagcaacagcgagagtgacacagagggcagcgaggaggaggatgatgatgacaaggaccaggatgaaagtgacagcgacacagaaggagagaagacctccatgaagctgaacaagaccaccagctctgtgaagagccccagcatgagcctgaccggccacagcaccccaagaaacctgcacatcgccaaggcccctggcagcgccccagctgccctgtgcagcgagagccagagccctgccttcctgggcaccagcagcagcaccctgaccagcagcccccacagcggcaccagcaagagaagaagagtgacagatgagcgggagctgcgcatccccctggagtatggctggcagcgggagacccgcatccggaactttggaggccgcctgcagggcgaggtggcctactatgccccctgtgggaagaagctgcggcagtacccagaggtgatcaagtacctgagcagaaatggcatcatggacatcagccgggacaacttctccttcagcgccaagatccgggtgggggacttctatgaggccagagatggcccccagggcatgcagtggtgcctgctgaaggaggaggatgtgatcccccgcatccgggccatggagggccggcggggccggccccccaacccagaccggcagagggcccgggaggagagcaggatgagaagaaggaagggccggcccccaaatgtgggcaatgctgagttcctggacaatgctgatgccaagctgctgaggaagctgcaggcccaggagatcgcccggcaggccgcccagatcaagctgctgaggaagctgcagaagcaggagcaggcccgggtggccaaggaggccaagaagcagcaggccatcatggctgctgaggagaagaggaagcagaaggagcagatcaagatcatgaagcagcaggagaagatcaagaggatccagcagatccgcatggagaaggagctgcgggcccagcagatcctggaggccaagaagaagaagaaggaggaggccgccaatgccaagctgctggaggccgagaagaggatcaaggagaaggagatgaggcggcagcaggccgtgctgctgaagcaccaggagcgggagcggcggcggcagcacatgatgctgatgaaggccatggaggccaggaagaaggccgaggagaaggagcggctgaagcaggagaagagagatgagaagaggctgaacaaggagaggaagctggagcagaggcggctggagctggagatggccaaggagctgaagaagcccaatgaagacatgtgcctggccgaccagaagcccctgcctgagctgccccgcatccctggcctggtgctgagcggcagcaccttcagtgactgcctgatggtggtgcagttcctgaggaactttgggaaggtgctgggctttgatgtgaacattgatgtgcccaacctgtctgtgctgcaggagggcctgctgaacatcggggacagcatgggagaggtgcaggacctgctggtgcggctgctgtctgctgctgtgtgtgaccccggcctcatcaccggctacaaggccaagacagccctgggggagcacctgctgaatgtgggcgtgaacagagacaacgtgtctgagatcctgcagatcttcatggaggcccactgcggccagacagagctgacagagagcctgaagaccaaggccttccaggcccacaccccagcccagaaggcctctgtgctggccttcctgatcaatgagctggcctgcagcaagtctgtggtgtctgaaattgacaagaacatcgactacatgagcaacctgcggcgggacaagtgggtggtggagggcaagctgaggaagctgcgcatcatccacgccaagaagacaggcaagagggacaccagcggcggcatcgacctgggggaggagcagcaccccctgggcacccccaccccaggcaggaagagaagaagaaaaggaggagacagcgactatgatgatgatgatgatgatgacagtgatgaccagggagatgaagatgatgaagatgaggaggacaaggaggacaagaagggcaagaagacagacatctgtgaagatgaagatgaaggagaccaggccgcctctgtggaggagctggagaagcagatcgagaagctgagcaagcagcagagccagtacagaaggaagctgtttgatgccagccacagcctgcggtctgtgatgtttggccaggaccgctacagaagacgctactggatcctgccccagtgtggcggcatctttgtggagggcatggagagcggggagggcctggaggagatcgccaaggagcgggagaagctgaagaaggccgagagcgtgcagatcaaggaggagatgtttgagaccagcggggacagcctgaactgcagcaacacagaccactgtgagcagaaggaggacctgaaggagaaggacaacaccaacctcttcctgcagaagccaggcagcttcagcaagctgagcaagctgctggaggtggccaagatgcctcctgagagcgaggtgatgacccccaagcccaatgctggggccaacggctgcaccctgagctaccagaacagcggcaagcacagcctgggctctgtgcagagcacagccacccagagcaatgtggagaaggctgacagcaacaacctcttcaacacaggcagcagcggccctgggaagttctacagccccctgcccaatgaccagctgctgaagaccctgacagagaagaaccggcagtggttcagcctgctgcccaggaccccctgtgatgacaccagcctgacccacgccgacatgagcacagccagcctggtgaccccccagagccagccccccagcaagagccccagccccaccccagcccccctgggcagcagcgcccagaaccctgtgggcctgaacccctttgccctgagccccctgcaggtgaagggcggcgtgtccatgatgggcctgcagttctgtggctggcccaccggggtggtgaccagcaacatccccttcaccagctctgtgcccagcctgggcagcggcctgggcctgtctgagggcaatggaaacagcttcctgaccagcaatgtggccagcagcaagtctgagagccctgtgccccagaatgagaaggccaccagcgcccagcctgctgctgtggaggtggccaagcctgtggacttccccagccccaagcccatccctgaggagatgcagtttggctggtggaggatcatcgaccctgaggacctgaaggccctgctgaaggtgctgcacctgcggggcatccgggagaaggccctgcagaagcagatccagaagcacctggactacatcacccaggcctgcctgaagaacaaggatgtggccatcatcgagctgaatgaaaatgaggagaaccaggtgacccgggacatcgtggagaactggagcgtggaggagcaggccatggagatggacctgtctgtgctgcagcaggtggaggacctggagcggcgggtggccagcgccagcctgcaggtgaagggctggatgtgcccagagcccgccagcgagcgggaggacctggtgtactttgagcacaagagcttcaccaagctgtgcaaggagcatgatggagagttcaccggggaggatgagagcagcgcccacgccctggagaggaagagtgacaaccccctggacattgctgtgacccggctggccgacctggagaggaacatcgagcggcgcatcgaggaggacatcgcccctggcctgcgggtgtggaggcgggccctgtctgaggcccggtctgctgcccaggtggccctgtgcatccagcagctgcagaagagcatcgcctgggagaagagcatcatgaaggtgtactgccagatctgcaggaaaggagacaatgaggagctgctgctgctgtgtgatggctgtgacaagggctgccacacctactgccaccggcccaagatcaccaccatcccagatggagactggttctgcccagcctgcatcgccaaggccagcggccagaccctgaagatcaagaagctgcacgtgaagggcaagaagaccaatgaaagcaagaagggcaagaaggtgaccctgactggagacacagaagatgaagattctgccagcaccagcagcagcctgaagaggggcaacaaggacctgaagaagaggaagatggaggagaacaccagcatcaacctgagcaagcaggagagcttcacctctgtgaagaagcccaagagagatgacagcaaggacctggccctgtgcagcatgatcctgacagagatggagacccatgaagatgcctggcccttcctgctgcctgtgaacctgaagctggtgcccggctacaagaaggtgatcaagaagcccatggacttcagcaccatccgggagaagctgagcagcggccagtaccccaacctggagacctttgccctggatgtgcggctggtgtttgacaactgtgagaccttcaatgaagatgacagcgacatcggccgggccggccacaacatgaggaagtactttgagaagaagtggacagacaccttcaaggtgtcctag

SEQ ID NO: 145384 - DNA, 432 bp, synthetic construct
  misc_feature 1..432: note = Description of Artificial Sequence: Synthetic coding sequence
  source 1..432: mol_type = other DNA
atggagagcggggagcggctgcccagcagcgctgccagcagcaccacccccaccagcagcagcacccccagcgtggcctctgtggtgtccaaaggaggcctgagcactggagtggccagcctgagcagcaccatcaacccctgtggccacctgttcagaacagctggggaccagcccttcaacctgagcacagtgtcctctgccttccccatggtgagccaccctgtgtttggcctgcacagcgccagcagcggccacagcgagtttggaggcctgggcaccctgggcacccccacagccctggccgcccacccccagctggccagcttccctggagctgagtggtggaggaccacagatgcccacaccaggactggagccaccttcttcccccccctgctgggcatcccccccctgtttgccccaccctag

SEQ ID NO: 145385 - DNA, 1563 bp, synthetic construct
  misc_feature 1..1563: note = Description of Artificial Sequence: Synthetic coding sequence
  source 1..1563: mol_type = other DNA
atggagagcggggagcggctgcccagcagcgctgccagcagcaccacccccaccagcagcagcacccccagcgtggcctctgtggtgtccaaaggaggcctgagcactggagtggccagcctgagcagcaccatcaacccctgtggggctgagtggtggaggaccacagatgcccacaccaggactggagccaccttcttcccccccctgctgggcatcccccccctgtttgcccccccagcccagaaccacgacagcagcagcttccacagcaggaccagcggcaagagcaacagaaatggacctgagaagggcgtgaatggcagcatcaatggcagcaacaccagctctgtgattggcatcaacacctctgtgctgagcaccacagccagcagctccatgggccagaccaagagcaccagcagcggcggcggcaacaggaagtgcaaccaggagcagagcaagaaccagcccctggatgcccgggtggacaagatcaaggacaagaagcccaggaagaaggccatggagagcagcagcaacagcgacagcgacagcggcaccagcagtgacaccagcagcgagggcatcagcagcagtgacagtgatgacctggaggaggatgaggaggaggaggaccagagcattgaggagagtgaagatgatgacagcgacagcgagagcgaggcccagcacaagagcaacaaccaggtgctgctgcacggcatcagtgaccccaaggcagatggccagaaggccacagagaaggcccaggagaagaggatccaccagcccctgcccctggccagcgagagccagacccacagcttccagagccagcagaagcagccccaggtgctgagccagcagctgcccttcatcttccagagcagccaggccaaggaggagagcgtgaacaagcacaccagcgtcatccagagcacaggcctggtgtccaatgtgaagcccctgagcctggtgaaccaggccaagaaggagacctacatgaagctgattgtgcccagcccagatgtgctgaaggccggcaacaagaacaccagcgaggagagcagcctgctgaccagcgagctgcggagcaagcgggagcagtacaagcaggccttccccagccagctgaagaagcaggagagcagcaagagcctgaagaaggtgattgctgccctgagcaaccccaaggccaccagcagcagccctgcccaccccaagcagaccctggagaacaaccaccccaaccccttcctgaccaatgccctgctgggcaaccaccagcccaacggggtcatccagagcgtcatccaggaggcccccctggccctgaccaccaagaccaagatgcagagcaagatcaatgaaaatattgctgctgccagcagcacccccttcagcagccctgtgaacctgagcaccagcggccgccgcaccccaggcaaccagacccctgtgatgcccagcgccagccccatcctgcacagccagggcaaggagaaggctgtgagcaacaacgtgaaccccaggaagatgatgaagaagaagatgaggtag

SEQ ID NO: 145386 - DNA, 3645 bp, synthetic construct
  misc_feature 1..3645: note = Description of Artificial Sequence: Synthetic coding sequence
  source 1..3645: mol_type = other DNA
atgggcgtggactttgatgtgaagaccttctgccacaacctgcgggccaccaagccaccctatgagtgccctgtggagacctgcaggaaggtgtacaagagctacagcggcatcgagtaccacctgtaccactatgaccatgacaaccccccaccaccccagcagacccccctgaggaagcacaagaagaagggccggcagagcaggcctgccaacaagcagagccccagccccagcgaggtgtcccagagccctggccgggaggtgatgtcctatgcccaggcccagaggatggtggaggtggacctgcacggccgggtgcaccgcatcagcatctttgacaacctggatgtggtgtctgaagatgaggaggcccctgaggaggccccagaaaatggcagcaacaaggaaaatacagagaccccagctgccacccccaagagcggcaagcacaagaacaaggagaagaggaaggacagcaaccaccaccaccaccacaacgtgtctgccagcaccacccccaagctgcctgaggtggtgtaccgggagctggagcaggacaccccagatgccccaccccggcccaccagctactaccgctacatcgagaagtctgctgaggagctggatgaggaggtggagtatgacatggatgaggaggactacatctggctggacatcatgaatgaaagaaggaagacagagggcgtgagccccatcccccaggagatctttgagtacctgatggaccggctggagaaggagagctactttgagagccacaacaagggggaccccaatgccctggtggatgaagatgctgtgtgctgcatctgcaatgatggagagtgccagaacagcaatgtcatcctcttctgtgacatgtgcaacctggccgtgcaccaggagtgctatggagtgccctacatccctgagggccagtggctgtgccgccgctgcctgcagagccccagcagagctgtggactgtgccctgtgccccaacaagggcggggccttcaagcagacagatgatggccgctgggcccacgtggtgtgtgccctgtggatccctgaggtgtgctttgccaacacagtgttcctggagcccatcgacagcattgagcacatccccccagcccgctggaagctgacctgctacatctgcaagcagaggggcagcggggcctgcatccagtgccacaaggccaactgctacacagccttccacgtgacctgtgcccagcaggccggcctgtacatgaagatggagcctgtgcgggagactggagccaacggcaccagcttctctgtgaggaagacagcctactgtgacatccacaccccacctggcagcgcccggcggctgcctgccctgagccacagcgagggggaggaggatgaagatgaggaggaggatgagggcaagggctggagcagcgagaaggtgaagaaggccaaggccaagagccgcatcaagatgaagaaggccaggaagatcctggccgagaagagagctgctgcccctgtggtgtctgtgccctgcatccccccccaccggctgagcaagatcaccaaccggctgaccatccagaggaagagccagttcatgcagaggctgcacagctactggaccctgaagaggcagagcagaaatggagtgcccctgctgcggcggctgcagacccacctgcagagccagaggaactgtgaccaggtgggccgggacagcgaggacaagaactgggccctgaaggagcagctgaagtcctggcagaggctgcggcatgacctggagcgggcccggctgctggtggagctgatcaggaagcgggagaagctgaagcgggagaccatcaaggtgcagcagatcgccatggagatgcagctgacccccttcctgatcctgctgaggaagaccctggagcagctgcaggagaaggacaccggcaacatcttcagcgagcctgtgcccctgtctgaggtgcctgactacctggaccacatcaagaagcccatggacttcttcaccatgaagcagaacctggaggcctaccgctacctgaactttgatgactttgaggaggacttcaacctgattgtgagcaactgcctgaagtacaatgccaaggacaccatcttctacagagctgctgtgcggctgcgggagcagggcggcgctgtgctgcggcaggcccggcggcaggccgagaagatgggcatcgactttgaaacaggcatgcacatcccccacagcctggccggagatgaggccacccaccacacagaagatgctgctgaggaggagcggctggtgctgctggagaaccagaagcacctgcctgtggaggagcagctgaagctgctgctggagcggctggatgaggtgaatgccagcaagcagagcgtgggccgcagcagaagagccaagatgatcaagaaggagatgacagccctgcggaggaagctggcccaccagcgggagaccggcagagatggccctgagagacatggccccagcagccggggcagcctgaccccccaccctgctgcctgtgacaaggatggccagacagacagcgctgctgaggagagcagcagccaggagaccagcaagggcctgggccccaacatgagcagcaccccagcccacgaggtgggccgccgcacctctgtgctcttcagcaagaagaaccccaagacagctggcccccccaagaggcctggccggccccccaagaaccgggagagccagatgacccccagccatggaggcagccctgtgggccccccccagctgcccatcatgagcagcctgcggcagaggaagaggggccgcagcccccggcccagcagcagcagtgacagcgacagcgacaagagcacagaagatcctcccatggacctgcctgccaacggcttcagcggcggcaaccagcctgtgaagaagagcttcctggtgtacagaaatgactgcagcctgcccaggagcagcagtgacagcgagagcagcagcagcagcagcagcagcgctgccagtgacaggaccagcaccacccccagcaagcagggccggggcaagcccagcttcagccggggcaccttccctgaggacagcagcgaggacaccagcggcacagaaaatgaggcctacagcgtgggcaccggccggggcgtgggccacagcatggtgaggaagagcctgggccgcggggccggctggctgtctgaagatgaggacagccccctggatgccctggacctggtgtgggccaagtgccggggctaccccagctacccagccctgatcatcgaccccaagatgccccgggagggcatgttccaccacggcgtgcccatccctgtgccccccctggaggtgctgaagctgggggagcagatgacccaggaggcccgggagcacctgtacctggtgctcttctttgacaacaagaggacctggcagtggctgcccaggaccaagctggtgcccctgggcgtgaaccaggacctggacaaggagaagatgctggagggcaggaagagcaacatcaggaagtctgtgcagatcgcctaccaccgggccctgcagcacaggagcaaggtgcagggcgagcagagcagcgagaccagtgacagcgactag

SEQ ID NO: 145387 - DNA, 3663 bp, synthetic construct
  misc_feature 1..3663: note = Description of Artificial Sequence: Synthetic coding sequence
  source 1..3663: mol_type = other DNA
atgggcgtggactttgatgtgaagaccttctgccacaacctgcgggccaccaagccaccctatgagtgccctgtggagacctgcaggaaggtgtacaagagctacagcggcatcgagtaccacctgtaccactatgaccatgacaaccccccaccaccccagcagacccccctgaggaagcacaagaagaagggccggcagagcaggcctgccaacaagcagagccccagccccagcgaggtgtcccagagccctggccgggaggtgatgtcctatgcccaggcccagaggatggtggaggtggacctgcacggccgggtgcaccgcatcagcatctttgacaacctggatgtggtgtctgaagatgaggaggcccctgaggaggccccagaaaatggcagcaacaaggaaaatacagagaccccagctgccacccccaagagcggcaagcacaagaacaaggagaagaggaaggacagcaaccaccaccaccaccacaacgtgtctgccagcaccacccccaagctgcctgaggtggtgtaccgggagctggagcaggacaccccagatgccccaccccggcccaccagctactaccgctacatcgagaagtctgctgaggagctggatgaggaggtggagtatgacatggatgaggaggactacatctggctggacatcatgaatgaaagaaggaagacagagggcgtgagccccatcccccaggagatctttgagtacctgatggaccggctggagaaggagagctactttgagagccacaacaagggggaccccaatgccctggtggatgaagatgctgtgtgctgcatctgcaatgatggagagtgccagaacagcaatgtcatcctcttctgtgacatgtgcaacctggccgtgcaccaggagtgctatggagtgccctacatccctgagggccagtggctgtgccgccgctgcctgcagagccccagcagagctgtggactgtgccctgtgccccaacaagggcggggccttcaagcagacagatgatggccgctgggcccacgtggtgtgtgccctgtggatccctgaggtgtgctttgccaacacagtgttcctggagcccatcgacagcattgagcacatccccccagcccgctggaagctgacctgctacatctgcaagcagaggggcagcggggcctgcatccagtgccacaaggccaactgctacacagccttccacgtgacctgtgcccagcaggccggcctgtacatgaagatggagcctgtgcgggagactggagccaacggcaccagcttctctgtgaggaagacagcctactgtgacatccacaccccacctggcagcgcccggcggctgcctgccctgagccacagcgagggggaggaggatgaagatgaggaggaggatgagggcaagggctggagcagcgagaaggtgaagaaggccaaggccaagagccgcatcaagatgaagaaggccaggaagatcctggccgagaagagagctgctgcccctgtggtgtctgtgccctgcatccccccccaccggctgagcaagatcaccaaccggctgaccatccagaggaagagccagttcatgcagaggctgcacagctactggaccctgaagaggcagagcagaaatggagtgcccctgctgcggcggctgcagacccacctgcagagccagaggaactgtgaccaggtgggccgggacagcgaggacaagaactgggccctgaaggagcagctgaagtcctggcagaggctgcggcatgacctggagcgggcccggctgctggtggagctgatcaggaagcgggagaagctgaagcgggagaccatcaaggtgcagcagatcgccatggagatgcagctgacccccttcctgatcctgctgaggaagaccctggagcagctgcaggagaaggacaccggcaacatcttcagcgagcctgtgcccctgtctgaggtgacagagctggatgaggtgcctgactacctggaccacatcaagaagcccatggacttcttcaccatgaagcagaacctggaggcctaccgctacctgaactttgatgactttgaggaggacttcaacctgattgtgagcaactgcctgaagtacaatgccaaggacaccatcttctacagagctgctgtgcggctgcgggagcagggcggcgctgtgctgcggcaggcccggcggcaggccgagaagatgggcatcgactttgaaacaggcatgcacatcccccacagcctggccggagatgaggccacccaccacacagaagatgctgctgaggaggagcggctggtgctgctggagaaccagaagcacctgcctgtggaggagcagctgaagctgctgctggagcggctggatgaggtgaatgccagcaagcagagcgtgggccgcagcagaagagccaagatgatcaagaaggagatgacagccctgcggaggaagctggcccaccagcgggagaccggcagagatggccctgagagacatggccccagcagccggggcagcctgaccccccaccctgctgcctgtgacaaggatggccagacagacagcgctgctgaggagagcagcagccaggagaccagcaagggcctgggccccaacatgagcagcaccccagcccacgaggtgggccgccgcacctctgtgctcttcagcaagaagaaccccaagacagctggcccccccaagaggcctggccggccccccaagaaccgggagagccagatgacccccagccatggaggcagccctgtgggccccccccagctgcccatcatgagcagcctgcggcagaggaagaggggccgcagcccccggcccagcagcagcagtgacagcgacagcgacaagagcacagaagatcctcccatggacctgcctgccaacggcttcagcggcggcaaccagcctgtgaagaagagcttcctggtgtacagaaatgactgcagcctgcccaggagcagcagtgacagcgagagcagcagcagcagcagcagcagcgctgccagtgacaggaccagcaccacccccagcaagcagggccggggcaagcccagcttcagccggggcaccttccctgaggacagcagcgaggacaccagcggcacagaaaatgaggcctacagcgtgggcaccggccggggcgtgggccacagcatggtgaggaagagcctgggccgcggggccggctggctgtctgaagatgaggacagccccctggatgccctggacctggtgtgggccaagtgccggggctaccccagctacccagccctgatcatcgaccccaagatgccccgggagggcatgttccaccacggcgtgcccatccctgtgccccccctggaggtgctgaagctgggggagcagatgacccaggaggcccgggagcacctgtacctggtgctcttctttgacaacaagaggacctggcagtggctgcccaggaccaagctggtgcccctgggcgtgaaccaggacctggacaaggagaagatgctggagggcaggaagagcaacatcaggaagtctgtgcagatcgcctaccaccgggccctgcagcacaggagcaaggtgcagggcgagcagagcagcgagaccagtgacagcgactag

SEQ ID NO: 145388 - DNA, 303 bp, synthetic construct
  misc_feature 1..303: note = Description of Artificial Sequence: Synthetic coding sequence
  source 1..303: mol_type = other DNA
atgggcgtggactttgatgtgaagaccttctgccacaacctgcgggccaccaagccaccctatgagtgccctgtggagacctgcaggaaggtgtacaagagctacagcggcatcgagtaccacctgtaccactatgaccatgacaaccccccaccaccccagcagacccccctgaggaagcacaagaagaagggccggcagagcaggcctgccaacaagcagagccccagccccagcgaggtgtcccagagccctggccgggaggtgatgtcctatgcccaggcccagaggatggtggagtag

SEQ ID NO: 145389 - DNA, 318 bp, synthetic construct
  misc_feature 1..318: note = Description of Artificial Sequence: Synthetic coding sequence
  source 1..318: mol_type = other DNA
atgggcgtggactttgatgtgaagaccttctgccacaacctgcgggccaccaagccaccctatgagtgccctgtggagacctgcaggaaggtgtacaagagctacagcggcatcgagtaccacctgtaccactatgaccatgacaaccccccaccaccccagcagacccccctgaggaagcacaagaagaagggccggcagagcaggcctgccaacaagcagagccccagccccagcgaggtgtcccagagccctggccgggaggtgatgtcctatgcccaggcccagaggatggtggaggtggacctgcacggctag

SEQ ID NO: 145390 - DNA, 3645 bp, synthetic construct; identical to SEQ ID NO: 145386
  misc_feature 1..3645: note = Description of Artificial Sequence: Synthetic coding sequence
  source 1..3645: mol_type = other DNA

SEQ ID NO: 145391 - DNA, 5409 bp, synthetic construct
  misc_feature 1..5409: note = Description of Artificial Sequence: Synthetic coding sequence
  source 1..5409: mol_type = other DNA
atggctgctgcccccacccagatcgaggccgagctgtactacctgattgcccgcttcctgcagagcggcccctgcaacaagagcgcccaggtgctggtgcaggagctggaggagcaccagctgatcccccggcggctggactgggagggcaaggagcaccggcgcagctttgaggacctggtggccgccaatgcccacatccccccagactacctgctgaagatctgtgaaagaattggccccctgctggacaaggagatcccccagagcgtgcctggggtgcagaccctgctgggcgtgggccggcagagcctgctgagagatgccaaggactgcaagagcaccctgtggaatggcagcgcctttgctgccctgcaccggggccggcccccagagctgcctgtgaactacgtgaagccacccaacgtggtgaacatcaccagcgcccggcagctgaccggctgcagccgcttcggccacatcttccccagcagcgcctaccagcacatcaagatgcacaagaggatcctgggccacctgagctctgtgtactgtgtggcctttgacagaagtggaagacgcatcttcaccggcagtgatgactgcctggtgaagatctgggccacagatgatggccgcctgctggccaccctgcggggccacagcgctgagatcagtgacatggctgtgaactatgagaacaccctgattgctgctggcagctgtgacaaggtggtgcgggtgtggtgcctgcggacctgtgcccctgtggccgtgctgcagggccacagcgccagcatcaccagcatccagttctgccccagcaccaagggcaccaaccgctacctgaccagcactggagcagatggcaccatctgcttctggcagtggcacgtgaagaccatgaagttccgggacaggcctgtgaagttcacagagaggagcaggcctggggtgcagatcagctgcagcagcttcagcagcggcggcatgttcatcaccaccggcagcacagaccacgtgatccgcatctactacctgggcagcgaggtgcctgagaagattgctgagctggagagccacacagacaaggtggtggccgtgcagttctgcaacaatggagacagcctgcgctttgtgtctggcagcagagatggaacagcccgcatctggcagtaccagcagcaggagtggaagagcatcgtgctggacatggccaccaagatgacaggcaacaacctgcccagcggggaggacaagatcaccaagctgaaggtgaccatggtggcctgggacagatatgacaccaccgtcatcacagctgtgaacaacttcctgctgaaggtgtggaacagcatcaccggccagctgctgcacaccctgagcggccatgatgatgaggtgtttgtgctggaggcccacccctttgaccagaggatcatcctgtctgctggccatgatggcaacatcttcatctgggacctggaccggggcaccaagatccggaactacttcaacatgattgagggccagggccatggagctgtgtttgactgcaagttctccccagatggcaaccactttgcctgcacagacagccacggccacctgctgctgtttggcttcggctgcagcaagtactatgagaagatcccagaccagatgttcttccacacagactaccggcccctcatcagagatgccaacaactacgtgctggatgagcagacccagcaggccccccacctgatgcccccacccttcctggtggatgtggatggcaacccccaccccaccaagttccagaggctggtgcccggccgggagaactgcaaggatgagcagctgatcccccagctgggctacgtggccaatggagatggagaggtggtggagcaggtgattggccagcagaccaatgaccaggatgagagcatcctggatggcatcatccgggagctgcagcgggagcaggacctgcggctcatcaatgaaggagatgtgccccacctgcctgtgaacagagcctacagcgtgaatggagccctgcggagccccaacatggacatcagcagcagccccaacatccggctgcggcggcacagcagccagattgaaggagtgcggcagatgcacaacaatgcccccaggagccagatggccacagagcgggacctgatggcctggagcagaagagtggtggtgaatgagctgaacaacggggtgtcccgggtgcaggaggagtgcaggacagccaagggggacatcgagatcagcctgtacacagtggagaagaagaagaagcccagctacaccacccagagaaatgactatgagcccagctgtggccgcagcctgcggaggacccagaggaagaggcagcacacctaccagaccaggagcaacatcgagcacaacagccaggccagctgccagaacagcggcgtgcaggaggacagcgacagcagcagcgaggaggatgaaacagtgggcaccagtgatgcctctgtggaggaccctgtggtggagtggcagagcgagagcagcagcagtgacagcagcagcgagtacagcgactggacagcagatgctggcatcaacctgcagccccccaagaggcagacccggcagaccaccaggaagatctgcagcagcagtgatgaggagaacctgaagagcctggaggagcggcagaagaagcccaagcagaccaggaagaagaagggcggcctggtgtccattgctggggagcccaatgaggagtggtttgccccccagtggatcctggacaccatcccccggcgcagcccctttgtgccccagatgggagatgagctgatctacttccggcagggccacgaggcctacgtgcgggctgtgaggaagagcaagatctacagcgtgaacctgcagaagcagccctggaacaagatggacctgcgggagcaggagtttgtgaagatcgtgggcatcaagtatgaggtgggcccccccaccctgtgctgcctgaagctggccttcctggaccccatcagcggcaagatgaccggggagagcttcagcatcaagtaccatgacatgccagatgtgattgacttcctggtgctgcaccagttctacaatgaggccaaggagaggaactggcagatcggggaccgcttccgcagcatcattgatgatgcctggtggtttggcaccgtggagagccagcagcccttccagcctgagtacccagacagcagcttccagtgctacagcgtgcactgggacaacaatgaaagagagaagatgagcccctgggacatggagcccatccctgagggcacagccttcccagatgaggtgggcgccggcgtgcctgtgtcccaggaggagctgacagccctgctgtacaagccccaggagggggagtggggcgcccacagcagagatgaggagtgtgagagggtcatccagggcatcaaccacctgctgagcctggactttgccagcccctttgctgtgcctgtggacctgagcgcctaccccctgtactgcaccgtggtggcctaccccacagacctgaacaccatcagaagaaggctggagaaccgcttctaccgccgcatcagcgccctgatgtgggaggtgcgctacatcgagcacaatgcccggaccttcaatgaaccagacagccccatcgtgaaggccgccaagatcgtgacagatgtgctgctgcgcttcatcggggaccagagctgcacagacatcctggacacctacaacaagatcaaggccgaggagaggaacagcacagatgctgaggaggacacagaaattgtggacctggacagtgatggccctggcaccagcagcggcaggaaggtgaagtgccggggccggcggcagagcctgaagtgcaacccagatgcctggaagaagcagtgcaaggagctgctgagcctcatctatgagcgggaggacagcgagcccttccggcagcctgctgacctgctgagctacccaggccaccaggagcaggagggggagagcagcgagagcgtggtgcctgagcggcagcaggacagcagcctgtctgaggactaccaggacgtcatcgacacccctgtggacttcagcacagtgaaggagaccctggaggccggcaactacggcagccccctggagttctacaaggatgtgcggcagatcttcaacaacagcaaggcctacaccagcaacaagaagagccgcatctacagcatgatgctgcggctgagcgccctgtttgagagccacatcaagaacatcatcagcgagtacaagagcgccatccagagccagaagagaagaagaccccgctacaggaagaggctgcggagcagcagcagcagcctgagcagcagcggggcccccagccccaagggcaagcagaagcagatgaagctgcagcccaagaatgaccagaacacctctgtgagccacgcccggaccagcagccccttcagcagccctgtgtctgatgctgctgagggcctgagcctgtacctgctggatgatgagccagatggccccttcagcagcagcagctttggaggctacagccgcagcggcaacagccatgaccccgggaaggccaagagcttcaggaacagagtgctgcctgtgaagcaggaccacagcctggatggccccctgaccaatggagatggccgggagcccaggacaggcatcaagaggaagctgctgagcgcctctgaagaagatgagaacatgggcggggaggacaaggagaagaaggagaccaaggagaagagccacctgagcaccagcgagagcggggagctgggcagcagcctgagcagcgagagcacctgtggcagtgacagcgacagcgagagcaccagcaggacagaccaggactatgtggatggagaccatgactacagcaagttcatccagacccggcccaagaggaagctgaggaagcagcacggcaatggcaagaggaactggaagacccggggcaccggcggccggggccgctggggccgctggggccgctggagcagaggaggccggggccggggcggccggggccggggcagccggggccggggcggcggcggcacccggggccggggccggggccggggcggccgcggggccagcagaggagccacccgggccaagagggccagaattgctgatgatgaatttgacaccatgttcagcggccgcttcagccggctgccccgcatcaagaccaggaaccagggccgcaggacagtgctgtacaatgatgacagcgacaatgacaactttgtgtccacagaggaccccctgaacctgggcaccagccgcagcggccgggtgaggaagatgacagagaaggcccgggtgagccacctgatgggctggaactactag

SEQ ID NO: 145392 - DNA, 2406 bp, synthetic construct
  misc_feature 1..2406: note = Description of Artificial Sequence: Synthetic coding sequence
  source 1..2406: mol_type = other DNA
atgctgcagaatgtgaccccccacaacaagctgcccggggagggcaatgccggcctgctgggcctgggccctgaggccgccgcccctgggaagaggatcaggaagcccagcctgctgtatgagggctttgagagccccaccatggcctctgtgcctgccctgcagctgaccccagccaaccccccacctcctgaggtgagcaaccccaagaagccaggccgggtgaccaaccagctgcagtacctgcacaaggtggtgatgaaggccctgtggaagcaccagtttgcctggcccttccggcagcctgtggatgctgtgaagctgggcctgcctgactaccacaagatcatcaagcagcccatggacatgggcaccatcaagaggcggctggagaacaactactactgggccgccagcgagtgcatgcaggacttcaacaccatgttcaccaactgctacatctacaacaagcccacagatgacatcgtgctgatggcccagaccctggagaagatcttcctgcagaaggtggcctccatgccccaggaggagcaggagctggtggtgaccatccccaagaacagccacaagaagggggccaagctggccgccctgcagggctctgtgaccagcgcccaccaggtgcctgctgtgtcctctgtgagccacacagccctgtacaccccacctcctgagatccccaccaccgtgctgaacatcccccaccccagcgtcatcagcagccccctgctgaagagcctgcacagcgctggcccccccctgctggccgtgacagctgcccccccagcccagcccctggccaagaagaagggcgtgaagaggaaggctgacaccaccacccccacccccacagccatcctggcccctggcagccctgccagccccccaggcagcctggagcccaaggccgcccggctgccccccatgagaagagagagcggccggcccatcaagccacccaggaaggacctgcctgacagccagcagcagcaccagagcagcaagaagggcaagctgtctgagcagctgaagcactgcaatggcatcctgaaggagctgctgagcaagaagcacgccgcctatgcctggcccttctacaagcctgtggatgccagcgccctgggcctgcatgactaccatgacatcatcaagcaccccatggacctgagcacagtgaagaggaagatggagaacagagactacagagatgcccaggagtttgctgctgatgtgcggctgatgttcagcaactgctacaagtacaaccccccagaccatgatgtggtggccatggccaggaagctgcaggatgtgtttgagttccgctatgccaagatgccagatgagcccctggagcccggccccctgcctgtgtccacagccatgcctcctggcctggccaagagcagcagcgagagcagcagcgaggagagcagcagcgagagcagcagcgaggaggaggaggaggaggatgaggaggatgaggaggaggaggagagcgagagcagtgacagcgaggaggagcgggcccaccggctggccgagctgcaggagcagctgcgggctgtgcatgagcagctggccgccctgagccagggccccatcagcaagcccaagaggaagcgggagaagaaggagaagaagaagaagaggaaggccgagaagcaccggggccgggccggggctgatgaagatgacaagggcccccgggcccccaggcctccccagcccaagaagagcaagaaggccagcggcagcggcggcggcagcgctgccctgggccccagcggcttcggccccagcggcggcagcggcaccaagctgcccaagaaggccaccaagacagcccccccagccctgcccaccggctatgattctgaggaggaggaggagagccggcccatgtcctatgatgagaagaggcagctgagcctggacatcaacaagctgcccggggagaagctgggccgggtggtgcacatcatccaggcccgggagcccagcctgcgggacagcaaccctgaggagattgaaattgactttgagaccctgaagcccagcaccctgcgggagctggagcgctacgtgctgagctgcctgaggaagaagcccaggaagccctacaccatcaagaagcctgtgggcaagaccaaggaggagctggccctggagaagaagcgggagctggagaagaggctgcaggatgtgtctggccagctgaacagcaccaagaagccacccaagaaggccaatgagaagacagagagcagcagcgcccagcaggtggccgtgtcccggctgagcgccagcagcagcagcagtgacagcagcagcagcagcagcagcagcagcagcagtgacaccagtgacagcgacagcggctag

SEQ ID NO: 145393 - DNA, 2406 bp, synthetic construct; identical to SEQ ID NO: 145392
  misc_feature 1..2406: note = Description of Artificial Sequence: Synthetic coding sequence
  source 1..2406: mol_type = other DNA

SEQ ID NO: 145394 - DNA, 2406 bp, synthetic construct; identical to SEQ ID NO: 145392
  misc_feature 1..2406: note = Description of Artificial Sequence: Synthetic coding sequence
  source 1..2406: mol_type = other DNA

SEQ ID NO: 145395 - DNA, 2511 bp, synthetic construct
  misc_feature 1..2511: note = Description of Artificial Sequence: Synthetic coding sequence
  source 1..2511: mol_type = other DNA
atgctgcagaatgtgaccccccacaacaagctgcccggggagggcaatgccggcctgctgggcctgggccctgaggccgccgcccctgggaagaggatcaggaagcccagcctgctgtatgagggctttgagagccccaccatggcctctgtgcctgccctgcagctgaccccagccaaccccccacctcctgaggtgagcaaccccaagaagccaggccgggtgaccaaccagctgcagtacctgcacaaggtggtgatgaaggccctgtggaagcaccagtttgcctggcccttccggcagcctgtggatgctgtgaagctgggcctgcctgactaccacaagatcatcaagcagcccatggacatgggcaccatcaagaggcggctggagaacaactactactgggccgccagcgagtgcatgcaggacttcaacaccatgttcaccaactgctacatctacaacaagcccacagatgacatcgtgctgatggcccagaccctggagaagatcttcctgcagaaggtggcctccatgccccaggaggagcaggagctggtggtgaccatccccaagaacagccacaagaagggggccaagctggccgccctgcagggctctgtgaccagcgcccaccaggtgcctgctgtgtcctctgtgagccacacagccctgtacaccccacctcctgagatccccaccaccgtgctgaacatcccccaccccagcgtcatcagcagccccctgctgaagagcctgcacagcgctggcccccccctgctggccgtgacagctgcccccccagcccagcccctggccaagaagaagggcgtgaagaggaaggctgacaccaccacccccacccccacagccatcctggcccctggcagccctgccagccccccaggcagcctggagcccaaggccgcccggctgccccccatgagaagagagagcggccggcccatcaagccacccaggaaggacctgcctgacagccagcagcagcaccagagcagcaagaagggcaagctgtctgagcagctgaagcactgcaatggcatcctgaaggagctgctgagcaagaagcacgccgcctatgcctggcccttctacaagcctgtggatgccagcgccctgggcctgcatgactaccatgacatcatcaagcaccccatggacctgagcacagtgaagaggaagatggagaacagagactacagagatgcccaggagtttgctgctgatgtgcggctgatgttcagcaactgctacaagtacaaccccccagaccatgatgtggtggccatggccaggaagctgcaggatgtgtttgagttccgctatgccaagatgccagatgagcccctggagcccggccccctgcctgtgtccacagccatgcctcctggcctggccaagagcagcagcgagagcagcagcgaggagagcagcagcgagagcagcagcgaggaggaggaggaggaggatgaggaggatgaggaggaggaggagagcgagagcagtgacagcgaggaggagcgggcccaccggctggccgagctgcaggagcagctgcgggctgtgcatgagcagctggccgccctgagccagggccccatcagcaagcccaagaggaagcgggagaagaaggagaagaagaagaagaggaaggccgagaagcaccggggccgggccggggctgatgaagatgacaagggcccccgggcccccaggcctccccagcccaagaagagcaagaaggccagcggcagcggcggcggcagcgctgccctgggccccagcggcttcggccccagcggcggcagcggcaccaagctgcaggccggcgtgcagtggagggacctgggcctgctgcagccccccctgctgggcttcaagcgcttcagctgcctgagcctgcccagcagccaggactaccgcctgcccaagaaggccaccaagacagcccccccagccctgcccaccggctatgacagcgaggaggaggaggagagccggcccatgtcctatgatgagaagaggcagctgagcctggacatcaacaagctgcctggagagaagctgggccgggtggtgcacatcatccaggcccgggagcccagcctgcgggacagcaaccctgaggagattgaaattgactttgagaccctgaagcccagcaccctgcgggagctggagagatatgtgctgagctgcctgaggaagaagcccaggaagccctacaccatcaagaagcctgtgggcaagaccaaggaggagctggccctggagaagaagcgggagctggagaagaggctgcaggatgtgtctggccagctgaacagcaccaagaagccacccaagaaggccaatgagaagacagagagcagcagcgcccagcaggtggccgtgtcccggctgagcgccagcagcagcagcagtgacagcagcagcagcagcagcagcagcagcagcagtgacaccagtgacagcgacagcggctag

SEQ ID NO: 145396 - DNA, 2511 bp, synthetic construct; identical to SEQ ID NO: 145395
  misc_feature 1..2511: note = Description of Artificial Sequence: Synthetic coding sequence
  source 1..2511: mol_type = other DNA

SEQ ID NO: 145397 - DNA, 2511 bp, synthetic construct; identical to SEQ ID NO: 145395
  misc_feature 1..2511: note = Description of Artificial Sequence: Synthetic coding sequence
  source 1..2511: mol_type = other DNA

SEQ ID NO: 145398 - DNA, 2406 bp, synthetic construct; identical to SEQ ID NO: 145392
  misc_feature 1..2406: note = Description of Artificial Sequence: Synthetic coding sequence
  source 1..2406: mol_type = other DNA

SEQ ID NO: 145399 - DNA, 2406 bp, synthetic construct; identical to SEQ ID NO: 145392
  misc_feature 1..2406: note = Description of Artificial Sequence: Synthetic coding sequence
  source 1..2406: mol_type = other DNA

SEQ ID NO: 145400 - DNA, 891 bp, synthetic construct
  misc_feature 1..891: note = Description of Artificial Sequence: Synthetic coding sequence
  source 1..891: mol_type = other DNA
tgaagacccctgggcgtgcagcagcccggggcccggctgcccggggagggcaatgccggcctgctgggcctgggccctgaggccgccgcccctgggaagaggatcaggaagcccagcctgctgtatgagggctttgagagccccaccatggcctctgtgcctgccctgcagctgaccccagccaaccccccacctcctgaggtgagcaaccccaagaagccaggccgggtgaccaaccagctgcagtacctgcacaaggtggtgatgaaggccctgtggaagcaccagtttgcctggcccttccggcagcctgtggatgctgtgaagctgggcctgcctgactaccacaagatcatcaagcagcccatggacatgggcaccatcaagaggcggctggagaacaactactactgggccgccagcgagtgcatgcaggacttcaacaccatgttcaccaactgctacatctacaacaagcccacagatgacatcgtgctgatggcccagaccctggagaagatcttcctgcagaaggtggcctccatgccccaggaggagcaggagctggtggtgaccatccccaagaacagccacaagaagggggccaagctggccgccctgcagggctctgtgaccagcgcccaccaggtgcctgctgtgtcctctgtgagccacacagccctgtacaccccacctcctgagatccccaccaccgtgctgaacatcccccaccccagcgtcatcagcagccccctgctgaagagcctgcacagcgctggcccccccctgctggccgtgacagctgcccccccagcccagcccctggccaagaagaagggcgtgaagaggaaggctgacaccaccacccccacccccacagccatcctgtag

SEQ ID NO: 145401 - DNA, 2406 bp, synthetic construct
  misc_feature 1..2406: note = Description of Artificial Sequence: Synthetic coding sequence
  source 1..2406: mol_type = other DNA
atgctgcagaatgtgaccccccacaacaagctgcccggggagggcaatgccggcctgctgggcctgggccctgaggccgccgcccctgggaagaggatcaggaagcccagcctgctgtatgagggctttgagagccccaccatggcctctgtgcctgccctgcagctgaccccagccaaccccccacctcctgaggtgagcaaccccaagaagccaggccgggtgaccaaccagctgcagtacctgcacaaggtggtgatgaaggccctgtggaagcaccagtttgcctggcccttccggcagcctgtggatgctgtgaagctgggcctgcctgactaccacaagatcatcaagcagcccatggacatgggcaccatcaagaggcggctggagaacaactactactgggccgccagcgagtgcatgcaggacttcaacaccatgttcaccaactgctacatctacaacaagcccacagatgacatcgtgctgatggcccagaccctggagaagatcttcctgcagaaggtggcctccatgccccaggaggagcaggagctggtggtgaccatccccaagaacagccacaagaagggggccaagctggccgccctgcagggctctgtgaccagcgcccaccaggtgcctgctgtgtcctctgtgagccacacagccctgtacaccccacctcctgagatccccaccaccgtcttcaacatcccccaccccagcgtcatcagcagccccctgctgaagagcctgcacagcgctggcccccccctgctggccgtgacagctgcccccccagcccagcccctggccaagaagaagggcgtgaagaggaaggctgacaccaccacccccacccccacagccatcctggcccctggcagccctgccagccccccaggcagcctggagcccaaggccgcccggctgccccccatgagaagagagagcggccggcccatcaagccacccaggaaggacctgcctgacagccagcagcagcaccagagcagcaagaagggcaagctgtctgagcagctgaagcactgcaatggcatcctgaaggagctgctgagcaagaagcacgccgcctatgcctggcccttctacaagcctgtggatgccagcgccctgggcctgcatgactaccatgacatcatcaagcaccccatggacctgagcacagtgaagaggaagatggagaacagagactacagagatgcccaggagtttgctgctgatgtgcggctgatgttcagcaactgctacaagtacaaccccccagaccatgatgtggtggccatggccaggaagctgcaggatgtgtttgagttccgctatgccaagatgccagatgagcccctggagcccggccccctgcctgtgtccacagccatgcctcctggcctggccaagagcagcagcgagagcagcagcgaggagagcagcagcgagagcagcagcgaggaggaggaggaggaggatgaggaggatgaggaggaggaggagagcgagagcagtgacagcgaggaggagcgggcccaccggctggccgagctgcaggagcagctgcgggctgtgcatgagcagctggccgccctgagccagggccccatcagcaagcccaagaggaagcgggagaagaaggagaagaagaagaagaggaaggccgagaagcaccggggccgggccggggctgatgaagatgacaagggcccccgggcccccaggcctccccagcccaagaagagcaagaaggccagcggcagcggcggcggcagcgctgccctgggccccagcggcttcggccccagcggcggcagcggcaccaagctgcccaagaaggccaccaagacagcccccccagccctgcccaccggctatgattctgaggaggaggaggagagccggcccatgtcctatgatgagaagaggcagctgagcctggacatcaacaagctgcccggggagaagctgggccgggtggtgcacatcatccaggcccgggagcccagcctgcgggacagcaaccctgaggagattgaaattgactttgagaccctgaagcccagcaccctgcgggagctggagcgctacgtgctgagctgcctgaggaagaagcccaggaagccctacaccatcaagaagcctgtgggcaagaccaaggaggagctggccctggagaagaagcgggagctggagaagaggctgcaggatgtgtctggccagctgaacagcaccaagaagccacccaagaaggccaatgagaagacagagagcagcagcgcccagcaggtggccgtgtcccggctgagcgccagcagcagcagcagtgacagcagcagcagcagcagcagcagcagcagcagtgacaccagtgacagcgacagcggctag

SEQ ID NO: 145402 - DNA, 1842 bp, synthetic construct
  misc_feature 1..1842: note = Description of Artificial Sequence: Synthetic coding sequence
  source 1..1842: mol_type = other DNA
atgctgcagaatgtgaccccccacaacaagctgcccggggagggcaatgccggcctgctgggcctgggccctgaggccgccgcccctgggaagaggatcaggaagcccagcctgctgtatgagggctttgagagccccaccatggcctctgtgcctgccctgcagctgaccccagccaaccccccacctcctgaggtgagcaaccccaagaagccaggccgggtgaccaaccagctgcagtacctgcacaaggtggtgatgaaggccctgtggaagcaccagtttgcctggcccttccggcagcctgtggatgctgtgaagctgggcctgcctgactaccacaagatcatcaagcagcccatggacatgggcaccatcaagaggcggctggagaacaactactactgggccgccagcgagtgcatgcaggacttcaacaccatgttcaccaactgctacatctacaacaagcccacagatgacatcgtgctgatggcccagaccctggagaagatcttcctgcagaaggtggcctccatgccccaggaggagcaggagctggtggtgaccatccccaagaacagccacaagaagggggccaagctggccgccctgcagggctctgtgaccagcgcccaccaggtgcctgctgtgtcctctgtgagccacacagccctgtacaccccacctcctgagatccccaccaccgtgctgaacatcccccaccccagcgtcatcagcagccccctgctgaagagcctgcacagcgctggcccccccctgctggccgtgacagctgcccccccagcccagcccctggccaagaagaagggcgtgaagaggaaggctgacaccaccacccccacccccacagccatcctggcccctggcagccctgccagccccccaggcagcctggagcccaaggccgcccggctgccccccatgagaagagagagcggccggcccatcaagccacccaggaaggacctgcctgacagccagcagcagcaccagagcagcaagaagggcaagctgtctgagcagctgaagcactgcaatggcatcctgaaggagctgctgagcaagaagcacgccgcctatgcctggcccttctacaagcctgtggatgccagcgccctgggcctgcatgactaccatgacatcatcaagcaccccatggacctgagcacagtgaagaggaagatggagaacagagactacagagatgcccaggagtttgctgctgatgtgcggctgatgttcagcaactgctacaagtacaaccccccagaccatgatgtggtggccatggccaggaagctgcaggatgtgtttgagttccgctatgccaagatgccagatgagcccctggagcccggccccctgcctgtgtccacagccatgcctcctggcctggccaagagcagcagcgagagcagcagcgaggagagcagcagcgagagcagcagcgaggaggaggaggaggaggatgaggaggatgaggaggaggaggagagcgagagcagtgacagcgaggaggagcgggcccaccggctggccgagctgcaggagcagctgcgggctgtgcatgagcagctggccgccctgagccagggccccatcagcaagcccaagaggaagcgggagaagaaggagaagaagaagaagaggaaggccgagaagcaccggggccgggccggggctgatgaagatgacaagggcccccgggcccccaggcctccccagcccaagaagagcaagaaggccagcggcagcggcggcggcagcgctgccctgggccccagcggcttcggccccagcggcggcagcggcacctag

SEQ ID NO: 145403 - DNA, 1842 bp, synthetic construct; identical to SEQ ID NO: 145402
  misc_feature 1..1842: note = Description of Artificial Sequence: Synthetic coding sequence
  source 1..1842: mol_type = other DNA

SEQ ID NO: 145404 - DNA, 987 bp, synthetic construct
  misc_feature 1..987: note = Description of Artificial Sequence: Synthetic coding sequence
  source 1..987: mol_type = other DNA
tgagccaagagcagcagcgagagcagcagcgaggagagcagcagcgagagcagcagcgaggaggaggaggaggaggatgaagatgaggaggaggaggagagcgagagcagtgacagcgaggaggagcgggcccaccggctggccgagctgcaggagcagctgcgggctgtgcatgagcagctggccgccctgagccagggccccatcagcaagcccaagaggaagcgggagaagaaggagaagaagaagaagaggaaggccgagaagcaccggggccgggccggggctgatgaagatgacaagggcccccgggccccccggcccccccagcccaagaagagcaagaaggccagcggcagcggcggcggcagcgctgccctgggccccagcggcttcggccccagcggcggcagcggcaccaagctgcccaagaaggccaccaagacagcccccccagccctgcccaccggctatgacagcgaggaggaggaggagagccggcccatgtcctatgatgagaagaggcagctgagcctggacatcaacaagctgcctggagagaagctgggccgggtggtgcacatcatccaggcccgggagcccagcctgcgggacagcaaccctgaggagattgaaattgactttgagaccctgaagcccagcaccctgcgggagctggagagatatgtgctgagctgcctgaggaagaagcccaggaagccctacaccatcaagaagcctgtgggcaagaccaaggaggagctggccctggagaagaagcgggagctggagaagaggctgcaggatgtgtctggccagctgaacagcaccaagaagccacccaagaaggccaatgagaagacagagagcagcagcgcccagcaggtggccgtgtcccggctgagcgccagcagcagcagcagtgacagcagcagcagcagcagcagcagcagcagcagtgacaccagtgacagcgacagcggctag

SEQ ID NO: 145405 - DNA, 1947 bp, synthetic construct
  misc_feature 1..1947: note = Description of Artificial Sequence: Synthetic coding sequence
  source 1..1947: mol_type = other DNA
atgctgcagaatgtgaccccccacaacaagctgcccggggagggcaatgccggcctgctgggcctgggccctgaggccgccgcccctgggaagaggatcaggaagcccagcctgctgtatgagggctttgagagccccaccatggcctctgtgcctgccctgcagctgaccccagccaaccccccacctcctgaggtgagcaaccccaagaagccaggccgggtgaccaaccagctgcagtacctgcacaaggtggtgatgaaggccctgtggaagcaccagtttgcctggcccttccggcagcctgtggatgctgtgaagctgggcctgcctgactaccacaagatcatcaagcagcccatggacatgggcaccatcaagaggcggctggagaacaactactactgggccgccagcgagtgcatgcaggacttcaacaccatgttcaccaactgctacatctacaacaagcccacagatgacatcgtgctgatggcccagaccctggagaagatcttcctgcagaaggtggcctccatgccccaggaggagcaggagctggtggtgaccatccccaagaacagccacaagaagggggccaagctggccgccctgcagggctctgtgaccagcgcccaccaggtgcctgctgtgtcctctgtgagccacacagccctgtacaccccacctcctgagatccccaccaccgtgctgaacatcccccaccccagcgtcatcagcagccccctgctgaagagcctgcacagcgctggcccccccctgctggccgtgacagctgcccccccagcccagcccctggccaagaagaagggcgtgaagaggaaggctgacaccaccacccccacccccacagccatcctggcccctggcagccctgccagccccccaggcagcctggagcccaaggccgcccggctgccccccatgagaagagagagcggccggcccatcaagccacccaggaaggacctgcctgacagccagcagcagcaccagagcagcaagaagggcaagctgtctgagcagctgaagcactgcaatggcatcctgaaggagctgctgagcaagaagcacgccgcctatgcctggcccttctacaagcctgtggatgccagcgccctgggcctgcatgactaccatgacatcatcaagcaccccatggacctgagcacagtgaagaggaagatggagaacagagactacagagatgcccaggagtttgctgctgatgtgcggctgatgttcagcaactgctacaagtacaaccccccagaccatgatgtggtggccatggccaggaagctgcaggatgtgtttgagttccgctatgccaagatgccagatgagcccctggagcccggccccctgcctgtgtccacagccatgcctcctggcctggccaagagcagcagcgagagcagcagcgaggagagcagcagcgagagcagcagcgaggaggaggaggaggaggatgaggaggatgaggaggaggaggagagcgagagcagtgacagcgaggaggagcgggcccaccggctggccgagctgcaggagcagctgcgggctgtgcatgagcagctggccgccctgagccagggccccatcagcaagcccaagaggaagcgggagaagaaggagaagaagaagaagaggaaggccgagaagcaccggggccgggccggggctgatgaagatgacaagggcccccgggcccccaggcctccccagcccaagaagagcaagaaggccagcggcagcggcggcggcagcgctgccctgggccccagcggcttcggccccagcggcggcagcggcaccaagctgcaggccggcgtgcagtggagggacctgggcctgctgcagccccccctgctgggcttcaagcgcttcagctgcctgagcctgcccagcagccaggactactag

SEQ ID NO: 145406 - DNA, 2424 bp, synthetic construct
  misc_feature 1..2424: note = Description of Artificial Sequence: Synthetic coding sequence
  source 1..2424: mol_type = other DNA
tgaaatggaggcggcggcagcgccacagcccggggcggggagtaccgcctgcccggggagggcaatgccggcctgctgggcctgggccctgaggccgccgcccctgggaagaggatcaggaagcccagcctgctgtatgagggctttgagagccccaccatggcctctgtgcctgccctgcagctgaccccagccaaccccccacctcctgaggtgagcaaccccaagaagccaggccgggtgaccaaccagctgcagtacctgcacaaggtggtgatgaaggccctgtggaagcaccagtttgcctggcccttccggcagcctgtggatgctgtgaagctgggcctgcctgactaccacaagatcatcaagcagcccatggacatgggcaccatcaagaggcggctggagaacaactactactgggccgccagcgagtgcatgcaggacttcaacaccatgttcaccaactgctacatctacaacaagcccacagatgacatcgtgctgatggcccagaccctggagaagatcttcctgcagaaggtggcctccatgccccaggaggagcaggagctggtggtgaccatccccaagaacagccacaagaagggggccaagctggccgccctgcagggctctgtgaccagcgcccaccaggtgcctgctgtgtcctctgtgagccacacagccctgtacaccccacctcctgagatccccaccaccgtcttcaacatcccccaccccagcgtcatcagcagccccctgctgaagagcctgcacagcgctggcccccccctgctggccgtgacagctgcccccccagcccagcccctggccaagaagaagggcgtgaagaggaaggctgacaccaccacccccacccccacagccatcctggcccctggcagccctgccagccccccaggcagcctggagcccaaggccgcccggctgccccccatgagaagagagagcggccggcccatcaagccacccaggaaggacctgcctgacagccagcagcagcaccagagcagcaagaagggcaagctgtctgagcagctgaagcactgcaatggcatcctgaaggagctgctgagcaagaagcacgccgcctatgcctggcccttctacaagcctgtggatgccagcgccctgggcctgcatgactaccatgacatcatcaagcaccccatggacctgagcacagtgaagaggaagatggagaacagagactacagagatgcccaggagtttgctgctgatgtgcggctgatgttcagcaactgctacaagtacaaccccccagaccatgatgtggtggccatggccaggaagctgcaggatgtgtttgagttccgctatgccaagatgccagatgagcccctggagcccggccccctgcctgtgtccacagccatgcctcctggcctggccaagagcagcagcgagagcagcagcgaggagagcagcagcgagagcagcagcgaggaggaggaggaggaggatgaggaggatgaggaggaggaggagagcgagagcagtgacagcgaggaggagcgggcccaccggctggccgagctgcaggagcagctgcgggctgtgcatgagcagctggccgccctgagccagggccccatcagcaagcccaagaggaagcgggagaagaaggagaagaagaagaagaggaaggccgagaagcaccggggccgggccggggctgatgaagatgacaagggcccccgggcccccaggcctccccagcccaagaagagcaagaaggccagcggcagcggcggcggcagcgctgccctgggccccagcggcttcggccccagcggcggcagcggcaccaagctgcccaagaaggccaccaagacagcccccccagccctgcccaccggctatgattctgaggaggaggaggagagccggcccatgtcctatgatgagaagaggcagctgagcctggacatcaacaagctgcccggggagaagctgggccgggtggtgcacatcatccaggcccgggagcccagcctgcgggacagcaaccctgaggagattgaaattgactttgagaccctgaagcccagcaccctgcgggagctggagcgctacgtgctgagctgcctgaggaagaagcccaggaagccctacaccatcaagaagcctgtgggcaagaccaaggaggagctggccctggagaagaagcgggagctggagaagaggctgcaggatgtgtctggccagctgaacagcaccaagaagccacccaagaaggccaatgagaagacagagagcagcagcgcccagcaggtggccgtgtcccggctgagcgccagcagcagcagcagtgacagcagcagcagcagcagcagcagcagcagcagtgacaccagtgacagcgacagcggctag

SEQ ID NO: 145407 - DNA, 891 bp, synthetic construct
  misc_feature 1..891: note = Description of Artificial Sequence: Synthetic coding sequence
  source 1..891: mol_type = other DNA
tgaagacccctgggcgtgcagcagcccggggcccggctgcccggggagggcaatgccggcctgctgggcctgggccctgaggccgccgcccctgggaagaggatcaggaagcccagcctgctgtatgagggctttgagagccccaccatggcctctgtgcctgccctgcagctgaccccagccaaccccccacctcctgaggtgagcaaccccaagaagccaggccgggtgaccaaccagctgcagtacctgcacaaggtggtgatgaaggccctgtggaagcaccagtttgcctggcccttccggcagcctgtggatgctgtgaagctgggcctgcctgactaccacaagatcatcaagcagcccatggacatgggcaccatcaagaggcggctggagaacaactactactgggccgccagcgagtgcatgcaggacttcaacaccatgttcaccaactgctacatctacaacaagcccacagatgacatcgtgctgatggcccagaccctggagaagatcttcctgcagaaggtggcctccatgccccaggaggagcaggagctggtggtgaccatccccaagaacagccacaagaagggggccaagctggccgccctgcagggctctgtgaccagcgcccaccaggtgcctgctgtgtcctctgtgagccacacagccctgtacaccccacctcctgagatccccaccaccgtcttcaacatcccccaccccagcgtcatcagcagccccctgctgaagagcctgcacagcgctggcccccccctgctggccgtgacagctgcccccccagcccagcccctggccaagaagaagggcgtgaagaggaaggctgacaccaccacccccacccccacagccatcctgtag

SEQ ID NO: 145408 - DNA, 2265 bp, synthetic construct
  misc_feature 1..2265: note = Description of Artificial Sequence: Synthetic coding sequence
  source 1..2265: mol_type = other DNA
atggcctctgtgcctgccctgcagctgaccccagccaaccccccacctcctgaggtgagcaaccccaagaagccaggccgggtgaccaaccagctgcagtacctgcacaaggtggtgatgaaggccctgtggaagcaccagtttgcctggcccttccggcagcctgtggatgctgtgaagctgggcctgcctgactaccacaagatcatcaagcagcccatggacatgggcaccatcaagaggcggctggagaacaactactactgggccgccagcgagtgcatgcaggacttcaacaccatgttcaccaactgctacatctacaacaagcccacagatgacatcgtgctgatggcccagaccctggagaagatcttcctgcagaaggtggcctccatgccccaggaggagcaggagctggtggtgaccatccccaagaacagccacaagaagggggccaagctggccgccctgcagggctctgtgaccagcgcccaccaggtgcctgctgtgtcctctgtgagccacacagccctgtacaccccacctcctgagatccccaccaccgtgctgaacatcccccaccccagcgtcatcagcagccccctgctgaagagcctgcacagcgctggcccccccctgctggccgtgacagctgcccccccagcccagcccctggccaagaagaagggcgtgaagaggaaggctgacaccaccacccccacccccacagccatcctggcccctggcagccctgccagccccccaggcagcctggagcccaaggccgcccggctgccccccatgaggcgggagagcggccggcccatcaagccacccaggaaggacctgcctgacagccagcagcagcaccagagcagcaagaagggcaagctgtctgagcagctgaagcactgcaatggcatcctgaaggagctgctgagcaagaagcatgctgcctatgcctggcccttctacaagcctgtggatgccagcgccctgggcctgcatgactaccatgacatcatcaagcaccccatggacctgagcacagtgaagaggaagatggagaacagagactacagagatgcccaggagtttgctgctgatgtgcggctgatgttcagcaactgctacaagtacaaccccccagaccatgatgtggtggccatggccaggaagctgcaggatgtgtttgagttccgctatgccaagatgccagatgagcccctggagcccggccccctgcctgtgtccacagccatgcctcctggcctggccaagagcagcagcgagagcagcagcgaggagagcagcagcgagagcagcagcgaggaggaggaggaggaggatgaagaagatgaggaggaggaggagagcgagagcagtgacagcgaggaggagcgggcccaccggctggccgagctgcaggagcagctgcgggctgtgcatgagcagctggccgccctgagccagggccccatcagcaagcccaagaggaagcgggagaagaaggagaagaagaagaagaggaaggccgagaagcaccggggccgggccggggctgatgaagatgacaagggcccccgggccccccggcccccccagcccaagaagagcaagaaggccagcggcagcggcggcggcagcgctgccctgggccccagcggcttcggccccagcggcggcagcggcaccaagctgcccaagaaggccaccaagacagcccccccagccctgcccaccggctatgacagcgaggaggaggaggagagccggcccatgtcctatgatgagaagaggcagctgagcctggacatcaacaagctgcctggagagaagctgggccgggtggtgcacatcatccaggcccgggagcccagcctgcgggacagcaaccctgaggagattgaaattgactttgagaccctgaagcccagcaccctgcgggagctggagagatatgtgctgagctgcctgaggaagaagcccaggaagccctacaccatcaagaagcctgtgggcaagaccaaggaggagctggccctggagaagaagcgggagctggagaagaggctgcaggatgtgtctggccagctgaacagcaccaagaagccacccaagaaggccaatgagaagacagagagcagcagcgcccagcaggtggccgtgtcccggctgagcgccagcagcagcagcagtgacagcagcagcagcagcagcagcagcagcagcagtgacaccagtgacagcgacagcggctag

SEQ ID NO: 145409 - DNA, 2406 bp, synthetic construct; identical to SEQ ID NO: 145392
  misc_feature 1..2406: note = Description of Artificial Sequence: Synthetic coding sequence
  source 1..2406: mol_type = other DNA

SEQ ID NO: 145410 - DNA, 2424 bp, synthetic construct
  misc_feature 1..2424: note = Description of Artificial Sequence: Synthetic coding sequence
  source 1..2424: mol_type = other DNA
tgaaatggaggcggcggcagcgccacagcccggggcggggagtaccgcctgcccggggagggcaatgccggcctgctgggcctgggccctgaggccgccgcccctgggaagaggatcaggaagcccagcctgctgtatgagggctttgagagccccaccatggcctctgtgcctgccctgcagctgaccccagccaaccccccacctcctgaggtgagcaaccccaagaagccaggccgggtgaccaaccagctgcagtacctgcacaaggtggtgatgaaggccctgtggaagcaccagtttgcctggcccttccggcagcctgtggatgctgtgaagctgggcctgcctgactaccacaagatcatcaagcagcccatggacatgggcaccatcaagaggcggctggagaacaactactactgggccgccagcgagtgcatgcaggacttcaacaccatgttcaccaactgctacatctacaacaagcccacagatgacatcgtgctgatggcccagaccctggagaagatcttcctgcagaaggtggcctccatgccccaggaggagcaggagctggtggtgaccatccccaagaacagccacaagaagggggccaagctggccgccctgcagggctctgtgaccagcgcccaccaggtgcctgctgtgtcctctgtgagccacacagccctgtacaccccacctcctgagatccccaccaccgtgctgaacatcccccaccccagcgtcatcagcagccccctgctgaagagcctgcacagcgctggcccccccctgctggccgtgacagctgcccccccagcccagcccctggccaagaagaagggcgtgaagaggaaggctgacaccaccacccccacccccacagccatcctggcccctggcagccctgccagccccccaggcagcctggagcccaaggccgcccggctgccccccatgagaagagagagcggccggcccatcaagccacccaggaaggacctgcctgacagccagcagcagcaccagagcagcaagaagggcaagctgtctgagcagctgaagcactgcaatggcatcctgaaggagctgctgagcaagaagcacgccgcctatgcctggcccttctacaagcctgtggatgccagcgccctgggcctgcatgactaccatgacatcatcaagcaccccatggacctgagcacagtgaagaggaagatggagaacagagactacagagatgcccaggagtttgctgctgatgtgcggctgatgttcagcaactgctacaagtacaaccccccagaccatgatgtggtggccatggccaggaagctgcaggatgtgtttgagttccgctatgccaagatgccagatgagcccctggagcccggccccctgcctgtgtccacagccatgcctcctggcctggccaagagcagcagcgagagcagcagcgaggagagcagcagcgagagcagcagcgaggaggaggaggaggaggatgaggaggatgaggaggaggaggagagcgagagcagtgacagcgaggaggagcgggcccaccggctggccgagctgcaggagcagctgcgggctgtgcatgagcagctggccgccctgagccagggccccatcagcaagcccaagaggaagcgggagaagaaggagaagaagaagaagaggaaggccgagaagcaccggggccgggccggggctgatgaagatgacaagggcccccgggcccccaggcctccccagcccaagaagagcaagaaggccagcggcagcggcggcggcagcgctgccctgggccccagcggcttcggccccagcggcggcagcggcaccaagctgcccaagaaggccaccaagacagcccccccagccctgcccaccggctatgattctgaggaggaggaggagagccggcccatgtcctatgatgagaagaggcagctgagcctggacatcaacaagctgcccggggagaagctgggccgggtggtgcacatcatccaggcccgggagcccagcctgcgggacagcaaccctgaggagattgaaattgactttgagaccctgaagcccagcaccctgcgggagctggagcgctacgtgctgagctgcctgaggaagaagcccaggaagccctacaccatcaagaagcctgtgggcaagaccaaggaggagctggccctggagaagaagcgggagctggagaagaggctgcaggatgtgtctggccagctgaacagcaccaagaagccacccaagaaggccaatgagaagacagagagcagcagcgcccagcaggtggccgtgtcccggctgagcgccagcagcagcagcagtgacagcagcagcagcagcagcagcagcagcagcagtgacaccagtgacagcgacagcggctag

SEQ ID NO: 145411 - DNA, 1092 bp, synthetic construct
  misc_feature 1..1092: note = Description of Artificial Sequence: Synthetic coding sequence
  source 1..1092: mol_type = other DNA
tgagccaagagcagcagcgagagcagcagcgaggagagcagcagcgagagcagcagcgaggaggaggaggaggaggatgaagatgaggaggaggaggagagcgagagcagtgacagcgaggaggagcgggcccaccggctggccgagctgcaggagcagctgcgggctgtgcatgagcagctggccgccctgagccagggccccatcagcaagcccaagaggaagcgggagaagaaggagaagaagaagaagaggaaggccgagaagcaccggggccgggccggggctgatgaagatgacaagggcccccgggccccccggcccccccagcccaagaagagcaagaaggccagcggcagcggcggcggcagcgctgccctgggccccagcggcttcggccccagcggcggcagcggcaccaagctgcaggccggcgtgcagtggagggacctgggcctgctgcagccccccctgctgggcttcaagcgcttcagctgcctgagcctgcccagcagccaggactaccgcctgcccaagaaggccaccaagacagcccccccagccctgcccaccggctatgattctgaggaggaggaggagagccggcccatgtcctatgatgagaagaggcagctgagcctggacatcaacaagctgcccggggagaagctgggccgggtggtgcacatcatccaggcccgggagcccagcctgcgggacagcaaccctgaggagattgaaattgactttgagaccctgaagcccagcaccctgcgggagctggagcgctacgtgctgagctgcctgaggaagaagcccaggaagccctacaccatcaagaagcctgtgggcaagaccaaggaggagctggccctggagaagaagcgggagctggagaagaggctgcaggatgtgtctggccagctgaacagcaccaagaagccacccaagaaggccaatgagaagacagagagcagcagcgcccagcaggtggccgtgtcccggctgagcgccagcagcagcagcagtgacagcagcagcagcagcagcagcagcagcagcagtgacaccagtgacagcgacagcggctag

SEQ ID NO: 145412 - DNA, 2511 bp, synthetic construct; identical to SEQ ID NO: 145395
  misc_feature 1..2511: note = Description of Artificial Sequence: Synthetic coding sequence
  source 1..2511: mol_type = other DNA

SEQ ID NO: 145413 - DNA, 2046 bp, synthetic construct
  misc_feature 1..2046: note = Description of Artificial Sequence: Synthetic coding sequence
  source 1..2046: mol_type = other DNA
atggacatgggcaccatcaagaggcggctggagaacaactactactgggccgccagcgagtgcatgcaggacttcaacaccatgttcaccaactgctacatctacaacaagcccacagatgacatcgtgctgatggcccagaccctggagaagatcttcctgcagaaggtggcctccatgccccaggaggagcaggagctggtggtgaccatccccaagaacagccacaagaagggggccaagctggccgccctgcagggctctgtgaccagcgcccaccaggtgcctgctgtgtcctctgtgagccacacagccctgtacaccccacctcctgagatccccaccaccgtgctgaacatcccccaccccagcgtcatcagcagccccctgctgaagagcctgcacagcgctggcccccccctgctggccgtgacagctgcccccccagcccagcccctggccaagaagaagggcgtgaagaggaaggctgacaccaccacccccacccccacagccatcctggcccctggcagccctgccagccccccaggcagcctggagcccaaggccgcccggctgccccccatgagaagagagagcggccggcccatcaagccacccaggaaggacctgcctgacagccagcagcagcaccagagcagcaagaagggcaagctgtctgagcagctgaagcactgcaatggcatcctgaaggagctgctgagcaagaagcacgccgcctatgcctggcccttctacaagcctgtggatgccagcgccctgggcctgcatgactaccatgacatcatcaagcaccccatggacctgagcacagtgaagaggaagatggagaacagagactacagagatgcccaggagtttgctgctgatgtgcggctgatgttcagcaactgctacaagtacaaccccccagaccatgatgtggtggccatggccaggaagctgcaggatgtgtttgagttccgctatgccaagatgccagatgagcccctggagcccggccccctgcctgtgtccacagccatgcctcctggcctggccaagagcagcagcgagagcagcagcgaggagagcagcagcgagagcagcagcgaggaggaggaggaggaggatgaggaggatgaggaggaggaggagagcgagagcagtgacagcgaggaggagcgggcccaccggctggccgagctgcaggagcagctgcgggctgtgcatgagcagctggccgccctgagccagggccccatcagcaagcccaagaggaagcgggagaagaaggagaagaagaagaagaggaaggccgagaagcaccggggccgggccggggctgatgaagatgacaagggcccccgggcccccaggcctccccagcccaagaagagcaagaaggccagcggcagcggcggcggcagcgctgccctgggccccagcggcttcggccccagcggcggcagcggcaccaagctgcccaagaaggccaccaagacagcccccccagccctgcccaccggctatgattctgaggaggaggaggagagccggcccatgtcctatgatgagaagaggcagctgagcctggacatcaacaagctgcccggggagaagctgggccgggtggtgcacatcatccaggcccgggagcccagcctgcgggacagcaaccctgaggagattgaaattgactttgagaccctgaagcccagcaccctgcgggagctggagcgctacgtgctgagctgcctgaggaagaagcccaggaagccctacaccatcaagaagcctgtgggcaagaccaaggaggagctggccctggagaagaagcgggagctggagaagaggctgcaggatgtgtctggccagctgaacagcaccaagaagccacccaagaaggccaatgagaagacagagagcagcagcgcccagcaggtggccgtgtcccggctgagcgccagcagcagcagcagtgacagcagcagcagcagcagcagcagcagcagcagtgacaccagtgacagcgacagcggctag

SEQ ID NO: 145414 - DNA, 2424 bp, synthetic construct; identical to SEQ ID NO: 145410
  misc_feature 1..2424: note = Description of Artificial Sequence: Synthetic coding sequence
  source 1..2424: mol_type = other DNA

SEQ ID NO: 145415 - DNA, 987 bp, synthetic construct; identical to SEQ ID NO: 145404
  misc_feature 1..987: note = Description of Artificial Sequence: Synthetic coding sequence
  source 1..987: mol_type = other DNA

SEQ ID NO: 145416 - DNA, 2511 bp, synthetic construct; identical to SEQ ID NO: 145395
  misc_feature 1..2511: note = Description of Artificial Sequence: Synthetic coding sequence
  source 1..2511: mol_type = other DNA

SEQ ID NO: 145417 - DNA, 2424 bp, synthetic construct; identical to SEQ ID NO: 145410
  misc_feature 1..2424: note = Description of Artificial Sequence: Synthetic coding sequence
  source 1..2424: mol_type = other DNA

SEQ ID NO: 145418 - DNA, 2265 bp, synthetic construct; identical to SEQ ID NO: 145408
  misc_feature 1..2265: note = Description of Artificial Sequence: Synthetic coding sequence
  source 1..2265: mol_type = other DNA

SEQ ID NO: 145419 - DNA, 2406 bp, synthetic construct; identical to SEQ ID NO: 145401
  misc_feature 1..2406: note = Description of Artificial Sequence: Synthetic coding sequence
  source 1..2406: mol_type = other DNA

SEQ ID NO: 145420 - DNA, 891 bp, synthetic construct; identical to SEQ ID NO: 145400
  misc_feature 1..891: note = Description of Artificial Sequence: Synthetic coding sequence
  source 1..891: mol_type = other DNA

SEQ ID NO: 145421 - DNA, 2511 bp, synthetic construct
  misc_feature 1..2511: note = Description of Artificial Sequence: Synthetic coding sequence
  source 1..2511: mol_type = other DNA
atgctgcagaatgtgaccccccacaacaagctgcccggggagggcaatgccggcctgctgggcctgggccctgaggccgccgcccctgggaagaggatcaggaagcccagcctgctgtatgagggctttgagagccccaccatggcctctgtgcctgccctgcagctgaccccagccaaccccccacctcctgaggtgagcaaccccaagaagccaggccgggtgaccaaccagctgcagtacctgcacaaggtggtgatgaaggccctgtggaagcaccagtttgcctggcccttccggcagcctgtggatgctgtgaagctgggcctgcctgactaccacaagatcatcaagcagcccatggacatgggcaccatcaagaggcggctggagaacaactactactgggccgccagcgagtgcatgcaggacttcaacaccatgttcaccaactgctacatctacaacaagcccacagatgacatcgtgctgatggcccagaccctggagaagatcttcctgcagaaggtggcctccatgccccaggaggagcaggagctggtggtgaccatccccaagaacagccacaagaagggggccaagctggccgccctgcagggctctgtgaccagcgcccaccaggtgcctgctgtgtcctctgtgagccacacagccctgtacaccccacctcctgagatccccaccaccgtcttcaacatcccccaccccagcgtcatcagcagccccctgctgaagagcctgcacagcgctggcccccccctgctggccgtgacagctgcccccccagcccagcccctggccaagaagaagggcgtgaagaggaaggctgacaccaccacccccacccccacagccatcctggcccctggcagccctgccagccccccaggcagcctggagcccaaggccgcccggctgccccccatgagaagagagagcggccggcccatcaagccacccaggaaggacctgcctgacagccagcagcagcaccagagcagcaagaagggcaagctgtctgagcagctgaagcactgcaatggcatcctgaaggagctgctgagcaagaagcacgccgcctatgcctggcccttctacaagcctgtggatgccagcgccctgggcctgcatgactaccatgacatcatcaagcaccccatggacctgagcacagtgaagaggaagatggagaacagagactacagagatgcccaggagtttgctgctgatgtgcggctgatgttcagcaactgctacaagtacaaccccccagaccatgatgtggtggccatggccaggaagctgcaggatgtgtttgagttccgctatgccaagatgccagatgagcccctggagcccggccccctgcctgtgtccacagccatgcctcctggcctggccaagagcagcagcgagagcagcagcgaggagagcagcagcgagagcagcagcgaggaggaggaggaggaggatgaggaggatgaggaggaggaggagagcgagagcagtgacagcgaggaggagcgggcccaccggctggccgagctgcaggagcagctgcgggctgtgcatgagcagctggccgccctgagccagggccccatcagcaagcccaagaggaagcgggagaagaaggagaagaagaagaagaggaaggccgagaagcaccggggccgggccggggctgatgaagatgacaagggcccccgggcccccaggcctccccagcccaagaagagcaagaaggccagcggcagcggcggcggcagcgctgccctgggccccagcggcttcggccccagcggcggcagcggcaccaagctgcaggccggcgtgcagtggagggacctgggcctgctgcagccccccctgctgggcttcaagcgcttcagctgcctgagcctgcccagcagccagaactaccgcctgcccaagaaggccaccaagacagcccccccagccctgcccaccggctatgacagcgaggaggaggaggagagccggcccatgtcctatgatgagaagaggcagctgagcctggacatcaacaagctgcctggagagaagctgggccgggtggtgcacatcatccaggcccgggagcccagcctgcgggacagcaaccctgaggagattgaaattgactttgagaccctgaagcccagcaccctgcgggagctggagagatatgtgctgagctgcctgaggaagaagcccaggaagccctacaccatcaagaagcctgtgggcaagaccaaggaggagctggccctggagaagaagcgggagctggagaagaggctgcaggatgtgtctggccagctgaacagcaccaagaagccacccaagaaggccaatgagaagacagagagcagcagcgcccagcaggtggccgtgtcccggctgagcgccagcagcagcagcagtgacagcagcagcagcagcagcagcagcagcagcagtgacaccagtgacagcgacagcggctag

SEQ ID NO: 145422 - DNA, 987 bp, synthetic construct; identical to SEQ ID NO: 145404
  misc_feature 1..987: note = Description of Artificial Sequence: Synthetic coding sequence
  source 1..987: mol_type = other DNA

SEQ ID NO: 145423 - DNA, 891 bp, synthetic construct; identical to SEQ ID NO: 145400
  misc_feature 1..891: note = Description of Artificial Sequence: Synthetic coding sequence
  source 1..891: mol_type = other DNA

SEQ ID NO: 145424 - DNA, 891 bp, synthetic construct; identical to SEQ ID NO: 145400
  misc_feature 1..891: note = Description of Artificial Sequence: Synthetic coding sequence
  source 1..891: mol_type = other DNA

SEQ ID NO: 145425 - DNA, 1860 bp, synthetic construct
  misc_feature 1..1860: note = Description of Artificial Sequence: Synthetic coding sequence
  source 1..1860: mol_type = other DNA
tgaaatggaggcggcggcagcgccacagcccggggcggggagtaccgcctgcccggggagggcaatgccggcctgctgggcctgggccctgaggccgccgcccctgggaagaggatcaggaagcccagcctgctgtatgagggctttgagagccccaccatggcctctgtgcctgccctgcagctgaccccagccaaccccccacctcctgaggtgagcaaccccaagaagccaggccgggtgaccaaccagctgcagtacctgcacaaggtggtgatgaaggccctgtggaagcaccagtttgcctggcccttccggcagcctgtggatgctgtgaagctgggcctgcctgactaccacaagatcatcaagcagcccatggacatgggcaccatcaagaggcggctggagaacaactactactgggccgccagcgagtgcatgcaggacttcaacaccatgttcaccaactgctacatctacaacaagcccacagatgacatcgtgctgatggcccagaccctggagaagatcttcctgcagaaggtggcctccatgccccaggaggagcaggagctggtggtgaccatccccaagaacagccacaagaagggggccaagctggccgccctgcagggctctgtgaccagcgcccaccaggtgcctgctgtgtcctctgtgagccacacagccctgtacaccccacctcctgagatccccaccaccgtgctgaacatcccccaccccagcgtcatcagcagccccctgctgaagagcctgcacagcgctggcccccccctgctggccgtgacagctgcccccccagcccagcccctggccaagaagaagggcgtgaagaggaaggctgacaccaccacccccacccccacagccatcctggcccctggcagccctgccagccccccaggcagcctggagcccaaggccgcccggctgccccccatgagaagagagagcggccggcccatcaagccacccaggaaggacctgcctgacagccagcagcagcaccagagcagcaagaagggcaagctgtctgagcagctgaagcactgcaatggcatcctgaaggagctgctgagcaagaagcacgccgcctatgcctggcccttctacaagcctgtggatgccagcgccctgggcctgcatgactaccatgacatcatcaagcaccccatggacctgagcacagtgaagaggaagatggagaacagagactacagagatgcccaggagtttgctgctgatgtgcggctgatgttcagcaactgctacaagtacaaccccccagaccatgatgtggtggccatggccaggaagctgcaggatgtgtttgagttccgctatgccaagatgccagatgagcccctggagcccggccccctgcctgtgtccacagccatgcctcctggcctggccaagagcagcagcgagagcagcagcgaggagagcagcagcgagagcagcagcgaggaggaggaggaggaggatgaggaggatgaggaggaggaggagagcgagagcagtgacagcgaggaggagcgggcccaccggctggccgagctgcaggagcagctgcgggctgtgcatgagcagctggccgccctgagccagggccccatcagcaagcccaagaggaagcgggagaagaaggagaagaagaagaagaggaaggccgagaagcaccggggccgggccggggctgatgaagatgacaagggcccccgggcccccaggcctccccagcccaagaagagcaagaaggccagcggcagcggcggcggcagcgctgccctgggccccagcggcttcggccccagcggcggcagcggcacctag

SEQ ID NO: 145426 - DNA, 987 bp, synthetic construct; identical to SEQ ID NO: 145404
  misc_feature 1..987: note = Description of Artificial Sequence: Synthetic coding sequence
  source 1..987: mol_type = other DNA

SEQ ID NO: 145427 - DNA, 2046 bp, synthetic construct
  misc_feature 1..2046: note = Description of Artificial Sequence: Synthetic coding sequence
  source 1..2046: mol_type = other DNA
atggacatgggcaccatcaagaggcggctggagaacaactactactgggccgccagcgagtgcatgcaggacttcaacaccatgttcaccaactgctacatctacaacaagcccacagatgacatcgtgctgatggcccagaccctggagaagatcttcctgcagaaggtggcctccatgccccaggaggagcaggagctggtggtgaccatccccaagaacagccacaagaagggggccaagctggccgccctgcagggctctgtgaccagcgcccaccaggtgcctgctgtgtcctctgtgagccacacagccctgtacaccccacctcctgagatccccaccaccgtcttcaacatcccccaccccagcgtcatcagcagccccctgctgaagagcctgcacagcgctggcccccccctgctggccgtgacagctgcccccccagcccagcccctggccaagaagaagggcgtgaagaggaaggctgacaccaccacccccacccccacagccatcctggcccctggcagccctgccagccccccaggcagcctggagcccaaggccgcccggctgccccccatgagaagagagagcggccggcccatcaagccacccaggaaggacctgcctgacagccagcagcagcaccagagcagcaagaagggcaagctgtctgagcagctgaagcactgcaatggcatcctgaaggagctgctgagcaagaagcacgccgcctatgcctggcccttctacaagcctgtggatgccagcgccctgggcctgcatgactaccatgacatcatcaagcaccccatggacctgagcacagtgaagaggaagatggagaacagagactacagagatgcccaggagtttgctgctgatgtgcggctgatgttcagcaactgctacaagtacaaccccccagaccatgatgtggtggccatggccaggaagctgcaggatgtgtttgagttccgctatgccaagatgccagatgagcccctggagcccggccccctgcctgtgtccacagccatgcctcctggcctggccaagagcagcagcgagagcagcagcgaggagagcagcagcgagagcagcagcgaggaggaggaggaggaggatgaggaggatgaggaggaggaggagagcgagagcagtgacagcgaggaggagcgggcccaccggctggccgagctgcaggagcagctgcgggctgtgcatgagcagctggccgccctgagccagggccccatcagcaagcccaagaggaagcgggagaagaaggagaagaagaagaagaggaaggccgagaagcaccggggccgggccggggctgatgaagatgacaagggcccccgggcccccaggcctccccagcccaagaagagcaagaaggccagcggcagcggcggcggcagcgctgccctgggccccagcggcttcggccccagcggcggcagcggcaccaagctgcccaagaaggccaccaagacagcccccccagccctgcccaccggctatgattctgaggaggaggaggagagccggcccatgtcctatgatgagaagaggcagctgagcctggacatcaacaagctgcccggggagaagctgggccgggtggtgcacatcatccaggcccgggagcccagcctgcgggacagcaaccctgaggagattgaaattgactttgagaccctgaagcccagcaccctgcgggagctggagcgctacgtgctgagctgcctgaggaagaagcccaggaagccctacaccatcaagaagcctgtgggcaagaccaaggaggagctggccctggagaagaagcgggagctggagaagaggctgcaggatgtgtctggccagctgaacagcaccaagaagccacccaagaaggccaatgagaagacagagagcagcagcgcccagcaggtggccgtgtcccggctgagcgccagcagcagcagcagtgacagcagcagcagcagcagcagcagcagcagcagtgacaccagtgacagcgacagcggctag

SEQ ID NO: 145428 - DNA, 2265 bp, synthetic construct
  misc_feature 1..2265: note = Description of Artificial Sequence: Synthetic coding sequence
  source 1..2265: mol_type = other DNA
atggcctctgtgcctgccctgcagctgaccccagccaaccccccacctcctgaggtgagcaaccccaagaagccaggccgggtgaccaaccagctgcagtacctgcacaaggtggtgatgaaggccctgtggaagcaccagtttgcctggcccttccggcagcctgtggatgctgtgaagctgggcctgcctgactaccacaagatcatcaagcagcccatggacatgggcaccatcaagaggcggctggagaacaactactactgggccgccagcgagtgcatgcaggacttcaacaccatgttcaccaactgctacatctacaacaagcccacagatgacatcgtgctgatggcccagaccctggagaagatcttcctgcagaaggtggcctccatgccccaggaggagcaggagctggtggtgaccatccccaagaacagccacaagaagggggccaagctggccgccctgcagggctctgtgaccagcgcccaccaggtgcctgctgtgtcctctgtgagccacacagccctgtacaccccacctcctgagatccccaccaccgtcttcaacatcccccaccccagcgtcatcagcagccccctgctgaagagcctgcacagcgctggcccccccctgctggccgtgacagctgcccccccagcccagcccctggccaagaagaagggcgtgaagaggaaggctgacaccaccacccccacccccacagccatcctggcccctggcagccctgccagccccccaggcagcctggagcccaaggccgcccggctgccccccatgaggcgggagagcggccggcccatcaagccacccaggaaggacctgcctgacagccagcagcagcaccagagcagcaagaagggcaagctgtctgagcagctgaagcactgcaatggcatcctgaaggagctgctgagcaagaagcatgctgcctatgcctggcccttctacaagcctgtggatgccagcgccctgggcctgcatgactaccatgacatcatcaagcaccccatggacctgagcacagtgaagaggaagatggagaacagagactacagagatgcccaggagtttgctgctgatgtgcggctgatgttcagcaactgctacaagtacaaccccccagaccatgatgtggtggccatggccaggaagctgcaggatgtgtttgagttccgctatgccaagatgccagatgagcccctggagcccggccccctgcctgtgtccacagccatgcctcctggcctggccaagagcagcagcgagagcagcagcgaggagagcagcagcgagagcagcagcgaggaggaggaggaggaggatgaagaagatgaggaggaggaggagagcgagagcagtgacagcgaggaggagcgggcccaccggctggccgagctgcaggagcagctgcgggctgtgcatgagcagctggccgccctgagccagggccccatcagcaagcccaagaggaagcgggagaagaaggagaagaagaagaagaggaaggccgagaagcaccggggccgggccggggctgatgaagatgacaagggcccccgggccccccggcccccccagcccaagaagagcaagaaggccagcggcagcggcggcggcagcgctgccctgggccccagcggcttcggccccagcggcggcagcggcaccaagctgcccaagaaggccaccaagacagcccccccagccctgcccaccggctatgacagcgaggaggaggaggagagccggcccatgtcctatgatgagaagaggcagctgagcctggacatcaacaagctgcctggagagaagctgggccgggtggtgcacatcatccaggcccgggagcccagcctgcgggacagcaaccctgaggagattgaaattgactttgagaccctgaagcccagcaccctgcgggagctggagagatatgtgctgagctgcctgaggaagaagcccaggaagccctacaccatcaagaagcctgtgggcaagaccaaggaggagctggccctggagaagaagcgggagctggagaagaggctgcaggatgtgtctggccagctgaacagcaccaagaagccacccaagaaggccaatgagaagacagagagcagcagcgcccagcaggtggccgtgtcccggctgagcgccagcagcagcagcagtgacagcagcagcagcagcagcagcagcagcagcagtgacaccagtgacagcgacagcggctag

SEQ ID NO: 145429 - DNA, 2511 bp, synthetic construct; identical to SEQ ID NO: 145395
  misc_feature 1..2511: note = Description of Artificial Sequence: Synthetic coding sequence
  source 1..2511: mol_type = other DNA

SEQ ID NO: 145430 - DNA, 2046 bp, synthetic construct; identical to SEQ ID NO: 145413
  misc_feature 1..2046: note = Description of Artificial Sequence: Synthetic coding sequence
  source 1..2046: mol_type = other DNA

SEQ ID NO: 145431 - DNA, 2511 bp, synthetic construct; identical to SEQ ID NO: 145395
  misc_feature 1..2511: note = Description of Artificial Sequence: Synthetic coding sequence
  source 1..2511: mol_type = other DNA

SEQ ID NO: 145432 - DNA, 2265 bp, synthetic construct; identical to SEQ ID NO: 145408
  misc_feature 1..2265: note = Description of Artificial Sequence: Synthetic coding sequence
  source 1..2265: mol_type = other DNA

SEQ ID NO: 145433 - DNA, 2046 bp, synthetic construct; identical to SEQ ID NO: 145413
  misc_feature 1..2046: note = Description of Artificial Sequence: Synthetic coding sequence
  source 1..2046: mol_type = other DNA

SEQ ID NO: 145434 - DNA, 2511 bp, synthetic construct; identical to SEQ ID NO: 145395
  misc_feature 1..2511: note = Description of Artificial Sequence: Synthetic coding sequence
  source 1..2511: mol_type = other DNA

SEQ ID NO: 145435 - DNA, 2511 bp, synthetic construct; identical to SEQ ID NO: 145421
  misc_feature 1..2511: note = Description of Artificial Sequence: Synthetic coding sequence
  source 1..2511: mol_type = other DNA

SEQ ID NO: 145436 - DNA, 2265 bp, synthetic construct; identical to SEQ ID NO: 145408
  misc_feature 1..2265: note = Description of Artificial Sequence: Synthetic coding sequence
  source 1..2265: mol_type = other DNA

SEQ ID NO: 145437 - DNA, 2406 bp, synthetic construct; identical to SEQ ID NO: 145392
  misc_feature 1..2406: note = Description of Artificial Sequence: Synthetic coding sequence
  source 1..2406: mol_type = other DNA

SEQ ID NO: 145438 - DNA, 2046 bp, synthetic construct; identical to SEQ ID NO: 145413
  misc_feature 1..2046: note = Description of Artificial Sequence: Synthetic coding sequence
  source 1..2046: mol_type = other DNA

SEQ ID NO: 145439 - DNA, 4089 bp, synthetic construct
  misc_feature 1..4089: note = Description of Artificial Sequence: Synthetic coding sequence
  source 1..4089: mol_type = other DNA
atgtctgctgagagcggccctggcacccggctgaggaacctgcctgtgatgggagatggcctggagaccagccagatgagcaccacccaggcccaggcccagccccagcctgccaatgctgccagcaccaaccccccacctcctgagaccagcaaccccaacaagcccaagaggcagaccaaccagctgcagtacctgctgcgggtggtgctgaagaccctgtggaagcaccagtttgcctggcccttccagcagcctgtggatgctgtgaagctgaacctgcctgactactacaagatcatcaagacccccatggacatgggcaccatcaagaagaggctggagaacaactactactggaatgcccaggagtgcatccaggacttcaacaccatgttcaccaactgctacatctacaacaagccaggagatgacatcgtgctgatggccgaggccctggagaagctgttcctgcagaagatcaatgagctgcccacagaggagacagagatcatgattgtgcaggccaagggccggggccggggcaggaaggagaccggcacagccaagccaggagtgtccacagtgcccaacaccacccaggccagcaccccaccccagacccagaccccccagcccaaccccccacctgtgcaggccaccccccaccccttccctgctgtgaccccagacctgattgtgcagacccctgtgatgacagtggtgcccccccagcccctgcagaccccacctcctgtgcccccccagccccagcccccaccagccccagccccccagcctgtgcagagccacccccccatcatcgccgccaccccccagcctgtgaagaccaagaagggcgtgaagaggaaggctgacaccaccacccccaccaccatcgaccccatccacgagccccccagcctgcccccagagcccaagaccaccaagctgggccagaggcgggagagcagcaggcctgtgaagccacccaagaaggatgtgcctgacagccagcagcacccagcccctgagaagagcagcaaggtgtctgagcagctgaagtgctgcagcggcatcctgaaggagatgtttgccaagaagcacgccgcctatgcctggcccttctacaagcctgtggatgtggaggccctgggcctgcatgactactgtgacatcatcaagcaccccatggacatgagcaccatcaagagcaagctggaggcccgggagtacagagatgcccaggagtttggagcagatgtgcggctgatgttcagcaactgctacaagtacaaccccccagaccacgaggtggtggccatggccaggaagctgcaggatgtgtttgagatgagatttgccaagatgccagatgagcctgaggagcctgtggtggccgtgagcagccctgctgtgcccccacccaccaaggtggtggccccacccagcagcagtgacagcagcagtgacagcagcagtgacagcgacagcagcacagatgattctgaggaggagcgggcccagaggctggccgagctgcaggagcagctgaaggctgtgcatgagcagctggccgccctgagccagccccagcagaacaagcccaagaagaaggagaaggacaagaaggagaagaagaaggagaagcacaagaggaaggaggaggtggaggagaacaagaagagcaaggccaaggagcccccacccaagaagaccaagaagaacaacagcagcaacagcaatgtgtccaagaaggagcccgcccccatgaagagcaagcccccacccacctatgaaagtgaggaggaggacaagtgcaagcccatgtcctatgaggagaagaggcagctgagcctggacatcaacaagctgcccggggagaagctgggccgggtggtgcacatcatccagagccgggagcccagcctgaagaacagcaacccagatgaaattgaaattgactttgagaccctgaagcccagcaccctgcgggagctggagcgctacgtgaccagctgcctgaggaagaagaggaagccccaggccgagaaggtggatgtgattgctggcagcagcaagatgaagggcttcagcagcagcgagagcgagagcagcagcgagagcagcagcagtgacagtgaagattctgaaacagagatggcccccaagagcaagaagaagggccaccctggccgggagcagaagaagcaccaccaccaccaccaccagcagatgcagcaggccccagcccctgtgccccagcagcccccacctccaccccagcagcccccacctcctcctccaccccagcagcagcagcagcccccacctcctcctcctccacccagcatgccccagcaggccgccccagccatgaagagcagccccccacccttcatcgccacccaggtgcctgtgctggagccccagctgcccggctctgtgtttgaccccatcggccacttcacccagcccatcctgcacctgccccagcctgagctgcccccccacctgccccagcccccagagcacagcaccccaccccacctgaaccagcacgctgtggtgtccccaccagccctgcacaatgccctgccccagcagcccagccggcccagcaacagagctgctgccctgccccccaagccagcccggcccccagctgtgtccccagccctgacccagacccccctgctgccccagccccccatggcccagcccccccaggtgctgctggaggatgaggagcccccagccccacccctgacctccatgcagatgcagctgtacctgcagcagctgcagaaggtgcagccccccacccccctgctgcccagcgtgaaggtgcagagccagcccccaccacccctgcccccaccaccccaccccagcgtgcagcagcagctgcagcagcagcccccacctcctcctccaccccagccccagcccccaccccagcagcagcaccagcccccacccaggcctgtgcacctgcagcccatgcagttcagcacccacatccagcagcccccaccaccccagggccagcagcccccccaccccccacctggccagcagcccccaccaccccagcctgccaagccccagcaggtgatccagcaccaccacagccccaggcaccacaagagtgacccctacagcacaggccacctgcgggaggcccccagccccctgatgatccacagcccccagatgagccagttccagagcctgacccaccagagccccccccagcagaatgtgcagcccaagaagcaggagctgcgggccgcctctgtggtgcagccccagcccctggtggtggtgaaggaggagaagatccacagccccatcatccgctctgagcccttcagccccagcctgcggcctgagccccccaagcaccctgagagcatcaaggcccctgtgcacctgccccagaggcctgagatgaagcctgtggatgtgggccggcctgtgatccggcccccagagcagaatgcccctcctcctggggccccagacaaggacaagcagaagcaggagcccaagacccctgtggcccccaagaaggacctgaagatcaagaacatgggctcctgggccagcctggtgcagaagcaccccaccacccccagcagcacagccaagagcagcagtgacagctttgagcagttccggcgggccgcccgggagaaggaggagcgggagaaggccctgaaggcccaggccgagcacgccgagaaggagaaggagcggctgcggcaggagaggatgaggagccgggaggatgaagatgccctggagcaggcccggcgggcccacgaggaggcccggcggcggcaggagcagcagcagcagcagaggcaggagcagcagcagcagcagcagcagcaggccgctgctgtggccgctgctgccaccccccaggcccagagcagccagccccagagcatgctggaccagcagcgggagctggccaggaagcgggagcaggagaggagaagaagagaggccatggccgccaccatcgacatgaacttccagagcgacctgctgagcatctttgaagaaaatctcttctag

SEQ ID NO: 145440 - DNA, 2385 bp, synthetic construct
  misc_feature 1..2385: note = Description of Artificial Sequence: Synthetic coding sequence
  source 1..2385: mol_type = other DNA
atgtctgctgagagcggccctggcacccggctgaggaacctgcctgtgatgggagatggcctggagaccagccagatgagcaccacccaggcccaggcccagccccagcctgccaatgctgccagcaccaaccccccacctcctgagaccagcaaccccaacaagcccaagaggcagaccaaccagctgcagtacctgctgcgggtggtgctgaagaccctgtggaagcaccagtttgcctggcccttccagcagcctgtggatgctgtgaagctgaacctgcctgactactacaagatcatcaagacccccatggacatgggcaccatcaagaagaggctggagaacaactactactggaatgcccaggagtgcatccaggacttcaacaccatgttcaccaactgctacatctacaacaagccaggagatgacatcgtgctgatggccgaggccctggagaagctgttcctgcagaagatcaatgagctgcccacagaggagacagagatcatgattgtgcaggccaagggccggggccggggcaggaaggagaccggcacagccaagccaggagtgtccacagtgcccaacaccacccaggccagcaccccaccccagacccagaccccccagcccaaccccccacctgtgcaggccaccccccaccccttccctgctgtgaccccagacctgattgtgcagacccctgtgatgacagtggtgcccccccagcccctgcagaccccacctcctgtgcccccccagccccagcccccaccagccccagccccccagcctgtgcagagccacccccccatcatcgccgccaccccccagcctgtgaagaccaagaagggcgtgaagaggaaggctgacaccaccacccccaccaccatcgaccccatccacgagccccccagcctgcccccagagcccaagaccaccaagctgggccagaggcgggagagcagcaggcctgtgaagccacccaagaaggatgtgcctgacagccagcagcacccagcccctgagaagagcagcaaggtgtctgagcagctgaagtgctgcagcggcatcctgaaggagatgtttgccaagaagcacgccgcctatgcctggcccttctacaagcctgtggatgtggaggccctgggcctgcatgactactgtgacatcatcaagcaccccatggacatgagcaccatcaagagcaagctggaggcccgggagtacagagatgcccaggagtttggagcagatgtgcggctgatgttcagcaactgctacaagtacaaccccccagaccacgaggtggtggccatggccaggaagctgcaggatgtgtttgagatgagatttgccaagatgccagatgagcctgaggagcctgtggtggccgtgagcagccctgctgtgcccccacccaccaaggtggtggccccacccagcagcagtgacagcagcagtgacagcagcagtgacagcgacagcagcacagatgattctgaggaggagcgggcccagaggctggccgagctgcaggagcagctgaaggctgtgcatgagcagctggccgccctgagccagccccagcagaacaagcccaagaagaaggagaaggacaagaaggagaagaagaaggagaagcacaagaggaaggaggaggtggaggagaacaagaagagcaaggccaaggagcccccacccaagaagaccaagaagaacaacagcagcaacagcaatgtgtccaagaaggagcccgcccccatgaagagcaagcccccacccacctatgaaagtgaggaggaggacaagtgcaagcccatgtcctatgaggagaagaggcagctgagcctggacatcaacaagctgcccggggagaagctgggccgggtggtgcacatcatccagagccgggagcccagcctgaagaacagcaacccagatgaaattgaaattgactttgagaccctgaagcccagcaccctgcgggagctggagcgctacgtgaccagctgcctgaggaagaagaggaagccccaggccgagaaggtggatgtgattgctggcagcagcaagatgaagggcttcagcagcagcgagagcgagagcagcagcgagagcagcagcagtgacagtgaagattctgaaacagccttctgcaccagcggggactttgtgtccccaggccccagcccctaccacagccacgtgcagtgtggccgcttccgggagatgctgcgctggttcctggtggatgtggagcagacagctgctggccagccccaccggcagagcgctgctggccctgccatcacctgggccccagccatcgcctaccccagcccagaatgtgcccgctgctgcgtgggctgcagctag

SEQ ID NO: 145441 - DNA, 2169 bp, synthetic construct
  misc_feature 1..2169: note = Description of Artificial Sequence: Synthetic coding sequence
  source 1..2169: mol_type = other DNA
atgtctgctgagagcggccctggcacccggctgaggaacctgcctgtgatgggagatggcctggagaccagccagatgagcaccacccaggcccaggcccagccccagcctgccaatgctgccagcaccaaccccccacctcctgagaccagcaaccccaacaagcccaagaggcagaccaaccagctgcagtacctgctgcgggtggtgctgaagaccctgtggaagcaccagtttgcctggcccttccagcagcctgtggatgctgtgaagctgaacctgcctgactactacaagatcatcaagacccccatggacatgggcaccatcaagaagaggctggagaacaactactactggaatgcccaggagtgcatccaggacttcaacaccatgttcaccaactgctacatctacaacaagccaggagatgacatcgtgctgatggccgaggccctggagaagctgttcctgcagaagatcaatgagctgcccacagaggagacagagatcatgattgtgcaggccaagggccggggccggggcaggaaggagaccggcacagccaagccaggagtgtccacagtgcccaacaccacccaggccagcaccccaccccagacccagaccccccagcccaaccccccacctgtgcaggccaccccccaccccttccctgctgtgaccccagacctgattgtgcagacccctgtgatgacagtggtgcccccccagcccctgcagaccccacctcctgtgcccccccagccccagcccccaccagccccagccccccagcctgtgcagagccacccccccatcatcgccgccaccccccagcctgtgaagaccaagaagggcgtgaagaggaaggctgacaccaccacccccaccaccatcgaccccatccacgagccccccagcctgcccccagagcccaagaccaccaagctgggccagaggcgggagagcagcaggcctgtgaagccacccaagaaggatgtgcctgacagccagcagcacccagcccctgagaagagcagcaaggtgtctgagcagctgaagtgctgcagcggcatcctgaaggagatgtttgccaagaagcacgccgcctatgcctggcccttctacaagcctgtggatgtggaggccctgggcctgcatgactactgtgacatcatcaagcaccccatggacatgagcaccatcaagagcaagctggaggcccgggagtacagagatgcccaggagtttggagcagatgtgcggctgatgttcagcaactgctacaagtacaaccccccagaccacgaggtggtggccatggccaggaagctgcaggatgtgtttgagatgagatttgccaagatgccagatgagcctgaggagcctgtggtggccgtgagcagccctgctgtgcccccacccaccaaggtggtggccccacccagcagcagtgacagcagcagtgacagcagcagtgacagcgacagcagcacagatgattctgaggaggagcgggcccagaggctggccgagctgcaggagcagctgaaggctgtgcatgagcagctggccgccctgagccagccccagcagaacaagcccaagaagaaggagaaggacaagaaggagaagaagaaggagaagcacaagaggaaggaggaggtggaggagaacaagaagagcaaggccaaggagcccccacccaagaagaccaagaagaacaacagcagcaacagcaatgtgtccaagaaggagcccgcccccatgaagagcaagcccccacccacctatgaaagtgaggaggaggacaagtgcaagcccatgtcctatgaggagaagaggcagctgagcctggacatcaacaagctgcccggggagaagctgggccgggtggtgcacatcatccagagccgggagcccagcctgaagaacagcaacccagatgaaattgaaattgactttgagaccctgaagcccagcaccctgcgggagctggagcgctacgtgaccagctgcctgaggaagaagaggaagccccaggccgagaaggtggatgtgattgctggcagcagcaagatgaagggcttcagcagcagcgagagcgagagcagcagcgagagcagcagcagtgacagtgaagattctgaaacaggccctgcctag

SEQ ID NO: 145442 - DNA, 2625 bp, synthetic construct
  misc_feature 1..2625: note = Description of Artificial Sequence: Synthetic coding sequence
  source 1..2625: mol_type = other DNA
atggacctgaacaccatcaagaagaggctggagaacaagtactatgccaaggccagcgagtgcatcgaggacttcaacaccatgttcagcaactgctacctgtacaacaagccaggagatgacatcgtgctgatggcccaggccctggagaagctgttcatgcagaagctgagccagatgccccaggaggagcaggtggtgggcgtgaaggagcgcatcaagaagggcacccagcagaacattgctgtgtcctctgccaaggagaagagcagccccagcgccacagagaaggtgttcaagcagcaggagatccccagcgtcttccccaagaccagcatcagccccctgaatgtggtgcagggcgcctctgtgaacagcagcagccagacagctgcccaggtgaccaagggcgtgaagaggaaggctgacaccaccaccccagccaccagcgctgtgaaggccagcagcgagttcagccccaccttcacagagaagtctgtggccctgccccccatcaaggagaacatgcccaagaatgtgctgcctgacagccagcagcagtacaacgtggtgaagacagtgaaggtgacagagcagctgcggcactgcagcgagatcctgaaggagatgctggccaagaagcacttctcctatgcctggcccttctacaaccctgtggatgtgaatgccctgggcctgcacaactactatgatgtggtgaagaaccccatggacctgggcaccatcaaggagaagatggacaaccaggagtacaaggatgcctacaagtttgctgctgatgtgcggctgatgttcatgaactgctacaagtacaaccccccagaccacgaggtggtgaccatggccaggatgctgcaggatgtgtttgagacccacttcagcaagatccccatcgagcctgtggagagcatgcccctgtgctacatcaagacagacatcacagagaccaccggccgggagaacaccaatgaggccagcagcgagggcaacagcagtgatgacagtgaagatgagcgggtgaagaggctggccaagctgcaggagcagctgaaggctgtgcaccagcagctgcaggtgctgagccaggtgcccttcaggaagctgaacaagaagaaggagaagagcaagaaggagaagaagaaggagaaggtgaacaacagcaatgaaaaccccaggaagatgtgtgagcagatgaggctgaaggagaagagcaagaggaaccagcccaagaagaggaagcagcagttcatcggcctgaagtcagaagatgaagataatgccaagcccatgaactatgatgagaagaggcagctgagcctgaacatcaacaagctgcccggggacaagctgggccgggtggtgcacatcatccagagccgggagcccagcctgagcaacagcaacccagatgaaattgaaattgactttgagaccctgaaggccagcaccctgcgggagctggagaagtatgtgtctgcctgcctgaggaagaggcccctgaagcccccagccaagaagatcatgatgagcaaggaggagctgcacagccagaagaagcaggagctggagaagaggctgctggatgtgaacaaccagctgaacagcaggaagaggcagaccaagagtgacaagacccagcccagcaaggctgtggagaatgtgtcccggctgtctgagagcagcagcagcagcagcagcagcagcgagagcgagagcagcagcagtgacctgagcagcagtgacagcagtgacagcgagagcgagatgttccccaagttcacagaggtgaagcccaatgacagccccagcaaagaaaatgtgaagaagatgaagaatgaatgcatccccccagagggccgcactggagtgacccagatcggctactgtgtgcaggacaccaccagcgccaacaccaccctggtgcaccagaccacccccagccacgtgatgccacccaaccaccaccagctggccttcaactaccaggagctggagcacctgcagacagtgaagaacatcagccccctgcagatcctgcccccatctggggacagcgagcagctgagcaatggcatcaccgtgatgcaccccagcggggacagcgacaccaccatgctggagagcgagtgccaggcccctgtgcagaaggacatcaagatcaagaatgctgacagctggaagagcctgggcaagcctgtgaagcccagcggcgtgatgaagagcagtgatgagctgttcaaccagttcaggaaggccgccatcgagaaggaggtgaaggcccggacccaggagctgatcaggaagcacctggagcagaacaccaaggagctgaaggccagccaggagaaccagagggacctgggcaatggcctgactgtggagagcttcagcaacaagatccagaacaagtgcagcggggaggagcagaaggagcaccagcagagcagcgaggcccaggacaagagcaagctgtggctgctgaaggaccgggacctggcccggcagaaggagcaggagaggagaagaagagaggccatggtgggcaccatcgacatgaccctgcagagcgacatcatgaccatgtttgagaacaactttgattag

SEQ ID NO: 145443 - DNA, 45 bp, synthetic construct
  misc_feature 1..45: note = Description of Artificial Sequence: Synthetic coding sequence
  source 1..45: mol_type = other DNA
atgagcctgcccagccggcagacagccatcatcgtgaacccctag

SEQ ID NO: 145444 - DNA, 2844 bp, synthetic construct
  misc_feature 1..2844: note = Description of Artificial Sequence: Synthetic coding sequence
  source 1..2844: mol_type = other DNA
atgagcctgcccagccggcagacagccatcatcgtgaaccccccacctcctgagtacatcaacaccaagaagaatggccgcctgaccaaccagctgcagtacctgcagaaggtggtgctgaaggacctgtggaagcacagcttctcctggcccttccagaggcctgtggatgctgtgaagctgcagctgcctgactactacaccatcatcaagaaccccatggacctgaacaccatcaagaagaggctggagaacaagtactatgccaaggcctctgaatgtattgaggacttcaacaccatgttcagcaactgctacctgtacaacaagccaggagatgacatcgtgctgatggcccaggccctggagaagctgttcatgcagaagctgagccagatgccccaggaggagcaggtggtgggcgtgaaggagcgcatcaagaagggcacccagcagaacattgctgtgagcagcgccaaggagaagagcagccccagcgccacagagaaggtgttcaagcagcaggagatccccagcgtcttccccaagaccagcatcagccccctgaatgtggtgcagggcgcctctgtgaacagcagcagccagacagctgcccaggtgaccaagggcgtgaagaggaaggctgacaccaccaccccagccaccagcgctgtgaaggccagcagcgagttcagccccaccttcacagagaagtctgtggccctgccccccatcaaggagaacatgcccaagaatgtgctgcctgacagccagcagcagtacaacgtggtgaagacagtgaaggtgacagagcagctgcggcactgcagcgagatcctgaaggagatgctggccaagaagcacttctcctatgcctggcccttctacaaccctgtggatgtgaatgccctgggcctgcacaactactatgatgtggtgaagaaccccatggacctgggcaccatcaaggagaagatggacaaccaggagtacaaggatgcctacaagtttgctgctgatgtgcggctgatgttcatgaactgctacaagtacaaccccccagaccacgaggtggtgaccatggccaggatgctgcaggatgtgtttgagacccacttcagcaagatccccatcgagcctgtggagagcatgcccctgtgctacatcaagacagacatcacagagaccaccggccgggagaacaccaatgaggccagcagcgagggcaacagcagtgatgattctgaagatgagcgggtgaagaggctggccaagctgcaggagcagctgaaggctgtgcaccagcagctgcaggtgctgagccaggtgcccttcaggaagctgaacaagaagaaggagaagagcaagaaggagaagaagaaggagaaggtgaacaacagcaatgaaaaccccaggaagatgtgtgagcagatgaggctgaaggagaagagcaagaggaaccagcccaagaagaggaagcagcagttcatcggcctgaagtcagaagatgaggacaatgccaagcccatgaactatgatgagaagaggcagctgagcctgaacatcaacaagctgcccggggacaagctgggccgggtggtgcacatcatccagagccgggagcccagcctgagcaacagcaacccagatgaaattgaaattgactttgagaccctgaaggccagcaccctgcgggagctggagaagtatgtgtctgcctgcctgaggaagaggcccctgaagcccccagccaagaagatcatgatgagcaaggaggagctgcacagccagaagaagcaggagctggagaagaggctgctggatgtgaacaaccagctgaacagcaggaagaggcagaccaagagtgacaagacccagcccagcaaggctgtggagaatgtgtcccggctgtctgagagcagcagcagcagcagcagcagcagcgagagcgagagcagcagcagtgacctgagcagcagtgacagcagtgacagcgagagcgagatgttccccaagttcacagaggtgaagcccaatgacagccccagcaaagaaaatgtgaagaagatgaagaatgaatgcatccccccagagggccgcactggagtgacccagatcggctactgtgtgcaggacaccaccagcgccaacaccaccctggtgcaccagaccacccccagccacgtgatgccacccaaccaccaccagctggccttcaactaccaggagctggagcacctgcagacagtgaagaacatcagccccctgcagatcctgccccccagcggggacagcgagcagctgagcaatggcatcaccgtgatgcaccccagcggggacagcgacaccaccatgctggagagcgagtgccaggcccctgtgcagaaggacatcaagatcaagaatgctgacagctggaagagcctgggcaagcctgtgaagcccagcggcgtgatgaagagcagtgatgagctgttcaaccagttcaggaaggccgccatcgagaaggaggtgaaggcccggacccaggagctgatcaggaagcacctggagcagaacaccaaggagctgaaggccagccaggagaaccagagggacctgggcaatggcctgactgtggagagcttcagcaacaagatccagaacaagtgcagcggggaggagcagaaggagcaccagcagagcagcgaggcccaggacaagagcaagctgtggctgctgaaggaccgggacctggcccggcagaaggagcaggagaggagaagaagagaggccatggtgggcaccatcgacatgaccctgcagagcgacatcatgaccatgtttgagaacaactttgattag

SEQ ID NO: 145445 - DNA, 2706 bp, synthetic construct
  misc_feature 1..2706: note = Description of Artificial Sequence: Synthetic coding sequence
  source 1..2706: mol_type = other DNA
atgagcctgcccagccggcagacagccatcatcgtgaaccccccacctcctgagtacatcaacaccaagaagaatggccgcctgaccaaccagctgcagtacctgcagaaggtggtgctgaaggacctgtggaagcacagcttctcctggcccttccagaggcctgtggatgctgtgaagctgcagctgcccccaggagatgacatcgtgctgatggcccaggccctggagaagctgttcatgcagaagctgagccagatgccccaggaggagcaggtggtgggcgtgaaggagcgcatcaagaagggcacccagcagaacattgctgtgagcagcgccaaggagaagagcagccccagcgccacagagaaggtgttcaagcagcaggagatccccagcgtcttccccaagaccagcatcagccccctgaatgtggtgcagggcgcctctgtgaacagcagcagccagacagctgcccaggtgaccaagggcgtgaagaggaaggctgacaccaccaccccagccaccagcgctgtgaaggccagcagcgagttcagccccaccttcacagagaagtctgtggccctgccccccatcaaggagaacatgcccaagaatgtgctgcctgacagccagcagcagtacaacgtggtgaagacagtgaaggtgacagagcagctgcggcactgcagcgagatcctgaaggagatgctggccaagaagcacttctcctatgcctggcccttctacaaccctgtggatgtgaatgccctgggcctgcacaactactatgatgtggtgaagaaccccatggacctgggcaccatcaaggagaagatggacaaccaggagtacaaggatgcctacaagtttgctgctgatgtgcggctgatgttcatgaactgctacaagtacaaccccccagaccacgaggtggtgaccatggccaggatgctgcaggatgtgtttgagacccacttcagcaagatccccatcgagcctgtggagagcatgcccctgtgctacatcaagacagacatcacagagaccaccggccgggagaacaccaatgaggccagcagcgagggcaacagcagtgatgattctgaagatgagcgggtgaagaggctggccaagctgcaggagcagctgaaggctgtgcaccagcagctgcaggtgctgagccaggtgcccttcaggaagctgaacaagaagaaggagaagagcaagaaggagaagaagaaggagaaggtgaacaacagcaatgaaaaccccaggaagatgtgtgagcagatgaggctgaaggagaagagcaagaggaaccagcccaagaagaggaagcagcagttcatcggcctgaagtcagaagatgaggacaatgccaagcccatgaactatgatgagaagaggcagctgagcctgaacatcaacaagctgcccggggacaagctgggccgggtggtgcacatcatccagagccgggagcccagcctgagcaacagcaacccagatgaaattgaaattgactttgagaccctgaaggccagcaccctgcgggagctggagaagtatgtgtctgcctgcctgaggaagaggcccctgaagcccccagccaagaagatcatgatgagcaaggaggagctgcacagccagaagaagcaggagctggagaagaggctgctggatgtgaacaaccagctgaacagcaggaagaggcagaccaagagtgacaagacccagcccagcaaggctgtggagaatgtgtcccggctgtctgagagcagcagcagcagcagcagcagcagcgagagcgagagcagcagcagtgacctgagcagcagtgacagcagtgacagcgagagcgagatgttccccaagttcacagaggtgaagcccaatgacagccccagcaaagaaaatgtgaagaagatgaagaatgaatgcatccccccagagggccgcactggagtgacccagatcggctactgtgtgcaggacaccaccagcgccaacaccaccctggtgcaccagaccacccccagccacgtgatgccacccaaccaccaccagctggccttcaactaccaggagctggagcacctgcagacagtgaagaacatcagccccctgcagatcctgccccccagcggggacagcgagcagctgagcaatggcatcaccgtgatgcaccccagcggggacagcgacaccaccatgctggagagcgagtgccaggcccctgtgcagaaggacatcaagatcaagaatgctgacagctggaagagcctgggcaagcctgtgaagcccagcggcgtgatgaagagcagtgatgagctgttcaaccagttcaggaaggccgccatcgagaaggaggtgaaggcccggacccaggagctgatcaggaagcacctggagcagaacaccaaggagctgaaggccagccaggagaaccagagggacctgggcaatggcctgactgtggagagcttcagcaacaagatccagaacaagtgcagcggggaggagcagaaggagcaccagcagagcagcgaggcccaggacaagagcaagctgtggctgctgaaggaccgggacctggcccggcagaaggagcaggagaggagaagaagagaggccatggtgggcaccatcgacatgaccctgcagagcgacatcatgaccatgtttgagaacaactttgattag

SEQ ID NO: 145446 - DNA, 2844 bp, synthetic construct; identical to SEQ ID NO: 145444
  misc_feature 1..2844: note = Description of Artificial Sequence: Synthetic coding sequence
  source 1..2844: mol_type = other DNA

SEQ ID NO: 145447 - DNA, 2844 bp, synthetic construct; identical to SEQ ID NO: 145444
  misc_feature 1..2844: note = Description of Artificial Sequence: Synthetic coding sequence
  source 1..2844: mol_type = other DNA

SEQ ID NO: 145448 - DNA, 531 bp, synthetic construct
  misc_feature 1..531: note = Description of Artificial Sequence: Synthetic coding sequence
  source 1..531: mol_type = other DNA
atgagcctgcccagccggcagacagccatcatcgtgaaccccccacctcctgagtacatcaacaccaagaagaatggccgcctgaccaaccagctgcagtacctgcagaaggtggtgctgaaggacctgtggaagcacagcttctcctggcccttccagaggcctgtggatgctgtgaagctgcagctgcctgactactacaccatcatcaagaaccccatggacctgaacaccatcaagaagaggctggagaacaagtactatgccaaggcctctgaatgtattgaggacttcaacaccatgttcagcaactgctacctgtacaacaagccaggagatgacatcgtgctgatggcccaggccctggagaagctgttcatgcagaagctgagccagatgccccaggaggagcaggtggtgggcgtgaaggagcgcatcaagaagggcacccagcagaacattgctgtgagcagcgccaaggagaagagcagccccagcgccacagagaaggtgttcaagcagcaggagtag

SEQ ID NO: 145449 - DNA, 1389 bp, synthetic construct
  misc_feature 1..1389: note = Description of Artificial Sequence: Synthetic coding sequence
  source 1..1389: mol_type = other DNA
atgagcctgcccagccggcagacagccatcatcgtgaaccccccacctcctgagtacatcaacaccaagaagaatggccgcctgaccaaccagctgcagtacctgcagaaggtggtgctgaaggacctgtggaagcacagcttctcctggcccttccagaggcctgtggatgctgtgaagctgcagctgcctgactactacaccatcatcaagaaccccatggacctgaacaccatcaagaagaggctggagaacaagtactatgccaaggcctctgaatgtattgaggacttcaacaccatgttcagcaactgctacctgtacaacaagccaggagatgacatcgtgctgatggcccaggccctggagaagctgttcatgcagaagctgagccagatgccccaggaggagcaggtggtgggcgtgaaggagcgcatcaagaagggcacccagcagaacattgctgtgagcagcgccaaggagaagagcagccccagcgccacagagaaggtgttcaagcagcaggagatccccagcgtcttccccaagaccagcatcagccccctgaatgtggtgcagggcgcctctgtgaacagcagcagccagacagctgcccaggtgaccaagggcgtgaagaggaaggctgacaccaccaccccagccaccagcgctgtgaaggccagcagcgagttcagccccaccttcacagagaagtctgtggccctgccccccatcaaggagaacatgcccaagaatgtgctgcctgacagccagcagcagtacaacgtggtgaagacagtgaaggtgacagagcagctgcggcactgcagcgagatcctgaaggagatgctggccaagaagcacttctcctatgcctggcccttctacaaccctgtggatgtgaatgccctgggcctgcacaactactatgatgtggtgaagaaccccatggacctgggcaccatcaaggagaagatggacaaccaggagtacaaggatgcctacaagtttgctgctgatgtgcggctgatgttcatgaactgctacaagtacaaccccccagaccacgaggtggtgaccatggccaggatgctgcaggatgtgtttgagacccacttcagcaagatccccatcgagcctgtggagagcatgcccctgtgctacatcaagacagacatcacagagaccaccggccgggagaacaccaatgaggccagcagcgagggcaacagcagtgatgattctgaagatgagcgggtgaagaggctggccaagctgcaggagcagctgaaggctgtgcaccagcagctgcaggtgctgagccaggtgcccttcaggaagctgaacaagaagaaggagaagagcaagaaggagaagaagaaggagtag

SEQ ID NO: 145450 - DNA, 468 bp, synthetic construct
  misc_feature 1..468: note = Description of Artificial Sequence: Synthetic coding sequence
  source 1..468: mol_type = other DNA
atgagcctgcccagccggcagacagccatcatcgtgaaccccccacctcctgagtacatcaacaccaagaagaatggccgcctgaccaaccagctgcagtacctgcagaaggtggtgctgaaggacctgtggaagcacagcttctcctggcccttccagaggcctgtggatgctgtgaagctgcagctgcctgactactacaccatcatcaagaaccccatggacctgaacaccatcaagaagaggctggagaacaagtactatgccaaggcctctgaatgtattgaggacttcaacaccatgttcagcaactgctacctgtacaacaagccaggagatgacatcgtgctgatggcccaggccctggagaagctgttcatgcagaagctgagccagatgccccaggaggagcaggtggtgggcgtgaaggagcgcatcaagaagggcacccagcagaacatcgcctag

SEQ ID NO: 145451 - DNA, 603 bp, synthetic construct
  misc_feature 1..603: note = Description of Artificial Sequence: Synthetic coding sequence
  source 1..603: mol_type = other DNA
atgagcctgcccagccggcagacagccatcatcgtgaaccccccacctcctgagtacatcaacaccaagaagaatggccgcctgaccaaccagctgcagtacctgcagaaggtggtgctgaaggacctgtggaagcacagcttctcctggcccttccagaggcctgtggatgctgtgaagctgcagctgcctgactactacaccatcatcaagaaccccatggacctgaacaccatcaagaagaggctggagaacaagtactatgccaaggcctctgaatgtattgaggacttcaacaccatgttcagcaactgctacctgtacaacaagccaggagatgacatcgtgctgatggcccaggccctggagaagctgttcatgcagaagctgagccagatgccccaggaggagcaggtggtgggcgtgaaggagcgcatcaagaagggcacccagcagaacattgctgtgagcagcgccaaggagaagagcagccccagcgccacagagaaggtgttcaagcagcaggagatccccagcgtcttccccaagaccagcatcagccccctgaatgtggtgcagggcgcctctgtgaacagcagctag

SEQ ID NO: 145452 - DNA, 468 bp, synthetic construct; identical to SEQ ID NO: 145450
  misc_feature 1..468: note = Description of Artificial Sequence: Synthetic coding sequence
  source 1..468: mol_type = other DNA

SEQ ID NO: 145453 - DNA, 159 bp, synthetic construct
  misc_feature 1..159: note = Description of Artificial Sequence: Synthetic coding sequence
  source 1..159: mol_type = other DNA
atgagcctgcccagccggcagacagccatcatcgtgaaccccccacctcctgagtacatcaacaccaagaagaatggccgcctgaccaaccagctgcagtacctgcagaaggtggtgctgaaggacctgtggaagcacagcttctcctggcccttctag

SEQ ID NO: 145454 - DNA, 291 bp, synthetic construct
  misc_feature 1..291: note = Description of Artificial Sequence: Synthetic coding sequence
  source 1..291: mol_type = other DNA
atgagcctgcccagccggcagacagccatcatcgtgaaccccccacctcctgagtacatcaacaccaagaagaatggccgcctgaccaaccagctgcagtacctgcagaaggtggtgctgaaggacctgtggaagcacagcttctcctggcccttccagaggcctgtggatgctgtgaagctgcagctgcctgactactacaccatcatcaagaaccccatggacctgaacaccatcaagaagaggctggagaacaagtactatgccaaggcctctgaatgtattgaatag

SEQ ID NO: 145455 - DNA, 99 bp, synthetic construct
  misc_feature 1..99: note = Description of Artificial Sequence: Synthetic coding sequence
  source 1..99: mol_type = other DNA
atgagcctgcccagccggcagacagccatcatcgtgaaccccccacctcctgagtacatcaacaccaagaagaatggccgcctgaccaaccagctgtag

SEQ ID NO: 145456 - DNA, 1398 bp, synthetic construct
  misc_feature 1..1398: note = Description of Artificial Sequence: Synthetic coding sequence
  source 1..1398: mol_type = other DNA
atgagcctgcccagccggcagacagccatcatcgtgaaccccccacctcctgagtacatcaacaccaagaagaatggccgcctgaccaaccagctgcagtacctgcagaaggtggtgctgaaggacctgtggaagcacagcttctcctggcccttccagaggcctgtggatgctgtgaagctgcagctgcctgactactacaccatcatcaagaaccccatggacctgaacaccatcaagaagaggctggagaacaagtactatgccaaggcctctgaatgtattgaggacttcaacaccatgttcagcaactgctacctgtacaacaagccaggagatgacatcgtgctgatggcccaggccctggagaagctgttcatgcagaagctgagccagatgccccaggaggagcaggtggtgggcgtgaaggagcgcatcaagaagggcacccagcagaacattgctgtgagcagcgccaaggagaagagcagccccagcgccacagagaaggtgttcaagcagcaggagatccccagcgtcttccccaagaccagcatcagccccctgaatgtggtgcagggcgcctctgtgaacagcagcagccagacagctgcccaggtgaccaagggcgtgaagaggaaggctgacaccaccaccccagccaccagcgctgtgaaggccagcagcgagttcagccccaccttcacagagaagtctgtggccctgccccccatcaaggagaacatgcccaagaatgtgctgcctgacagccagcagcagtacaacgtggtgaagacagtgaaggtgacagagcagctgcggcactgcagcgagatcctgaaggagatgctggccaagaagcacttctcctatgcctggcccttctacaaccctgtggatgtgaatgccctgggcctgcacaactactatgatgtggtgaagaaccccatggacctgggcaccatcaaggagaagatggacaaccaggagtacaaggatgcctacaagtttgctgctgatgtgcggctgatgttcatgaactgctacaagtacaaccccccagaccacgaggtggtgaccatggccaggatgctgcaggatgtgtttgagacccacttcagcaagatccccatcgagcctgtggagagcatgcccctgtgctacatcaagacagacatcacagagaccaccggccgggagaacaccaatgaggccagcagcgagggcaacagcagtgatgattctgaagatgagcgggtgaagaggctggccaagctgcaggagcagctgaaggctgtgcaccagcagctgcaggtgctgagccaggtgcccttcaggaagctgaacaagaagaaggagaagagcaagaaggagaagaagaaggagaagaagaagtag

SEQ ID NO: 145457 - DNA, 303 bp, synthetic construct
  misc_feature 1..303: note = Description of Artificial Sequence: Synthetic coding sequence
  source 1..303: mol_type = other DNA
atgagcctgcccagccggcagacagccatcatcgtgaaccccccacctcctgagtacatcaacaccaagaagaatggccgcctgaccaaccagctgcagtacctgcagaaggtggtgctgaaggacctgtggaagcacagcttctcctggcccttccagaggcctgtggatgctgtgaagctgcagctgcctgactactacaccatcatcaagaaccccatggacctgaacaccatcaagaagaggctggagaacaagtactatgccaaggcctctgaatgtattgaggacttcaacacctag

SEQ ID NO: 145458 - DNA, 5550 bp, synthetic construct
  misc_feature 1..5550: note = Description of Artificial Sequence: Synthetic coding sequence
  source 1..5550: mol_type = other DNA
atggctgtgtcccggctggacaggctcttcatcctgctggacaccggcaccacccctgtgaccaggaaggctgctgcccagcagctgggggaggtggtgaagctgcacccccatgagctgaacaacctgctgagcaaggtgctgatctacctgcggagcgccaactgggacaccagaattgctgctggccaggccgtggaggccatcgtgaagaatgtgcctgagtggaaccctgtgcccaggacccggcaggagcccaccagcgagagctccatggaggacagccccaccacagagcggctgaactttgacagatttgacatctgccgcctgctgcagcacggggccagcctgctgggcagcgctggagctgagtttgaggtgcaggatgagaagtctggagaggtggaccccaaggagcgcatcgcccggcagaggaagctgctgcagaagaagctgggcctgaacatgggagaggccatcggcatgagcacagaggagctgttcaatgatgaggacctggactacacccccaccagcgccagctttgtgaacaagcagcccaccctgcaggccgctgagctgattgacagcgagttccgggccggcatgagcaaccggcagaagaacaaggccaagaggatggccaagctgtttgccaagcagaggagcagagatgctgtggagaccaatgagaagagcaatgacagcacagatggagagcctgaggagaagaggaggaagatcgccaacgtggtgatcaaccagagcgccaatgacagcaaggtgctgattgacaacatcccagacagcagcagcctgattgaggagaccaatgagtggcccctggagagcttctgtgaggagctgtgcaatgacctcttcaaccccagctgggaggtgagacatggagctggcaccggcctgcgggagatcctgaaggcccacggcaagagcggcggcaagatgggagacagcaccctggaggagatgatccagcagcaccaggagtggctggaggacctggtgatccggctgctgtgtgtgtttgccctggacagatttggagactttgtgtctgatgaggtggtggcccctgtgcgggagacctgtgcccagaccctgggcgtggtgctgaagcacatgaatgaaacaggagtgcacaagacagtggatgtgctgctgaagctgctgacccaggagcagtgggaggtgagacatggaggcctgctgggcatcaagtatgccctggccgtgcggcaggacgtcatcaacaccctgctgcccaaggtgctgacccgcatcatcgagggcctgcaggacctggatgatgatgtgcgggctgtggccgccgccagcctggtgcctgtggtggagagcctggtgtacctgcagacccagaaggtgcccttcatcatcaacaccctgtgggatgccctgctggagctggatgacctgacagccagcaccaacagcatcatgaccctgctgagcagcctgctgacctacccccaggtgcagcagtgcagcatccagcagagcctgactgtgctggtgccccgggtgtggcccttcctgcaccacaccatcagctctgtgcggcgggccgccctggagaccctcttcaccctgctgagcacccaggaccagaacagcagctcctggctgatccccatcctgcctgacatgctgcggcacatcttccagttctgtgtgctggagagcagccaggagatcctggacctgatccacaaggtgtggatggagctgctgagcaaggcctctgtgcagtatgtggtggccgccgcctgcccctggatgggcgcctggctgtgcctgatgatgcagcccagccacctgcccatcgacctgaacatgctgctggaggtgaaggcccgggccaaggagaagacaggaggcaaggtgcggcagggccagagccagaacaaggaggtgctgcaggagtacatcgccggggctgacaccatcatggaggaccctgccacccgggactttgtggtgatgagggccaggatgatggccgccaagctgctgggcgccctgtgctgctgcatctgtgaccccggggtgaatgtggtgacccaggagatcaagccagctgagagcctgggccagctgctgctcttccacctgaacagcaagagcgccctgcagaggatctctgtggccctggtgatctgtgagtgggccgccctgcagaaggagtgcaaggctgtgaccctggccgtgcagccccggctgctggacatcctgtctgagcacctgtactatgatgaaattgctgtgcccttcaccaggatgcagaatgaatgcaagcagctgatcagcagcctggctgatgtgcacatcgaggtgggcaacagagtgaacaacaacgtgctgaccatcgaccaggccagtgacctggtgaccaccgtcttcaatgaggccaccagcagctttgacctgaacccccaggtgctgcagcagctggacagcaagaggcagcaggtgcagatgacagtgacagagaccaaccaggagtggcaggtgctgcagctgcgggtgcacacctttgctgcctgtgctgtggtgtccctgcagcagctgcctgagaagctgaaccccatcatcaagcccctgatggagaccatcaagaaggaggagaacaccctggtgcagaactatgctgcccagtgcatcgccaagctgctgcagcagtgcaccaccaggaccccctgccccaacagcaagatcatcaagaacctgtgcagcagcctgtgtgtggacccctacctgaccccctgtgtgacctgccctgtgcccacccagagcggccaggagaacagcaagggcagcaccagcgagaaggatggcatgcaccacacagtgaccaagcaccggggcatcatcaccctgtaccgccaccagaaggccgcctttgccatcaccagccggcggggccccacccccaaggctgtgaaggcccagattgctgacctgcctgctggcagcagcggcaacatcctggtggagctggatgaggcccagaagccctacctggtgcagaggagaggagctgagtttgccctgaccaccatcgtgaagcactttggaggagagatggctgtgaagctgccccacctgtgggatgccatggtgggccccctgaggaacaccatcgacatcaacaactttgatggcaagagcctgctggacaagggggacagccctgcccaggagctggtgaacagcctgcaggtgtttgaaacagctgctgcctccatggacagcgagctgcaccccctgctggtgcagcacctgccccacctgtacatgtgcctgcagtaccccagcacagctgtgcgccacatggccgcccgctgtgtgggcgtgatgagcaagatcgccaccatggagaccatgaacatcttcctggagaaggtgctgccctggctgggcgccattgatgattctgtgaagcaggagggcgccatcgaggccctggcctgtgtgatggagcagctggatgtgggcatcgtgccctacatcgtgctgctggtggtgcctgtgctgggccgcatgtctgaccagacagattctgtgcgcttcatggccacccagtgctttgccaccctcatccggctgatgcccctggaggccggcatcccagacccccccaacatgtctgctgagctgatccagctgaaggccaaggagcggcacttcctggagcagctgctggatggcaagaagctggagaactacaagatccctgtgcccatcaatgctgagctgaggaagtaccagcaggatggagtgaactggctggccttcctgaacaagtacaagctgcacggcatcctgtgtgatgacatgggcctgggcaagaccctgcagagcatctgcatcctggccggggaccactgccaccgggcccaggagtatgcccggagcaagctggccgagtgcatgcccctgcccagcctggtggtgtgcccccccaccctgaccggccactgggtggatgaggtgggcaagttctgcagccgggagtacctgaaccccctgcactacacaggccccccaacagagcgcatccggctgcagcaccaggtgaagaggcacaacctgattgtggccagctatgatgtggtgagaaatgacatcgacttcttcaggaacatcaagttcaactactgcatcctggatgagggccacgtgatcaagaatggcaagaccaagctgagcaaggctgtgaagcagctgacagccaactaccgcatcatcctgagcggcacccccatccagaacaacgtgctggagctgtggagcctgtttgacttcctgatgcctggcttcctgggcacagagcggcagtttgctgcccgctatggcaagcccatcctggccagcagagatgcccggagcagcagccgggagcaggaggccggcgtgctggccatggatgccctgcaccggcaggtgctgcccttcctgctgcggaggatgaaggaggatgtgctgcaggacctgccccccaagatcatccaggactactactgcaccctgagccccctgcaggtgcagctgtatgaagattttgccaagagccgggccaagtgtgatgtggatgaaacagtgagcagcgccaccctgtctgaggagacagagaagcccaagctgaaggccactggacatgtgttccaggccctgcagtacctgaggaagctgtgcaaccacccagccctggtgctgaccccccagcaccctgagttcaagaccacagctgagaagctggccgtgcagaacagcagcctgcatgacatccagcacgcccccaagctgagcgccctgaagcagctgctgctggactgtggcctgggcaatggcagcaccagcgagagcggcacagagagcgtggtggcccagcaccgcatcctgatcttctgccagctgaagtccatgctggacatcgtggagcatgacctgctgaagccccacctgcccagcgtgacctacctgcggctggatggcagcatccccccaggccagaggcacagcatcgtgagccgcttcaacaatgaccccagcattgatgtgctgctgctgaccacccacgtgggcggcctgggcctgaacctgaccggggctgacacagtggtgtttgtggagcatgactggaaccccatgagggacctgcaggccatggaccgggcccacagaattggccagaagagggtggtgaatgtgtaccgcctcatcacccggggcaccctggaggagaagatcatgggcctgcagaagttcaagatgaacatcgccaacacagtcatcagccaggagaacagcagcctgcagagcatgggcacagaccagctgctggacctcttcaccctggacaaggatggcaaggccgagaaggctgacaccagcaccagcggcaaggcctccatgaagagcatcctggagaacctgagtgacctgtgggaccaggagcagtatgattctgagtacagcctggagaacttcatgcacagcctgaagtag

SEQ ID NO: 145459 - DNA, 2100 bp, synthetic construct
  misc_feature 1..2100: note = Description of Artificial Sequence: Synthetic coding sequence
  source 1..2100: mol_type = other DNA
aagctgtggttcaagaacacagaggactacagaagaacagccctgacccggctgaccagcggcgtgatggagcagctggatgtgggcatcgtgccctacatcgtgctgctggtggtgcctgtgctgggccgcatgtctgaccagacagattctgtgcgcttcatggccacccagtgctttgccaccctcatccggctgatgcccctggaggccggcatcccagacccccccaacatgtctgctgagctgatccagctgaaggccaaggagcggcacttcctggagcagctgctggatggcaagaagctggagaactacaagatccctgtgcccatcaatgctgagctgaggaagtaccagcaggatggagtgaactggctggccttcctgaacaagtacaagctgcacggcatcctgtgtgatgacatgggcctgggcaagaccctgcagagcatctgcatcctggccggggaccactgccaccgggcccaggagtatgcccggagcaagctggccgagtgcatgcccctgcccagcctggtggtgtgcccccccaccctgaccggccactgggtggatgaggtgggcaagttctgcagccgggagtacctgaaccccctgcactacacaggccccccaacagagcgcatccggctgcagcaccaggtgaagaggcacaacctgattgtggccagctatgatgtggtgagaaatgacatcgacttcttcaggaacatcaagttcaactactgcatcctggatgagggccacgtgatcaagaatggcaagaccaagctgagcaaggctgtgaagcagctgacagccaactaccgcatcatcctgagcggcacccccatccagaacaacgtgctggagctgtggagcctgtttgacttcctgatgcctggcttcctgggcacagagcggcagtttgctgcccgctatggcaagcccatcctggccagcagagatgcccggagcagcagccgggagcaggaggccggcgtgctggccatggatgccctgcaccggcaggtgctgcccttcctgctgcggaggatgaaggaggatgtgctgcaggacctgccccccaagatcatccaggactactactgcaccctgagccccctgcaggtgcagctgtatgaagattttgccaagagccgggccaagtgtgatgtggatgaaacagtgagcagcgccaccctgtctgaggagacagagaagcccaagctgaaggccactggacatgtgttccaggccctgcagtacctgaggaagctgtgcaaccacccagccctggtgctgaccccccagcaccctgagttcaagaccacagctgagaagctggccgtgcagaacagcagcctgcatgacatccagcacgcccccaagctgagcgccctgaagcagctgctgctggactgtggcctgggcaatggcagcaccagcgagagcggcacagagagcgtggtggcccagcaccgcatcctgatcttctgccagctgaagtccatgctggacatcgtggagcatgacctgctgaagccccacctgcccagcgtgacctacctgcggctggatggcagcatccccccaggccagaggcacagcatcgtgagccgcttcaacaatgaccccagcattgatgtgctgctgctgaccacccacgtgggcggcctgggcctgaacctgaccggggctgacacagtggtgtttgtggagcatgactggaaccccatgagggacctgcaggccatggaccgggcccacagaattggccagaagagggtggtgaatgtgtaccgcctcatcacccggggcaccctggaggagaagatcatgggcctgcagaagttcaagatgaacatcgccaacacagtcatcagccaggagaacagcagcctgcagagcatgggcacagaccagctgctggacctcttcaccctggacaaggatggcaaggccgagaaggctgacaccagcaccagcggcaaggcctccatgaagagcatcctggagaacctgagtgacctgtgggaccaggagcagtatgattctgagtacagcctggagaacttcatgcacagcctgaagtag

SEQ ID NO: 145460 - DNA, 2034 bp, synthetic construct
  misc_feature 1..2034: note = Description of Artificial Sequence: Synthetic coding sequence
  source 1..2034: mol_type = other DNA
atggagcagctggatgtgggcatcgtgccctacatcgtgctgctggtggtgcctgtgctgggccgcatgtctgaccagacagattctgtgcgcttcatggccacccagtgctttgccaccctcatccggctgatgcccctggaggccggcatcccagacccccccaacatgtctgctgagctgatccagctgaaggccaaggagcggcacttcctggagcagctgctggatggcaagaagctggagaactacaagatccctgtgcccatcaatgctgagctgaggaagtaccagcaggatggagtgaactggctggccttcctgaacaagtacaagctgcacggcatcctgtgtgatgacatgggcctgggcaagaccctgcagagcatctgcatcctggccggggaccactgccaccgggcccaggagtatgcccggagcaagctggccgagtgcatgcccctgcccagcctggtggtgtgcccccccaccctgaccggccactgggtggatgaggtgggcaagttctgcagccgggagtacctgaaccccctgcactacacaggccccccaacagagcgcatccggctgcagcaccaggtgaagaggcacaacctgattgtggccagctatgatgtggtgagaaatgacatcgacttcttcaggaacatcaagttcaactactgcatcctggatgagggccacgtgatcaagaatggcaagaccaagctgagcaaggctgtgaagcagctgacagccaactaccgcatcatcctgagcggcacccccatccagaacaacgtgctggagctgtggagcctgtttgacttcctgatgcctggcttcctgggcacagagcggcagtttgctgcccgctatggcaagcccatcctggccagcagagatgcccggagcagcagccgggagcaggaggccggcgtgctggccatggatgccctgcaccggcaggtgctgcccttcctgctgcggaggatgaaggaggatgtgctgcaggacctgccccccaagatcatccaggactactactgcaccctgagccccctgcaggtgcagctgtatgaagattttgccaagagccgggccaagtgtgatgtggatgaaacagtgagcagcgccaccctgtctgaggagacagagaagcccaagctgaaggccactggacatgtgttccaggccctgcagtacctgaggaagctgtgcaaccacccagccctggtgctgaccccccagcaccctgagttcaagaccacagctgagaagctggccgtgcagaacagcagcctgcatgacatccagcacgcccccaagctgagcgccctgaagcagctgctgctggactgtggcctgggcaatggcagcaccagcgagagcggcacagagagcgtggtggcccagcaccgcatcctgatcttctgccagctgaagtccatgctggacatcgtggagcatgacctgctgaagccccacctgcccagcgtgacctacctgcggctggatggcagcatccccccaggccagaggcacagcatcgtgagccgcttcaacaatgaccccagcattgatgtgctgctgctgaccacccacgtgggcggcctgggcctgaacctgaccggggctgacacagtggtgtttgtggagcatgactggaaccccatgagggacctgcaggccatggaccgggcccacagaattggccagaagagggtggtgaatgtgtaccgcctcatcacccggggcaccctggaggagaagatcatgggcctgcagaagttcaagatgaacatcgccaacacagtcatcagccaggagaacagcagcctgcagagcatgggcacagaccagctgctggacctcttcaccctggacaaggatggcaaggccgagaaggctgacaccagcaccagcggcaaggcctccatgaagagcatcctggagaacctgagtgacctgtgggaccaggagcagtatgattctgagtacagcctggagaacttcatgcacagcctgaagtag

SEQ ID NO: 145461 - DNA, 1233 bp, synthetic construct
  misc_feature 1..1233: note = Description of Artificial Sequence: Synthetic coding sequence
  source 1..1233: mol_type = other DNA
atgggcgccaatgccagcaactacccccacagctgcagcccccgggtgggcggcaacagccaggcccagcagaccttcatcggcaccagcagctacagccagcagggctacggctgtgagagcaagctgtacagcctggaccacggccacgagaagccccaggacaagaagaagaggaccagcggcctggccaccctgaagaagaagttcatcaagaggaggaagagcaacagatctgctgaccacgccaagcagatgagggagctgctgagcggctgggatgtgagagatgtgaatgccctggtggaggagtatgagggcaccagcgccctgaaggagctgagcctgcaggccagcctggcccggcctgaggcccggaccctgcagaaggacatggctgacctgtatgagtacaagtactgcacagatgtggacctgatcttccaggagacctgcttccctgtgcaccgggccatcctggccgcccgctgccccttcttcaagaccctgctgagcagcagcccagaatatggagctgagatcatcatggacatcaacacagctggcatcgacatgcccatgttcagcgccctgctgcactacctgtacaccggggagtttggcatggaggacagccgcttccagaatgtggacatcctggtgcagctgtctgaggagtttggcacccccaacagcctggatgtggacatgaggggcctgtttgactacatgtgctactatgatgtggtgctgtccttcagcagtgacagcgagctggtggaggcctttggaggcaaccagaactgcctggatgaggagctgaaggcccacaaggctgtgatcagcgcccggagccccttcttcaggaacctgctgcagaggcgcatcagaactggagaggagatcacagacaggaccctgcggacccccacccgcatcatcctggatgagagcatcatccccaagaagtatgccaccgtcatcctgcactgcatgtacacagatgtggtggacctgtctgtgctgcactgcagccccagcgtgggcagcctgtctgaggtgcaggccctggtggccggcaagcccaacatgaccagggctgaggaggccatggagctgtaccacatcgccctcttcctggagttcaacatgctggcccaggaggagaccaccgtcatccggcctgcctgtgccgctgagctgagcaacagctgcctgctgccccagagctag

SEQ ID NO: 145462 - DNA, 3399 bp, synthetic construct
  misc_feature 1..3399: note = Description of Artificial Sequence: Synthetic coding sequence
  source 1..3399: mol_type = other DNA
atgggcgccaatgccagcaactacccccacagctgcagcccccgggtgggcggcaacagccaggcccagcagaccttcatcggcaccagcagctacagccagcagggctacggctgtgagagcaagctgtacagcctggaccacggccacgagaagccccaggacaagaagaagaggaccagcggcctggccaccctgaagaagaagttcatcaagaggaggaagagcaacagatctgctgaccacgccaagcagatgagggagctgctgagcggctgggatgtgagagatgtgaatgccctggtggaggagtatgagggcaccagcgccctgaaggagctgagcctgcaggccagcctggcccggcctgaggcccggaccctgcagaaggacatggctgacctgtatgagtacaagtactgcacagatgtggacctgatcttccaggagacctgcttccctgtgcaccgggccatcctggccgcccgctgccccttcttcaagaccctgctgagcagcagcccagaatatggagctgagatcatcatggacatcaacacagctggcatcgacatgcccatgttcagcgccctgctgcactacctgtacaccggggagtttggcatggaggacagccgcttccagaatgtggacatcctggtgcagctgtctgaggagtttggcacccccaacagcctggatgtggacatgaggggcctgtttgactacatgtgctactatgatgtggtgctgtccttcagcagtgacagcgagctggtggaggcctttggaggcaaccagaactgcctggatgaggagctgaaggcccacaaggctgtgatcagcgcccggagccccttcttcaggaacctgctgcagaggcgcatcagaactggagaggagatcacagacaggaccctgcggacccccacccgcatcatcctggatgagagcatcatccccaagaagtatgccaccgtcatcctgcactgcatgtacacagatgtggtggacctgtctgtgctgcactgcagccccagcgtgggcagcctgtctgaggtgcaggccctggtggccggcaagcccaacatgaccagggctgaggaggccatggagctgtaccacatcgccctcttcctggagttcaacatgctggcccagggctgtgaggacatcatcgccgagagcatcagcctggacaccctgattgccatcctgaagtggagcagccacccctacggcagcaagtgggtgcaccggcaggccctgcacttcctgtgtgaggagttcagccaggtgatgaccagtgatgtgttctatgagctgagcaaggaccacctgctgacagccatccagagcgactacctgcaggccagcgagcaggacatcctgaagtacctgatcaagtggggcgagcaccagctgatgaagagaattgctgaccgggagcccaacctgctgagcggcacagcccacagcgtgaacaagaggggcgtgaagagaagagacctggacatggaggagctgcgggagatcctgagcagcctgctgccctttgtgcgcatcgagcacatcctgcccatcaacagcgaggtgctgagtgatgccatgaagaggggcctcatcagcaccccacccagcgacatgctgcccaccacagaaggaggcaagagcaatgcctggctgcggcagaagaatgccggcatctacgtgcggcccaggctcttcagcccctacgtggaggaggccaagtctgtgctggatgagatgatggtggagcagacagacctggtgcggctgaggatggtgaggatgagcaatgtgcctgacaccctgtacatggtgaacaatgctgtgccccagtgctgccacatgatcagccaccagcagatcagcagcaaccagagcagcccccccagcgtggtggccaatgagatccctgtgccccggctgctgatcatgaaggacatggtgcggcggctgcaggagctgcggcacacagagcaggtgcagagggcctatgccctgaactgtggggagggcgccaccgtgtcctatgagatccagatccgggtgctgcgggagtttggcctggctgatgctgctgctgagctgctgcagaacccccacaagttcttcccagatgaaagatttggagatgagagccccctgctgaccatgaggcagcccggccgctgccgggtgaacagcaccccacctgctgagaccatgttcacagacctggacagctttgtggccttccacccccccctgcccccacctcctccaccctaccaccccccagccacccccatccacaaccagctgaaggccggctggaagcagaggcctcccagccagcaccccagccgctccttctcctacccctgcaaccacagcctcttccacagcaggacagcccccaaggccggccccccacctgtgtacctgcccagcgtgaaggccgcccccccagactgcaccagcacagctggcctgggccggcagacagtggccgctgctgctgccaccaccaccagcacagccacagctgctgctgctgctgccagcgagaagcaggtgaggacccagcctgtgctgaatgacctgatgccagacattgctgtgggcgtgtccaccctgagcctgaaggaccggcggctgcctgagctggccgtggacacagagctgagccagagcgtgtctgaggccggccctggccccccccagcacctgagctgcatcccccagaggcacacccacaccagcaggaagaagcacaccctggagcagaagacagacacccgggagaacccccaggagtacccagacttctatgacttcagcaatgctgcctgccggcccagcaccccagccctgagcaggaggacccccagccccagccagggcggctactttggaccagacctgtacagccacaacaaggccagccccagcggcctgaagagcgcctacctgcccggccagaccagccccaagaagcaggaggaggcccggcgggagtaccccctgagcccagatggccacctgcaccggcagaagaatgagcccatccacctggatgtggtggagcagcccccccagaggagtgacttccccctggccgccccagaaaatgccagcactggacctgcccacgtgcggggccgcacagctgtggagacagacctgaccttcggcctgacccccaaccggcccagcctgagcgcctgcagcagcgaggcccctgaggagaggtctggaagaaggctggccgacagcgagagcctgggccatggagcccagaggaacacagacctggagcgggaggacagcatcagccggggcagaagaagccccagcaagccagacttcctgtacaagaagagcgccctgtag

SEQ ID NO: 145463 - DNA, 2121 bp, synthetic construct
  misc_feature 1..2121: note = Description of Artificial Sequence: Synthetic coding sequence
  source 1..2121: mol_type = other DNA
atgtacacagatgtggtggacctgtctgtgctgcactgcagccccagcgtgggcagcctgtctgaggtgcaggccctggtggccggcaagcccaacatgaccagggctgaggaggccatggagctgtaccacatcgccctcttcctggagttcaacatgctggcccaggagcccaacctgctgagcggcacagcccacagcgtgaacaagaggggcgtgaagagaagagacctggacatggaggagctgcgggagatcctgagcagcctgctgccctttgtgcgcatcgagcacatcctgcccatcaacagcgaggtgctgagtgatgccatgaagaggggcctcatcagcaccccacccagcgacatgctgcccaccacagaaggaggcaagagcaatgcctggctgcggcagaagaatgccggcatctacgtgcggcccaggctcttcagcccctacgtggaggaggccaagtctgtgctggatgagatgatggtggagcagacagacctggtgcggctgaggatggtgaggatgagcaatgtgcctgacaccctgtacatggtgaacaatgctgtgccccagtgctgccacatgatcagccaccagcagatcagcagcaaccagagcagcccccccagcgtggtggccaatgagatccctgtgccccggctgctgatcatgaaggacatggtgcggcggctgcaggagctgcggcacacagagcaggtgcagagggcctatgccctgaactgtggggagggcgccaccgtgtcctatgagatccagatccgggtgctgcgggagtttggcctggctgatgctgctgctgagctgctgcagaacccccacaagttcttcccagatgaaagatttggagatgagagccccctgctgaccatgaggcagcccggccgctgccgggtgaacagcaccccacctgctgagaccatgttcacagacctggacagctttgtggccttccacccccccctgcccccacctcctccaccctaccaccccccagccacccccatccacaaccagctgaaggccggctggaagcagaggcctcccagccagcaccccagccgctccttctcctacccctgcaaccacagcctcttccacagcaggacagcccccaaggccggccccccacctgtgtacctgcccagcgtgaaggccgcccccccagactgcaccagcacagctggcctgggccggcagacagtggccgctgctgctgccaccaccaccagcacagccacagctgctgctgctgctgccagcgagaagcaggtgaggacccagcctgtgctgaatgacctgatgccagacattgctgtgggcgtgtccaccctgagcctgaaggaccggcggctgcctgagctggccgtggacacagagctgagccagagcgtgtctgaggccggccctggccccccccagcacctgagctgcatcccccagaggcacacccacaccagcaggaagaagcacaccctggagcagaagacagacacccgggagaacccccaggagtacccagacttctatgacttcagcaatgctgcctgccggcccagcaccccagccctgagcaggaggacccccagccccagccagggcggctactttggaccagacctgtacagccacaacaaggccagccccagcggcctgaagagcgcctacctgcccggccagaccagccccaagaagcaggaggaggcccggcgggagtaccccctgagcccagatggccacctgcaccggcagaagaatgagcccatccacctggatgtggtggagcagcccccccagaggagtgacttccccctggccgccccagaaaatgccagcactggacctgcccacgtgcggggccgcacagctgtggagacagacctgaccttcggcctgacccccaaccggcccagcctgagcgcctgcagcagcgaggcccctgaggagaggtctggaagaaggctggccgacagcgagagcctgggccatggagcccagaggaacacagacctggagcgggaggacagcatcagccggggcagaagaagccccagcaagccagacttcctgtacaagaagagcgccctgtag

SEQ ID NO: 145464 - DNA, 2346 bp, synthetic construct
  misc_feature 1..2346: note = Description of Artificial Sequence: Synthetic coding sequence
  source 1..2346: mol_type = other DNA
atggccggcggggccggggccggggctgatggaggagctgggggcggcggcggcggcggagatggcagcggccccagcggcagcagcagcggcggccgcagcctgcggggctgtgaggacatcatcgccgagagcatcagcctggacaccctcatcgccatcctgaagtggagcagccacccctacggcagcaagtgggtgcaccggcaggccctgcacttcctgtgtgaggagttcagccaggtgatgaccagtgatgtgttctatgagctgagcaaggaccacctgctgacagccatccagagcgactacctgcaggccagcgagcaggacatcctgaagtacctgatcaagtggggcgagcaccagctgatgaagagaattgctgaccgggagcccaacctgctgtctggaacagcccacagcgtgaacaagaggggcgtgaagaggcgggacctggacatggaggagctgcgggagatcctgagcagcctgctgccctttgtgagaattgagcacatcctgcccatcaacagcgaggtgctgagtgatgccatgaagaggggcctcatcagcaccccacccagcgacatgctgcccaccacagagggcggcaagagcaatgcctggctgcggcagaagaatgccggcatctacgtgcggcccaggctcttcagcccctacgtggaggaggccaagtctgtgctggatgagatgatggtggagcagacagacctggtgcggctgaggatggtgaggatgagcaatgtgcctgacaccctgtacatggtgaacaatgctgtgccccagtgctgccacatgatcagccaccagcagatcagcagcaaccagagcagccccccatctgtggtggccaatgagatccctgtgccccggctgctgatcatgaaggacatggtgcggcggctgcaggagctgcggcacacagagcaggtgcagagggcctatgccctgaactgtggggagggcgccaccgtgtcctatgagatccagatccgggtgctgcgggagtttggcctggctgatgctgctgctgagctgctgcagaacccccacaagttcttcccagatgaaagatttggagatgagagccccctgctgaccatgaggcagcccggccgctgccgggtgaacagcaccccacctgctgagaccatgttcacagacctggacagctttgtggccttccacccccccctgcccccacctcctccaccctaccaccccccagccacccccatccacaaccagctgaaggccggctggaagcagaggcctcccagccagcaccccagccgctccttctcctacccctgcaaccacagcctcttccacagcaggacagcccccaaggccggccccccacctgtgtacctgcccagcgtgaaggccgcccccccagactgcaccagcacagctggcctgggccggcagacagtggccgctgctgctgccaccaccaccagcacagccacagctgctgctgctgctgccagcgagaagcaggtgaggacccagcctgtgctgaatgacctgatgccagacattgctgtgggcgtgtccaccctgagcctgaaggaccggcggctgcctgagctggccgtggacacagagctgagccagagcgtgtctgaggccggccctggccccccccagcacctgagctgcatcccccagaggcacacccacaccagcaggaagaagcacaccctggagcagaagacagacacccgggagaacccccaggagtacccagacttctatgacttcagcaatgctgcctgccggcccagcaccccagccctgagcaggaggacccccagccccagccagggcggctacttcggccctgacctgtacagccacaacaaggccagccccagcggcctgaagagcgcctacctgcccggccagaccagccccaagaagcaggaggaggcccggcgggagtaccccctgagcccagatggccacctgcaccggcagaagaatgagcccatccacctggatgtggtggagcagcccccccagaggagtgacttccccctggccgccccagaaaatgccagcacaggccctgcccacgtgcggggccgcacagctgtggagacagacctgaccttcggcctgacccccaaccggcccagcctgagcgcctgcagcagcgaggcccctgaggagaggagcggccggcggctggccgacagcgagagcctgggccacggggcccagaggaacacagacctggagagagaagattccatcagccggggccgccgcagccccagcaagccagacttcctgtacaagaagagcgccctgtag

SEQ ID NO: 145465 - DNA, 168 bp, synthetic construct
  misc_feature 1..168: note = Description of Artificial Sequence: Synthetic coding sequence
  source 1..168: mol_type = other DNA
atgggcgccaatgccagcaactacccccacagctgcagcccccgggtgggcggcaacagccaggcccagcagaccttcatcggcaccagcagctacagccagcagggctacggctgtgagagcaagctgtacagcctggaccacggccacgagaagccccaggactag

SEQ ID NO: 145466 - DNA, 1635 bp, synthetic construct
  misc_feature 1..1635: note = Description of Artificial Sequence: Synthetic coding sequence
  source 1..1635: mol_type = other DNA
atgagggagagccagcctgaggccgagatccccctgcaggacaccacagctgaggccttcaccatgctgctgaagtacatctacacaggccgggccaccctgacagatgagaaggaggaggtgctgctggacttcctgagcctggcccacaagtatggcttccctgagctggaggacagcaccagcgagtacctgtgcaccatcctgaacatccagaatgtgtgcatgacctttgatgtggccagcctgtacagcctgcccaagctgacctgcatgtgctgcatgttcatggacagaaatgcccaggaggtgctgagcagcgagggcttcctgagcctgagcaagacagccctgctgaacatcgtgctgcgggacagctttgctgcccctgagaaggacatcttcctggccctgctgaactggtgcaagcacaacagcaaggagaaccacgccgagatcatgcaggccgtgcggctgcccctgatgagcctgacagagctgctgaatgtggtgcggcccagcggcctgctgagcccagatgccatcctggatgccatcaaggtgcgctctgagagccgggacatggacctgaactaccggggcatgctgatcccagaagaaaatattgccaccatgaagtacggggcccaggtggtgaagggggagctgaagagcgccctgctggatggagacacccagaactatgacctggaccacggcttcagccgccaccccattgatgatgactgccgcagcggcatcgagatcaagctgggccagcccagcatcatcaaccacatccgcatcctgctgtgggaccgggacagccgcagctacagctacttcatcgaggtgtccatggatgagctggactgggtgcgggtcatcgaccacagccagtacctgtgccgctcctggcagaagctgtacttccctgcccgggtgtgccgctacatcagaattgtgggcacccacaacacagtgaacaagatcttccacatcgtggcctttgagtgcatgttcaccaacaagaccttcaccctggagaagggcctgattgtgcccatggagaatgtggccaccatcgctgactgtgcctctgtgattgaaggagtgagccgcagcagaaatgccctgctgaatggagacaccaagaactatgactgggacagcggctacacctgccaccagctgggcagcggggccatcgtggtgcagctggcccagccctacatgattggcagcatccggctgctgctgtgggactgtgatgacaggagctacagctactacgtggaggtgtccaccaaccagcagcagtggaccatggtggccgacaggaccaaggtgtcctgcaagtcctggcagagcgtgacctttgagcggcagcctgccagcttcatccgcatcgtgggcacccacaacacagccaatgaggtgttccactgtgtgcactttgaatgtcctgagcagcagagcagccagaaggaggagaacagcgaggagagcggcactggagacaccagcctggccggccagcagctggacagccacgccctgcgggcccccagcggcagcagcctgcccagcagccctggcagcaacagccgcagccccaaccggcagcaccagtag

SEQ ID NO: 145467 - DNA, 1839 bp, synthetic construct
  misc_feature 1..1839: note = Description of Artificial Sequence: Synthetic coding sequence
  source 1..1839: mol_type = other DNA
atgagcaacagccaccccctgcggcccttcaccgctgtgggggagattgaccacgtgcacatcctgtctgagcacatcggggccctgctgattggagaggagtatggagatgtgacctttgtggtggagaagaagcgcttccctgcccacagggtcatcctggccgcccgctgccagtacttccgggccctgctgtatggaggcatgagggagagccagcctgaggccgagatccccctgcaggacaccacagctgaggccttcaccatgctgctgaagtacatctacacaggccgggccaccctgacagatgagaaggaggaggtgctgctggacttcctgagcctggcccacaagtatggcttccctgagctggaggacagcaccagcgagtacctgtgcaccatcctgaacatccagaatgtgtgcatgacctttgatgtggccagcctgtacagcctgcccaagctgacctgcatgtgctgcatgttcatggacagaaatgcccaggaggtgctgagcagcgagggcttcctgagcctgagcaagacagccctgctgaacatcgtgctgcgggacagctttgctgcccctgagaaggacatcttcctggccctgctgaactggtgcaagcacaacagcaaggagaaccacgccgagatcatgcaggccgtgcggctgcccctgatgagcctgacagagctgctgaatgtggtgcggcccagcggcctgctgagcccagatgccatcctggatgccatcaaggtgcgctctgagagccgggacatggacctgaactaccggggcatgctgatcccagaagaaaatattgccaccatgaagtacggggcccaggtggtgaagggggagctgaagagcgccctgctggatggagacacccagaactatgacctggaccacggcttcagccgccaccccattgatgatgactgccgcagcggcatcgagatcaagctgggccagcccagcatcatcaaccacatccgcatcctgctgtgggaccgggacagccgcagctacagctacttcatcgaggtgtccatggatgagctggactgggtgcgggtcatcgaccacagccagtacctgtgccgctcctggcagaagctgtacttccctgcccgggtgtgccgctacatcagaattgtgggcacccacaacacagtgaacaagatcttccacatcgtggcctttgagtgcatgttcaccaacaagaccttcaccctggagaagggcctgattgtgcccatggagaatgtggccaccatcgctgactgtgcctctgtgattgaaggagtgagccgcagcagaaatgccctgctgaatggagacaccaagaactatgactgggacagcggctacacctgccaccagctgggcagcggggccatcgtggtgcagctggcccagccctacatgattggcagcatccggctgctgctgtgggactgtgatgacaggagctacagctactacgtggaggtgtccaccaaccagcagcagtggaccatggtggccgacaggaccaaggtgtcctgcaagtcctggcagagcgtgacctttgagcggcagcctgccagcttcatccgcatcgtgggcacccacaacacagccaatgaggtgttccactgtgtgcactttgaatgtcctgagcagcagagcagccagaaggaggagaacagcgaggagagcggcactggagacaccagcctggccggccagcagctggacagccacgccctgcgggcccccagcggcagcagcctgcccagcagccctggcagcaacagccgcagccccaaccggcagcaccagtag

SEQ ID NO: 145468 - DNA, 1635 bp, synthetic construct; identical to SEQ ID NO: 145466
  misc_feature 1..1635: note = Description of Artificial Sequence: Synthetic coding sequence
  source 1..1635: mol_type = other DNA

SEQ ID NO: 145469 - DNA, 1839 bp, synthetic construct; identical to SEQ ID NO: 145467
  misc_feature 1..1839: note = Description of Artificial Sequence: Synthetic coding sequence
  source 1..1839: mol_type = other DNA

SEQ ID NO: 145470 - DNA, 279 bp, synthetic construct
  misc_feature 1..279: note = Description of Artificial Sequence: Synthetic coding sequence
  source 1..279: mol_type = other DNA
atgagcaacagccaccccctgcggcccttcaccgctgtgggggagattgaccacgtgcacatcctgtctgagcacatcggggccctgctgattggagaggagtatggagatgtgacctttgtggtggagaagaagcgcttccctgcccacagggtcatcctggccgcccgctgccagtacttccgggccctgctgtatggaggcatgagggagagccagcctgaggccgagatccccctgcaggacaccacagctgaggccttcaccatgctgctgtag

SEQ ID NO: 145471 - DNA, 1749 bp, synthetic construct
  misc_feature 1..1749: note = Description of Artificial Sequence: Synthetic coding sequence
  source 1..1749: mol_type = other DNA
atgtgccgggccctgctgtatggaggcatgagggagagccagcctgaggccgagatccccctgcaggacaccacagctgaggccttcaccatgctgctgaagtacatctacacaggccgggccaccctgacagatgagaaggaggaggtgctgctggacttcctgagcctggcccacaagtatggcttccctgagctggaggacagcaccagcgagtacctgtgcaccatcctgaacatccagaatgtgtgcatgacctttgatgtggccagcctgtacagcctgcccaagctgacctgcatgtgctgcatgttcatggacagaaatgcccaggaggtgctgagcagcgagggcttcctgagcctgagcaagacagccctgctgaacatcgtgctgcgggacagctttgctgcccctgagaaggacatcttcctggccctgctgaactggtgcaagcacaacagcaaagaaaatcatgctgagatcatgcaggccgtgcggctgcccctgatgagcctgacagagctgctgaatgtggtgcggcccagcggcctgctgagcccagatgccatcctggatgccatcaaggtgcgctctgagagccgggacatggacctgaactaccggggcatgctgatccctgaggagaacatcgccaccatgaagtatggagcccaggtggtgaagggggagctgaagagcgccctgctggatggagacacccagaactatgacctggaccacggcttcagccgccaccccattgatgatgactgccgctctggaattgagatcaagctgggccagcccagcatcatcaaccacatccgcatcctgctgtgggaccgggacagccgcagctacagctacttcatcgaggtgtccatggatgagctggactgggtgcgggtgattgaccacagccagtacctgtgccgctcctggcagaagctgtacttccctgcccgggtgtgcagcggagatggagtgtccctgtggtgccccctgtggagcaggaccccagagctgaagcagagcagcctgctgggcctgcccaagtgccgctacatcagaattgtgggcacccacaacacagtgaacaagatcttccacatcgtggcctttgagtgcatgttcaccaacaagaccttcaccctggagaagggcctgattgtgcccatggagaatgtggccaccatcgctgactgtgcctctgtgattgaaggagtgagccgcagcagaaatgccctgctgaatggagacaccaagaactatgactgggacagcggctacacctgccaccagctgggcagcggggccatcgtggtgcagctggcccagccctacatgattggcagcatccggctgctgctgtgggactgtgatgacaggagctacagctactacgtggaggtgtccaccaaccagcagcagtggaccatggtggccgacaggaccaaggtgtcctgcaagtcctggcagagcgtgacctttgagcggcagcctgccagcttcatccgcatcgtgggcacccacaacacagccaatgaggtgttccactgtgtgcactttgaatgtcctgagcagcagagcagccagaaggaggagaacagcgaggagagcggcactggagacaccagcctggccggccagcagctggacagccacgccctgcgggcccccagcggcagcagcctgcccagcagccctggcagcaacagccgcagccccaaccggcagcaccagtag

SEQ ID NO: 145472 - DNA, 2211 bp, synthetic construct
  misc_feature 1..2211: note = Description of Artificial Sequence: Synthetic coding sequence
  source 1..2211: mol_type = other DNA
atgagcctgtctgaaaattctgtgtttgcctatgagagctctgtgcacagcaccaacgtgctgctgagcctgaatgaccagaggaagaaggatgtgctgtgtgatgtgaccatctttgtggagggccagcgcttccgggcccacaggtctgtgctggccgcctgcagcagctacttccacagcagaattgtgggccaggctgatggagagctgaacatcaccctgcctgaggaggtgacagtgaagggctttgagcccctcatccagtttgcctacacagccaagctgatcctgagcaaagaaaatgtggatgaggtgtgcaagtgtgtggagttcctgtctgtgcacaacatcgaggagagctgcttccagttcctgaagttcaagttcctggacagcacagctgaccagcaggagtgccccaggaagaagtgcttcagcagccactgccagaagacagacctgaagctgagcctgctggaccagagggacctggagacagatgaggtggaggagttcctggagaacaagaatgtgcagaccccccagtgcaagctgcggcgctaccagggcaatgccaaggccagcccccccctgcaggacagcgccagccagacctatgaatccatgtgcctggagaaggatgctgccctggccctgcccagcctgtgccccaagtacaggaagttccagaaggccttcggcacagacagagtgaggactggagagagctctgtgaaggacatccacgcctctgtgcagcccaatgaaagaagtgaaaatgaatgtctgggcggcgtgcctgaatgtcgggacctgcaggtgatgctgaagtgtgatgagagcaagctggccatggagcctgaggagaccaagaaggaccctgccagccagtgccccacagagaagtctgaggtgacccccttcccccacaacagcagcattgacccccacggcctgtacagcctgagcctgctgcacacctatgaccagtacggggacctgaactttgctggcatgcagaacaccaccgtgctgacagagaagcccctgagcggcacagatgtgcaggagaagacctttggagagagccaggacctgcccctgaagagtgacctgggcacccgggaggacagctctgtggccagcagtgacaggagctctgtggagcgggaggtggccgagcacctggccaagggcttctggagcgacatctgcagcacagacaccccctgccagatgcagctgagccctgctgtggccaaggatggcagcgagcagatcagccagaagaggtctgagtgcccctggctgggcatccgcatcagcgagagccctgagcccggccagaggaccttcaccaccctgagctctgtgaactgccccttcatcagcaccctgagcacagagggctgcagcagcaacctggagattggaaatgatgattatgtgtctgagccccagcaggagccctgcccctatgcctgcgtcatcagcctgggagatgacagcgagacagacacagaaggagacagcgagagctgcagcgcccgggagcaggagtgtgaggtgaagctgcccttcaatgcccagaggatcatcagcctgagcagaaatgacttccagagcctgctgaagatgcacaagctgaccccagagcagctggactgcatccatgacatcagaagaagaagcaagaacagaattgctgcccagcgctgcaggaagaggaagctggactgcatccagaacctggagagcgagattgagaagctgcagagcgagaaggagagcctgctgaaggagcgggaccacatcctgagcaccctgggggagaccaagcagaacctgaccggcctgtgccagaaggtgtgcaaggaggccgccctgagccaggagcagatccagatcctggccaagtacagcgctgctgactgccccctgtccttcctgatcagcgagaaggacaagagcaccccagatggagagctggccctgcccagcatcttcagcctgagtgaccggcccccagctgtgctgcccccctgtgcccggggcaacagcgagcccggctacgcccggggccaggagagccagcagatgagcacagccaccagcgagcaggccggccctgctgagcagtgccggcagagcggcggcatcagtgacttctgccagcagatgacagacaagtgcaccacagatgaatag

SEQ ID NO: 145473 - DNA, 2211 bp, synthetic construct; identical to SEQ ID NO: 145472
  misc_feature 1..2211: note = Description of Artificial Sequence: Synthetic coding sequence
  source 1..2211: mol_type = other DNA

SEQ ID NO: 145474 - DNA, 513 bp, synthetic construct
  misc_feature 1..513: note = Description of Artificial Sequence: Synthetic coding sequence
  source 1..513: mol_type = other DNA
atgagcctgtctgaaaattctgtgtttgcctatgagagctctgtgcacagcaccaacgtgctgctgagcctgaatgaccagaggaagaaggatgtgctgtgtgatgtgaccatctttgtggagggccagcgcttccgggcccacaggtctgtgctggccgcctgcagcagctacttccacagcagaattgtgggccaggctgatggagagctgaacatcaccctgcctgaggaggtgacagtgaagggctttgagcccctcatccagtttgcctacacagccaagctgatcctgagcaaagaaaatgtggatgaggtgtgcaagtgtgtggagttcctgtctgtgcacaacatcgaggagagctgcttccagttcctgaagttcaagttcctggacagcacagctgaccagcaggagtgccccaggaagaagtgcttcagcagccactgccagaagacagacctgaagctgagcctgctggaccagagggacctggagacagatgaggtgtag

SEQ ID NO: 145475 - DNA, 663 bp, synthetic construct
  misc_feature 1..663: note = Description of Artificial Sequence: Synthetic coding sequence
  source 1..663: mol_type = other DNA
atgagcctgtctgaaaattctgtgtttgcctatgagagctctgtgcacagcaccaacgtgctgctgagcctgaatgaccagaggaagaaggatgtgctgtgtgatgtgaccatctttgtggagggccagcgcttccgggcccacaggtctgtgctggccgcctgcagcagctacttccacagcagaattgtgggccaggctgatggagagctgaacatcaccctgcctgaggaggtgacagtgaagggctttgagcccctcatccagtttgcctacacagccaagctgatcctgagcaaagaaaatgtggatgaggtgtgcaagtgtgtggagttcctgtctgtgcacaacatcgaggagagctgcttccagttcctgaagttcaagttcctggacagcacagctgaccagcaggagtgccccaggaagaagtgcttcagcagccactgccagaagacagacctgaagctgagcctgctggaccagagggacctggagacagatgaggtggaggagttcctggagaacaagaatgtgcagaccccccagtgcaagctgcggcgctaccagggcaatgccaaggccagcccccccctgcaggacagcgccagccagacctatgaatccatgtgcctggagaaggatgctgccctggccctgtag

SEQ ID NO: 145476 - DNA, 678 bp, synthetic construct
  misc_feature 1..678: note = Description of Artificial Sequence: Synthetic coding sequence
  source 1..678: mol_type = other DNA
atgagcctgtctgaaaattctgtgtttgcctatgagagctctgtgcacagcaccaacgtgctgctgagcctgaatgaccagaggaagaaggatgtgctgtgtgatgtgaccatctttgtggagggccagcgcttccgggcccacaggtctgtgctggccgcctgcagcagctacttccacagcagaattgtgggccaggctgatggagagctgaacatcaccctgcctgaggaggtgacagtgaagggctttgagcccctcatccagtttgcctacacagccaagctgatcctgagcaaagaaaatgtggatgaggtgtgcaagtgtgtggagttcctgtctgtgcacaacatcgaggagagctgcttccagttcctgaagttcaagttcctggacagcacagctgaccagcaggagtgccccaggaagaagtgcttcagcagccactgccagaagacagacctgaagctgagcctgctggaccagagggacctggagacagatgaggtggaggagttcctggagaacaagaatgtgcagaccccccagtgcaagctgcggcgctaccagggcaatgccaaggccagcccccccctgcaggacagcgccagccagacctatgaatccatgtgcctggagaaggatgctgccctggccctgcccagcctgtgcccctag

SEQ ID NO: 145477 - DNA, 78 bp, synthetic construct
  misc_feature 1..78: note = Description of Artificial Sequence: Synthetic coding sequence
  source 1..78: mol_type = other DNA
atgagcctgtctgaaaattctgtgtttgcctatgagagctctgtgcacagcaccaacgtgctgctgagcctgaactag

SEQ ID NO: 145478 - DNA, 78 bp, synthetic construct; identical to SEQ ID NO: 145477
  misc_feature 1..78: note = Description of Artificial Sequence: Synthetic coding sequence
  source 1..78: mol_type = other DNA

SEQ ID NO: 145479 - DNA, 78 bp, synthetic construct; identical to SEQ ID NO: 145477
  misc_feature 1..78: note = Description of Artificial Sequence: Synthetic coding sequence
  source 1..78: mol_type = other DNA

SEQ ID NO: 145480 - DNA, 78 bp, synthetic construct; identical to SEQ ID NO: 145477
  misc_feature 1..78: note = Description of Artificial Sequence: Synthetic coding sequence
  source 1..78: mol_type = other DNA

SEQ ID NO: 145481 - DNA, 78 bp, synthetic construct; identical to SEQ ID NO: 145477
  misc_feature 1..78: note = Description of Artificial Sequence: Synthetic coding sequence
  source 1..78: mol_type = other DNA

SEQ ID NO: 145482 - DNA, 2526 bp, synthetic construct
  misc_feature 1..2526: note = Description of Artificial Sequence: Synthetic coding sequence
  source 1..2526: mol_type = other DNA
atgtctgtggatgagaagccagacagccccatgtatgtgtatgagagcacagtgcactgcaccaacatcctgctgggcctgaatgaccagaggaagaaggacatcctgtgtgatgtgaccctcatcgtggagaggaaggagttccgggcccacagagctgtgctggccgcctgcagcgagtacttctggcaggccctggtgggccagaccaagaatgacctggtggtgtccctgcctgaggaggtgacagcccggggcttcggccccctgctgcagtttgcctacacagccaagctgctgctgagccgggagaacatccgggaggtgatccgctgtgccgagttcctgaggatgcacaacctggaggacagctgcttctccttcctgcagacccagctgctgaacagtgaagatggcctgtttgtgtgcaggaaggatgctgcctgccagaggcctcatgaggactgtgaaaattctgctggggaggaggaggatgaggaggaggagaccatggattctgaaacagccaagatggcctgcccccgggaccagatgctgcctgagcccatcagctttgaggccgccgccatccctgtggccgagaaggaggaggccctgctgcctgagccagatgtgcccacagacaccaaggagagcagcgagaaggatgccctgacccagtacccccgctacaagaagtaccagctggcctgcaccaagaatgtgtacaatgccagcagccacagcaccagcggctttgccagcaccttccgggaggacaacagcagcaacagcctgaagccaggcctggcccggggccagatcaagtctgagcccccatctgaagaaaatgaggaggagagcatcaccctgtgcctgtctggagatgagccagatgccaaggacagagctggagatgtggagatggacaggaagcagcccagccctgcccccacccccacagccccagctggggccgcctgcctggagaggagccgctctgtggccagccccagctgcctgcggagcctcttcagcatcaccaagtctgtggagctgagcggcctgcccagcaccagccagcagcactttgcccggagccctgcctgcccctttgacaagggcatcacccagggcgacctgaagacagactacacccccttcaccggcaactacggccagccccacgtgggccagaaggaggtgagcaacttcaccatgggcagccccctgcggggccctggcctggaggccctgtgcaagcaggagggggagctggaccggcgcagcgtcatcttcagcagcagcgcctgtgaccaggtgtccacctctgtgcacagctacagcggcgtgagcagcctggacaaggacctgtctgagcctgtgcccaagggcctgtgggtgggcgccggccagagcctgcccagcagccaggcctacagccacggcggcctgatggctgaccacctgcccggccgcatgaggcccaacaccagctgccctgtgcccatcaaggtgtgccccaggagcccccccctggagaccaggaccaggaccagcagcagctgcagcagctacagctatgcagaagatggcagcggcggcagcccctgcagcctgcccctgtgtgagttcagcagcagcccctgcagccagggcgcccgcttcctggccacagagcaccaggagcccggcctgatgggagatggcatgtacaaccaggtgcggccccagatcaagtgtgagcagagctatggcaccaacagcagtgatgaaagtggcagcttcagcgaggccgacagcgagagctgccctgtgcaggaccggggccaggaggtgaagctgcccttccctgtggaccagatcacagacctgcccagaaatgacttccagatgatgatcaagatgcacaagctgaccagcgagcagctggagttcatccatgatgtgagaagaagaagcaagaacagaattgctgcccagcgctgcaggaagaggaagctggactgcatccagaacctggagtgtgagatcaggaagctggtgtgtgagaaggagaagctgctgtctgagaggaaccagctgaaggcctgcatgggagagctgctggacaacttcagctgcctgagccaggaggtgtgccgggacatccagagccctgagcagatccaggccctgcaccgctactgccctgtgctgcggcccatggacctgcccacagccagcagcatcaacccagcccccctgggcgctgagcagaacattgctgccagccagtgtgctgtgggggagaatgtgccctgctgcctggagcccggggccgcccctcctggccccccctgggcccccagcaacaccagcgagaactgcaccagcggccggcggctggagggcacagatcctggcaccttcagcgagcggggcccccccctggagcccaggagccagacagtgacagtggacttctgccaggagatgacagacaagtgcaccacagatgagcagcccaggaaggactacacctag

SEQ ID NO: 145483 - DNA, 2526 bp, synthetic construct; identical to SEQ ID NO: 145482
  misc_feature 1..2526: note = Description of Artificial Sequence: Synthetic coding sequence
  source 1..2526: mol_type = other DNA

SEQ ID NO: 145484 - DNA, 246 bp, synthetic construct
  misc_feature 1..246: note = Description of Artificial Sequence: Synthetic coding sequence
  source 1..246: mol_type = other DNA
atgtctgtggatgagaagccagacagccccatgtatgtgtatgagagcacagtgcactgcaccaacatcctgctgggcctgaatgaccagaggaagaaggacatcctgtgtgatgtgaccctcatcgtggagaggaaggagttccgggcccacagagctgtgctggccgcctgcagcgagtacttctggcaggccctggtgggccagaccaagaatgacctggtggtgtccctgcctgaggagtag

SEQ ID NO: 145485 - DNA, 246 bp, synthetic construct; identical to SEQ ID NO: 145484
  misc_feature 1..246: note = Description of Artificial Sequence: Synthetic coding sequence
  source 1..246: mol_type = other DNA

SEQ ID NO: 145486 - DNA, 2526 bp, synthetic construct; identical to SEQ ID NO: 145482
  misc_feature 1..2526: note = Description of Artificial Sequence: Synthetic coding sequence
  source 1..2526: mol_type = other DNA

SEQ ID NO: 145487 - DNA, 477 bp, synthetic construct
  misc_feature 1..477: note = Description of Artificial Sequence: Synthetic coding sequence
  source 1..477: mol_type = other DNA
atgagccatggaaaaggaacagacatgctgcctgagattgctgctgctgtgggcttcctgagcagcctgctgcggacccggggctgtgtgtctgagcagaggctgaaggtgttttctggggccctgcaggaggccctgacagagcactacaagcaccactggttccctgagaagcccagcaaaggaagtggctaccgctgcatccgcatcaaccacaagatggaccccatcatcagccgggtggccagccagatcggcctgagccagccccagctgcaccagctgctgcccagcgagctgaccctgtgggtggacccctatgaggtgtcctacagaattggagaagatggcagcatctgtgtgctgtatgaggaggcccccctggccgccagctgtggcctgctgacctgcaagaaccaggtgctgctgggccgcagcagccccagcaagaactacgtgatggctgtgagcagctag

SEQ ID NO: 145488 - DNA, 3258 bp, synthetic construct
  misc_feature 1..3258: note = Description of Artificial Sequence: Synthetic coding sequence
  source 1..3258: mol_type = other DNA
atggacaccccagaaaatgtgctgcagatgctggaggcccacatgcagagctacaagggaaatgaccccctgggggagtgggagcgctacatccagtgggtggaggagaacttccctgagaacaaggagtacctgatcaccctgctggagcacctgatgaaggagttcctggacaagaagaagtaccacaatgacccccgcttcatctcctactgcctgaagtttgctgagtacaacagcgacctgcaccagttctttgagttcctgtacaaccacggcatcggcaccctgagcagccccctgtacatcgcctgggccggccacctggaggcccagggcgagctgcagcacgccagcgctgtgctgcagaggggcatccagaaccaggccgagccccgggagttcctgcagcagcagtaccgcctcttccagacccggctgacagagacccacctgcctgcccaggcccggaccagcgagcccctgcacaacgtgcaggtgctgaaccagatgatcaccagcaagagcaaccctggcaacaacatggcctgcatcagcaagaaccagggcagcgagctgagcggggtcatcagcagcgcctgtgacaaggagagcaacatggagaggagggtcatcaccatcagcaagtctgagtacagcgtgcacagcagcctggccagcaaggtggatgtggagcaggtggtgatgtactgcaaggagaagctgatccggggggagagcgagttctcctttgaggagctgcgggcccagaagtacaaccagaggaggaagcatgagcagtgggtgaatgaagatagacactacatgaagaggaaggaggccaatgcctttgaggagcagctgctgaagcagaagatggatgagctgcacaagaagctgcaccaggtggtggagaccagccatgaggacctgcctgccagccaggagaggtctgaggtgaacccagccaggatgggccccagcgtgggcagccagcaggagctgcgggccccctgcctgcctgtgacctaccagcagacccctgtgaacatggagaagaacccccgggaggcccctcctgtggtgccccccctggccaatgccatctctgctgccctggtgtccccagccaccagccagagcatcgcccctcctgtgcccctgaaggcccagacagtgacagacagcatgtttgctgtggccagcaaggatgctggctgtgtgaacaagagcacccatgagttcaagccccagagcggggctgagatcaaggagggctgtgagacccacaaggtggccaacaccagcagcttccacaccacccccaacaccagcctgggcatggtgcaggccacccccagcaaggtgcagcccagccccaccgtgcacaccaaggaggccctgggcttcatcatgaacatgttccaggcccccaccctgcctgacatcagtgatgacaaggatgagtggcagagcctggaccagaatgaagatgcctttgaggcccagttccagaagaatgtgcgcagcagcggggcctggggcgtgaacaagatcatcagcagcctgagcagcgccttccacgtgtttgaagatggcaacaaggagaactacggcctgccccagcccaagaacaagcccaccggggcccggacctttggagagaggtctgtgtcccggctgcccagcaagcccaaggaggaggtgccccacgccgaggagttcctggatgacagcacagtgtggggcatccgctgcaacaagaccctggcccccagccccaagagccctggggacttcaccagcgctgcccagctggccagcacccccttccacaagctgcctgtggagagcgtgcacatcctggaggacaaggaaaatgtggtggccaagcagtgcacccaggccaccctggacagctgtgaggagaacatggtggtgcccagcagagatggcaagttcagccccatccaggagaagagccccaagcaggccctgagcagccacatgtacagcgccagcctgctgcggctgagccagcctgctgctggaggagtgctgacctgtgaggccgagctgggcgtggaggcctgccgcctgacagacacagatgctgccatcgcagaagatcctccagatgccatcgccggcctgcaggccgagtggatgcagatgagcagcctgggcaccgtggatgcccccaacttcatcgtgggcaacccctgggatgacaagctgatcttcaagctgctgagcggcctgagcaagcctgtgagcagctaccccaacacctttgagtggcagtgcaagctgcctgccatcaagcccaagacagagttccagctgggcagcaagctggtgtatgtgcaccacctgctgggggagggcgcctttgcccaggtgtatgaggccacccagggcgacctgaatgatgccaagaacaagcagaagtttgtgctgaaggtgcagaagccagccaacccctgggagttctacatcggcacccagctgatggagcggctgaagcccagcatgcagcacatgttcatgaagttctacagcgcccacctgttccagaatggatctgtgctggtgggggagctgtacagctatggcaccctgctgaatgccatcaacctgtacaagaacaccccagagaaggtgatgccccagggcctggtgatcagctttgccatgaggatgctgtacatgattgagcaggtgcatgactgtgagatcatccatggagacatcaagccagacaacttcatcctgggcaatggcttcctggagcaggatgatgaagatgacctgtctgctggcctggccctgattgacctgggccagagcattgacatgaagctgttccccaagggcaccatcttcaccgccaagtgtgagaccagcggcttccagtgtgtggagatgctgagcaacaagccctggaactaccagattgactactttggagtggccgccaccgtgtactgcatgctgtttggcacctacatgaaggtgaagaatgaaggaggagagtgcaagccagagggcctcttccggcggctgccccacctggacatgtggaatgagttcttccacgtgatgctgaacatcccagactgccaccacctgcccagcctggacctgctgcggcagaagctgaagaaggtgttccagcagcactacaccaacaagatccgggccctgaggaacagactcatcgtgctgctgctggagtgcaagaggagcaggaagtag

SEQ ID NO: 145489 - DNA, 3087 bp, synthetic construct
  misc_feature 1..3087: note = Description of Artificial Sequence: Synthetic coding sequence
  source 1..3087: mol_type = other DNA
atggacaccccagaaaatgtgctgcagatgctggaggcccacatgcagagctacaagggaaatgaccccctgggggagtgggagcgctacatccagtgggtggaggagaacttccctgagaacaaggagtacctgatcaccctgctggagcacctgatgaaggagttcctggacaagaagaagtaccacaatgacccccgcttcatctcctactgcctgaagtttgctgagtacaacagcgacctgcaccagttctttgagttcctgtacaaccacggcatcggcaccctgagcagccccctgtacatcgcctgggccggccacctggaggcccagggcgagctgcagcacgccagcgctgtgctgcagaggggcatccagaaccaggccgagccccgggagttcctgcagcagcagtaccgcctcttccagacccggctgacagagacccacctgcctgcccaggcccggaccagcgagcccctgcacaacgtgcaggtgctgaaccagatgatcaccagcaagagcaaccctggcaacaacatggcctgcatcagcaagaaccagggcagcgagctgagcggggtcatcagcagcgcctgtgacaaggagagcaacatggagaggagggtcatcaccatcagcaagtctgagtacagcgtgcacagcagcctggccagcaaggtggatgtggagcaggtggtgatgtactgcaaggagaagctgatccggggggagagcgagttctcctttgaggagctgcgggcccagaagtacaaccagaggaggaagcatgagcagtgggtgaatgaagatagacactacatgaagaggaaggaggccaatgcctttgaggagcagctgctgaagcagaagatggatgagctgcacaagaagctgcaccaggtggtggagaccagccatgaggacctgcctgccagccaggagaggtctgaggtgaacccagccaggatgggccccagcgtgggcagccagcaggagctgcgggccccctgcctgcctgtgacctaccagcagacccctgtgaacatggagaagaacccccgggaggcccctcctgtggtgccccccctggccaatgccatctctgctgccctggtgtccccagccaccagccagagcatcgcccctcctgtgcccctgaaggcccagacagtgacagacagcatgtttgctgtggccagcaaggatgctggctgtgtgaacaagagcacccatgagttcaagccccagagcggggctgagatcaaggagggctgtgagacccacaaggtggccaacaccagcagcttccacaccacccccaacaccagcctgggcatggtgcaggccacccccagcaaggtgcagcccagccccaccgtgcacaccaaggaggccctgggcttcatcatgaacatgttccaggcccccaccctgcctgacatcagtgatgacaaggatgagtggcagagcctggaccagaatgaagatgcctttgaggcccagttccagaagaatgtgcgcagcagcggggcctggggcgtgaacaagatcatcagcagcctgagcagcgccttccacgtgtttgaagatggcaacaaggagaactacggcctgccccagcccaagaacaagcccaccggggcccggacctttggagagaggtctgtgtcccggctgcccagcaagcccaaggaggaggtgccccacgccgaggagttcctggatgacagcacagtgtggggcatccgctgcaacaagaccctggcccccagccccaagagccctggggacttcaccagcgctgcccagctggccagcacccccttccacaagctgcctgtggagagcgtgcacatcctggaggacaaggaaaatgtggtggccaagcagtgcacccaggccaccctggacagctgtgaggagaacatggtggtgcccagcagagatggcaagttcagccccatccaggagaagagccccaagcaggccctgagcagccacatgtacagcgccagcctgctgcggctgagccagcctgctgctggaggagtgctgacctgtgaggccgagctgggcgtggaggcctgccgcctgacagacacagatgctgccatcgcagaagatcctccagatgccatcgccggcctgcaggccgagtggatgcagatgagcagcctgggcaccgtggatgcccccaacttcatcgtgggcaacccctgggatgacaagctgatcttcaagctgctgagcggcctgagcaagcctgtgagcagctaccccaacacctttgagtggcagtgcaagctgcctgccatcaagcccaagacagagttccagctgggcagcaagctggtgtatgtgcaccacctgctgggggagggcgcctttgcccaggtgtatgaggccacccagggcgacctgaatgatgccaagaacaagcagaagtttgtgctgaaggtgcagaagccagccaacccctgggagttctacatcggcacccagctgatggagcggctgaagcccagcatgcagcacatgttcatgaagttctacagcgcccacctgttccagaatggatctgtgctggtgggggagctgtacagctatggcaccctgctggatgatgaagatgacctgtctgctggcctggccctgattgacctgggccagagcattgacatgaagctgttccccaagggcaccatcttcaccgccaagtgtgagaccagcggcttccagtgtgtggagatgctgagcaacaagccctggaactaccagattgactactttggagtggccgccaccgtgtactgcatgctgtttggcacctacatgaaggtgaagaatgaaggaggagagtgcaagccagagggcctcttccggcggctgccccacctggacatgtggaatgagttcttccacgtgatgctgaacatcccagactgccaccacctgcccagcctggacctgctgcggcagaagctgaagaaggtgttccagcagcactacaccaacaagatccgggccctgaggaaccggctgattgtgctgctgctggagtgcaagaggagcaggaagtag

SEQ ID NO: 145490 - DNA, 3198 bp, synthetic construct
  misc_feature 1..3198: note = Description of Artificial Sequence: Synthetic coding sequence
  source 1..3198: mol_type = other DNA
atggacaccccagaaaatgtgctgcagtacatccagtgggtggaggagaacttccctgagaacaaggagtacctgatcaccctgctggagcacctgatgaaggagttcctggacaagaagaagtaccacaatgacccccgcttcatctcctactgcctgaagtttgctgagtacaacagcgacctgcaccagttctttgagttcctgtacaaccacggcatcggcaccctgagcagccccctgtacatcgcctgggccggccacctggaggcccagggcgagctgcagcacgccagcgctgtgctgcagaggggcatccagaaccaggccgagccccgggagttcctgcagcagcagtaccgcctcttccagacccggctgacagagacccacctgcctgcccaggcccggaccagcgagcccctgcacaacgtgcaggtgctgaaccagatgatcaccagcaagagcaaccctggcaacaacatggcctgcatcagcaagaaccagggcagcgagctgagcggggtcatcagcagcgcctgtgacaaggagagcaacatggagaggagggtcatcaccatcagcaagtctgagtacagcgtgcacagcagcctggccagcaaggtggatgtggagcaggtggtgatgtactgcaaggagaagctgatccggggggagagcgagttctcctttgaggagctgcgggcccagaagtacaaccagaggaggaagcatgagcagtgggtgaatgaagatagacactacatgaagaggaaggaggccaatgcctttgaggagcagctgctgaagcagaagatggatgagctgcacaagaagctgcaccaggtggtggagaccagccatgaggacctgcctgccagccaggagaggtctgaggtgaacccagccaggatgggccccagcgtgggcagccagcaggagctgcgggccccctgcctgcctgtgacctaccagcagacccctgtgaacatggagaagaacccccgggaggcccctcctgtggtgccccccctggccaatgccatctctgctgccctggtgtccccagccaccagccagagcatcgcccctcctgtgcccctgaaggcccagacagtgacagacagcatgtttgctgtggccagcaaggatgctggctgtgtgaacaagagcacccatgagttcaagccccagagcggggctgagatcaaggagggctgtgagacccacaaggtggccaacaccagcagcttccacaccacccccaacaccagcctgggcatggtgcaggccacccccagcaaggtgcagcccagccccaccgtgcacaccaaggaggccctgggcttcatcatgaacatgttccaggcccccaccctgcctgacatcagtgatgacaaggatgagtggcagagcctggaccagaatgaagatgcctttgaggcccagttccagaagaatgtgcgcagcagcggggcctggggcgtgaacaagatcatcagcagcctgagcagcgccttccacgtgtttgaagatggcaacaaggagaactacggcctgccccagcccaagaacaagcccaccggggcccggacctttggagagaggtctgtgtcccggctgcccagcaagcccaaggaggaggtgccccacgccgaggagttcctggatgacagcacagtgtggggcatccgctgcaacaagaccctggcccccagccccaagagccctggggacttcaccagcgctgcccagctggccagcacccccttccacaagctgcctgtggagagcgtgcacatcctggaggacaaggaaaatgtggtggccaagcagtgcacccaggccaccctggacagctgtgaggagaacatggtggtgcccagcagagatggcaagttcagccccatccaggagaagagccccaagcaggccctgagcagccacatgtacagcgccagcctgctgcggctgagccagcctgctgctggaggagtgctgacctgtgaggccgagctgggcgtggaggcctgccgcctgacagacacagatgctgccatcgcagaagatcctccagatgccatcgccggcctgcaggccgagtggatgcagatgagcagcctgggcaccgtggatgcccccaacttcatcgtgggcaacccctgggatgacaagctgatcttcaagctgctgagcggcctgagcaagcctgtgagcagctaccccaacacctttgagtggcagtgcaagctgcctgccatcaagcccaagacagagttccagctgggcagcaagctggtgtatgtgcaccacctgctgggggagggcgcctttgcccaggtgtatgaggccacccagggcgacctgaatgatgccaagaacaagcagaagtttgtgctgaaggtgcagaagccagccaacccctgggagttctacatcggcacccagctgatggagcggctgaagcccagcatgcagcacatgttcatgaagttctacagcgcccacctgttccagaatggatctgtgctggtgggggagctgtacagctatggcaccctgctgaatgccatcaacctgtacaagaacaccccagagaaggtgatgccccagggcctggtgatcagctttgccatgaggatgctgtacatgattgagcaggtgcatgactgtgagatcatccatggagacatcaagccagacaacttcatcctgggcaatggcttcctggagcaggatgatgaagatgacctgtctgctggcctggccctgattgacctgggccagagcattgacatgaagctgttccccaagggcaccatcttcaccgccaagtgtgagaccagcggcttccagtgtgtggagatgctgagcaacaagccctggaactaccagattgactactttggagtggccgccaccgtgtactgcatgctgtttggcacctacatgaaggtgaagaatgaaggaggagagtgcaagccagagggcctcttccggcggctgccccacctggacatgtggaatgagttcttccacgtgatgctgaacatcccagactgccaccacctgcccagcctggacctgctgcggcagaagctgaagaaggtgttccagcagcactacaccaacaagatccgggccctgaggaacagactcatcgtgctgctgctggagtgcaagaggagcaggaagtag

SEQ ID NO: 145491 - DNA, 2475 bp, synthetic construct
  misc_feature 1..2475: note = Description of Artificial Sequence: Synthetic coding sequence
  source 1..2475: mol_type = other DNA
atggacaccccagaaaatgtgctgcagatgctggaggcccacatgcagagctacaagggaaatgaccccctgggggagtgggagcgctacatccagtgggtggaggagaacttccctgagaacaaggagtacctgatcaccctgctggagcacctgatgaaggagttcctggacaagaagaagtaccacaatgacccccgcttcatctcctactgcctgaagtttgctgagtacaacagcgacctgcaccagttctttgagttcctgtacaaccacggcatcggcaccctgagcagccccctgtacatcgcctgggccggccacctggaggcccagggcgagctgcagcacgccagcgctgtgctgcagaggggcatccagaaccaggccgagccccgggagttcctgcagcagcagtaccgcctcttccagacccggctgacagagacccacctgcctgcccaggcccggaccagcgagcccctgcacaacgtgcaggtgctgaaccagatgatcaccagcaagagcaaccctggcaacaacatggcctgcatcagcaagaaccagggcagcgagctgagcggggtcatcagcagcgcctgtgacaaggagagcaacatggagaggagggtcatcaccatcagcaagtctgagtacagcgtgcacagcagcctggccagcaaggtggatgtggagcaggtggtgatgtactgcaaggagaagctgatccggggggagagcgagttctcctttgaggagctgcgggcccagaagtacaaccagaggaggaagcatgagcagtgggtgaatgaagatagacactacatgaagaggaaggaggccaatgcctttgaggagcagctgctgaagcagaagatggatgagctgcacaagaagctgcaccaggtggtggagaccagccatgaggacctgcctgccagccaggagaggtctgaggtgaacccagccaggatgggccccagcgtgggcagccagcaggagctgcgggccccctgcctgcctgtgacctaccagcagacccctgtgaacatggagaagaacccccgggaggcccctcctgtggtgccccccctggccaatgccatctctgctgccctggtgtccccagccaccagccagagcatcgcccctcctgtgcccctgaaggcccagacagtgacagacagcatgtttgctgtggccagcaaggatgctggctgtgtgaacaagagcacccatgagttcaagccccagagcggggctgagatcaaggagggctgtgagacccacaaggtggccaacaccagcagcttccacaccacccccaacaccagcctgggcatggtgcaggccacccccagcaaggtgcagcccagccccaccgtgcacaccaaggaggccctgggcttcatcatgaacatgttccaggcccccaccctgcctgacatcagtgatgacaaggatgagtggcagagcctggaccagaatgaagatgcctttgaggcccagttccagaagaatgtgcgcagcagcggggcctggggcgtgaacaagatcatcagcagcctgagcagcgccttccacgtgtttgaagatggcaacaaggagaactacggcctgccccagcccaagaacaagcccaccggggcccggacctttggagagaggtctgtgtcccggctgcccagcaagcccaaggaggaggtgccccacgccgaggagttcctggatgacagcacagtgtggggcatccgctgcaacaagaccctggcccccagccccaagagccctggggacttcaccagcgctgcccagctggccagcacccccttccacaagctgcctgtggagagcgtgcacatcctggaggacaaggaaaatgtggtggccaagcagtgcacccaggccaccctggacagctgtgaggagaacatggtggtgcccagcagagatggcaagttcagccccatccaggagaagagccccaagcaggccctgagcagccacatgtacagcgccagcctgctgcggctgagccagcctgctgctggaggagtgctgacctgtgaggccgagctgggcgtggaggcctgccgcctgacagacacagatgctgccatcgcagaagatcctccagatgccatcgccggcctgcaggccgagtggatgcagatgagcagcctgggcaccgtggatgcccccaacttcatcgtgggcaacccctgggatgacaagctgatcttcaagctgctgagcggcctgagcaagcctgtgagcagctaccccaacacctttgagtggcagtgcaagctgcctgccatcaagcccaagacagagttccagctgggcagcaagctggtgtatgtgcaccacctgctgggggagggcgcctttgcccaggtgtatgaggccacccagggcgacctgaatgatgccaagaacaagcagaagtttgtgctgaaggtgaagagctag

SEQ ID NO: 145492 - DNA, 981 bp, synthetic construct
  misc_feature 1..981: note = Description of Artificial Sequence: Synthetic coding sequence
  source 1..981: mol_type = other DNA
atgacaggcagcaatgagttcaagctgaaccagcccccagaagatggcatcagctctgtgaagttcagccccaacaccagccagttcctgctggtgtcctcctgggacacctctgtgcggctgtatgatgtgcctgccaacagcatgaggctgaagtaccagcacactggagctgtgctggactgtgccttctatgaccccacccacgcctggagcggcggcctggaccaccagctgaagatgcatgacctgaacacagaccaggagaacctggtgggcacccatgatgcccccatccgctgtgtggagtactgcccagaggtgaatgtgatggtgacaggctcctgggaccagacagtgaagctgtgggaccccaggaccccctgcaatgccggcaccttcagccagcctgagaaggtgtacaccctgtctgtgtctggggaccggctgattgtgggcacagctggaagaagagtgctggtgtgggacctgaggaacatgggctacgtgcagcagaggcgggagagcagcctgaagtaccagacccgctgcatccgggccttccccaacaagcagggctacgtgctgagcagcattgagggccgggtggccgtggagtacctggaccccagccctgaggtgcagaagaagaagtatgccttcaagtgccaccggctgaaggagaacaacatcgagcagatctaccctgtgaatgccatctccttccacaacatccacaacacctttgccactggaggcagtgatggctttgtgaacatctgggaccccttcaacaagaagaggctgtgccagttccaccgctaccccaccagcatcgccagcctggccttcagcaatgatggcaccaccctggccatcgccagcagctacatgtatgagatggatgacacagagcacccagaagatggcatcttcatccggcaggtgacagatgctgagaccaagcccaagagcacctag

SEQ ID NO: 145493 - DNA, 987 bp, synthetic construct
  misc_feature 1..987: note = Description of Artificial Sequence: Synthetic coding sequence
  source 1..987: mol_type = other DNA
atgacaggcagcaatgagttcaagctgaaccagcccccagaagatggcatcagctctgtgaagttcagccccaacaccagccagttcctgctggtgtcctcctgggacacctctgtgcggctgtatgatgtgcctgccaacagcatgaggctgaagtaccagcacactggagctgtgctggactgtgccttctatgaccccacccacgcctggagcggcggcctggaccaccagctgaagatgcatgacctgaacacagaccaggagaacctggtgggcacccatgatgcccccatccgctgtgtggagtactgcccagaggtgaatgtgatggtgacaggctcctgggaccagacagtgaagctgtgggaccccaggaccccctgcaatgccggcaccttcagccagcctgagaaggtgtacaccctgtctgtgtctggggaccggctgattgtgggcacagctggaagaagagtgctggtgtgggacctgaggaacatgggctacgtgcagcagaggcgggagagcagcctgaagtaccagacccgctgcatccgggccttccccaacaagcagggctacgtgctgagcagcattgagggccgggtggccgtggagtacctggaccccagccctgaggtgcagaagaagaagtatgccttcaagtgccaccggctgaaggagaacaacatcgagcagatctaccctgtgaatgccatctccttccacaacatccacaacacctttgccactggaggcagtgatggctttgtgaacatctgggaccccttcaacaagaagaggctgtgccagttccaccgctaccccaccagcatcgccagcctggccttcagcaatgatggcaccaccctggccatcgccagcagctacatgtatgagatggatgacacagagcacccagaagatggcatcttcatccggcaggtgacagatgctgagaccaagcccaagagcccctgcacctag

SEQ ID NO: 145494 - DNA, 747 bp, synthetic construct
  misc_feature 1..747: note = Description of Artificial Sequence: Synthetic coding sequence
  source 1..747: mol_type = other DNA
atgcatgacctgaacacagaccaggagaacctggtgggcacccatgatgcccccatccgctgtgtggagtactgcccagaggtgaatgtgatggtgacaggctcctgggaccagacagtgaagctgtgggaccccaggaccccctgcaatgccggcaccttcagccagcctgagaaggtgtacaccctgtctgtgtctggggaccggctgattgtgggcacagctggaagaagagtgctggtgtgggacctgaggaacatgggctacgtgcagcagaggcgggagagcagcctgaagtaccagacccgctgcatccgggccttccccaacaagcagggctacgtgctgagcagcattgagggccgggtggccgtggagtacctggaccccagccctgaggtgcagaagaagaagtatgccttcaagtgccaccggctgaaggagaacaacatcgagcagatctaccctgtgaatgccatctccttccacaacatccacaacacctttgccactggaggcagtgatggctttgtgaacatctgggaccccttcaacaagaagaggctgtgccagttccaccgctaccccaccagcatcgccagcctggccttcagcaatgatggcaccaccctggccatcgccagcagctacatgtatgagatggatgacacagagcacccagaagatggcatcttcatccggcaggtgacagatgctgagaccaagcccaagagcccctgcacctag

SEQ ID NO: 145495 - DNA, 1164 bp, synthetic construct
  misc_feature 1..1164: note = Description of Artificial Sequence: Synthetic coding sequence
  source 1..1164: mol_type = other DNA
atggcctgcaccatccagaaggccgaggccctggatggagcccacctgatgcagatcctgtggtatgatgaggaggagagcctgtacccagctgtgtggctgcgggacaactgcccctgcagcgactgctacctggacagcgccaaggccaggaagctgctggtggaggccctggatgtgaacatcggcatcaagggcctcatctttgacaggaagaaggtgtacatcacctggccagatgagcactacagcgagttccaggccgactggctgaagaagcgctgcttcagcaagcaggcccgggccaagctgcagcgggagctgttcttccctgagtgccagtactggggcagcgagctgcagctgcccaccctggactttgaagatgtgctgcgctatgatgagcacgcctacaagtggctgagcaccctgaagaaggtgggcatcgtgcggctgactggagccagtgacaagccaggagaggtgtccaagctgggcaagaggatgggcttcctgtacctgaccttctacggccacacctggcaggtgcaggacaagattgatgccaacaacgtggcctacaccaccgggaagctgtccttccacacagactacccagccctgcaccaccccccaggagtgcagctgctgcactgcatcaagcagacagtgactggaggagacagcgagatcgtggatggcttcaacgtgtgccagaagctgaagaagaacaacccccaggccttccagatcctgagcagcacctttgtggacttcacagacatcggcgtggactactgtgacttctctgtgcagagcaagcacaagatcatcgagctggatgacaagggccaggtggtgcgcatcaacttcaacaatgccacccgggacaccatctttgatgtgcctgtggagcgggtgcagcccttctacgccgccctgaaggagtttgtggacctgatgaacagcaaggagagcaagttcaccttcaagatgaaccctggagatgtgatcacctttgacaactggaggctgctgcatggaagaagaagctatgaggccggcacagagatcagccgccacctggagggcgcctatgctgactgggatgtggtgatgagccggctgcgcatcctgcggcagagggtggagaatggaaattag

SEQ ID NO: 145496 - DNA, 1164 bp, synthetic construct; identical to SEQ ID NO: 145495
  misc_feature 1..1164: note = Description of Artificial Sequence: Synthetic coding sequence
  source 1..1164: mol_type = other DNA

SEQ ID NO: 145497 - DNA, 1164 bp, synthetic construct; identical to SEQ ID NO: 145495
  misc_feature 1..1164: note = Description of Artificial Sequence: Synthetic coding sequence
  source 1..1164: mol_type = other DNA

SEQ ID NO: 145498 - DNA, 1164 bp, synthetic construct; identical to SEQ ID NO: 145495
  misc_feature 1..1164: note = Description of Artificial Sequence: Synthetic coding sequence
  source 1..1164: mol_type = other DNA

SEQ ID NO: 145499 - DNA, 207 bp, synthetic construct
  misc_feature 1..207: note = Description of Artificial Sequence: Synthetic coding sequence
  source 1..207: mol_type = other DNA
atggcctgcaccatccagaaggccgaggccctggatggagcccacctgatgcagatcctgtggtatgatgaggaggagagcctgtacccagctgtgtggctgcgggacaactgcccctgcagcgactgctacctggacagcgccaaggccaggaagctgctggtggaggccctggatgtgaacatcggcatcaagggcctcatctag

SEQ ID NO: 145500 - DNA, 771 bp, synthetic construct
  misc_feature 1..771: note = Description of Artificial Sequence: Synthetic coding sequence
  source 1..771: mol_type = other DNA
atggagcctgctgctgccctgcacttcagcctgcctgccagcctgctgctgctgctgctgctgctgctgctgagcctgtgtgccctggtgtctgcccagttcaccgtggtgggccctgccaaccccatcctggccatggtgggggagaacaccaccctgcgctgccacctgagccctgagaagaatgctgaggacatggaggtgcgctggttccgcagccagttctccccagctgtgtttgtgtacaagggcggccgggagaggacagaggagcagatggaggagtaccggggccgcatcacctttgtgtccaaggacatcaacagaggctctgtggccctggtgatccacaacgtgacagcccaggagaatggcatctaccgctgctacttccaggagggccgctcctatgatgaggccatcctgcggctggtggtggccgagagcttcatgcccagcgccagcccctggatggtggccctggccgtcatcctgacagccagcccctggatggtgtccatgaccgtcatcctggccgtgttcatcatcttcatggctgtgtccatctgctgcatcaagaagctgcagcgggagaagaagatcctgtctggagagaagaaggtggagcaggaggagaaggagatcgcccagcagctgcaggaggagctgcgctggaggaggaccttcctgcacgccggctatgagctgcccggcatccggggccccagctggaagaggcccctgcatggagagccccccagcgccttctag

SEQ ID NO: 145501 - DNA, 942 bp, synthetic construct
  misc_feature 1..942: note = Description of Artificial Sequence: Synthetic coding sequence
  source 1..942: mol_type = other DNA
atggagcctgctgctgccctgcacttcagcctgcctgccagcctgctgctgctgctgctgctgctgctgctgagcctgtgtgccctggtgtctgagagcttcatgcccagcgccagcccctggatggtggccctggccgtcatcctgacagccagcccctggatggtgtccatgaccgtcatcctggccgtgttcatcatcttcatggctgtgtccatctgctgcatcaagaagctgcagcgggagaagaagatcctgtctggagagaagaaggtggagcaggaggagaaggagatcgcccagcagctgcaggaggagctgcgctggaggaggaccttcctgcacgccgcagatgtggtgctggaccctgacacagcccaccctgagctgttcctgtctgaggaccggcgctctgtgcggcggggcccctaccggcagagggtgcctgacaaccctgagagatttgacagccagccctgtgtgctgggctgggagagctttgccagcggcaagcactactgggaggtggaggtggagaatgtgatggtgtggacagtgggcgtgtgccgccacagcgtggagaggaagggggaggtgctgctgatcccccagaatggcttctggaccctggagatgtttggaaaccagtaccgggccctgagcagccctgagcgcatcctgcccctgaaggagagcctgtgccgggtgggcgtcttcctggactatgaggccggagatgtgtccttctacaacatgagggacaggagccacatctacacctgccccaggtctgccttcaccgtgcctgtgcggcccttcttccggctgggcagtgatgacagccccatcttcatctgcccagccctgaccggggccagcggcgtgatggtgcctgaggagggcctgaagctgcaccgggtgggcacccaccagagcctgtag

SEQ ID NO: 145502 - DNA, 1608 bp, synthetic construct
  misc_feature 1..1608: note = Description of Artificial Sequence: Synthetic coding sequence
  source 1..1608: mol_type = other DNA
atggtgggggaggatgctgacctgccctgccacctgttccccaccatgtctgctgagaccatggagctgcgctgggtgagcagcagcctgcggcaggtggtgaatgtgtatgcagatggcaaggaggtggaggaccggcagagcgccccctaccggggccgcaccagcatcctgagagatggcatcacagctgggaaggccgccctgcgcatccacaacgtgacagccagtgacagcggcaagtacctgtgctacttccaggatggagacttctatgagaaggccctggtggagctgaaggtggccgccctgggcagtgacctgcacatcgaggtgaagggctatgaagatggcggcatccacctggagtgccgcagcacaggctggtacccccagccccagatcaagtggagcgacaccaagggggagaacatcccagctgtggaggcccctgtggtggctgatggagtgggcctgtatgctgtggccgccagcgtcatcatgaggggcagcagcggcggcggcgtgtcctgcatcatccggaacagcctgctgggcctggagaagacagccagcatcagcattgctgaccccttcttccgcagcgcccagccctggattgctgccctggccggcaccctgcccatcagcctgctgctgctggccggggccagctacttcctgtggaggcagcagaaggagaagatcgccctgagccgggagacagagcgggagcgggagatgaaggagatgggctacgccgccacagagcaggagatcagcctgcgggagtggaggaagatccagtacatggcccggggggagaagagcctggcctaccacgagtggaagatggccctcttcaagccagcagatgtgatcctggaccctgacacagccaatgccatcctgctggtgtctgaggaccagaggtctgtgcagagagctgaggagccccgggacctgcctgacaaccctgagagatttgagtggagatactgtgtgctgggctgtgagaacttcaccagcggccgccactactgggaggtggaggtgggggacaggaaggagtggcacatcggcgtgtgcagcaagaatgtggagaggaagaagggctgggtgaagatgaccccagaaaatggctactggaccatgggcctgacagatggcaacaagtaccgggccctgacagagcccaggaccaacctgaagctgcctgagccccccaggaaggtgggcatcttcctggactatgagaccggggagatctccttctacaatgccacagatggcagccacatctacaccttcccccacgccagcttcagcgagcccctgtaccctgtgttccgcatcctgaccctggagcccacagccctgaccatctgccccatccccaaggaggtggagagcagcccagaccctgacctggtgcctgaccacagcctggagacccccctgaccccaggcctggccaatgaaagtggagagccccaggccgaggtgaccagcctgctgctgcctgcccaccctggagctgaggtgagccccagcgccaccaccaaccagaaccacaagctgcaggccaggacagaggccctgtactag

SEQ ID NO: 145503 - DNA, 1581 bp, synthetic construct
  misc_feature 1..1581: note = Description of Artificial Sequence: Synthetic coding sequence
  source 1..1581: mol_type = other DNA
atggctgtgttccccagcagcggcctgccccgctgcctgctgaccctcatcctgctgcagctgcccaagctggacagcgccccctttgatgtgattggccccccagagcccatcctggccgtggtgggggaggatgctgagctgccctgccgcctgagccccaatgccagcgctgagcacctggagctgcgctggttcaggaagaaggtgtccccagctgtgctggtgcacagagatggccgggagcaggaggccgagcagatgcctgagtaccggggccgggccaccctggtgcaggacggcatcgccaagggccgggtggccctgcgcatccggggcgtgcgggtgtctgatgatggagagtacacctgcttcttccgggaggatggcagctatgaggaggccctggtgcacctgaaggtggccgccctgggcagtgacccccacatctccatgcaggtgcaggagaatggagagatctgcctggagtgcacctctgtgggctggtacccagagccccaggtgcagtggaggaccagcaaaggagagaagttccccagcaccagcgagagcaggaacccagatgaggagggcctcttcaccgtggccgccagcgtcatcatccgggacaccagcgccaagaatgtgtcctgctacatccagaacctgctgctgggccaggagaagaaggtggagatcagcatcccagccagcagcctgccccggctgaccccctggatcgtggccgtggccgtcatcctgatggtgctgggcctgctgaccatcggcagcatcttcttcacctggaggctgtacaatgaaagaccccgggagaggagaaatgagttcagcagcaaggagcggctgctggaggagctgaagtggaagaaggccaccctgcatgctgtggatgtgaccctggaccctgacacagcccacccccacctgttcctgtatgaggacagcaagtctgtgcggctggaggacagccggcagaagctgcctgagaagacagaaagatttgacagctggccctgtgtgctgggccgggagaccttcaccagcggccgccactactgggaggtggaggtgggggacagaacagactgggccatcggcgtgtgcagagaaaatgtgatgaagaagggctttgaccccatgaccccagaaaatggcttctgggccgtggagctgtatggaaatggctactgggccctgacccccctgcggacccccctgcccctggccggccccccccggcgggtgggcatcttcctggactatgagagcggggacatctccttctacaacatgaatgatggcagtgacatctacaccttcagcaatgtgaccttcagcggccccctgcggcccttcttctgcctgtggagcagcggcaagaagcccctgaccatctgccccatcgcagatggccctgagcgggtgacagtgattgccaatgcccaggacctgagcaaggagatccccctgagccccatgggagaggacagcgcccccagagatgctgacaccctgcacagcaagctgatccccacccagcccagccagggcgccccctag

SEQ ID NO: 145504 - DNA, 1485 bp, synthetic construct
  misc_feature 1..1485: note = Description of Artificial Sequence: Synthetic coding sequence
  source 1..1485: mol_type = other DNA
atggctgtgttccccagcagcggcctgccccgctgcctgctgaccctcatcctgctgcagctgcccaagctggacagcgccccctttgatgtgattggccccccagagcccatcctggccgtggtgggggaggatgctgagctgccctgccgcctgagccccaatgccagcgctgagcacctggagctgcgctggttcaggaagaaggtgtccccagctgtgctggtgcacagagatggccgggagcaggaggccgagcagatgcctgagtaccggggccgggccaccctggtgcaggacggcatcgccaagggccgggtggccctgcgcatccggggcgtgcgggtgtctgatgatggagagtacacctgcttcttccgggaggatggcagctatgaggaggccctggtgcacctgaaggtggccgccctgggcagtgacccccacatctccatgcaggtgcaggagaatggagagatctgcctggagtgcacctctgtgggctggtacccagagccccaggtgcagtggaggaccagcaaaggagagaagttccccagcaccagcgagagcaggaacccagatgaggagggcctcttcaccgtggccgccagcgtcatcatccgggacaccagcgccaagaatgtgtcctgctacatccagaacctgctgctgggccaggagaagaaggtggagatcagcatcccagccagcagcctgccccggctgaccccctggatcgtggccgtggccgtcatcctgatggtgctgggcctgctgaccatcggcagcatcttcttcacctggaggctgtacaatgaaagaccccgggagaggagaaatgagttcagcagcaaggagcggctgctggaggagctgaagtggaagaaggccaccctgcatgctgtggatgtgaccctggaccctgacacagcccacccccacctgttcctgtatgaggacagcaagtctgtgcggctggaggacagccggcagaagctgcctgagaagacagaaagatttgacagctggccctgtgtgctgggccgggagaccttcaccagcggccgccactactgggaggtggaggtgggggacagaacagactgggccatcggcgtgtgcagagaaaatgtgatgaagaagggctttgaccccatgaccccagaaaatggcttctgggccgtggagctgtatggaaatggctactgggccctgacccccctgcggacccccctgcccctggccggccccccccggcgggtgggcatcttcctggactatgagagcggggacatctccttctacaacatgaatgatggcagtgacatctacaccttcagcaatgtgacagtgattgccaatgcccaggacctgagcaaggagatccccctgagccccatgggagaggacagcgcccccagagatgctgacaccctgcacagcaagctgatccccacccagcccagccagggcgccccctag

SEQ ID NO: 145505 - DNA, 1590 bp, synthetic construct
  misc_feature 1..1590: note = Description of Artificial Sequence: Synthetic coding sequence
  source 1..1590: mol_type = other DNA
atggagagcgctgctgccctgcacttcagcaggcctgccagcctgctgctgctgctgctgagcctgtgtgccctggtgtctgcccagttcatcgtggtgggccccacagaccccatcctggccaccgtgggggagaacaccaccctgcgctgccacctgagccctgagaagaatgctgaggacatggaggtgcgctggttccgcagccagttctccccagctgtgtttgtgtacaagggcggccgggagaggacagaggagcagatggaggagtaccggggccgcaccacctttgtgtccaaggacatcagccggggctctgtggccctggtgatccacaacatcacagcccaggagaatggcacctaccgctgctacttccaggagggccgctcctatgatgaggccatcctgcacctggtggtggccggcctgggcagcaagcccctcatctccatgaggggccatgaagatggcggcatccggctggagtgcatcagccggggctggtaccccaagcccctgactgtgtggagggacccctacggcggcgtggccccagccctgaaggaggtgtccatgccagatgctgatggcctcttcatggtgaccacagctgtgatcatccgggacaagtctgtgaggaacatgagctgcagcatcaacaacaccctgctgggccagaagaaggagagcgtcatcttcatccctgagagcttcatgcccagcgtgagcccccccatcgctgtgtgcatctactggatcaacaagctgcagaaggagaagaagatcctgagcggggagaaggagtttgagcgggagacccgggagatcgccctgaaggagctggagaaggagcgggtgcagaaggaggaggagctgcaggtgaaggagaagctgcaggaggagctgcgctggaggaggaccttcctgcatgctgtggatgtggtgctggaccctgacacagcccacccagacctcttcctgtctgaagatagaagatctgtgcggcgctgccccttccgccacctgggggagagcgtgcctgacaaccctgagagatttgacagccagccctgtgtgctgggccgggagagctttgccagcggcaagcactactgggaggtggaggtggagaatgtcatcgagtggacagtgggcgtgtgccgggacagcgtggagaggaagggggaggtgctgctgatcccccagaatggcttctggaccctggagatgcacaagggccagtacagagctgtgagcagcccagaccgcatcctgcccctgaaggagagcctgtgccgggtgggcgtcttcctggactatgaggccggagatgtgtccttctacaacatgagggacaggagccacatctacacctgccccaggtctgccttcagcggccctgacaccagccagagcggggaccccccagagcccatcgagagcatcccctggagccacagccacgtggacaagccctggagcagccagcagcccccccacaacacccacctgcctgctgccagcttcacccccaccacagacctgagccccagcttcctgctgctgacccggctgtgcttctag

SEQ ID NO: 145506 - DNA, 1584 bp, synthetic construct
  misc_feature 1..1584: note = Description of Artificial Sequence: Synthetic coding sequence
  source 1..1584: mol_type = other DNA
atggagagcgctgctgccctgcacttcagcaggcctgccagcctgctgctgctgctgctgagcctgtgtgccctggtgtctgcccagttcatcgtggtgggccccacagaccccatcctggccaccgtgggggagaacaccaccctgcgctgccacctgagccctgagaagaatgctgaggacatggaggtgcgctggttccgcagccagttctccccagctgtgtttgtgtacaagggcggccgggagaggacagaggagcagatggaggagtaccggggccgcaccacctttgtgtccaaggacatcagccggggctctgtggccctggtgatccacaacatcacagcccaggagaatggcacctaccgctgctacttccaggagggccgctcctatgatgaggccatcctgcacctggtggtggccggcctgggcagcaagcccctcatctccatgaggggccatgaagatggcggcatccggctggagtgcatcagccggggctggtaccccaagcccctgactgtgtggagggacccctacggcggcgtggccccagccctgaaggaggtgtccatgccagatgctgatggcctcttcatggtgaccacagctgtgatcatccgggacaagtctgtgaggaacatgagctgcagcatcaacaacaccctgctgggccagaagaaggagagcgtcatcttcatccctgagagcttcatgcccagcgtgagcccctgtgctgtggccctgcccatcatcgtggtgatcctgatgatccccatcgctgtgtgcatctactggatcaacaagctgcagaaggagaagaagatcctgagcggggagaaggagtttgagcgggagacccgggagatcgccctgaaggagctggagaaggagcgggtgcagaaggaggaggagctgcaggtgaaggagaagctgcaggaggagctgcgctggaggaggaccttcctgcatgctgtggatgtggtgctggaccctgacacagcccacccagacctcttcctgtctgaagatagaagatctgtgcggcgctgccccttccgccacctgggggagagcgtgcctgacaaccctgagagatttgacagccagccctgtgtgctgggccgggagagctttgccagcggcaagcactactgggaggtggaggtggagaatgtcatcgagtggacagtgggcgtgtgccgggacagcgtggagaggaagggggaggtgctgctgatcccccagaatggcttctggaccctggagatgcacaagggccagtacagagctgtgagcagcccagaccgcatcctgcccctgaaggagagcctgtgccgggtgggcgtcttcctggactatgaggccggagatgtgtccttctacaacatgagggacaggagccacatctacacctgccccaggtctgccttctctgtgcctgtgcggcccttcttccggctgggctgtgaggacagccccatcttcatctgcccagccctgaccggggccaatggagtgacagtgcctgaggagggcctgaccctgcaccgggtgggcacccaccagagcctgtag

SEQ ID NO: 145507 - DNA, 1005 bp, synthetic construct
  misc_feature 1..1005: note = Description of Artificial Sequence: Synthetic coding sequence
  source 1..1005: mol_type = other DNA
atggagagcgctgctgccctgcacttcagcaggcctgccagcctgctgctgctgctgctgagcctgtgtgccctggtgtctgcccagttcatcgtggtgggccccacagaccccatcctggccaccgtgggggagaacaccaccctgcgctgccacctgagccctgagaagaatgctgaggacatggaggtgcgctggttccgcagccagttctccccagctgtgtttgtgtacaagggcggccgggagaggacagaggagcagatggaggagtaccggggccgcaccacctttgtgtccaaggacatcagccggggctctgtggccctggtgatccacaacatcacagcccaggagaatggcacctaccgctgctacttccaggagggccgctcctatgatgaggccatcctgcacctggtggtggccggcctgggcagcaagcccctcatctccatgaggggccatgaagatggcggcatccggctggagtgcatcagccggggctggtaccccaagcccctgactgtgtggagggacccctacggcggcgtggccccagccctgaaggaggtgtccatgccagatgctgatggcctcttcatggtgaccacagctgtgatcatccgggacaagtctgtgaggaacatgagctgcagcatcaacaacaccctgctgggccagaagaaggagagcgtcatcttcatccctgagagcttcatgcccagcgtgagcccctgtgctgtggccctgcccatcatcgtggtgatcctgatgatccccatcgctgtgtgcatctactggatcaacaagctgcagaaggagaagaagatcctgagcggggagaaggagtttgagcgggagacccgggagatcgccctgaaggagctggagaaggagcgggtgcagaaggaggaggagctgcaggtgaaggagaagctgcaggaggagctgcgctggaggaggaccttcctgcatgctgagctgcagttcttcagcaactag

SEQ ID NO: 145508 - DNA, 993 bp, synthetic construct
  misc_feature 1..993: note = Description of Artificial Sequence: Synthetic coding sequence
  source 1..993: mol_type = other DNA
atggagagcgctgctgccctgcacttcagcaggcctgccagcctgctgctgctgctgctgagcctgtgtgccctggtgtctgcccagttcatcgtggtgggccccacagaccccatcctggccaccgtgggggagaacaccaccctgcgctgccacctgagccctgagaagaatgctgaggacatggaggtgcgctggttccgcagccagttctccccagctgtgtttgtgtacaagggcggccgggagaggacagaggagcagatggaggagtaccggggccgcaccacctttgtgtccaaggacatcagccggggctctgtggccctggtgatccacaacatcacagcccaggagaatggcacctaccgctgctacttccaggagggccgctcctatgatgaggccatcctgcacctggtggtggccggcctgggcagcaagcccctcatctccatgaggggccatgaagatggcggcatccggctggagtgcatcagccggggctggtaccccaagcccctgactgtgtggagggacccctacggcggcgtggccccagccctgaaggaggtgtccatgccagatgctgatggcctcttcatggtgaccacagctgtgatcatccgggacaagtctgtgaggaacatgagctgcagcatcaacaacaccctgctgggccagaagaaggagagcgtcatcttcatccctgagagcttcatgcccagcgtgagcccctgtgctgtggccctgcccatcatcgtggtgatcctgatgatccccatcgctgtgtgcatctactggatcaacaagctgcagaaggagaagaagatcctgagcggggagaaggagtttgagcgggagacccgggagatcgccctgaaggagctggagaaggagcgggtgcagaaggaggaggagctgcaggtgaaggagaagctgcaggaggagctgcgctggaggaggaccttcctgcatgctggccctgtgtag

SEQ ID NO: 145509 - DNA, 1401 bp, synthetic construct
  misc_feature 1..1401: note = Description of Artificial Sequence: Synthetic coding sequence
  source 1..1401: mol_type = other DNA
atggaggtgcgctggttccgcagccagttcagccctgctgtgtttgtgtacaagggcggccgggagaggacagaggagcagatggaggagtaccggggccgcaccacctttgtgtccaaggacatcagccggggctctgtggccctggtgatccacaacatcacagcccaggagaatggcacctaccgctgctacttccaggagggccgctcctatgatgaggccatcctgcacctggtggtggccggcctgggcagcaagcccctcatctccatgaggggccatgaagatggcggcatccggctggagtgcatcagccggggctggtaccccaagcccctgactgtgtggagggacccctatggaggagtggccccagccctgaaggaggtgtccatgccagatgctgatggcctcttcatggtgaccacagctgtgatcatccgggacaagtctgtgaggaacatgagctgcagcatcaacaacaccctgctgggccagaagaaggagagcgtcatcttcatccctgagagcttcatgcccagcgtgagcccctgtgctgtggccctgcccatcatcgtggtgatcctgatgatccccatcgctgtgtgcatctactggatcaacaagctgcagaaggagaagaagatcctgtctggagagaaggagtttgagcgggagacccgggagatcgccctgaaggagctggagaaggagcgggtgcagaaggaggaggagctgcaggtgaaggagaagctgcaggaggagctgcgctggaggaggaccttcctgcatgctgtggatgtggtgctggaccctgacacagcccacccagacctcttcctgtctgaggaccggcgctctgtgcggcgctgccccttccgccacctgggggagagcgtgcctgacaaccctgagagatttgacagccagccctgtgtgctgggccgggagagctttgccagcggcaagcactactgggaggtggaggtggagaatgtgattgagtggacagtgggcgtgtgccgggacagcgtggagaggaaaggagaggtgctgctgatcccccagaatggcttctggaccctggagatgcacaagggccagtacagagctgtgagcagcccagaccgcatcctgcccctgaaggagagcctgtgccgggtgggcgtcttcctggactatgaagctggagatgtgtccttctacaacatgagggacaggagccacatctacacctgccccaggtctgccttctctgtgcctgtgcggcccttcttccggctgggctgtgaggacagccccatcttcatctgcccagccctgactggagccaacggggtgacagtgcctgaggagggcctgaccctgcaccgggtgggcacccaccagagcctgtag

SEQ ID NO: 145510 - DNA, 1224 bp, synthetic construct
  misc_feature 1..1224: note = Description of Artificial Sequence: Synthetic coding sequence
  source 1..1224: mol_type = other DNA
atggagcctgctgctgccctgcacttcagcctgcctgccagcctgctgctgctgctgctgctgctgctgctgagcctgtgtgccctggtgtctggcctgggcagcaagcccctgattgagatcaaggcccaggaggatggcagcatctggctggagtgcatcagcggcggctggtacccagagcccctgactgtgtggagggacccctacggggaggtggtgcctgccctgaaggaggtgtccattgctgatgctgatggcctcttcatggtgaccacagctgtgatcatccgggacaagtatgtgagaaatgtgtcctgcagcgtgaacaacaccctgctgggccaggagaaggagaccgtcatcttcatccctgagagcttcatgcccagcgccagcccctggatggtggccctggccgtcatcctgacagccagcccctggatggtgtccatgaccgtcatcctggccgtgttcatcatcttcatggctgtgtccatctgctgcatcaagaagctgcagcgggagaagaagatcctgtctggagagaagaaggtggagcaggaggagaaggagatcgcccagcagctgcaggaggagctgcgctggaggaggaccttcctgcacgccgcagatgtggtgctggaccctgacacagcccaccctgagctgttcctgtctgaggaccggcgctctgtgcggcggggcccctaccggcagagggtgcctgacaaccctgagagatttgacagccagccctgtgtgctgggctgggagagctttgccagcggcaagcactactgggaggtggaggtggagaatgtgatggtgtggacagtgggcgtgtgccgccacagcgtggagaggaagggggaggtgctgctgatcccccagaatggcttctggaccctggagatgtttggaaaccagtaccgggccctgagcagccctgagcgcatcctgcccctgaaggagagcctgtgccgggtgggcgtcttcctggactatgaggccggagatgtgtccttctacaacatgagggacaggagccacatctacacctgccccaggtctgccttcaccgtgcctgtgcggcccttcttccggctgggcagtgatgacagccccatcttcatctgcccagccctgaccggggccagcggcgtgatggtgcctgaggagggcctgaagctgcaccgggtgggcacccaccagagcctgtag

SEQ ID NO: 145511 - DNA, 1572 bp, synthetic construct
  misc_feature 1..1572: note = Description of Artificial Sequence: Synthetic coding sequence
  source 1..1572: mol_type = other DNA
atggagcctgctgctgccctgcacttcagcctgcctgccagcctgctgctgctgctgctgctgctgctgctgagcctgtgtgccctggtgtctgcccagttcaccgtggtgggccctgccaaccccatcctggccatggtgggggagaacaccaccctgcgctgccacctgagccctgagaagaatgctgaggacatggaggtgcgctggttccgcagccagttctccccagctgtgtttgtgtacaagggcggccgggagaggacagaggagcagatggaggagtaccggggccgcatcacctttgtgtccaaggacatcaacagaggctctgtggccctggtgatccacaacgtgacagcccaggagaatggcatctaccgctgctacttccaggagggccgctcctatgatgaggccatcctgcggctggtggtggccggcctgggcagcaagcccctgattgagatcaaggcccaggaggatggcagcatctggctggagtgcatcagcggcggctggtacccagagcccctgactgtgtggagggacccctacggggaggtggtgcctgccctgaaggaggtgtccattgctgatgctgatggcctcttcatggtgaccacagctgtgatcatccgggacaagtatgtgagaaatgtgtcctgcagcgtgaacaacaccctgctgggccaggagaaggagaccgtcatcttcatccctgagagcttcatgcccagcgccagcccctggatggtggccctggccgtcatcctgacagccagcccctggatggtgtccatgaccgtcatcctggccgtgttcatcatcttcatggctgtgtccatctgctgcatcaagaagctgcagcgggagaagaagatcctgtctggagagaagaaggtggagcaggaggagaaggagatcgcccagcagctgcaggaggagctgcgctggaggaggaccttcctgcacgccgcagatgtggtgctggaccctgacacagcccaccctgagctgttcctgtctgaggaccggcgctctgtgcggcggggcccctaccggcagagggtgcctgacaaccctgagagatttgacagccagccctgtgtgctgggctgggagagctttgccagcggcaagcactactgggaggtggaggtggagaatgtgatggtgtggacagtgggcgtgtgccgccacagcgtggagaggaagggggaggtgctgctgatcccccagaatggcttctggaccctggagatgtttggaaaccagtaccgggccctgagcagccctgagcgcatcctgcccctgaaggagagcctgtgccgggtgggcgtcttcctggactatgaggccggagatgtgtccttctacaacatgagggacaggagccacatctacacctgccccaggtctgccttcaccgtgcctgtgcggcccttcttccggctgggcagtgatgacagccccatcttcatctgcccagccctgaccggggccagcggcgtgatggtgcctgaggagggcctgaagctgcaccgggtgggcacccaccagagcctgtag

SEQ ID NO: 145512 - DNA, 1572 bp, synthetic construct; identical to SEQ ID NO: 145511
  misc_feature 1..1572: note = Description of Artificial Sequence: Synthetic coding sequence
  source 1..1572: mol_type = other DNA

SEQ ID NO: 145513 - DNA, 1011 bp, synthetic construct
  misc_feature 1..1011: note = Description of Artificial Sequence: Synthetic coding sequence
  source 1..1011: mol_type = other DNA
atggagcctgctgctgccctgcacttcagcctgcctgccagcctgctgctgctgctgctgctgctgctgctgagcctgtgtgccctggtgtctgcccagttcaccgtggtgggccctgccaaccccatcctggccatggtgggggagaacaccaccctgcgctgccacctgagccctgagaagaatgctgaggacatggaggtgcgctggttccgcagccagttctccccagctgtgtttgtgtacaagggcggccgggagaggacagaggagcagatggaggagtaccggggccgcatcacctttgtgtccaaggacatcaacagaggctctgtggccctggtgatccacaacgtgacagcccaggagaatggcatctaccgctgctacttccaggagggccgctcctatgatgaggccatcctgcggctggtggtggccggcctgggcagcaagcccctgattgagatcaaggcccaggaggatggcagcatctggctggagtgcatcagcggcggctggtacccagagcccctgactgtgtggagggacccctacggggaggtggtgcctgccctgaaggaggtgtccattgctgatgctgatggcctcttcatggtgaccacagctgtgatcatccgggacaagtatgtgagaaatgtgtcctgcagcgtgaacaacaccctgctgggccaggagaaggagaccgtcatcttcatccctgagagcttcatgcccagcgccagcccctggatggtggccctggccgtcatcctgacagccagcccctggatggtgtccatgaccgtcatcctggccgtgttcatcatcttcatggctgtgtccatctgctgcatcaagaagctgcagcgggagaagaagatcctgtctggagagaagaaggtggagcaggaggagaaggagatcgcccagcagctgcaggaggagctgcgctggaggaggaccttcctgcacgcagatgtgaacctgaccggcctgaggaacacctag

SEQ ID NO: 145514 - DNA, 333 bp, synthetic construct
  misc_feature 1..333: note = Description of Artificial Sequence: Synthetic coding sequence
  source 1..333: mol_type = other DNA
atggagcctgctgctgccctgcacttcagcctgcctgccagcctgctgctgctgctgctgctgctgctgctgagcctgtgtgccctggtgtctggcctgggcagcaagcccctgattgagatcaaggcccaggaggatggcagcatctggctggagtgcatcagcggcggctggtacccagagcccctgactgtgtggagggacccctacggggaggtggtgcctgccctgaaggaggtgtccattgctgatgctgatggcctcttcatggtgaccacagctgtgatcatccgggacaagtatgtgagaaatgtgtcctgcagcgtgaactag

SEQ ID NO: 145515 - DNA, 555 bp, synthetic construct
  misc_feature 1..555: note = Description of Artificial Sequence: Synthetic coding sequence
  source 1..555: mol_type = other DNA
atggagcctgctgctgccctgcacttcagcctgcctgccagcctgctgctgctgctgctgctgctgctgctgagcctgtgtgccctggtgtctggcctgggcagcaagcccctgattgagatcaaggcccaggaggatggcagcatctggctggagtgcatcagcggcggctggtacccagagcccctgactgtgtggagggacccctacggggaggtggtgcctgccctgaaggaggtgtccattgctgatgctgatggcctcttcatggtgaccacagctgtgatcatccgggacaagtatgtgagaaatgtgtcctgcagcgtgaacaacaccctgctgggccaggagaaggagaccgtcatcttcatccctgagagcttcatgcccagcgccagcccctggatggtggccctggccgtcatcctgacagccagcccctggatggtgtccatgaccgtcatcctggccgtgttcatcatcttcatggctgtgtccatctgctgcatcaagaagctgcagcgggagaagaagatcctgtctggagagaagtag

SEQ ID NO: 145516 - DNA, 720 bp, synthetic construct
  misc_feature 1..720: note = Description of Artificial Sequence: Synthetic coding sequence
  source 1..720: mol_type = other DNA
atggagcctgctgctgccctgcacttcagcctgcctgccagcctgctgctgctgctgctgctgctgctgctgagcctgtgtgccctggtgtctgcccagttcaccgtggtgggccctgccaaccccatcctggccatggtgggggagaacaccaccctgcgctgccacctgagccctgagaagaatgctgaggacatggaggtgcgctggttccgcagccagttctccccagctgtgtttgtgtacaagggcggccgggagaggacagaggagcagatggaggagtaccggggccgcatcacctttgtgtccaaggacatcaacagaggctctgtggccctggtgatccacaacgtgacagcccaggagaatggcatctaccgctgctacttccaggagggccgctcctatgatgaggccatcctgcggctggtggtggccggcctgggcagcaagcccctgattgagatcaaggcccaggaggatggcagcatctggctggagtgcatcagcggcggctggtacccagagcccctgactgtgtggagggacccctacggggaggtggtgcctgccctgaaggaggtgtccattgctgatgctgatggcctcttcatggtgaccacagctgtgatcatccgggacaagtatgtgagaaatgtgtcctgcagcgtgaacaacaccctgctgggccaggagaaggagaccgtcatcttctag

SEQ ID NO: 145517 - DNA, 291 bp, synthetic construct
  misc_feature 1..291: note = Description of Artificial Sequence: Synthetic coding sequence
  source 1..291: mol_type = other DNA
atggagcctgctgctgccctgcacttcagcctgcctgccagcctgctgctgctgctgctgctgctgctgctgagcctgtgtgccctggtgtctgcccagttcaccgtggtgggccctgccaaccccatcctggccatggtgggggagaacaccaccctgcgctgccacctgagccctgagaagaatgctgaggacatggaggtgcgctggttccgcagccagttctccccagctgtgtttgtgtacaagggcggccgggagaggacagaggagcagatggaggagtactag

SEQ ID NO: 145518 - DNA, 1542 bp, synthetic construct
  misc_feature 1..1542: note = Description of Artificial Sequence: Synthetic coding sequence
  source 1..1542: mol_type = other DNA
atgaagatggccagcttcctggccttcctgctgctgaacttccgggtgtgcctgctgctgctgcagctgctgatgccccacagcgcccagttctctgtgctgggccccagcggccccatcctggccatggtgggggaggatgctgacctgccctgccacctgttccccaccatgtctgctgagaccatggagctgaagtgggtgagcagcagcctgcggcaggtggtgaatgtgtatgcagatggcaaggaggtggaggaccggcagagcgccccctaccggggccgcaccagcatcctgagagatggcatcacagctgggaaggccgccctgcgcatccacaacgtgacagccagtgacagcggcaagtacctgtgctacttccaggatggagacttctatgagaaggccctggtggagctgaaggtggccgccctgggcagtgacctgcacgtggatgtgaagggctacaaggatggcggcatccacctggagtgccgcagcacaggctggtacccccagccccagatccagtggagcaacaacaagggggagaacatccccaccgtggaggcccctgtggtggctgatggagtgggcctgtatgctgtggccgccagcgtcatcatgaggggcagcagcggggagggcgtgtcctgcaccatccgcagcagcctgctgggcctggagaagacagccagcatcagcattgctgaccccttcttccgcagcgcccagcgctggattgctgccctggccggcaccctgcctgtgctgctgctgctgctgggcggggccggctacttcctgtggcagcagcaggaggagaagaagacccagttcaggaagaagaagcgggagcaggagctgcgggagatggcctggagcaccatgaagcaggagcagagcaccagggtgaagctgctggaggagctgcgctggaggagcatccagtatgccagcagaggagagcggcacagcgcctacaatgagtggaagaaggccctcttcaagccagcagatgtgatcctggaccccaagacagccaaccccatcctgctggtgtctgaggaccagaggtctgtgcagagggccaaggagccccaggacctgcctgacaaccctgagcgcttcaactggcactactgtgtgctgggctgtgagagcttcatcagcggccgccactactgggaggtggaggtgggggacaggaaggagtggcacatcggcgtgtgcagcaagaatgtgcagaggaagggctgggtgaagatgaccccagaaaatggcttctggaccatgggcctgacagatggcaacaagtaccgcaccctgacagagcccaggaccaacctgaagctgcccaagccacccaagaaggtgggcgtcttcctggactatgagaccggggacatctccttctacaatgctgtggatggcagccacatccacaccttcctggatgtgtccttcagcgaggccctgtaccctgtgttccgcatcctgaccctggagcccacagccctgaccatctgcccagcctag

SEQ ID NO: 145519 - DNA, 1386 bp, synthetic construct
  misc_feature 1..1386: note = Description of Artificial Sequence: Synthetic coding sequence
  source 1..1386: mol_type = other DNA
atgaagatggccagcttcctggccttcctgctgctgaacttccgggtgtgcctgctgctgctgcagctgctgatgccccacagcgcccagttctctgtgctgggccccagcggccccatcctggccatggtgggggaggatgctgacctgccctgccacctgttccccaccatgtctgctgagaccatggagctgaagtgggtgagcagcagcctgcggcaggtggtgaatgtgtatgcagatggcaaggaggtggaggaccggcagagcgccccctaccggggccgcaccagcatcctgagagatggcatcacagctgggaaggccgccctgcgcatccacaacgtgacagccagtgacagcggcaagtacctgtgctacttccaggatggagacttctatgagaaggccctggtggagctgaaggtggctgatggagtgggcctgtatgctgtggccgccagcgtcatcatgaggggcagcagcggggagggcgtgtcctgcaccatccgcagcagcctgctgggcctggagaagacagccagcatcagcattgctgaccccttcttccgcagcgcccagcgctggattgctgccctggccggcaccctgcctgtgctgctgctgctgctgggcggggccggctacttcctgtggcagcagcaggaggagaagaagacccagttcaggaagaagaagcgggagcaggagctgcgggagatggcctggagcaccatgaagcaggagcagagcaccagggtgaagctgctggaggagctgcgctggaggagcatccagtatgccagcagaggagagcggcacagcgcctacaatgagtggaagaaggccctcttcaagccagcagatgtgatcctggaccccaagacagccaaccccatcctgctggtgtctgaggaccagaggtctgtgcagagggccaaggagccccaggacctgcctgacaaccctgagcgcttcaactggcactactgtgtgctgggctgtgagagcttcatcagcggccgccactactgggaggtggaggtgggggacaggaaggagtggcacatcggcgtgtgcagcaagaatgtgcagaggaagggctgggtgaagatgaccccagaaaatggcttctggaccatgggcctgacagatggcaacaagtaccgcaccctgacagagcccaggaccaacctgaagctgcccaagccacccaagaaggtgggcgtcttcctggactatgagaccggggacatctccttctacaatgctgtggatggcagccacatccacaccttcctggatgtgtccttcagcgaggccctgtaccctgtgttccgcatcctgaccctggagcccacagccctgaccatctgcccagcctag

SEQ ID NO: 145520 - DNA, 1137 bp, synthetic construct
  misc_feature 1..1137: note = Description of Artificial Sequence: Synthetic coding sequence
  source 1..1137: mol_type = other DNA
atgaagatggccagcttcctggccttcctgctgctgaacttccgggtgtgcctgctgctgctgcagctgctgatgccccacagcgcccagttctctgtgctgggccccagcggccccatcctggccatggtgggggaggatgctgacctgccctgccacctgttccccaccatgtctgctgagaccatggagctgaagtgggtgagcagcagcctgcggcaggtggtgaatgtgtatgcagatggcaaggaggtggaggaccggcagagcgccccctaccggggccgcaccagcatcctgagagatggcatcacagctgggaaggccgccctgcgcatccacaacgtgacagccagtgacagcggcaagtacctgtgctacttccaggatggagacttctatgagaaggccctggtggagctgaaggtggccgccctgggcagtgacctgcacgtggatgtgaagggctacaaggatggcggcatccacctggagtgccgcagcacaggctggtacccccagccccagatccagtggagcaacaacaagggggagaacatccccaccgtggaggcccctgtggtggctgatggagtgggcctgtatgctgtggccgccagcgtcatcatgaggggcagcagcggggagggcgtgtcctgcaccatccgcagcagcctgctgggcctggagaagacagccagcatcagcattgctgaccccttcttccgcagcgcccagcgctggattgctgccctggccggcaccctgcctgtgctgctgctgctgctgggcggggccggctacttcctgtggcagcagcaggaggagaagaagacccagttcaggaagaagaagcgggagcaggagctgcgggagatggcctggagcaccatgaagcaggagcagagcaccagggtgaagctgctggaggagctgcgctggaggagcatccagtatgccagcagaggagagcggcacagcgcctacaatgagtggaagaaggccctcttcaagccaggcccccccatcggccagacccagcagcagacccggggccagggcagccctgtggccctgagccaggagagcgcccagaggacagacagctggggccctgaggagggcggggagagctag

SEQ ID NO: 145521 - DNA, 132 bp, synthetic construct
  misc_feature 1..132: note = Description of Artificial Sequence: Synthetic coding sequence
  source 1..132: mol_type = other DNA
atgaagatggccagcttcctggccttcctgctgctgaacttccgggtgtgcctgctgctgctgcagctgctgatgccccacagcgcccagttctctgtgctgggccccagcggccccatcctggccatgtag

SEQ ID NO: 145522 - DNA, 360 bp, synthetic construct
  misc_feature 1..360: note = Description of Artificial Sequence: Synthetic coding sequence
  source 1..360: mol_type = other DNA
atgaagatggccagcttcctggccttcctgctgctgaacttccgggtgtgcctgctgctgctgcagctgctgatgccccacagcgcccagttctctgtgctgggccccagcggccccatcctggccatggtgggggaggatgctgacctgccctgccacctgttccccaccatgtctgctgagaccatggagctgaagtgggtgagcagcagcctgcggcaggtggtgaatgtgtatgcagatggcaaggaggtggaggaccggcagagcgccccctaccggggccgcaccagcatcctgagagatggcatcacagctgggaaggccgccctgcgcatccacaacgtgacagccagctag

SEQ ID NO: 145523 - DNA, 1059 bp, synthetic construct
  misc_feature 1..1059: note = Description of Artificial Sequence: Synthetic coding sequence
  source 1..1059: mol_type = other DNA
atgaagatggccagcttcctggccttcctgctgctgaacttccgggtgtgcctgctgctgctgcagctgctgatgccccacagcgcccagttctctgtgctgggccccagcggccccatcctggccatggtgggggaggatgctgacctgccctgccacctgttccccaccatgtctgctgagaccatggagctgaagtgggtgagcagcagcctgcggcaggtggtgaatgtgtatgcagatggcaaggaggtggaggaccggcagagcgccccctaccggggccgcaccagcatcctgagagatggcatcacagctgggaaggccgccctgcgcatccacaacgtgacagccagtgacagcggcaagtacctgtgctacttccaggatggagacttctatgagaaggccctggtggagctgaaggtggccgccctgggcagtgacctgcacgtggatgtgaagggctacaaggatggcggcatccacctggagtgccgcagcacaggctggtacccccagccccagatccagtggagcaacaacaagggggagaacatccccaccgtggaggcccctgtggtggctgatggagtgggcctgtatgctgtggccgccagcgtcatcatgaggggcagcagcggggagggcgtgtcctgcaccatccgcagcagcctgctgggcctggagaagacagccagcatcagcattgctgaccccttcttccgcagcgcccagcgctggattgctgccctggccggcaccctgcctgtgctgctgctgctgctgggcggggccggctacttcctgtggcagcagcaggaggagaagaagacccagttcaggaagaagaagcgggagcaggagctgcgggagatggcctggagcaccatgaagcaggagcagagcaccagggtgaagctgctggaggagctgcgctggaggagcatccagtatgccagcagaggagagcggcacagcgcctacaatgagtggaagaaggccctcttcaagccaggagaggagatgctgcagatgaggctgcactttgtgaagtag

SEQ ID NO: 145524 - DNA, 279 bp, synthetic construct
  misc_feature 1..279: note = Description of Artificial Sequence: Synthetic coding sequence
  source 1..279: mol_type = other DNA
atgaagatggccagcttcctggccttcctgctgctgaacttccgggtgtgcctgctgctgctgcagctgctgatgccccacagcgcccagttctctgtgctgggccccagcggccccatcctggccatggtgggggaggatgctgacctgccctgccacctgttccccaccatgtctgctgagaccatggagctgaagtgggtgagcagcagcctgcggcaggtggtgaatgtgtatgcagatggcaaggaggtggaggaccggcagagcgccccctag

SEQ ID NO: 145525 - DNA, 1005 bp, synthetic construct
  misc_feature 1..1005: note = Description of Artificial Sequence: Synthetic coding sequence
  source 1..1005: mol_type = other DNA
atgaagatggccagcagcctggccttcctgctgctgaacttccacgtgtccctgctgctggtgcagctgctgaccccctgcagcgcccagttctctgtgctgggccccagcggccccatcctggccatggtgggggaggatgctgacctgccctgccacctgttccccaccatgtctgctgagaccatggagctgaagtgggtgagcagcagcctgcggcaggtggtgaatgtgtatgcagatggcaaggaggtggaggaccggcagagcgccccctaccggggccgcaccagcatcctgagagatggcatcacagctgggaaggccgccctgcgcatccacaacgtgacagccagtgacagcggcaagtacctgtgctacttccaggatggagacttctatgagaaggccctggtggagctgaaggtggccgccctgggcagcaacctgcacgtggaggtgaagggctatgaagatggcggcatccacctggagtgccgcagcacaggctggtacccccagccccagatccagtggagcaatgccaagggggagaacatcccagctgtggaggcccctgtggtggctgatggagtgggcctgtatgaggtggccgccagcgtcatcatgaggggcggcagcggggagggcgtgtcctgcatcatccggaacagcctgctgggcctggagaagacagccagcatcagcattgctgaccccttcttccgcagcgcccagccctggattgctgccctggccggcaccctgcccatcctgctgctgctgctggccggggccagctacttcctgtggaggcagcagaaggagatcacagccctgagcagcgagattgagagcgagcaggagatgaaggagatgggctacgccgccacagagcgggagatcagcctgcgggagagcctgcaggaggagctgaagaggaagaagatccagtacctgaccagaggagaggagagcagcagtgacaccaacaagagcgcctag

SEQ ID NO: 145526 - DNA, 1005 bp, synthetic construct; identical to SEQ ID NO: 145525
  misc_feature 1..1005: note = Description of Artificial Sequence: Synthetic coding sequence
  source 1..1005: mol_type = other DNA

SEQ ID NO: 145527 - DNA, 936 bp, synthetic construct
  misc_feature 1..936: note = Description of Artificial Sequence: Synthetic coding sequence
  source 1..936: mol_type = other DNA
atgggcatcccccgggcccagttctctgtgctgggccccagcggccccatcctggccatggtgggagaagatgctgacctgccctgccacctgttccccaccatgtctgctgagaccatggagctgaagtgggtgagcagcagcctgcggcaggtggtgaatgtgtatgcagatggcaaggaggtggaggaccggcagagcgccccctaccggggccgcaccagcatcctgagagatggcatcacagctgggaaggccgccctgcgcatccacaacgtgacagccagtgacagcggcaagtacctgtgctacttccaggatggagacttctatgagaaggccctggtggagctgaaggtggccgccctgggcagcaacctgcacgtggaggtgaagggctatgaagatggcggcatccacctggagtgccgcagcacaggctggtacccccagccccagatccagtggagcaatgccaagggggagaacatcccagctgtggaggcccctgtggtggctgatggagtgggcctgtatgaggtggccgccagcgtcatcatgagaggaggcagcggggagggcgtgtcctgcatcatccggaacagcctgctgggcctggagaagacagccagcatcagcattgctgaccccttcttccgcagcgcccagccctggattgctgccctggccggcaccctgcccatcctgctgctgctgctggccggggccagctacttcctgtggaggcagcagaaggagatcacagccctgagcagcgagattgaaagtgagcaggagatgaaggagatgggctatgctgccacagagcgggagatcagcctgcgggagagcctgcaggaggagctgaagaggaagaagatccagtacctgaccagaggagaggagagcagcagtgacaccaacaagagcgcctag

SEQ ID NO: 145528 - DNA, 1005 bp, synthetic construct; identical to SEQ ID NO: 145525
  misc_feature 1..1005: note = Description of Artificial Sequence: Synthetic coding sequence
  source 1..1005: mol_type = other DNA

SEQ ID NO: 145529 - DNA, 879 bp, synthetic construct
  misc_feature 1..879: note = Description of Artificial Sequence: Synthetic coding sequence
  source 1..879: mol_type = other DNA
atggtgggggaggatgctgacctgccctgccacctgttccccaccatgtctgctgagaccatggagctgaagtgggtgagcagcagcctgcggcaggtggtgaatgtgtatgcagatggcaaggaggtggaggaccggcagagcgccccctaccggggccgcaccagcatcctgagagatggcatcacagctgggaaggccgccctgcgcatccacaacgtgacagccagtgacagcggcaagtacctgtgctacttccaggatggagacttctatgagaaggccctggtggagctgaaggtggccgccctgggcagcaacctgcacgtggaggtgaagggctatgaagatggcggcatccacctggagtgccgcagcacaggctggtacccccagccccagatccagtggagcaatgccaagggggagaacatcccagctgtggaggcccctgtggtggctgatggagtgggcctgtatgaggtggccgccagcgtcatcatgaggggcggcagcggggagggcgtgtcctgcatcatccggaacagcctgctgggcctggagaagacagccagcatcagcattgctgaccccttcttccgcagcgcccagccctggattgctgccctggccggcaccctgcccatcctgctgctgctgctggccggggccagctacttcctgtggaggcagcagaaggagatcacagccctgagcagcgagattgagagcgagcaggagatgaaggagatgggctacgccgccacagagcgggagatcagcctgcgggagagcctgcaggaggagctgaagaggaagaagatccagtacctgaccagaggagaggagagcagcagtgacaccaacaagagcgcctag

SEQ ID NO: 145530 - DNA, 1005 bp, synthetic construct; identical to SEQ ID NO: 145525
  misc_feature 1..1005: note = Description of Artificial Sequence: Synthetic coding sequence
  source 1..1005: mol_type = other DNA

SEQ ID NO: 145531 - DNA, 960 bp, synthetic construct
  misc_feature 1..960: note = Description of Artificial Sequence: Synthetic coding sequence
  source 1..960: mol_type = other DNA
atgaagatggccagcagcctggccttcctgctgctgaacttccacgtgtccctgctgctggtgcagctgctgaccccctgcagcgcccagttctctgtgctgggccccagcggccccatcctggccatggtgggggaggatgctgacctgccctgccacctgttccccaccatgtctgctgagaccatggagctgaagtgggtgagcagcagcctgcggcaggtggtgaatgtgtatgcagatggcaaggaggtggaggaccggcagagcgccccctaccggggccgcaccagcatcctgagagatggcatcacagctgggaaggccgccctgcgcatccacaacgtgacagccagtgacagcggcaagtacctgtgctacttccaggatggagacttctatgagaaggccctggtggagctgaaggtggccgccctgggcagcaacctgcacgtggaggtgaagggctatgaagatggcggcatccacctggagtgccgcagcacaggctggtacccccagccccagatccagtggagcaatgccaagggggagaacatcccagctgtggaggcccctgtggtggctgatggagtgggcctgtatgaggtggccgccagcgtcatcatgaggggcggcagcggggagggcgtgtcctgcatcatccggaacagcctgctgggcctggagaagacagccagcatcagcattgctgaccccttcttccgcagcgcccagccctggattgctgccctggccggcaccctgcccatcctgctgctgctgctggccggggccagctacttcctgtggaggcagcagaaggagatcacagccctgagcagcgagattgagagcgagcaggagatgaaggagatgggctacgccgccacagagcgggagatcagcctgcgggagagcctgcaggaggagctgaagaggaagaagagcagcacctag

SEQ ID NO: 145532 - DNA, 1755 bp, synthetic construct
  misc_feature 1..1755: note = Description of Artificial Sequence: Synthetic coding sequence
  source 1..1755: mol_type = other DNA
atgaagatggccagcagcctggccttcctgctgctgaacttccacgtgtccctcttcctggtgcagctgctgaccccctgcagcgcccagttctctgtgctgggccccagcggccccatcctggccatggtgggggaggatgctgacctgccctgccacctgttccccaccatgtctgctgagaccatggagctgcgctgggtgagcagcagcctgcggcaggtggtgaatgtgtatgcagatggcaaggaggtggaggaccggcagagcgccccctaccggggccgcaccagcatcctgagagatggcatcacagctgggaaggccgccctgcgcatccacaacgtgacagccagtgacagcggcaagtacctgtgctacttccaggatggagacttctatgagaaggccctggtggagctgaaggtggccgccctgggcagtgacctgcacatcgaggtgaagggctatgaagatggcggcatccacctggagtgccgcagcacaggctggtacccccagccccagatcaagtggagcgacaccaagggggagaacatcccagctgtggaggcccctgtggtggctgatggagtgggcctgtatgctgtggccgccagcgtcatcatgaggggcagcagcggcggcggcgtgtcctgcatcatccggaacagcctgctgggcctggagaagacagccagcatcagcattgctgaccccttcttccgcagcgcccagccctggattgctgccctggccggcaccctgcccatcagcctgctgctgctggccggggccagctacttcctgtggaggcagcagaaggagaagatcgccctgagccgggagacagagcgggagcgggagatgaaggagatgggctacgccgccacagagcaggagatcagcctgcgggagaagctgcaggaggagctgaagtggaggaagatccagtacatggcccggggggagaagagcctggcctaccacgagtggaagatggccctcttcaagccagcagatgtgatcctggaccctgacacagccaatgccatcctgctggtgtctgaggaccagaggtctgtgcagagagctgaggagccccgggacctgcctgacaaccctgagagatttgagtggagatactgtgtgctgggctgtgagaacttcaccagcggccgccactactgggaggtggaggtgggggacaggaaggagtggcacatcggcgtgtgcagcaagaatgtggagaggaagaagggctgggtgaagatgaccccagaaaatggctactggaccatgggcctgacagatggcaacaagtaccgggccctgacagagcccaggaccaacctgaagctgcctgagccccccaggaaggtgggcatcttcctggactatgaaacaggagagatctccttctacaatgccacagatggcagccacatctacaccttcccccacgccagcttcagcgagcccctgtaccctgtgttccgcatcctgaccctggagcccacagccctgaccatctgccccatccccaaggaggtggagagcagcccagaccctgacctggtgcctgaccacagcctggagacccccctgaccccaggcctggccaatgaaagtggagagccccaggccgaggtgaccagcctgctgctgcctgcccaccctggagctgaggtgagccccagcgccaccaccaaccagaaccacaagctgcaggccaggacagaggccctgtactag

SEQ ID NO: 145533 - DNA, 1629 bp, synthetic construct
  misc_feature 1..1629: note = Description of Artificial Sequence: Synthetic coding sequence
  source 1..1629: mol_type = other DNA
atggtgggggaggatgctgacctgccctgccacctgttccccaccatgtctgctgagaccatggagctgcgctgggtgagcagcagcctgcggcaggtggtgaatgtgtatgcagatggcaaggaggtggaggaccggcagagcgccccctaccggggccgcaccagcatcctgagagatggcatcacagctgggaaggccgccctgcgcatccacaacgtgacagccagtgacagcggcaagtacctgtgctacttccaggatggagacttctatgagaaggccctggtggagctgaaggtggccgccctgggcagtgacctgcacatcgaggtgaagggctatgaagatggcggcatccacctggagtgccgcagcacaggctggtacccccagccccagatcaagtggagcgacaccaagggggagaacatcccagctgtggaggcccctgtggtggctgatggagtgggcctgtatgctgtggccgccagcgtcatcatgaggggcagcagcggcggcggcgtgtcctgcatcatccggaacagcctgctgggcctggagaagacagccagcatcagcattgctgaccccttcttccgcagcgcccagccctggattgctgccctggccggcaccctgcccatcagcctgctgctgctggccggggccagctacttcctgtggaggcagcagaaggagaagatcgccctgagccgggagacagagcgggagcgggagatgaaggagatgggctacgccgccacagagcaggagatcagcctgcgggagaagctgcaggaggagctgaagtggaggaagatccagtacatggcccggggggagaagagcctggcctaccacgagtggaagatggccctcttcaagccagcagatgtgatcctggaccctgacacagccaatgccatcctgctggtgtctgaggaccagaggtctgtgcagagagctgaggagccccgggacctgcctgacaaccctgagagatttgagtggagatactgtgtgctgggctgtgagaacttcaccagcggccgccactactgggaggtggaggtgggggacaggaaggagtggcacatcggcgtgtgcagcaagaatgtggagaggaagaagggctgggtgaagatgaccccagaaaatggctactggaccatgggcctgacagatggcaacaagtaccgggccctgacagagcccaggaccaacctgaagctgcctgagccccccaggaaggtgggcatcttcctggactatgaaacaggagagatctccttctacaatgccacagatggcagccacatctacaccttcccccacgccagcttcagcgagcccctgtaccctgtgttccgcatcctgaccctggagcccacagccctgaccatctgccccatccccaaggaggtggagagcagcccagaccctgacctggtgcctgaccacagcctggagacccccctgaccccaggcctggccaatgaaagtggagagccccaggccgaggtgaccagcctgctgctgcctgcccaccctggagctgaggtgagccccagcgccaccaccaaccagaaccacaagctgcaggccaggacagaggccctgtactag

SEQ ID NO: 145534 - DNA, 417 bp, synthetic construct
  misc_feature 1..417: note = Description of Artificial Sequence: Synthetic coding sequence
  source 1..417: mol_type = other DNA
atgaagatggccagcagcctggccttcctgctgctgaacttccacgtgtccctcttcctggtgcagctgctgaccccctgcagcgcccagttctctgtgctgggccccagcggccccatcctggccatggtgggggaggatgctgacctgccctgccacctgttccccaccatgtctgctgagaccatggagctgcgctgggtgagcagcagcctgcggcaggtggtgaatgtgtatgcagatggcaaggaggtggaggaccggcagagcgccccctaccggggccgcaccagcatcctgagagatggcatcacagctgggaaggccgccctgcgcatccacaacgtgacagccagtgacagcggcaagtacctgtgctacttccaggatggagacttctatgagaaggccctgtag

SEQ ID NO: 145535 - DNA, 717 bp, synthetic construct
  misc_feature 1..717: note = Description of Artificial Sequence: Synthetic coding sequence
  source 1..717: mol_type = other DNA
atgaagatggccagcagcctggccttcctgctgctgaacttccacgtgtccctcttcctggtgcagctgctgaccccctgcagcgcccagttctctgtgctgggccccagcggccccatcctggccatggtgggggaggatgctgacctgccctgccacctgttccccaccatgtctgctgagaccatggagctgcgctgggtgagcagcagcctgcggcaggtggtgaatgtgtatgcagatggcaaggaggtggaggaccggcagagcgccccctaccggggccgcaccagcatcctgagagatggcatcacagctgggaaggccgccctgcgcatccacaacgtgacagccagtgacagcggcaagtacctgtgctacttccaggatggagacttctatgagaaggccctggtggagctgaaggtggccgccctgggcagtgacctgcacatcgaggtgaagggctatgaagatggcggcatccacctggagtgccgcagcacaggctggtacccccagccccagatcaagtggagcgacaccaagggggagaacatcccagctgtggaggcccctgtggtggctgatggagtgggcctgtatgctgtggccgccagcgtcatcatgaggggcagcagcggcggcggcgtgtcctgcatcatccggaacagcctgctgggcctggagaagacagccagcatcagcatcgcctag

SEQ ID NO: 145536 - DNA, 1368 bp, synthetic construct
  misc_feature 1..1368: note = Description of Artificial Sequence: Synthetic coding sequence
  source 1..1368: mol_type = other DNA
atggtggacttccctggctacaacctgagcggggctgtggccagcttcctgttcatcctgctgaccatgaagcagagcgaggacttccgggtcatcggccctgcccaccccatcctggccggcgtgggggaggatgccctgctgacctgccagctgctgcccaagaggaccaccatgcacgtggaggtgcgctggtacagaagtgagcccagcacccctgtgtttgtgcacagagatggagtggaggtgacagagatgcagatggaggagtaccggggctgggtggagtggattgaaaatggcatcgccaagggaaatgtggccctgaagatccacaacatccagcccagcgacaatggccagtactggtgccacttccaggacggcaactactgtggggagaccagcctgctgctgaaggtggccggcctgggcagcgcccccagcatccacatggagggccctggagagagcggcgtgcagctggtgtgcacagcccggggctggttccctgagccccaggtgtactgggaggacatccggggggagaagctgctggccgtgtctgagcaccgcatccaggacaaggatggcctcttctacgccgaggccaccctggtggtgagaaatgccagcgctgagagcgtgtcctgcctggtgcacaaccctgtgctgacagaggagaagggcagcgtcatcagcctgcctgagaagctgcagacagagctggccagcctgaaggtgaatggccccagccagcccatcctggtgcgggtgggggaggacatccagctgacctgctacctgagccccaaggccaatgcccagagcatggaggtgcgctgggacaggagccaccgctacccagctgtgcacgtgtacatggatggagaccacgtggccggggagcagatggccgagtaccggggccgcacagtgctggtgtctgatgccattgatgagggccgcctgaccctgcagatcctgagcgcccggcccagtgatgatggccagtaccgctgcctgtttgagaaggatgatgtgtaccaggaggccagcctggacctgaaggtggtgtccctgggcagcagccccctcatcaccgtggagggccaggaggatggagagatgcagcccatgtgcagcagtgatggctggttcccccagccccacgtgccctggagggacatggagggcaagaccatccccagcagcagccaggccctgacccagggcagccacggcctcttccacgtgcagaccctgctgcgggtgaccaacatctctgctgtggatgtgacctgcagcatcagcatccccttcctgggggaggagaagatcgccaccttcagcctgagcggctggtag

SEQ ID NO: 145537 - DNA, 1167 bp, synthetic construct
  misc_feature 1..1167: note = Description of Artificial Sequence: Synthetic coding sequence
  source 1..1167: mol_type = other DNA
atggtggacttccctggctacaacctgagcggggctgtggccagcttcctgttcatcctgctgaccatgaagcagagcgaggacttccgggtcatcggccctgcccaccccatcctggccggcgtgggggaggatgccctgctgacctgccagctgctgcccaagaggaccaccatgcacgtggaggtgcgctggtacagaagtgagcccagcacccctgtgtttgtgcacagagatggagtggaggtgacagagatgcagatggaggagtaccggggctgggtggagtggattgaaaatggcatcgccaagggaaatgtggccctgaagatccacaacatccagcccagcgacaatggccagtactggtgccacttccaggacggcaactactgtggggagaccagcctgctgctgaaggtggccgagaagctgctggccgtgctgagcagcctgaaggtgaatggccccagccagcccatcctggtgcgggtgggggaggacatccagctgacctgctacctgagccccaaggccaatgcccagagcatggaggtgcgctgggacaggagccaccgctacccagctgtgcacgtgtacatggatggagaccacgtggccggggagcagatggccgagtaccggggccgcacagtgctggtgtctgatgccattgatgagggccgcctgaccctgcagatcctgagcgcccggcccagtgatgatggccagtaccgctgcctgtttgagaaggatgatgtgtaccaggaggccagcctggacctgaaggtggtgtccctgggcagcagccccctcatcaccgtggagggccaggaggatggagagatgcagcccatgtgcagcagtgatggctggttcccccagccccacgtgccctggagggacatggagggcaagaccatccccagcagcagccaggccctgacccagggcagccacggcctcttccacgtgcagaccctgctgcgggtgaccaacatctctgctgtggatgtgacctgcagcatcagcatccccttcctgggggaggagaagatcgccaccttcagcctgtctgagagcaggatgaccttcctgtggaagaccctgctggtgtggggcctgctgctggccgtggccgtgggcctgcccaggaagaggagctag

SEQ ID NO: 145538 - DNA, 738 bp, synthetic construct
  misc_feature 1..738: note = Description of Artificial Sequence: Synthetic coding sequence
  source 1..738: mol_type = other DNA
atggtggacttccctggctacaacctgagcggggctgtggccagcttcctgttcatcctgctgaccatgaagcagagcgagaagctgcagacagagctggccagcctgaaggtgaatggccccagccagcccatcctggtgcgggtgggggaggacatccagctgacctgctacctgagccccaaggccaatgcccagagcatggaggtgcgctgggacaggagccaccgctacccagctgtgcacgtgtacatggatggagaccacgtggccggggagcagatggccgagtaccggggccgcacagtgctggtgtctgatgccattgatgagggccgcctgaccctgcagatcctgagcgcccggcccagtgatgatggccagtaccgctgcctgtttgagaaggatgatgtgtaccaggaggccagcctggacctgaaggtggtgtccctgggcagcagccccctcatcaccgtggagggccaggaggatggagagatgcagcccatgtgcagcagtgatggctggttcccccagccccacgtgccctggagggacatggagggcaagaccatccccagcagcagccaggccctgacccagggcagccacggcctcttccacgtgcagaccctgctgcgggtgaccaacatctctgctgtggatgtgacctgcagcatcagcatccccttcctgggggaggagaagatcgccaccttcagcctgagcggctggtag

SEQ ID NO: 145539 - DNA, 327 bp, synthetic construct
  misc_feature 1..327: note = Description of Artificial Sequence: Synthetic coding sequence
  source 1..327: mol_type = other DNA
atggtggacttccctggctacaacctgagcggggctgtggccagcttcctgttcatcctgctgaccatgaagcagagcgacttccgggtgattggccctgcccaccccatcctggccggcgtgggagaagatgccctgctgacctgccagctgctgcccaagaggaccaccatgcacgtggaggtgcgctggtacagaagtgagcccagcacccctgtgtttgtgcacagagatggagtggaggtgacagagatgcagatggaggagtaccggggctgggtggagtggattgaaaatggaattgccaagggaaatgtggccctgtag

SEQ ID NO: 145540 - DNA, 780 bp, synthetic construct
  misc_feature 1..780: note = Description of Artificial Sequence: Synthetic coding sequence
  source 1..780: mol_type = other DNA
atggtggacttccctggctacaacctgagcggggctgtggccagcttcctgttcatcctgctgaccatgaagcagagcgaggacttccgggtcatcggccctgcccaccccatcctggccggcgtgggggaggatgccctgctgacctgccagctgctgcccaagaggaccaccatgcacgtggaggtgcgctggtacagaagtgagcccagcacccctgtgtttgtgcacagagatggagtggaggtgacagagatgcagatggaggagtaccggggctgggtggagtggattgaaaatggcatcgccaagggaaatgtggccctgaagatccacaacatccagcccagcgacaatggccagtactggtgccacttccaggacggcaactactgtggggagaccagcctgctgctgaaggtggccggcctgggcagcgcccccagcatccacatggagggccctggagagagcggcgtgcagctggtgtgcacagcccggggctggttccctgagccccaggtgtactgggaggacatccggggggagaagctgctggccgtgtctgagcaccgcatccaggatgaagatggcctcttctacgccgaggccaccctggtggtgagaaatgccagcgctgagagcgtgtcctgcctggtgcacaaccctgtgctgacagaggagaagggcagcgtcatcagcctgcctgagaagctgcagacagagctgggcaagtatgaggtgctggcccacacctgtggcggcagcctgtgcccctag

SEQ ID NO: 145541 - DNA, 780 bp, synthetic construct
  misc_feature 1..780: note = Description of Artificial Sequence: Synthetic coding sequence
  source 1..780: mol_type = other DNA
atggtggacttccctggctacaacctgagcggggctgtggccagcttcctgttcatcctgctgaccatgaagcagagcgaggacttccgggtcatcggccctgcccaccccatcctggccggcgtgggggaggatgccctgctgacctgccagctgctgcccaagaggaccaccatgcacgtggaggtgcgctggtacagaagtgagcccagcacccctgtgtttgtgcacagagatggagtggaggtgacagagatgcagatggaggagtaccggggctgggtggagtggattgaaaatggcatcgccaagggaaatgtggccctgaagatccacaacatccagcccagcgacaatggccagtactggtgccacttccaggacggcaactactgtggggagaccagcctgctgctgaaggtggccggcctgggcagcgcccccagcatccacatggagggccctggagagagcggcgtgcagctggtgtgcacagcccggggctggttccctgagccccaggtgtactgggaggacatccggggggagaagctgctggccgtgtctgagcaccgcatccaggacaaggatggcctcttctacgccgaggccaccctggtggtgagaaatgccagcgctgagagcgtgtcctgcctggtgcacaaccctgtgctgacagaggagaagggcagcgtcatcagcctgcctgagaagctgcagacagagctgggcaagtatgaggtgctggcccacacctgtggcggcagcctgtgcccctag

SEQ ID NO: 145542 - DNA, 636 bp, synthetic construct
  misc_feature 1..636: note = Description of Artificial Sequence: Synthetic coding sequence
  source 1..636: mol_type = other DNA
aaggccaatgcccagagcatggaggtgcgctgggacaggagccaccgctacccagctgtgcacgtgtacatggatggagaccacgtggccggggagcagatggccgagtaccggggccgcacagtgctggtgtctgatgccattgatgagggccgcctgaccctgcagatcctgagcgcccggcccagtgatgatggccagtaccgctgcctgtttgagaaggatgatgtgtaccaggaggccagcctggacctgaaggtggtgtccctgggcagcagccccctcatcaccgtggagggccaggaggatggagagatgcagcccatgtgcagcagtgatggctggttcccccagccccacgtgccctggagggacatggagggcaagaccatccccagcagcagccaggccctgacccagggcagccacggcctcttccacgtgcagaccctgctgcgggtgaccaacatctctgctgtggatgtgacctgcagcatcagcatccccttcctgggggaggagaagatcgccaccttcagcctgtctgagagcaggatgaccttcctgtggaagaccctgctggtgtggggcctgctgctggccgtggccgtgggcctgcccaggaagaggagctag

SEQ ID NO: 145543 - DNA, 780 bp, synthetic construct; identical to SEQ ID NO: 145541
  misc_feature 1..780: note = Description of Artificial Sequence: Synthetic coding sequence
  source 1..780: mol_type = other DNA

SEQ ID NO: 145544 - DNA, 327 bp, synthetic construct; identical to SEQ ID NO: 145539
  misc_feature 1..327: note = Description of Artificial Sequence: Synthetic coding sequence
  source 1..327: mol_type = other DNA

SEQ ID NO: 145545 - DNA, 327 bp, synthetic construct; identical to SEQ ID NO: 145539
  misc_feature 1..327: note = Description of Artificial Sequence: Synthetic coding sequence
  source 1..327: mol_type = other DNA

SEQ ID NO: 145546 - DNA, 636 bp, synthetic construct
  misc_feature 1..636: note = Description of Artificial Sequence: Synthetic coding sequence
  source 1..636: mol_type = other DNA
aaggccaatgcccagagcatggaggtgcgctgggacaggagccaccgctacccagctgtgcacgtgtacatggatggagaccacgtggccggggagcagatggccgagtaccggggccgcacagtgctggtgtctgatgccattgatgagggccgcctgaccctgcagatcctgagcgcccggcccagtgatgatggccagtaccgctgcctgtttgagaaggatgatgtgtaccaggaggccagcctggacctgaaggtggtgggcctgggcagcagccccctcatcaccgtggagggccaggaggatggagagatgcagcccatgtgcagcagtgatggctggttcccccagccccacgtgccctggagggacatggagggcaagaccatccccagcagcagccaggccctgacccagggcagccacggcctcttccacgtgcagaccctgctgcgggtgaccaacatctctgctgtggatgtgacctgcagcatcagcatccccttcctgggggaggagaagatcgccaccttcagcctgtctgagagcaggatgaccttcctgtggaagaccctgctggtgtggggcctgctgctggccgtggccgtgggcctgcccaggaagaggagctag

SEQ ID NO: 145547 - DNA, 816 bp, synthetic construct
  misc_feature 1..816: note = Description of Artificial Sequence: Synthetic coding sequence
  source 1..816: mol_type = other DNA
atggtggacttccctggctacaacctgagcggggctgtggccagcttcctgttcatcctgctgaccatgaagcagagcgaggacttccgggtcatcggccctgcccaccccatcctggccggcgtgggggaggatgccctgctgacctgccagctgctgcccaagaggaccaccatgcacgtggaggtgcgctggtacagaagtgagcccagcacccctgtgtttgtgcacagagatggagtggaggtgacagagatgcagatggaggagtaccggggctgggtggagtggattgaaaatggcatcgccaagggaaatgtggccctgaagatccacaacatccagcccagcgacaatggccagtactggtgccacttccaggacggcaactactgtggggagaccagcctgctgctgaaggtggccgctgtgctgagagatgacatcatcgccagcctgaaggtgaatggccccagccagcccatcctggtgcgggtgggggaggacatccagctgacctgctacctgagccccaaggccaatgcccagagcatggaggtgcgctgggacaggagccaccgctacccagctgtgcacgtgtacatggatggagaccacgtggccggggagcagatggccgagtaccggggccgcacagtgctggtgtctgatgccattgatgagggccgcctgaccctgcagatcctgagcgcccggcccagtgatgatggccagtaccgctgcctgtttgagaaggatgatgtgtaccaggaggccagcctggacctgaaggtggtgtgggtgctgccccactag

SEQ ID NO: 145548 - DNA, 327 bp, synthetic construct; identical to SEQ ID NO: 145539
  misc_feature 1..327: note = Description of Artificial Sequence: Synthetic coding sequence
  source 1..327: mol_type = other DNA

SEQ ID NO: 145549 - DNA, 780 bp, synthetic construct; identical to SEQ ID NO: 145540
  misc_feature 1..780: note = Description of Artificial Sequence: Synthetic coding sequence
  source 1..780: mol_type = other DNA

SEQ ID NO: 145550 - DNA, 327 bp, synthetic construct; identical to SEQ ID NO: 145539
  misc_feature 1..327: note = Description of Artificial Sequence: Synthetic coding sequence
  source 1..327: mol_type = other DNA

SEQ ID NO: 145551 - DNA, 636 bp, synthetic construct; identical to SEQ ID NO: 145546
  misc_feature 1..636: note = Description of Artificial Sequence: Synthetic coding sequence
  source 1..636: mol_type = other DNA

SEQ ID NO: 145552 - DNA, 780 bp, synthetic construct; identical to SEQ ID NO: 145540
  misc_feature 1..780: note = Description of Artificial Sequence: Synthetic coding sequence
  source 1..780: mol_type = other DNA

SEQ ID NO: 145553 - DNA, 780 bp, synthetic construct; identical to SEQ ID NO: 145541
  misc_feature 1..780: note = Description of Artificial Sequence: Synthetic coding sequence
  source 1..780: mol_type = other DNA

SEQ ID NO: 145554 - DNA, 327 bp, synthetic construct; identical to SEQ ID NO: 145539
  misc_feature 1..327: note = Description of Artificial Sequence: Synthetic coding sequence
  source 1..327: mol_type = other DNA

SEQ ID NO: 145555 - DNA, 780 bp, synthetic construct; identical to SEQ ID NO: 145541
  misc_feature 1..780: note = Description of Artificial Sequence: Synthetic coding sequence
  source 1..780: mol_type = other DNA

SEQ ID NO: 145556 - DNA, 636 bp, synthetic construct; identical to SEQ ID NO: 145546
  misc_feature 1..636: note = Description of Artificial Sequence: Synthetic coding sequence
  source 1..636: mol_type = other DNA

SEQ ID NO: 145557 - DNA, 636 bp, synthetic construct; identical to SEQ ID NO: 145542
  misc_feature 1..636: note = Description of Artificial Sequence: Synthetic coding sequence
  source 1..636: mol_type = other DNA

SEQ ID NO: 145558 - DNA, 636 bp, synthetic construct; identical to SEQ ID NO: 145542
  misc_feature 1..636: note = Description of Artificial Sequence: Synthetic coding sequence
  source 1..636: mol_type = other DNA

SEQ ID NO: 145559 - DNA, 327 bp, synthetic construct; identical to SEQ ID NO: 145539
  misc_feature 1..327: note = Description of Artificial Sequence: Synthetic coding sequence
  source 1..327: mol_type = other DNA

SEQ ID NO: 145560 - DNA, 636 bp, synthetic construct; identical to SEQ ID NO: 145542
  misc_feature 1..636: note = Description of Artificial Sequence: Synthetic coding sequence
  source 1..636: mol_type = other DNA

SEQ ID NO: 145561 - DNA, 1449 bp, synthetic construct
  misc_feature 1..1449: note = Description of Artificial Sequence: Synthetic coding sequence
  source 1..1449: mol_type = other DNA
atggtggacttccctggctacaacctgagcggggctgtggccagcttcctgttcatcctgctgaccatgaagcagagcgaggacttccgggtcatcggccctgcccaccccatcctggccggcgtgggggaggatgccctgctgacctgccagctgctgcccaagaggaccaccatgcacgtggaggtgcgctggtacagaagtgagcccagcacccctgtgtttgtgcacagagatggagtggaggtgacagagatgcagatggaggagtaccggggctgggtggagtggattgaaaatggcatcgccaagggaaatgtggccctgaagatccacaacatccagcccagcgacaatggccagtactggtgccacttccaggacggcaactactgtggggagaccagcctgctgctgaaggtggccggcctgggcagcgcccccagcatccacatggagggccctggagagagcggcgtgcagctggtgtgcacagcccggggctggttccctgagccccaggtgtactgggaggacatccggggggagaagctgctggccgtgtctgagcaccgcatccaggacaaggatggcctcttctacgccgaggccaccctggtggtgagaaatgccagcgctgagagcgtgtcctgcctggtgcacaaccctgtgctgacagaggagaagggcagcgtcatcagcctgcctgagaagctgcagacagagctggccagcctgaaggtgaatggccccagccagcccatcctggtgcgggtgggggaggacatccagctgacctgctacctgagccccaaggccaatgcccagagcatggaggtgcgctgggacaggagccaccgctacccagctgtgcacgtgtacatggatggagaccacgtggccggggagcagatggccgagtaccggggccgcacagtgctggtgtctgatgccattgatgagggccgcctgaccctgcagatcctgagcgcccggcccagtgatgatggccagtaccgctgcctgtttgagaaggatgatgtgtaccaggaggccagcctggacctgaaggtggtgtccctgggcagcagccccctcatcaccgtggagggccaggaggatggagagatgcagcccatgtgcagcagtgatggctggttcccccagccccacgtgccctggagggacatggagggcaagaccatccccagcagcagccaggccctgacccagggcagccacggcctcttccacgtgcagaccctgctgcgggtgaccaacatctctgctgtggatgtgacctgcagcatcagcatccccttcctgggggaggagaagatcgccaccttcagcctgtctgagagcaggatgaccttcctgtggaagaccctgctggtgtggggcctgctgctggccgtggccgtgggcctgcccaggaagaggagctag

SEQ ID NO: 145562 - DNA, 738 bp, synthetic construct
  misc_feature 1..738: note = Description of Artificial Sequence: Synthetic coding sequence
  source 1..738: mol_type = other DNA
atggtggacttccctggctacaacctgagcggggctgtggccagcttcctgttcatcctgctgaccatgaagcagagcgaccggctggacacccccaaggccagcctgaaggtgaatggccccagccagcccatcctggtgcgggtgggggaggacatccagctgacctgctacctgagccccaaggccaatgcccagagcatggaggtgcgctgggacaggagccaccgctacccagctgtgcacgtgtacatggatggagaccacgtggccggggagcagatggccgagtaccggggccgcacagtgctggtgtctgatgccattgatgagggccgcctgaccctgcagatcctgagcgcccggcccagtgatgatggccagtaccgctgcctgtttgagaaggatgatgtgtaccaggaggccagcctggacctgaaggtggtgtccctgggcagcagccccctcatcaccgtggagggccaggaggatggagagatgcagcccatgtgcagcagtgatggctggttcccccagccccacgtgccctggagggacatggagggcaagaccatccccagcagcagccaggccctgacccagggcagccacggcctcttccacgtgcagaccctgctgcgggtgaccaacatctctgctgtggatgtgacctgcagcatcagcatccccttcctgggggaggagaagatcgccaccttcagcctgagcggctggtag

SEQ ID NO: 145563 - DNA, 537 bp, synthetic construct
  misc_feature 1..537: note = Description of Artificial Sequence: Synthetic coding sequence
  source 1..537: mol_type = other DNA
atggaggtgcgctgggacaggagccaccgctacccagctgtgcacgtgtacatggatggagaccacgtggccggggagcagatggccgagtaccggggccgcacagtgctggtgtctgatgccattgatgagggccgcctgaccctgcagatcctgagcgcccggcccagtgatgatggccagtaccgctgcctgtttgagaaggatgatgtgtaccaggaggccagcctggacctgaaggtggtgtccctgggcagcagccccctcatcaccgtggagggccaggaggatggagagatgcagcccatgtgcagcagtgatggctggttcccccagccccacgtgccctggagggacatggagggcaagaccatccccagcagcagccaggccctgacccagggcagccacggcctcttccacgtgcagaccctgctgcgggtgaccaacatctctgctgtggatgtgacctgcagcatcagcatccccttcctgggggaggagaagatcgccaccttcagcctgagcggctggtag

SEQ ID NO: 145564 - DNA, 1167 bp, synthetic construct; identical to SEQ ID NO: 145537
  misc_feature 1..1167: note = Description of Artificial Sequence: Synthetic coding sequence
  source 1..1167: mol_type = other DNA

SEQ ID NO: 145565 - DNA, 1167 bp, synthetic construct
  misc_feature 1..1167: note = Description of Artificial Sequence: Synthetic coding sequence
  source 1..1167: mol_type = other DNA
atggtggacttccctggctacaacctgagcggggctgtggccagcttcctgttcatcctgctgaccatgaagcagagcgaggacttccgggtcatcggccctgcccaccccatcctggccggcgtgggggaggatgccctgctgacctgccagctgctgcccaagaggaccaccatgcacgtggaggtgcgctggtacagaagtgagcccagcacccctgtgtttgtgcacagagatggagtggaggtgacagagatgcagatggaggagtaccggggctgggtggagtggattgaaaatggcatcgccaagggaaatgtggccctgaagatccacaacatccagcccagcgacaatggccagtactggtgccacttccaggacggcaactactgtggggagaccagcctgctgctgaaggtggccgagaagctgctggccgtgctgagcagcctgaaggtgaatggccccagccagcccatcctggtgcgggtgggggaggacatccagctgacctgctacctgagccccaaggccaatgcccagagcatggaggtgcgctgggacaggagccaccgctacccagctgtgcacgtgtacatggatggagaccacgtggccggggagcagatggccgagtaccggggccgcacagtgctggtgtctgatgccattgatgagggccgcctgaccctgcagatcctgagcgcccggcccagtgatgatggccagtaccgctgcctgtttgagaaggatgatgtgtaccaggaggccagcctggacctgaaggtggtgggcctgggcagcagccccctcatcaccgtggagggccaggaggatggagagatgcagcccatgtgcagcagtgatggctggttcccccagccccacgtgccctggagggacatggagggcaagaccatccccagcagcagccaggccctgacccagggcagccacggcctcttccacgtgcagaccctgctgcgggtgaccaacatctctgctgtggatgtgacctgcagcatcagcatccccttcctgggggaggagaagatcgccaccttcagcctgtctgagagcaggatgaccttcctgtggaagaccctgctggtgtggggcctgctgctggccgtggccgtgggcctgcccaggaagaggagctag

SEQ ID NO: 145566 - DNA, 1167 bp, synthetic construct; identical to SEQ ID NO: 145537
  misc_feature 1..1167: note = Description of Artificial Sequence: Synthetic coding sequence
  source 1..1167: mol_type = other DNA

SEQ ID NO: 145567 - DNA, 738 bp, synthetic construct
  misc_feature 1..738: note = Description of Artificial Sequence: Synthetic coding sequence
  source 1..738: mol_type = other DNA
atggtggacttccctggctacaacctgagcggggctgtggccagcttcctgttcatcctgctgaccatgaagcagagcgaccggctggacacccccaaggccagcctgaaggtgaatggccccagccagcccatcctggtgcgggtgggggaggacatccagctgacctgctacctgagccccaaggccaatgcccagagcatggaggtgcgctgggacaggagccaccgctacccagctgtgcacgtgtacatggatggagaccacgtggccggggagcagatggccgagtaccggggccgcacagtgctggtgtctgatgccattgatgagggccgcctgaccctgcagatcctgagcgcccggcccagtgatgatggccagtaccgctgcctgtttgagaaggatgatgtgtaccaggaggccagcctggacctgaaggtggtgggcctgggcagcagccccctcatcaccgtggagggccaggaggatggagagatgcagcccatgtgcagcagtgatggctggttcccccagccccacgtgccctggagggacatggagggcaagaccatccccagcagcagccaggccctgacccagggcagccacggcctcttccacgtgcagaccctgctgcgggtgaccaacatctctgctgtggatgtgacctgcagcatcagcatccccttcctgggggaggagaagatcgccaccttcagcctgagcggctggtag

SEQ ID NO: 145568 - DNA, 738 bp, synthetic construct; identical to SEQ ID NO: 145562
  misc_feature 1..738: note = Description of Artificial Sequence: Synthetic coding sequence
  source 1..738: mol_type = other DNA

SEQ ID NO: 145569 - DNA, 1167 bp, synthetic construct; identical to SEQ ID NO: 145537
  misc_feature 1..1167: note = Description of Artificial Sequence: Synthetic coding sequence
  source 1..1167: mol_type = other DNA

SEQ ID NO: 145570 - DNA, 816 bp, synthetic construct; identical to SEQ ID NO: 145547
  misc_feature 1..816: note = Description of Artificial Sequence: Synthetic coding sequence
  source 1..816: mol_type = other DNA

SEQ ID NO: 145571 - DNA, 738 bp, synthetic construct
  misc_feature 1..738: note = Description of Artificial Sequence: Synthetic coding sequence
  source 1..738: mol_type = other DNA
atggtggacttccctggctacaacctgagcggggctgtggccagcttcctgttcatcctgctgaccatgaagcagagcgagaagctgcagacagagctggccagcctgaaggtgaatggccccagccagcccatcctggtgcgggtgggggaggacatccagctgacctgctacctgagccccaaggccaatgcccagagcatggaggtgcgctgggacaggagccaccgctacccagctgtgcacgtgtacatggatggagaccacgtggccggggagcagatggccgagtaccggggccgcacagtgctggtgtctgatgccattgatgagggccgcctgaccctgcagatcctgagcgcccggcccagtgatgatggccagtaccgctgcctgtttgagaaggatgatgtgtaccaggaggccagcctggacctgaaggtggtgggcctgggcagcagccccctcatcaccgtggagggccaggaggatggagagatgcagcccatgtgcagcagtgatggctggttcccccagccccacgtgccctggagggacatggagggcaagaccatccccagcagcagccaggccctgacccagggcagccacggcctcttccacgtgcagaccctgctgcgggtgaccaacatctctgctgtggatgtgacctgcagcatcagcatccccttcctgggggaggagaagatcgccaccttcagcctgagcggctggtag

SEQ ID NO: 145572 - DNA, 537 bp, synthetic construct
  misc_feature 1..537: note = Description of Artificial Sequence: Synthetic coding sequence
  source 1..537: mol_type = other DNA
atggaggtgcgctgggacaggagccaccgctacccagctgtgcacgtgtacatggatggagaccacgtggccggggagcagatggccgagtaccggggccgcacagtgctggtgtctgatgccattgatgagggccgcctgaccctgcagatcctgagcgcccggcccagtgatgatggccagtaccgctgcctgtttgagaaggatgatgtgtaccaggaggccagcctggacctgaaggtggtgggcctgggcagcagccccctcatcaccgtggagggccaggaggatggagagatgcagcccatgtgcagcagtgatggctggttcccccagccccacgtgccctggagggacatggagggcaagaccatccccagcagcagccaggccctgacccagggcagccacggcctcttccacgtgcagaccctgctgcgggtgaccaacatctctgctgtggatgtgacctgcagcatcagcatccccttcctgggggaggagaagatcgccaccttcagcctgagcggctggtag

SEQ ID NO: 145573 - DNA, 738 bp, synthetic construct; identical to SEQ ID NO: 145562
  misc_feature 1..738: note = Description of Artificial Sequence: Synthetic coding sequence
  source 1..738: mol_type = other DNA

SEQ ID NO: 145574 - DNA, 1368 bp, synthetic construct
  misc_feature 1..1368: note = Description of Artificial Sequence: Synthetic coding sequence
  source 1..1368: mol_type = other DNA
atggtggacttccctggctacaacctgagcggggctgtggccagcttcctgttcatcctgctgaccatgaagcagagcgaggacttccgggtcatcggccctgcccaccccatcctggccggcgtgggggaggatgccctgctgacctgccagctgctgcccaagaggaccaccatgcacgtggaggtgcgctggtacagaagtgagcccagcacccctgtgtttgtgcacagagatggagtggaggtgacagagatgcagatggaggagtaccggggctgggtggagtggattgaaaatggcatcgccaagggaaatgtggccctgaagatccacaacatccagcccagcgacaatggccagtactggtgccacttccaggacggcaactactgtggggagaccagcctgctgctgaaggtggccggcctgggcagcgcccccagcatccacatggagggccctggagagagcggcgtgcagctggtgtgcacagcccggggctggttccctgagccccaggtgtactgggaggacatccggggggagaagctgctggccgtgtctgagcaccgcatccaggatgaagatggcctcttctacgccgaggccaccctggtggtgagaaatgccagcgctgagagcgtgtcctgcctggtgcacaaccctgtgctgacagaggagaagggcagcgtcatcagcctgcctgagaagctgcagacagagctggccagcctgaaggtgaatggccccagccagcccatcctggtgcgggtgggggaggacatccagctgacctgctacctgagccccaaggccaatgcccagagcatggaggtgcgctgggacaggagccaccgctacccagctgtgcacgtgtacatggatggagaccacgtggccggggagcagatggccgagtaccggggccgcacagtgctggtgtctgatgccattgatgagggccgcctgaccctgcagatcctgagcgcccggcccagtgatgatggccagtaccgctgcctgtttgagaaggatgatgtgtaccaggaggccagcctggacctgaaggtggtgggcctgggcagcagccccctcatcaccgtggagggccaggaggatggagagatgcagcccatgtgcagcagtgatggctggttcccccagccccacgtgccctggagggacatggagggcaagaccatccccagcagcagccaggccctgacccagggcagccacggcctcttccacgtgcagaccctgctgcgggtgaccaacatctctgctgtggatgtgacctgcagcatcagcatccccttcctgggggaggagaagatcgccaccttcagcctgagcggctggtag

SEQ ID NO: 145575 - DNA, 816 bp, synthetic construct; identical to SEQ ID NO: 145547
  misc_feature 1..816: note = Description of Artificial Sequence: Synthetic coding sequence
  source 1..816: mol_type = other DNA

SEQ ID NO: 145576 - DNA, 816 bp, synthetic construct; identical to SEQ ID NO: 145547
  misc_feature 1..816: note = Description of Artificial Sequence: Synthetic coding sequence
  source 1..816: mol_type = other DNA

SEQ ID NO: 145577 - DNA, 738 bp, synthetic construct; identical to SEQ ID NO: 145562
  misc_feature 1..738: note = Description of Artificial Sequence: Synthetic coding sequence
  source 1..738: mol_type = other DNA

SEQ ID NO: 145578 - DNA, 816 bp, synthetic construct; identical to SEQ ID NO: 145547
  misc_feature 1..816: note = Description of Artificial Sequence: Synthetic coding sequence
  source 1..816: mol_type = other DNA

SEQ ID NO: 145579 - DNA, 738 bp, synthetic construct; identical to SEQ ID NO: 145567
  misc_feature 1..738: note = Description of Artificial Sequence: Synthetic coding sequence
  source 1..738: mol_type = other DNA

SEQ ID NO: 145580 - DNA, 738 bp, synthetic construct; identical to SEQ ID NO: 145562
  misc_feature 1..738: note = Description of Artificial Sequence: Synthetic coding sequence
  source 1..738: mol_type = other DNA

SEQ ID NO: 145581 - DNA, 1368 bp, synthetic construct; identical to SEQ ID NO: 145536
  misc_feature 1..1368: note = Description of Artificial Sequence: Synthetic coding sequence
  source 1..1368: mol_type = other DNA

SEQ ID NO: 145582 - DNA, 1368 bp, synthetic construct; identical to SEQ ID NO: 145536
  misc_feature 1..1368: note = Description of Artificial Sequence: Synthetic coding sequence
  source 1..1368: mol_type = other DNA

SEQ ID NO: 145583 - DNA, 537 bp, synthetic construct; identical to SEQ ID NO: 145563
  misc_feature 1..537: note = Description of Artificial Sequence: Synthetic coding sequence
  source 1..537: mol_type = other DNA

SEQ ID NO: 145584 - DNA, 1368 bp, synthetic construct; identical to SEQ ID NO: 145536
  misc_feature 1..1368: note = Description of Artificial Sequence: Synthetic coding sequence
  source 1..1368: mol_type = other DNA

SEQ ID NO: 145585 - DNA, 816 bp, synthetic construct; identical to SEQ ID NO: 145547
  misc_feature 1..816: note = Description of Artificial Sequence: Synthetic coding sequence
  source 1..816: mol_type = other DNA

SEQ ID NO: 145586 - DNA, 1368 bp, synthetic construct; identical to SEQ ID NO: 145574
  misc_feature 1..1368: note = Description of Artificial Sequence: Synthetic coding sequence
  source 1..1368: mol_type = other DNA

SEQ ID NO: 145587 - DNA, 1368 bp, synthetic construct; identical to SEQ ID NO: 145574
  misc_feature 1..1368: note = Description of Artificial Sequence: Synthetic coding sequence
  source 1..1368: mol_type = other DNA

SEQ ID NO: 145588 - DNA, 816 bp, synthetic construct; identical to SEQ ID NO: 145547
  misc_feature 1..816: note = Description of Artificial Sequence: Synthetic coding sequence
  source 1..816: mol_type = other DNA

SEQ ID NO: 145589 - DNA, 537 bp, synthetic construct; identical to SEQ ID NO: 145572
  misc_feature 1..537: note = Description of Artificial Sequence: Synthetic coding sequence
  source 1..537: mol_type = other DNA

SEQ ID NO: 145590 - DNA, 738 bp, synthetic construct; identical to SEQ ID NO: 145571
  misc_feature 1..738: note = Description of Artificial Sequence: Synthetic coding sequence
  source 1..738: mol_type = other DNA

SEQ ID NO: 145591 - DNA, 738 bp, synthetic construct; identical to SEQ ID NO: 145538
  misc_feature 1..738: note = Description of Artificial Sequence: Synthetic coding sequence
  source 1..738: mol_type = other DNA

SEQ ID NO: 145592 - DNA, 1167 bp, synthetic construct; identical to SEQ ID NO: 145537
  misc_feature 1..1167: note = Description of Artificial Sequence: Synthetic coding sequence
  source 1..1167: mol_type = other DNA

SEQ ID NO: 145593 - DNA, 1368 bp, synthetic construct; identical to SEQ ID NO: 145536
  misc_feature 1..1368: note = Description of Artificial Sequence: Synthetic coding sequence
  source 1..1368: mol_type = other DNA

SEQ ID NO: 145594 - DNA, 1167 bp, synthetic construct; identical to SEQ ID NO: 145565
  misc_feature 1..1167: note = Description of Artificial Sequence: Synthetic coding sequence
  source 1..1167: mol_type = other DNA

SEQ ID NO: 145595 - DNA, 738 bp, synthetic construct; identical to SEQ ID NO: 145567
  misc_feature 1..738: note = Description of Artificial Sequence: Synthetic coding sequence
  source 1..738: mol_type = other DNA

SEQ ID NO: 145596 - DNA, 816 bp, synthetic construct; identical to SEQ ID NO: 145547
  misc_feature 1..816: note = Description of Artificial Sequence: Synthetic coding sequence
  source 1..816: mol_type = other DNA

SEQ ID NO: 145597 - DNA, 1167 bp, synthetic construct; identical to SEQ ID NO: 145565
  misc_feature 1..1167: note = Description of Artificial Sequence: Synthetic coding sequence
  source 1..1167: mol_type = other DNA

SEQ ID NO: 145598 - DNA, 1401 bp, synthetic construct
  misc_feature 1..1401: note = Description of Artificial Sequence: Synthetic coding sequence
  source 1..1401: mol_type = other DNA
atggcctttgtgctgatcctggtgctgtccttctatgagctggtgtctggccagtggcaggtgacaggccctgggaagtttgtgcaggccctggtgggggaggatgctgtgttcagctgcagcctcttccctgagaccagcgctgaggccatggaggtgcgcttcttcaggaaccagttccacgctgtggtgcacctgtacagagatggagaggactgggagagcaagcagatgccccagtaccggggccgcacagaatttgtgaaggacagcattgctgggggccgggtgtccctgcggctgaagaacatcacccccagcgacatcggcctgtatggctgctggttcagcagccagatctatgatgaggaggccacctgggagctgcgggtggccgccctgggcagcctgcccctcatcagcatcgtgggctacgtggatggcggcatccagctgctgtgcctgagcagcggctggttcccccagcccacagccaagtggaagggcccccagggccaggacctgagcagtgacagccgggccaatgctgatggctacagcctgtatgatgtggagatcagcatcatcgtgcaggagaatgccggcagcatcctgtgcagcatccacctggccgagcagagccatgaggtggagagcaaggtgctgattggagagaccttcttccagcccagcccctggaggctggccagcatcctgctgggcctgctgtgtggggccctgtgtggggtggtgatgggcatgatcatcgtgttcttcaagagcaagggcaagatccaggccgagctggactggaggaggaagcacggccaggccgagctgagagatgccaggaagcatgctgtggaggtgaccctggaccctgagacagcccaccccaagctgtgtgtgtctgacctgaagacagtgacccacaggaaggccccccaggaggtgccccacagcgagaagcgcttcaccaggaagtctgtggtggccagccagggcttccaggccggcaagcactactgggaggtggatgtgggccagaatgtgggctggtacgtgggcgtgtgcagagatgatgtggaccggggcaagaacaacgtgaccctgagccccaacaacggctactgggtgctgcggctgaccacagagcacctgtacttcaccttcaacccccacttcatcagcctgccccccagcaccccacccaccagggtgggcgtcttcctggactatgaaggaggcaccatctccttcttcaacaccaatgaccagagcctcatctacaccctgctgacctgccagtttgagggcctgctgcggccctacatccagcacgccatgtatgatgaggagaagggcacccccatcttcatctgccctgtgtcctggggctag

SEQ ID NO: 145599 - DNA, 1299 bp, synthetic construct
  misc_feature 1..1299: note = Description of Artificial Sequence: Synthetic coding sequence
  source 1..1299: mol_type = other DNA
atggcctttgtgctgatcctggtgctgtccttctatgagctggtgtctggccagtggcaggtgacaggccctgggaagtttgtgcaggccctggtgggggaggatgctgtgttcagctgcagcctcttccctgagaccagcgctgaggccatggaggtgcgcttcttcaggaaccagttccacgctgtggtgcacctgtacagagatggagaggactgggagagcaagcagatgccccagtaccggggccgcacagaatttgtgaaggacagcattgctgggggccgggtgtccctgcggctgaagaacatcacccccagcgacatcggcctgtatggctgctggttcagcagccagatctatgatgaggaggccacctgggagctgcgggtggccgccctgggcagcctgcccctcatcagcatcgtgggctacgtggatggcggcatccagctgctgtgcctgagctctgtgcagcccagcccctggaggctggccagcatcctgctgggcctgctgtgtggggccctgtgtggggtggtgatgggcatgatcatcgtgttcttcaagagcaagggcaagatccaggccgagctgggcatgtgccacgtgctgagcctgccccacatggtgctgcccggccccagcctcatccacagcctgagcctgtggaccaccctggccgccggctggacaggcagcacagactggaggaggaagcacggccaggccgagctgagagatgccaggaagcatgctgtggaggtgaccctggaccctgagacagcccaccccaagctgtgtgtgtctgacctgaagacagtgacccacaggaaggccccccaggaggtgccccacagcgagaagcgcttcaccaggaagtctgtggtggccagccagggcttccaggccggcaagcactactgggaggtggatgtgggccagaatgtgggctggtacgtgggcgtgtgcagagatgatgtggaccggggcaagaacaacgtgaccctgagccccaacaacggctactgggtgctgcggctgaccacagagcacctgtacttcaccttcaacccccacttcatcagcctgccccccagcaccccacccaccagggtgggcgtcttcctggactatgaaggaggcaccatctccttcttcaacaccaatgaccagagcctcatctacaccctgctgacctgccagtttgagggcctgctgcggccctacatccagcacgccatgtatgatgaggagaagggcacccccatcttcatctgccctgtgtcctggggctag

SEQ ID NO: 145600 - DNA, 1809 bp, synthetic construct
  misc_feature 1..1809: note = Description of Artificial Sequence: Synthetic coding sequence
  source 1..1809: mol_type = other DNA
atgcacagcaaggtgaccatcatctgcatccgcttcctgttctggttcctgctgctgtgcatgctgattggcaagagccacacagaagatgacatcatcatcgccaccaagaatggcaaggtgcggggcatgaacctgactgtgtttggaggcaccgtgacagccttcctgggcatcccctatgcccagccccccctgggccgcctgcgcttcaagaagccccagagcctgaccaagtggagcgacatctggaatgccaccaagtatgccaacagctgctgccagaacatcgaccagagcttccctggcttccacggcagcgagatgtggaaccccaacacagacctgtctgaggactgcctgtacctgaatgtgtggatcccagcccccaagcccaagaatgccaccgtgctgatctggatctacggcggcggcttccagacaggcaccagcagcctgcacgtgtatgatggcaagttcctggcccgggtggagagggtcatcgtggtgtccatgaactacagagtgggcgccctgggcttcctggccctgcccggcaaccctgaggcccctggcaacatgggcctgtttgaccagcagctggccctgcagtgggtgcagaagaacattgctgcctttggaggcaaccccaagtctgtgaccctgtttggagagagcgctggagctgcctctgtgtccctgcacctgctgagccctggcagccacagcctcttcacccgggccatcctgcagagcggcagcttcaatgccccctgggccgtgaccagcctgtatgaggccaggaacagaaccctgaacctggccaagctgaccggctgcagcagagaaaatgaaacagagatcatcaagtgcctgaggaacaaggacccccaggagatcctgctgaatgaggcctttgtggtgccctacggcacccccctgtctgtgaactttggccccaccgtggatggagacttcctgacagacatgccagacatcctgctggagctgggccagttcaagaagacccagatcctggtgggcgtgaacaaggatgagggcacagccttcctggtgtatggagcccctggcttcagcaaggacaacaacagcatcatcaccaggaaggagttccaggagggcctgaagatcttcttccctggggtgtctgaatttgggaaggagagcatcctcttccactacacagactgggtggatgaccagaggcctgagaactaccgggaggccctgggagatgtggtgggggactacaacttcatctgcccagccctggagttcaccaagaagttcagcgagtggggcaacaatgccttcttctactactttgagcacaggagcagcaagctgccctggccagagtggatgggcgtgatgcacggctatgaaattgaatttgtgtttggcctgcccctggagcggcgggacaactacaccaaggccgaggagatcctgagccgcagcatcgtgaagcgctgggccaactttgccaagtatggcaaccccaatgagacccagaacaacagcacctcctggcctgtgttcaagagcacagagcagaagtacctgaccctgaacacagagagcacccgcatcatgaccaagctgcgggcccagcagtgccgcttctggaccagcttcttccccaaggtgctggagatgactggaaatattgatgaagctgagtgggagtggaaggccggcttccaccgctggaacaactacatgatggactggaagaaccagttcaatgactacaccagcaagaaggagagctgtgtgggcctgtag

SEQ ID NO: 145601 - DNA, 399 bp, synthetic construct
  misc_feature 1..399: note = Description of Artificial Sequence: Synthetic coding sequence
  source 1..399: mol_type = other DNA
gctgtgcagttcaccggctggagcagcagctgcatcctgcacttccctgaggtgctgcatgacttccacagcctgcagaccctgcccagcctgctgcagagaattggcaaccccaatgagacccagaacaacagcacctcctggcctgtgttcaagagcacagagcagaagtacctgaccctgaacacagagagcacccgcatcatgaccaagctgcgggcccagcagtgccgcttctggaccagcttcttccccaaggtgctggagatgactggaaatattgatgaagctgagtgggagtggaaggccggcttccaccgctggaacaactacatgatggactggaagaaccagttcaatgactacaccagcaagaaggagagctgtgtgggcctgtag

SEQ ID NO: 145602 - DNA, 195 bp, synthetic construct
  misc_feature 1..195: note = Description of Artificial Sequence: Synthetic coding sequence
  source 1..195: mol_type = other DNA
atgaccaagctgcgggcccagcagtgccgcttctggaccagcttcttccccaaggtgctggagatgactggaaatattgatgaagctgagtgggagtggaaggccggcttccaccgctggaacaactacatgatggactggaagaaccagttcaatgactacaccagcaagaaggagagctgtgtgggcctgtag

SEQ ID NO: 145603 - DNA, 1431 bp, synthetic construct
  misc_feature 1..1431: note = Description of Artificial Sequence: Synthetic coding sequence
  source 1..1431: mol_type = other DNA
atggccagcagaattggcctgaggatgcagctgatgagggagcaggcccagcaggaggagcagcgggagaggatgcagcagcaggccgtgatgcactacatgcagcagcagcagcagcagcagcagcagcagctgggcggcccccccaccccagccatcaacacccctgtgcacttccagagccccccacctgtgcctggagaggtgctgaaggtgcagagctacctggagaaccccaccagctaccacctgcagcagagccagcaccagaaggtgcgggagtacctgtctgagacctacggcaacaagtttgctgcccacatcagccctgcccagggcagccccaagcccccacctgctgccagccctggggtgcgggccggccacgtgctgagcagcagcgctggcaacagcgcccccaacagccccatggccatgctgcacatcggcagcaaccctgagcgggagctggatgatgtgattgacaacatcatgaggctggatgatgtgctgggctacatcaaccctgagatgcagatgcccaacaccctgcccctgagcagcagccacctgaatgtgtacagcagtgacccccaggtgacagccagcctggtgggcgtgaccagcagcagctgcccagctgacctgacccagaagcgggagctgacagatgctgagagccgggccctggccaaggagcggcagaagaaggacaaccacaacctgattgaaagaagaagacgcttcaacatcaatgaccgcatcaaggagctgggcatgctgatccccaaggccaatgacctggatgtgcgctggaacaagggcaccatcctgaaggcctctgtggactacatccggaggatgcagaaggacctgcagaagagccgggagctggagaaccacagccggcggctggagatgaccaacaagcagctgtggctgcgcatccaggagctggagatgcaggcccgggtgcacggcctgcccaccaccagccccagcggcatgaacatggccgagctggcccagcaggtggtgaagcaggagctgcccagcgaggagggccctggagaggccctgatgctgggcgctgaggtgcctgaccctgagcccctgcctgccctgcccccccaggcccccctgcccctgcccacccagccccccagccccttccaccacctggacttcagccacagcctgagctttggaggccgggaggatgagggccccccaggctacccagagcccctggcccctggccacggcagccccttccccagcctgagcaagaaggacctggacctgatgctgctggatgacagcctgctgcccctggccagtgaccccctgctgagcaccatgagccctgaggccagcaaggccagcagccgccgcagcagcttctccatggaggagggagatgtgctgtag

SEQ ID NO: 145604 - DNA, 426 bp, synthetic construct
  misc_feature 1..426: note = Description of Artificial Sequence: Synthetic coding sequence
  source 1..426: mol_type = other DNA
atggccggggaggagatcaatgaagactaccctgtggagatccacgagtacctgagcgcctttgagaacagcattggagctgtggatgagatgctgaagaccatgatgtctgtgtccagaaatgagctgctgcagaagctggaccccctggagcaggccaaggtggacctggtgtctgcctacaccctgaacagcatgttctgggtgtacctggccacccagggcgtgaaccccaaggagcaccctgtgaagcaggagctggagcgcatccgggtgtacatgaacagagtgaaggagatcacagacaagaagaaggccggcaagctggacagaggagctgccagcagatttgtgaagaatgccctgtgggagcccaagagcaagaatgccagcaaggtggccaacaagggcaagagcaagagctag

SEQ ID NO: 145605 - DNA, 543 bp, synthetic construct
  misc_feature 1..543: note = Description of Artificial Sequence: Synthetic coding sequence
  source 1..543: mol_type = other DNA
atgcccagccccagcgtgtccaccagcgctgcctctgtgctggagggcgtgtgtggccgggcccggagcacctaccgcaccccagaggagggggaggagcagagctggagcgccatcatggccggggaggagatcaatgaagactaccctgtggagatccacgagtacctgagcgcctttgaaaattccatcggggctgtggatgagatgctgaagaccatgatgtctgtgtccagaaatgagctgctgcagaagctggaccccctggagcaggccaaggtggacctggtgtctgcctacaccctgaacagcatgttctgggtgtacctggccacccagggcgtgaaccccaaggagcaccctgtgaagcaggagctggagcgcatccgggtgtacatgaacagagtgaaggagatcacagacaagaagaaggccggcaagctggacagaggagctgccagcagatttgtgaagaatgccctgtgggagcccaagagcaagaatgccagcaaggtggccaacaagggcaagagcaagagctag

SEQ ID NO: 145606 - DNA, 426 bp, synthetic construct; identical to SEQ ID NO: 145604
  misc_feature 1..426: note = Description of Artificial Sequence: Synthetic coding sequence
  source 1..426: mol_type = other DNA

SEQ ID NO: 145607 - DNA, 426 bp, synthetic construct; identical to SEQ ID NO: 145604
  misc_feature 1..426: note = Description of Artificial Sequence: Synthetic coding sequence
  source 1..426: mol_type = other DNA

SEQ ID NO: 145608 - DNA, 957 bp, synthetic construct
  misc_feature 1..957: note = Description of Artificial Sequence: Synthetic coding sequence
  source 1..957: mol_type = other DNA
atgctgtctgagagcagcagcttcctgaagggcgtgatgctgggcagcatcttctgtgccctgatcaccatgctgggccacatccgcatcggccacggcaacaggatgcaccaccacgagcaccaccacctgcaggcccccaacaaggaggacatcctgaagatcagtgaagatgagaggatggagctgagcaagagcttccgggtgtactgcatcatcctggtgaagcccaaggatgtgtccctgtgggccgctgtgaaggagacctggaccaagcactgtgacaaggccgagttcttcagcagtgaaaatgtgaaggtgtttgagagcatcaacatggacaccaatgacatgtggctgatgatgaggaaggcctacaagtatgcctttgacaagtacagagaccagtacaactggttcttcctggcccggcccaccacctttgccatcatcgagaacctgaagtacttcctgctgaagaaggaccccagccagcccttctacctgggccacaccatcaagagcggggacctggagtatgtgggcatggagggcggcatcgtgctgtctgtggagagcatgaagaggctgaacagcctgctgaacatccctgagaagtgcccagagcagggcggcatgatctggaagatcagcgaggacaagcagctggccgtgtgcctgaagtatgctggggtgtttgctgaaaatgcagaagatgctgatggcaaggatgtgttcaacaccaagtctgtgggcctgagcatcaaggaggccatgacctaccaccccaaccaggtggtggagggctgctgcagcgacatggctgtgaccttcaacggcctgacccccaaccagatgcacgtgatgatgtatggagtgtaccgcctgcgggccttcggccacatcttcaatgatgccctggtgttcctgcccccaaatggaagtgacaatgactag

SEQ ID NO: 145609 - DNA, 957 bp, synthetic construct; identical to SEQ ID NO: 145608
  misc_feature 1..957: note = Description of Artificial Sequence: Synthetic coding sequence
  source 1..957: mol_type = other DNA

SEQ ID NO: 145610 - DNA, 732 bp, synthetic construct
  misc_feature 1..732: note = Description of Artificial Sequence: Synthetic coding sequence
  source 1..732: mol_type = other DNA
atgaggcccctgctggtgctgctgctgctgggcctggccgccggcagcccccccctggatgacaacaagatccccagcctgtgccccggccaccctggcctgcccggcaccccaggccaccacggcagccagggcctgcccggcagagatggaagagatggaagagatggagcccctggggcccctggagagaagggggagggcggccggcccggcctgcccggccccaggggggaccccggccccagaggagaggccggccctgctggccccaccggccctgctggagaatgttctgtgcccccaagaagtgccttcagcgccaagaggtctgagagccgggtgcccccacccagtgatgcccccctgccctttgacagagtgctggtgaatgagcagggccactatgatgctgtgacaggcaagttcacctgccaggtgcctggggtgtactactttgctgtgcacgccaccgtgtaccgggccagcctgcagtttgacctggtgaagaatggagagagcatcgccagcttcttccagttcttcggcggctggcccaagccagccagcctgagcggcggggccatggtgcggctggagcctgaggaccaggtgtgggtgcaggtgggcgtgggggactacatcggcatctatgccagcatcaagacagacagcaccttcagcggcttcctggtgtacagcgactggcacagcagccctgtgtttgcctag

SEQ ID NO: 145611 - DNA, 732 bp, synthetic construct; identical to SEQ ID NO: 145610
  misc_feature 1..732: note = Description of Artificial Sequence: Synthetic coding sequence
  source 1..732: mol_type = other DNA

SEQ ID NO: 145612 - DNA, 759 bp, synthetic construct
  misc_feature 1..759: note = Description of Artificial Sequence: Synthetic coding sequence
  source 1..759: mol_type = other DNA
atggccgccccagccctgctgctgctggccctgctgctgcctgtgggcgcctggccaggcctgccccggcggccctgtgtgcactgctgcaggcctgcctggcccccaggcccctatgcccgggtgtctgaccgggacctgtggaggggggacctgtggaggggcctgccccgggtgcggcccaccattgatattgagatcctgaagggggagaagggggaggccggcgtgcggggccgggccggccgcagcggcaaggagggccccccaggggcccggggcctgcagggccggcggggccagaagggccaggtgggccccccaggggccgcctgcagaagagcctatgctgccttctctgtgggcagaagagagggcctgcacagcagtgaccacttccaggccgtgccctttgacacagagctggtgaacctggatggagcctttgacctggccgccggccgcttcctgtgcaccgtgcctggggtgtacttcctgagcctgaatgtgcacacctggaactacaaggagacctacctgcacatcatgctgaacagaagacctgctgctgtgctgtatgcccagcccagcgagaggtctgtgatgcaggcccagagcctgatgctgctgctggccgctggagatgctgtgtgggtgaggatgttccagagggaccgggacaatgccatctatggagagcacggggacctgtacatcaccttcagcggccacctggtgaagccagctgctgagctgtag

SEQ ID NO: 145613 - DNA, 1002 bp, synthetic construct
  misc_feature 1..1002: note = Description of Artificial Sequence: Synthetic coding sequence
  source 1..1002: mol_type = other DNA
atgaggatctggtggctgctgctggccatcgagatctgcaccggcaacatcaacagccaggacacctgccggcagggccaccctggcatccctggcaaccctggccacaacggcctgcccggcagagatggaagagatggagccaagggggacaagggagatgctggggagcccggccggcccggcagccctgggaaggatggcaccagcggggagaagggggagagaggagcagatggcaaggtggaggccaagggcatcaagggggaccagggcagccggggcagccctgggaagcacggccccaagggcctggccggccccatgggagagaagggcctgcggggggagaccggcccccagggccagaagggcaacaagggagatgtgggccccactggacctgagggcccccggggcaacatcggccccctgggccccaccggcctgcccggccccatgggccccatcggcaagccaggccccaagggggaggccggccccaccggcccccagggcgagcccggggtgcggggcatccggggctggaagggggacagaggagagaagggcaagattggagagaccctggtgctgcccaagagcgccttcaccgtgggcctgactgtgctgagcaagttccccagcagtgacatgcccatcaagtttgacaagatcctgtacaatgagttcaaccactatgacacagctgctgggaagttcacctgccacatcgccggcgtgtactacttcacctaccacatcaccgtcttcagcagaaatgtgcaggtgtccctggtgaagaatggagtgaagatcctgcacaccaaggatgcctacatgagcagcgaggaccaggccagcggcggcatcgtgctgcagctgaagctgggagatgaggtgtggctgcaggtgactggaggagagcgcttcaacggcctgtttgctgatgaagatgatgacaccaccttcaccggcttcctgctcttcagcagcccctag

SEQ ID NO: 145614 - DNA, 1002 bp, synthetic construct; identical to SEQ ID NO: 145613
  misc_feature 1..1002: note = Description of Artificial Sequence: Synthetic coding sequence
  source 1..1002: mol_type = other DNA

SEQ ID NO: 145615 - DNA, 300 bp, synthetic construct
  misc_feature 1..300: note = Description of Artificial Sequence: Synthetic coding sequence
  source 1..300: mol_type = other DNA
atgaggatctggtggctgctgctggccatcgagatctgcaccggcaacatcaacagccaggacacctgccggcagggccaccctggcatccctggcaaccctggccacaacggcctgcccggcagagatggaagagatggagccaagggggacaagggagatgctggggagcccggctgccccggcagccctgggaaggatggcaccagcggggagaagggggagagaggagcagatggcaaggtggaggccaagggcatcaagggcatgttccgctgcctgtggagcaagacagaatag

SEQ ID NO: 145616 - DNA, 1002 bp, synthetic construct
  misc_feature 1..1002: note = Description of Artificial Sequence: Synthetic coding sequence
  source 1..1002: mol_type = other DNA
atgaggatctggtggctgctgctggccatcgagatctgcaccggcaacatcaacagccaggacacctgccggcagggccaccctggcatccctggcaaccctggccacaacggcctgcccggcagagatggaagagatggagccaagggggacaagggagatgctggggagcccggctgccccggcagccctgggaaggatggcaccagcggggagaagggggagagaggagcagatggcaaggtggaggccaagggcatcaagggggaccagggcagccggggcagccctgggaagcacggccccaagggcctggccggccccatgggagagaagggcctgcggggggagaccggcccccagggccagaagggcaacaagggagatgtgggccccactggacctgagggcccccggggcaacatcggccccctgggccccaccggcctgcccggccccatgggccccatcggcaagccaggccccaagggggaggccggccccaccggcccccagggcgagcccggggtgcggggcatccggggctggaagggggacagaggagagaagggcaagattggagagaccctggtgctgcccaagagcgccttcaccgtgggcctgactgtgctgagcaagttccccagcagtgatgtgcccatcaagtttgacaagatcctgtacaatgagttcaaccactatgacacagctgtgggcaagttcacctgccacatcgccggcgtgtactacttcacctaccacatcaccgtcttcagcagaaatgtgcaggtgtccctggtgaagaatggagtgaagatcctgcacaccagagatgcctacgtgtcctctgaggaccaggccagcggcagcatcgtgctgcagctgaagctgggagatgagatgtggctgcaggtgactggaggagagcgcttcaacggcctgtttgctgatgaagatgatgacaccaccttcaccggcttcctgctcttcagcagccagtag

SEQ ID NO: 145617 - DNA, 1002 bp, synthetic construct; identical to SEQ ID NO: 145616
  misc_feature 1..1002: note = Description of Artificial Sequence: Synthetic coding sequence
  source 1..1002: mol_type = other DNA

SEQ ID NO: 145618 - DNA, 150 bp, synthetic construct
  misc_feature 1..150: note = Description of Artificial Sequence: Synthetic coding sequence
  source 1..150: mol_type = other DNA
gtgggccccaccggccctgagggcccccggggcaacatcggccccctgggccccaccggcctgcccggccccatgggccccatcggcaagccaggccccaagggggaggccggccccaccggcccccaggtgttccccttctgcatctag

SEQ ID NO: 145619 - DNA, 1110 bp, synthetic construct
  misc_feature 1..1110: note = Description of Artificial Sequence: Synthetic coding sequence
  source 1..1110: mol_type = other DNA
atgtggtgcctggagcggctgcggctgggccctgagtgcctgcggcgcagcggggactggctgctgcccggccgggcccggggggccaagagcaggaccacagctgcctgtgccaacgtgctgaccccagaccgcatccctgagttctgcatccccccccggctgatgccccggctggccctggccgccctgagaaattcctgggtggaggaggccggcatggatgaaggagctggccgcacagactgggaccccaggagccaggccgccctgagcctgccccacctgccccgggtgaggacagcctacggcttctgtgccctgctggagagcccccacaccaggaggaaggagagcctgctgctgggcggccccccagccccccggccccgggcccacacctatggaggcggcggcggcccagatgccctgctgggcaccctgcgggtgccccgggcccctggccctgccaccccagctgcccctggctgccccaggcctccccaggatgccctggcccggcggccccggggctgccgcctgctgcgggtgcctgatggcctgctgagccgggccctgcgggccggccgcagccggcggctgaccagggtgcgctctgtgtcctctggaaatgaagacaaggagcggcgggccggcagccagagccctgcccgggcccccagcaccagcccccccagcagccgggtgcccttccctgagcggctggaggccgagggcaccgtggccctgggccgggctggagatgccctgcggctggccgctgagtactgccccggcaccggccgcctgcggctgcggctgctgcgggcagagagccctgctggaggagcccctggccccagggctgtgtcctgccgcctgagcctggtgctgcggcccccaggcacagccctgcggcagtgcagcacagtggtgggccgcagcaggaaggccagctttgaccaggacttctgctttgatggcctgtctgaagatgaggtgcggcggctggccgtgcgggtgaaggccagagatgagggccggggccgggagcggggccgcctgctgggccagggcgagctgagcctgggcgccctgctgctgctgtag

SEQ ID NO: 145620 - DNA, 1095 bp, synthetic construct
  misc_feature 1..1095: note = Description of Artificial Sequence: Synthetic coding sequence
  source 1..1095: mol_type = other DNA
atgaggctgctggagaagctgtgcagcagcgctgctggcagcagcgcccccaagccagcctttgccaaggtgctgacccccaaccgcatccctgagttctgcatccccccccggctgcctgccccctgcaccctggagagccccatccgggctgctgctgtgccccggcgctgtgccgctgagagtgacctgtggcccagggctgctgatgaagatgctggccgcacagactgggaccccaggagccaggccgccctgagcctgccccacctgccccgggtgaggaccacctacggcttctgtgccctgctggagagcccccacaccaggaggaaggagagcctgctgctgggcggccccccagccccccggccccgggcccacagctgtggcggcggcggcggcccagatgcccccctgggcaccctgtgtggcccccggggccctggccctgccaccccagctgcccctgggggcccccggctgccccaggatgccctggccgccggcccccggcgctgccgcctgctgcgggtgcctgatggcctgctgagccgggccctgcgggccggccgcagccggcggctggcccgggtgcgctctgtgtcctctggaaatgaagatgaggagaggagagctggcagcgagagccctgcccgggcccccagcagcagccccctgagcagccgggcccccctgcctgagcggctggaggccaagggcaccgtggccctgggccgggctggagatgccctgcggctggccgctgagtactgccccggcacccggcggctgcggctgcggctgctgcgggcagagagcctgtttggaggagcccctggccccagggctgtgcgctgccgcctgagcctggtgctgcggcccccaggcacagcccgctggcagtgcagcgctgtggtgggccgcagcaggaaggccagctttgaccaggacttctgctttgatggcctgtctgaagatgaggtgcggcggctggccgtgcgggtgaaggccagagatgagggccggggccgggaccggggccgcctgctgggccagggcgagctgagcctgggcgccctgctgctgctgtag

SEQ ID NO: 145621 - DNA, 1266 bp, synthetic construct
  misc_feature 1..1266: note = Description of Artificial Sequence: Synthetic coding sequence
  source 1..1266: mol_type = other DNA
atgaggaagaccaacatgtggttcctggagcggctgcggggcagcggagaaaatggagctgcccggggcgtgggcagcgaggccggggacaaggccagcaagggccccctgtacagcaatgtgctgaccccagacaagatcccagacttcttcatcccccccaagctgcccagcggccctgctgagggggagggccaggccgccctgggccccagcaccagcgagcagaacctggccagcgctgccccccggcagacccccaggagcccccggctgcctgccaagctggccgctgagagcaagagcctgctgaaggccgccaccaggcatgtgatccagatcgagagcgctgaggactggctgtctgaggaggccacagatgctgacccccaggcccagggcgccatgagcctgcccagcgtgcccaaggcccagaccagctatggctttgccatgctggccgagagcccccacaccaggaggaaggagagcctcttccacagcgagcacggggccctggcccaggtgggcagccctggagctggaagaagaagagctgctgccaaggccaatggaggagatggcggcccccgggaggccggcggggccctgatgagccctggccgctacttcagcggcggggagagtgacaccggcagcagcgctgagagcagccccttcggcagccccctgctgagccgctctgtgtccctgctgaagggctttgcccaggacagccaggccaaggtgtcccagctgcggcacagcgtgggccgccacggcagcctgtctgcagatgacagcaccccagatgccagccctggcagcagaagaaggctgacccggcgggcccctcctgagcccggccctgagagcggccaggcccggggggagcacacagtgcacgtgggcccccggggctctgtgcggctgctggccgagtatgaagctggccaggcccggctgcgggtgcacctgctggccgctgagggcctgtatgaccggctgtgtgatgcccggagcatcaactgctgcgtgggcctgtgcctggtgcctgggaagctgcagaagcagaggagcaccatcgtgaagaacagcagaagacctgtgttcaatgaagacttcttctttgatggcctgggccctgcctctgtgaggaagctggccctgcgcatcaaggtggtgaacaagggcagcagcctgaagagggacaccctgctgggggagaaggagctgcccctgaccagcctgctgcccttcctgtag

SEQ ID NO: 145622 - DNA, 3945 bp, synthetic construct
  misc_feature 1..3945: note = Description of Artificial Sequence: Synthetic coding sequence
  source 1..3945: mol_type = other DNA
atgctggaccccagcagcagcgaggaggagagtgatgagatcgtggaggaggagagcggcaaggaggtgctgggcagcgcccccagcggggcccggctgagccccagcaggaccagcgagggcagcgctggcagcgctggcctgggcggcggcggggccggggccggggccggcgtgggcgccggcggcggcggcggcagcggggccagcagcggcggcggggccggcggcctgcagcccagcagccgggccggcggcggccggcccagcagccccagccccagcgtggtgtctgagaaggagaaggaggagctggagcggctgcagaaggaggaggaggagaggaagaagaggctgcagctgtatgtgtttgtgatgcgctgcatcgcctaccccttcaatgccaagcagcccacagacatggcccggcggcagcagaagatcagcaagcagcagctgcagacagtgaaggaccgcttccaggccttcctgaatggagagacccagatcatggctgatgaggccttcatgaatgctgtgcagagctactatgaggtgttcctgaagagtgacagagtggccaggatggtgcagagcggcggctgcagcgccaatgacagccgggaggtgttcaagaagcacatcgagaagagggtgcgcagcctgcctgagattgatggcctgagcaaggagaccgtgctgagctcctggatggccaagtttgatgccatctacagaggagaggaggaccccaggaagcagcaggccaggatgacagccagcgctgccagcgagctgatcctgagcaaggagcagctgtatgagatgttccagaacatcctgggcatcaagaagtttgagcaccagctgctgtacaatgcctgccagctggacaacccagatgagcaggccgcccagatccggcgggagctggatggccgcctgcagatggctgaccagatcgcccgggagaggaagttccccaagtttgtgtccaaggagatggagaacatgtacatcgaggagctgaagagctctgtgaacctgctgatggccaacctggagagcatgcctgtgtccaaaggaggagagttcaagctgcagaagctgaagaggagccacaatgccagcatcatcgacatgggagaggagagcgagaaccagctgagcaagagtgatgtggtgctgtccttcagcctggaggtggtgatcatggaggtgcagggcctgaagagcctggcccccaaccgcatcgtgtactgcaccatggaggtggagggcggggagaagctgcagacagaccaggccgaggccagcaagcccacctggggcacccagggcgacttcagcaccacccacgccctgcctgctgtgaaggtgaagctgttcacagagagcactggagtgctggccctggaggacaaggagctgggccgggtcatcctgcaccccacccccaacagccccaagcagagcgagtggcacaagatgacagtgtccaagaactgcccagaccaggacctgaagatcaagctggccgtgaggatggacaagccccagaacatgaagcacagcggctacctgtgggccatcggcaagaatgtgtggaagcgctggaagaagcgcttctttgtgctggtgcaggtgtcccagtacacctttgccatgtgcagctaccgggagaagaaggccgagccccaggagctgctgcagctggatggctacacagtggactacacagacccccagcccggcctggagggcggccgggccttcttcaatgctgtgaaggagggggacaccgtcatctttgccagtgatgatgagcaggaccgcatcctgtgggtgcaggccatgtaccgggccaccggccagagccacaagcctgtgccccccacccaggtgcagaagctgaatgccaagggcggcaatgtgccccagctggatgcccccatcagccagttctatgctgaccgggcccagaagcacggcatggatgagttcatcagcagcaacccctgcaactttgaccacgccagcctgtttgagatggtgcagaggctgaccctggaccaccggctgaatgacagctacagctgcctgggctggttcagccctggccaggtgtttgtgctggatgagtactgtgccagaaatggagtgcggggctgccaccgccacctgtgctacctgcgggacctgctggagcgggcagaaaatggagccatgattgaccccaccctgctgcactacagctttgccttctgtgccagccacgtgcacggcaacagaccagatggcatcggcaccgtgacagtggaggagaaggagagatttgaggagatcaaggagcggctgcgggtgctgctggagaaccagatcacccacttccgctactgcttccccttcggccggcctgagggcgccctgaaggccaccctgagcctgctggagcgggtgctgatgaaggacatcgtgacccctgtgccccaggaggaggtgaagacagtcatcaggaagtgcctggagcaggccgccctggtgaactacagccggctgtctgaatatgccaagattgagggcaagaagcgggagatgtatgagcaccctgtgttctgcctggccagccaggtgatggacctgaccatccagaatgtgggccgcctcatcaccccagccaagaagctggaggacaccatccggctggccgagctggtgattgaggtgctgcagcagaatgaggagcaccacgccgaggcctttgcctggtggagcgacctgatggtggagcacgccgagaccttcctgagcctgtttgctgtggacatggatgctgccctggaggtgcagcccccagacacctgggacagcttccccctcttccagctgctgaatgacttcctgaggacagactacaacctgtgcaatggcaagttccacaagcacctgcaggacctgtttgcccccctggtggtgcgctacgtggacctgatggagagcagcatcgcccagagcatccaccggggctttgagcgggagagctgggagcctgtgaacaacggcagcggcaccagcgaggacctcttctggaagctggatgccctgcagaccttcatccgggacctgcactggccagaggaggagtttgggaagcacctggagcagaggctgaagctgatggccagtgacatgattgagagctgtgtgaagaggacccgcatcgcctttgaggtgaagctgcagaagaccagccgcagcacagacttccgggtgccccagagcatctgcaccatgttcaacgtgatggtggatgccaaggcccagagcaccaagctgtgcagcatggagatgggccaggagcaccagtaccacagcaagattgatgagctgattgaggagaccgtgaaggagatgatcaccctgctggtggccaagtttgtgaccatcctggagggcgtgctggccaagctgagccgctatgatgagggcaccctcttcagcagcttcctgtccttcaccgtgaaggccgccagcaaatatgtggatgtgcccaagccaggcatggatgtggctgatgcctacgtgacctttgtgcgccacagccaggatgtgctgcgggacaaggtgaatgaggagatgtacatcgagcggctgtttgaccagtggtacaacagctccatgaatgtcatctgcacctggctgacagacaggatggacctgcagctgcacatctaccagctgaagaccctcatccgcatggtgaagaagacctacagagacttccggctgcagggcgtgctggacagcaccctgaacagcaagacctatgagaccatccggaaccggctgactgtggaggaggccacagcctctgtgtctgagggcggcggcctgcagggcatctccatgaaggacagtgatgaagaagatgaggaggatgactag

SEQ ID NO: 145623 - DNA, 3825 bp, synthetic construct
  misc_feature 1..3825: note = Description of Artificial Sequence: Synthetic coding sequence
  source 1..3825: mol_type = other DNA
atgctggaccccagcagcagcgaggaggagagtgatgagatcgtggaggaggagagcggcaaggaggtgctgggcagcgcccccagcggggcccggctgagccccagcaggaccagcgagggcagcgctggcagcgctggcctgggcggcggcggggccggggccggggccggcgtgggcgccggcggcggcggcggcagcggggccagcagcggcggcggggccggcggcctgcagcccagcagccgggccggcggcggccggcccagcagccccagccccagcgtggtgtctgagaaggagaaggaggagctggagcggctgcagaaggaggaggaggagaggaagaagaggctgcagctgtatgtgtttgtgatgcgctgcatcgcctaccccttcaatgccaagcagcccacagacatggcccggcggcagcagaagatcagcaagcagcagctgcagacagtgaaggaccgcttccaggccttcctgaatggagagacccagatcatggctgatgaggccttcatgaatgctgtgcagagctactatgaggtgttcctgaagagtgacagagtggccaggatggtgcagagcggcggctgcagcgccaatgacagccgggaggtgttcaagaagcacatcgagaagagggtgcgcagcctgcctgagattgatggcctgagcaaggagaccgtgctgagctcctggatggccaagtttgatgccatctacagaggagaggaggaccccaggaagcagcaggccaggatgacagccagcgctgccagcgagctgatcctgagcaaggagcagctgtatgagatgttccagaacatcctgggcatcaagaagtttgagcaccagctgctgtacaatgcctgccagctggacaacccagatgagcaggccgcccagatccggcgggagctggatggccgcctgcagatggctgaccagatcgcccgggagaggaagttccccaagtttgtgtccaaggagatggagaacatgtacatcgaggagctgaagagctctgtgaacctgctgatggccaacctggagagcatgcctgtgtccaaaggaggagagttcaagctgcagaagctgaagaggagccacaatgccagcatcatcgacatgggagaggagagcgagaaccagctgagcaagagtgatgtggtgctgtccttcagcctggaggtggtgatcatggaggtgcagggcctgaagagcctggcccccaaccgcatcgtgtactgcaccatggaggtggagggcggggagaagctgcagacagaccaggccgaggccagcaagcccacctggggcacccagggcgacttcagcaccacccacgccctgcctgctgtgaaggtgaagctgttcacagagagcactggagtgctggccctggaggacaaggagctgggccgggtcatcctgcaccccacccccaacagccccaagcagagcgagtggcacaagatgacagtgtccaagaactgcccagaccaggacctgaagatcaagctggccgtgaggatggacaagccccagaacatgaagcacagcggctacctgtgggccatcggcaagaatgtgtggaagcgctggaagaagcgcttctttgtgctggtgcaggtgtcccagtacacctttgccatgtgcagctaccgggagaagaaggccgagccccaggagctgctgcagctggatggctacacagtggactacacagacccccagcccggcctggagggcggccgggccttcttcaatgctgtgaaggagggggacaccgtcatctttgccagtgatgatgagcaggaccgcatcctgtgggtgcaggccatgtaccgggccaccggccagagccacaagcctgtgccccccacccaggtgcagaagctgaatgccaagggcggcaatgtgccccagctggatgcccccatcagccagttctatgctgaccgggcccagaagcacggcatggatgagttcatcagcagcaacccctgcaactttgaccacgccagcctgtttgagatgggctggttcagccctggccaggtgtttgtgctggatgagtactgtgccagaaatggagtgcggggctgccaccgccacctgtgctacctgcgggacctgctggagcgggcagaaaatggagccatgattgaccccaccctgctgcactacagctttgccttctgtgccagccacgtgcacggcaacagaccagatggcattggaacagtgacagtggaggagaaggagagatttgaggagatcaaggagcggctgcgggtgctgctggagaaccagatcacccacttccgctactgcttccccttcggccggcctgagggcgccctgaaggccaccctgagcctgctggagcgggtgctgatgaaggacatcgtgacccctgtgccccaggaggaggtgaagacagtcatcaggaagtgcctggagcaggccgccctggtgaactacagccggctgtctgaatatgccaagattgaggagaatgtgggccgcctcatcaccccagccaagaagctggaggacaccatccggctggccgagctggtgattgaggtgctgcagcagaatgaggagcaccacgccgaggcctttgcctggtggagcgacctgatggtggagcacgccgagaccttcctgagcctgtttgctgtggacatggatgctgccctggaggtgcagcccccagacacctgggacagcttccccctcttccagctgctgaatgacttcctgaggacagactacaacctgtgcaatggcaagttccacaagcacctgcaggacctgtttgcccccctggtggtgcgctacgtggacctgatggagagcagcatcgcccagagcatccaccggggctttgagcgggagagctgggagcctgtgaacaacggcagcggcaccagcgaggacctcttctggaagctggatgccctgcagaccttcatccgggacctgcactggccagaggaggagtttgggaagcacctggagcagaggctgaagctgatggccagtgacatgattgagagctgtgtgaagaggacccgcatcgcctttgaggtgaagctgcagaagaccagccgcagcacagacttccgggtgccccagagcatctgcaccatgttcaacgtgatggtggatgccaaggcccagagcaccaagctgtgcagcatggagatgggccaggagcaccagtaccacagcaagattgatgagctgattgaggagaccgtgaaggagatgatcaccctgctggtggccaagtttgtgaccatcctggagggcgtgctggccaagctgagccgctatgatgagggcaccctcttcagcagcttcctgtccttcaccgtgaaggccgccagcaaatatgtggatgtgcccaagccaggcatggatgtggctgatgcctacgtgacctttgtgcgccacagccaggatgtgctgcgggacaaggtgaatgaggagatgtacatcgagcggctgtttgaccagtggtacaacagctccatgaatgtcatctgcacctggctgacagacaggatggacctgcagctgcacatctaccagctgaagaccctcatccgcatggtgaagaagacctacagagacttccggctgcagggcgtgctggacagcaccctgaacagcaagacctatgagaccatccggaaccggctgactgtggaggaggccacagcctctgtgtctgagggcggcggcctgcagggcatctccatgaaggacagtgatgaagaagatgaggaggatgactag

SEQ ID NO: 145624 - DNA, 4080 bp, synthetic construct
  misc_feature 1..4080: note = Description of Artificial Sequence: Synthetic coding sequence
  source 1..4080: mol_type = other DNA
atgctggaccccagcagcagcgaggaggagagtgatgagatcgtggaggaggagagcggcaaggaggtgctgggcagcgcccccagcggggcccggctgagccccagcaggaccagcgagggcagcgctggcagcgctggcctgggcggcggcggggccggggccggggccggcgtgggcgccggcggcggcggcggcagcggggccagcagcggcggcggggccggcggcctgcagcccagcagccgggccggcggcggccggcccagcagccccagccccagcgtggtgtctgagaaggagaaggaggagctggagcggctgcagaaggaggaggaggagaggaagaagaggctgcagctgtatgtgtttgtgatgcgctgcatcgcctaccccttcaatgccaagcagcccacagacatggcccggcggcagcagaagatcagcaagcagcagctgcagacagtgaaggaccgcttccaggccttcctgaatggagagacccagatcatggctgatgaggccttcatgaatgctgtgcagagctactatgaggtgttcctgaagagtgacagagtggccaggatggtgcagagcggcggctgcagcgccaatgacagccgggaggtgttcaagaagcacatcgagaagagggtgcgcagcctgcctgagattgatggcctgagcaaggagaccgtgctgagctcctggatggccaagtttgatgccatctacagaggagaggaggaccccaggaagcagcaggccaggatgacagccagcgctgccagcgagctgatcctgagcaaggagcagctgtatgagatgttccagaacatcctgggcatcaagaagtttgagcaccagctgctgtacaatgcctgccagctggacaacccagatgagcaggccgcccagatccggcgggagctggatggccgcctgcagatggctgaccagatcgcccgggagaggaagttccccaagtttgtgtccaaggagatggagaacatgtacatcgaggagctgaagagctctgtgaacctgctgatggccaacctggagagcatgcctgtgtccaaaggaggagagttcaagctgcagaagctgaagaggagccacaatgccagcatcatcgacatgggagaggagagcgagaaccagctgagcaagagtgatgtggtgctgtccttcagcctggaggtggtgatcatggaggtgcagggcctgaagagcctggcccccaaccgcatcgtgtactgcaccatggaggtggagggcggggagaagctgcagacagaccaggccgaggccagcaagcccacctggggcacccagggcgacttcagcaccacccacgccctgcctgctgtgaaggtgaagctgttcacagagagcactggagtgctggccctggaggacaaggagctgggccgggtcatcctgcaccccacccccaacagccccaagcagagcgagtggcacaagatgacagtgtccaagaactgcccagaccaggacctgaagatcaagctggccgtgaggatggacaagccccagaacatgaagcacagcggctacctgtgggccatcggcaagaatgtgtggaagcgctggaagaagcgcttctttgtgctggtgcaggtgtcccagtacacctttgccatgtgcagctaccgggagaagaaggccgagccccaggagctgctgcagctggatggctacacagtggactacacagacccccagcccggcctggagggcggccgggccttcttcaatgctgtgaaggagggggacaccgtcatctttgccagtgatgatgagcaggaccgcatcctgtgggtgcaggccatgtaccgggccaccggccagagccacaagcctgtgccccccacccaggtgcagaagctgaatgccaagggcggcaatgtgccccagctggatgcccccatcagccagttctatgctgaccgggcccagaagcacggcatggatgagttcatcagcagcaacccctgcaactttgaccacgccagcctgtttgagatggtgcagaggctgaccctggaccaccggctgaatgacagctacagctgcctgggctggttcagccctggccaggtgtttgtgctggatgagtactgtgccagaaatggagtgcggggctgccaccgccacctgtgctacctgcgggacctgctggagcgggcagaaaatggagccatgattgaccccaccctgctgcactacagctttgccttctgtgccagccacgtgcacggcaacagaccagatggcatcggcaccgtgacagtggaggagaaggagagatttgaggagatcaaggagcggctgcgggtgctgctggagaaccagatcacccacttccgctactgcttccccttcggccggcctgagggcgccctgaaggccaccctgagcctgctggagcgggtgctgatgaaggacatcgtgacccctgtgccccaggaggaggtgaagacagtcatcaggaagtgcctggagcaggccgccctggtgaactacagccggctgtctgaatatgccaagattgaggccaacagctgcaccacagaaaatgtgggccgcctcatcaccccagccaagaagctggaggacaccatccggctggccgagctggtgattgaggtgctgcagcagaatgaggagcaccacgccgagccccacgtggacaagggggaggcctttgcctggtggagcgacctgatggtggagcacgccgagaccttcctgagcctgtttgctgtggacatggatgctgccctggaggtgcagcccccagacacctgggacagcttccccctcttccagctgctgaatgacttcctgaggacagactacaacctgtgcaatggcaagttccacaagcacctgcaggacctgtttgcccccctggtggtgcgctacgtggacctgatggagagcagcatcgcccagagcatccaccggggctttgagcgggagagctgggagcctgtgaagagcctgaccagcaacctgcccaacgtgaacctgcccaacgtgaacctgcccaaggtgcccaacctgcctgtgaacatccccctgggcatcccccagatgcccaccttcagcgcccccagctggatggccgccatctatgatgctgacaatggaagtggcaccagtgaagatctcttctggaagctggatgccctgcagaccttcatccgggacctgcactggccagaggaggagtttgggaagcacctggagcagaggctgaagctgatggccagtgacatgattgagagctgtgtgaagaggaccagaattgcctttgaggtgaagctgcagaagaccagccgcagcacagacttccgggtgccccagagcatctgcaccatgtttaatgtgatggtggatgccaaggcccagagcaccaagctgtgcagcatggagatgggccaggagaagtacaagaagatgaggcaccagtaccacagcaagattgatgagctgattgaggagaccgtgaaggagatgatcaccctgctggtggccaagtttgtgaccatcctggagggcgtgctggccaagctgagccgctatgatgagggcaccctcttcagcagcttcctgtccttcaccgtgaaggccgccagcaaatatgtggatgtgcccaagccaggcatggatgtggctgatgcctacgtgacctttgtgcgccacagccaggatgtgctgcgggacaaggtgaatgaggagatgtacatcgagcggctgtttgaccagtggtacaacagctccatgaatgtcatctgcacctggctgacagacaggatggacctgcagctgcacatctaccagctgaagaccctcatccgcatggtgaagaagacctacagagacttccggctgcagggcgtgctggacagcaccctgaacagcaagacctatgagaccatccggaaccggctgactgtggaggaggccacagcctctgtgtctgagggcggcggcctgcagggcatctccatgaaggacagtgatgaggaggatgaagaagatgactag

SEQ ID NO: 145625 - DNA, 4062 bp, synthetic construct
  misc_feature 1..4062: note = Description of Artificial Sequence: Synthetic coding sequence
  source 1..4062: mol_type = other DNA
atgctggaccccagcagcagcgaggaggagagtgatgagatcgtggaggaggagagcggcaaggaggtgctgggcagcgcccccagcggggcccggctgagccccagcaggaccagcgagggcagcgctggcagcgctggcctgggcggcggcggggccggggccggggccggcgtgggcgccggcggcggcggcggcagcggggccagcagcggcggcggggccggcggcctgcagcccagcagccgggccggcggcggccggcccagcagccccagccccagcgtggtgtctgagaaggagaaggaggagctggagcggctgcagaaggaggaggaggagaggaagaagaggctgcagctgtatgtgtttgtgatgcgctgcatcgcctaccccttcaatgccaagcagcccacagacatggcccggcggcagcagaagatcagcaagcagcagctgcagacagtgaaggaccgcttccaggccttcctgaatggagagacccagatcatggctgatgaggccttcatgaatgctgtgcagagctactatgaggtgttcctgaagagtgacagagtggccaggatggtgcagagcggcggctgcagcgccaatgacagccgggaggtgttcaagaagcacatcgagaagagggtgcgcagcctgcctgagattgatggcctgagcaaggagaccgtgctgagctcctggatggccaagtttgatgccatctacagaggagaggaggaccccaggaagcagcaggccaggatgacagccagcgctgccagcgagctgatcctgagcaaggagcagctgtatgagatgttccagaacatcctgggcatcaagaagtttgagcaccagctgctgtacaatgcctgccagctggacaacccagatgagcaggccgcccagatccggcgggagctggatggccgcctgcagatggctgaccagatcgcccgggagaggaagttccccaagtttgtgtccaaggagatggagaacatgtacatcgaggagctgaagagctctgtgaacctgctgatggccaacctggagagcatgcctgtgtccaaaggaggagagttcaagctgcagaagctgaagaggagccacaatgccagcatcatcgacatgggagaggagagcgagaaccagctgagcaagagtgatgtggtgctgtccttcagcctggaggtggtgatcatggaggtgcagggcctgaagagcctggcccccaaccgcatcgtgtactgcaccatggaggtggagggcggggagaagctgcagacagaccaggccgaggccagcaagcccacctggggcacccagggcgacttcagcaccacccacgccctgcctgctgtgaaggtgaagctgttcacagagagcactggagtgctggccctggaggacaaggagctgggccgggtcatcctgcaccccacccccaacagccccaagcagagcgagtggcacaagatgacagtgtccaagaactgcccagaccaggacctgaagatcaagctggccgtgaggatggacaagccccagaacatgaagcacagcggctacctgtgggccatcggcaagaatgtgtggaagcgctggaagaagcgcttctttgtgctggtgcaggtgtcccagtacacctttgccatgtgcagctaccgggagaagaaggccgagccccaggagctgctgcagctggatggctacacagtggactacacagacccccagcccggcctggagggcggccgggccttcttcaatgctgtgaaggagggggacaccgtcatctttgccagtgatgatgagcaggaccgcatcctgtgggtgcaggccatgtaccgggccaccggccagagccacaagcctgtgccccccacccaggtgcagaagctgaatgccaagggcggcaatgtgccccagctggatgcccccatcagccagttctatgctgaccgggcccagaagcacggcatggatgagttcatcagcagcaacccctgcaactttgaccacgccagcctgtttgagatggtgcagaggctgaccctggaccaccggctgaatgacagctacagctgcctgggctggttcagccctggccaggtgtttgtgctggatgagtactgtgccagaaatggagtgcggggctgccaccgccacctgtgctacctgcgggacctgctggagcgggcagaaaatggagccatgattgaccccaccctgctgcactacagctttgccttctgtgccagccacgtgcacggcaacagaccagatggcatcggcaccgtgacagtggaggagaaggagagatttgaggagatcaaggagcggctgcgggtgctgctggagaaccagatcacccacttccgctactgcttccccttcggccggcctgagggcgccctgaaggccaccctgagcctgctggagcgggtgctgatgaaggacatcgtgacccctgtgccccaggaggaggtgaagacagtcatcaggaagtgcctggagcaggccgccctggtgaactacagccggctgtctgaatatgccaagattgaggagaaccagaaggatgctgaaaatgtgggccgcctcatcaccccagccaagaagctggaggacaccatccggctggccgagctggtgattgaggtgctgcagcagaatgaggagcaccacgccgagccccacgtggacaagggggaggcctttgcctggtggagcgacctgatggtggagcacgccgagaccttcctgagcctgtttgctgtggacatggatgctgccctggaggtgcagcccccagacacctgggacagcttccccctcttccagctgctgaatgacttcctgaggacagactacaacctgtgcaatggcaagttccacaagcacctgcaggacctgtttgcccccctggtggtgcgctacgtggacctgatggagagcagcatcgcccagagcatccaccggggctttgagcgggagagctgggagcctgtgaagagcctgaccagcaacctgcccaacgtgaacctgcccaacgtgaacctgcccaaggtgcccaacctgcctgtgaacatccccctgggcatcccccagatgcccaccttcagcgcccccagctggatggccgccatctatgatgctgacaatggaagtggcaccagtgaagatctcttctggaagctggatgccctgcagaccttcatccgggacctgcactggccagaggaggagtttgggaagcacctggagcagaggctgaagctgatggccagtgacatgattgagagctgtgtgaagaggaccagaattgcctttgaggtgaagctgcagaagaccagccgcagcacagacttccgggtgccccagagcatctgcaccatgtttaatgtgatggtggatgccaaggcccagagcaccaagctgtgcagcatggagatgggccaggagcaccagtaccacagcaagattgatgagctgattgaggagaccgtgaaggagatgatcaccctgctggtggccaagtttgtgaccatcctggagggcgtgctggccaagctgagccgctatgatgagggcaccctcttcagcagcttcctgtccttcaccgtgaaggccgccagcaaatatgtggatgtgcccaagccaggcatggatgtggctgatgcctacgtgacctttgtgcgccacagccaggatgtgctgcgggacaaggtgaatgaggagatgtacatcgagcggctgtttgaccagtggtacaacagctccatgaatgtcatctgcacctggctgacagacaggatggacctgcagctgcacatctaccagctgaagaccctcatccgcatggtgaagaagacctacagagacttccggctgcagggcgtgctggacagcaccctgaacagcaagacctatgagaccatccggaaccggctgactgtggaggaggccacagcctctgtgtctgagggcggcggcctgcagggcatctccatgaaggacagtgatgaggaggatgaagaagatgactag

SEQ ID NO: 145626 - DNA, 1038 bp, synthetic construct
  misc_feature 1..1038: note = Description of Artificial Sequence: Synthetic coding sequence
  source 1..1038: mol_type = other DNA
tgactgcccaacgtgaacctgcccaacgtgaacctgcccaaggtgcccaacctgcctgtgaacatccccctgggcatcccccagatgcccaccttcagcgcccccagctggatggccgccatctatgatgctgacaatggcagcggcaccagcgaggacctcttctggaagctggatgccctgcagaccttcatccgggacctgcactggccagaggaggagtttgggaagcacctggagcagaggctgaagctgatggccagtgacatgattgagagctgtgtgaagaggacccgcatcgcctttgaggtgaagctgcagaagaccagccgcagcacagacttccgggtgccccagagcatctgcaccatgttcaacgtgatggtggatgccaaggcccagagcaccaagctgtgcagcatggagatgggccaggagtttgccaagatgtggcaccagtaccacagcaagattgatgagctgattgaggagaccgtgaaggagatgatcaccctgctggtggccaagtttgtgaccatcctggagggcgtgctggccaagctgagccgctatgatgagggcaccctcttcagcagcttcctgtccttcaccgtgaaggccgccagcaaatatgtggatgtgcccaagccaggcatggatgtggctgatgcctacgtgacctttgtgcgccacagccaggatgtgctgcgggacaaggtgaatgaggagatgtacatcgagcggctgtttgaccagtggtacaacagctccatgaatgtcatctgcacctggctgacagacaggatggacctgcagctgcacatctaccagctgaagaccctcatccgcatggtgaagaagacctacagagacttccggctgcagggcgtgctggacagcaccctgaacagcaagacctatgagaccatccggaaccggctgactgtggaggaggccacagcctctgtgtctgagggcggcggcctgcagggcatctccatgaaggacagtgatgaggaggatgaagaagatgactag

SEQ ID NO: 145627 - DNA, 3768 bp, synthetic construct
  misc_feature 1..3768: note = Description of Artificial Sequence: Synthetic coding sequence
  source 1..3768: mol_type = other DNA
atgctggaccccagcagcagcgaggaggagagtgatgagggcctggaggaggagagcagagatgtgctggtggccgccggcagcagccagagggcccccccagcccccacccgggagggcagaagagatgcccctggccgggccggcggcggcggggccgcccggtctgtgagccccagccccagcgtgctgtctgagggcagagatgagccccagaggcagctggatgatgagcaggagcggcgcatccggctgcagctgtatgtgtttgtggtgcgctgcatcgcctaccccttcaatgccaagcagcccacagacatggcccggcggcagcagaagctgaacaagcagcagctgcagctgctgaaggagcgcttccaggccttcctgaatggagagacccagatcgtggctgatgaggccttctgcaatgctgtgcgcagctactatgaggtgttcctgaagagtgacagagtggccaggatggtgcagagcggcggctgcagcgccaatgacttccgggaggtgttcaagaagaacatcgagaagagggtgcgcagcctgcctgagattgatggcctgagcaaggagaccgtgctgagctcctggatcgccaagtatgatgccatctacagaggagaggaggacctgtgcaagcagcccaacaggatggccctgtctgctgtgtctgagctgatcctgagcaaggagcagctgtatgagatgttccagcagatcctgggcatcaagaagctggagcaccagctgctgtacaatgcctgccagctggacaatgctgatgagcaggccgcccagatccggcgggagctggatggccgcctgcagctggccgacaagatggccaaggagaggaagttccccaagttcatcgccaaggacatggagaacatgtacatcgaggagctgcggagctctgtgaacctgctgatggccaacctggagagcctgcctgtgtccaaaggaggccctgagttcaagctgcagaagctgaagaggagccagaacagcgccttcctggacattggagatgaaaatgagatccagctgagcaagagtgatgtggtgctgtccttcaccctggagatcgtcatcatggaggtgcagggcctgaagtctgtggcccccaacagaattgtgtactgcaccatggaggtggagggggagaagctgcagacagaccaggccgaggccagccggccccagtggggcacccagggcgacttcaccaccacccaccccaggcctgtggtgaaggtgaagctgttcacagagagcactggagtgctggccctggaggacaaggagctgggccgggtcatcctgtaccccaccagcaacagcagcaagtctgctgagctgcacaggatggtggtgcccaagaacagccaggacagcgacctgaagatcaagctggccgtgaggatggacaagccagcccacatgaagcacagcggctacctgtatgccctgggccagaaggtgtggaagcgctggaagaagcgctactttgtgctggtgcaggtgtcccagtacacctttgccatgtgcagctaccgggagaagaagtctgagccccaggagctgatgcagctggagggctacacagtggactacacagacccccaccctggcctgcagggcggctgcatgttcttcaatgctgtgaaggagggggacaccgtcatctttgccagtgatgatgagcaggaccgcatcctgtgggtgcaggccatgtaccgggccaccggccagagctacaagcctgtgcctgccatccagacccagaagctgaaccccaagggcggcaccctgcatgctgatgcccagctgtatgctgaccgcttccagaagcacggcatggatgagttcatcagcgccaacccctgcaagctggaccacgccttcctgttccgcatcctgcagaggcagaccctggaccaccggctgaatgacagctacagctgcctgggctggttcagccctggccaggtgtttgtgctggatgagtactgtgcccgctatggagtgcggggctgccaccgccacctgtgctacctggccgagctgatggagcacagtgaaaatggagctgtgattgaccccaccctgctgcactacagctttgccttctgtgccagccacgtgcacggcaacagaccagatggcatcggcaccgtgtctgtggaggagaaggagagatttgaggagatcaaggagcggctgagcagcctgctggagaaccagatcagccacttccgctactgcttccccttcggccggcctgagggcgccctgaaggccaccctgagcctgctggagcgggtgctgatgaaggacatcgccacccccatcccagctgaggaggtgaagaaggtggtgaggaagtgcctggagaaggccgccctgatcaactacacccggctgacagaatatgccaagattgaggagaccatgaaccaggccagccctgccaggaagctggaggagatcctgcacctggccgagctgtgcatcgaggtgctgcagcagaatgaggagcaccacgccgaggcctttgcctggtggccagacctgctggccgagcacgccgagaagttctgggccctcttcaccgtggacatggacacagccctggaggcccagccccaggacagctgggacagcttccccctcttccagctgctgaacaacttcctgagaaatgacaccctgctgtgcaatggcaagttccacaagcacctgcaggagatctttgtgcccctggtggtgcgctacgtggacctgatggagagcagcatcgcccagagcatccaccggggctttgagcaggagacctggcagcctgtgaacaacggcagcgccaccagcgaggacctcttctggaagctggatgccctgcagatgtttgtgtttgacctgcactggccagagcaggagtttgcccaccacctggagcagaggctgaagctgatggccagtgacatgctggaggcctgtgtgaagaggaccaggacagcctttgagctgaagctgcagaaggccagcaagaccacagacctgcgcatcccagcctctgtgtgcaccatgttcaacgtgctggtggatgccaagaagcagagcaccaagctgtgtgccctggatggcggccaggaggtgtgccgcatcttccagcagtaccacagcaagattgatgacctgattgacaacagcgtgaaggagatcatcagcctgctggtgtccaagtttgtgtctgtgctggagggcgtgctgagcaagctgagccgctatgatgagggcaccttcttcagcagcatcctgtccttcaccgtgaaggccgccgccaagtatgtggatgtgcccaagccaggcatggacctggccgacacctacatcatgtttgtgcggcagaaccaggacatcctgcgggagaaggtgaatgaggagatgtacatcgagaagctgtttgaccagtggtacagcagctccatgaaggtgatctgtgtgtggctgacagaccggctggacctgcagctgcacatctaccagctgaagaccctcatcaagatcgtgaagaagacctacagagacttccggctgcagggcgtgctggagggcaccctgaacagcaagacctatgacacagtgcaccggcggctgactgtggaggaggccacagcctctgtgtctgagggcggcggcctgcagggcatcaccatgaaggacagtgatgaggaggaggagggctag

SEQ ID NO: 145628 - DNA, 3885 bp, synthetic construct
  misc_feature 1..3885: note = Description of Artificial Sequence: Synthetic coding sequence
  source 1..3885: mol_type = other DNA
atgctggaccccagcagcagcgaggaggagagtgatgagggcctggaggaggagagcagagatgtgctggtggccgccggcagcagccagagggcccccccagcccccacccgggagggcagaagagatgcccctggccgggccggcggcggcggggccgcccggtctgtgagccccagccccagcgtgctgtctgagggcagagatgagccccagaggcagctggatgatgagcaggagcggcgcatccggctgcagctgtatgtgtttgtggtgcgctgcatcgcctaccccttcaatgccaagcagcccacagacatggcccggcggcagcagaagctgaacaagcagcagctgcagctgctgaaggagcgcttccaggccttcctgaatggagagacccagatcgtggctgatgaggccttctgcaatgctgtgcgcagctactatgaggtgttcctgaagagtgacagagtggccaggatggtgcagagcggcggctgcagcgccaatgacttccgggaggtgttcaagaagaacatcgagaagagggtgcgcagcctgcctgagattgatggcctgagcaaggagaccgtgctgagctcctggatcgccaagtatgatgccatctacagaggagaggaggacctgtgcaagcagcccaacaggatggccctgtctgctgtgtctgagctgatcctgagcaaggagcagctgtatgagatgttccagcagatcctgggcatcaagaagctggagcaccagctgctgtacaatgcctgccagctggacaatgctgatgagcaggccgcccagatccggcgggagctggatggccgcctgcagctggccgacaagatggccaaggagaggaagttccccaagttcatcgccaaggacatggagaacatgtacatcgaggagctgcggagctctgtgaacctgctgatggccaacctggagagcctgcctgtgtccaaaggaggccctgagttcaagctgcagaagctgaagaggagccagaacagcgccttcctggacattggagatgaaaatgagatccagctgagcaagagtgatgtggtgctgtccttcaccctggagatcgtcatcatggaggtgcagggcctgaagtctgtggcccccaacagaattgtgtactgcaccatggaggtggagggggagaagctgcagacagaccaggccgaggccagccggccccagtggggcacccagggcgacttcaccaccacccaccccaggcctgtggtgaaggtgaagctgttcacagagagcactggagtgctggccctggaggacaaggagctgggccgggtcatcctgtaccccaccagcaacagcagcaagtctgctgagctgcacaggatggtggtgcccaagaacagccaggacagcgacctgaagatcaagctggccgtgaggatggacaagccagcccacatgaagcacagcggctacctgtatgccctgggccagaaggtgtggaagcgctggaagaagcgctactttgtgctggtgcaggtgtcccagtacacctttgccatgtgcagctaccgggagaagaagtctgagccccaggagctgatgcagctggagggctacacagtggactacacagacccccaccctggcctgcagggcggctgcatgttcttcaatgctgtgaaggagggggacaccgtcatctttgccagtgatgatgagcaggaccgcatcctgtgggtgcaggccatgtaccgggccaccggccagagctacaagcctgtgcctgccatccagacccagaagctgaaccccaagggcggcaccctgcatgctgatgcccagctgtctgagttcacagatgctgaccgcttccagaagcacggcatggatgagttcatcagcgccaacccctgcaagctggaccacgccttcctgttccgcatcctgcagaggcagaccctggaccaccggctgaatgacagctacagctgcctgggctggttcagccctggccaggtgtttgtgctggatgagtactgtgcccgctatggagtgcggggctgccaccgccacctgtgctacctggccgagctgatggagcacagtgaaaatggagctgtgattgaccccaccctgctgcactacagctttgccttctgtgccagccacgtgcacggcaacagaccagatggcatcggcaccgtgtctgtggaggagaaggagagatttgaggagatcaaggagcggctgagcagcctgctggagaaccagatcagccacttccgctactgcttccccttcggccggcctgagggcgccctgaaggccaccctgagcctgctggagcgggtgctgatgaaggacatcgccacccccatcccagctgaggaggtgaagaaggtggtgaggaagtgcctggagaaggccgccctgatcaactacacccggctgacagaatatgccaagattgaggagaccatgaaccaggccagccctgccaggaagctggaggagatcctgcacctggccgagctgtgcatcgaggtgctgcagcagaatgaggagcaccacgccgaggcctttgcctggtggccagacctgctggccgagcacgccgagaagttctgggccctcttcaccgtggacatggacacagccctggaggcccagccccaggacagctgggacagcttccccctcttccagctgctgaacaacttcctgagaaatgacaccctgctgtgcaatggcaagttccacaagcacctgcaggagatctttgtgcccctggtggtgcgctacgtggacctgatggagagcagcatcgcccagagcatccaccggggctttgagcaggagacctggcagcctgtgaagaacatcgccaacagcctgcccaacgtggccctgcccaaggtgcccagcctgcccctgaacctgccccagatccccaacatcagcacagcctcctggatgcccagcctgtatgagagcaccaacggcagcgccaccagcgaggacctcttctggaagctggatgccctgcagatgtttgtgtttgacctgcactggccagagcaggagtttgcccaccacctggagcagaggctgaagctgatggccagtgacatgctggaggcctgtgtgaagaggaccaggacagcctttgagctgaagctgcagaaggccagcaagaccacagacctgcgcatcccagcctctgtgtgcaccatgttcaacgtgctggtggatgccaagaagcagagcaccaagctgtgtgccctggatggcggccaggagcagcagtaccacagcaagattgatgacctgattgacaacagcgtgaaggagatcatcagcctgctggtgtccaagtttgtgtctgtgctggagggcgtgctgagcaagctgagccgctatgatgagggcaccttcttcagcagcatcctgtccttcaccgtgaaggctgctgccaagtatgtggatgtgcccaagccaggcatggacctggccgacacctacatcatgtttgtgcggcagaaccaggacatcctgcgggagaaggtgaatgaggagatgtacatcgagaagctgtttgaccagtggtacagcagctccatgaaggtgatctgtgtgtggctgacagaccggctggacctgcagctgcacatctaccagctgaagaccctcatcaagatcgtgaagaagacctacagagacttccggctgcagggcgtgctggagggcaccctgaacagcaagacctatgacacagtgcaccggcggctgactgtggaggaggccacagcctctgtgtctgagggcggcggcctgcagggcatcaccatgaaggacagtgatgaggaggaggagggctag

SEQ ID NO: 145629 - DNA, 1410 bp, synthetic construct
  misc_feature 1..1410: note = Description of Artificial Sequence: Synthetic coding sequence
  source 1..1410: mol_type = other DNA
atgaaccaggccagccctgccaggaagctggaggagatcctgcacctggccgagctgtgcatcgaggtgctgcagcagaatgaggagcaccacgccgagctgcggcatgcctttgcctggtggccagacctgctggccgagcacgccgagaagttctgggccctcttcaccgtggacatggacacagccctggaggcccagccccaggacagctgggacagcttccccctcttccagctgctgaacaacttcctgagaaatgacaccctgctgtgcaatggcaagttccacaagcacctgcaggagatctttgtgcccctggtggtgcgctacgtggacctgatggagagcagcatcgcccagagcatccaccggggctttgagcaggagacctggcagcctgtgaagaacatcgccaacagcctgcccaacgtggccctgcccaaggtgcccagcctgcccctgaacctgccccagatccccaacatcagcacagcctcctggatgcccagcctgtatgagagcaccaatggaagtgccaccagtgaagatctcttctggaagctggatgccctgcagatgtttgtgtttgacctgcactggccagagcaggagtttgcccaccacctggagcagaggctgaagctgatggccagtgacatgctggaggcctgtgtgaagaggaccaggacagcctttgagctgaagctgcagaaggccagcaagaccacagacctgcgcatcccagcctctgtgtgcaccatgtttaatgtgctggtggatgccaagaagcagagcaccaagctgtgtgccctggatggcggccaggagcagcagtaccacagcaagattgatgacctgattgacaacagcgtgaaggagatcatcagcctgctggtgtccaagtttgtgtctgtgctggagggcgtgctgagcaagctgagccgctatgatgagggcaccttcttcagcagcatcctgtccttcaccgtgaaggccgccgccaagtatgtggatgtgcccaagccaggcatggacctggccgacacctacatcatgtttgtgcggcagaaccaggacatcctgcgggagaaggtgaatgaggagatgtacatcgagaagctgtttgaccagtggtacagcagctccatgaaggtgatctgtgtgtggctgacagaccggctggacctgcagctgcacatctaccagctgaagaccctcatcaagatcgtgaagaagacctacagagacttccggctgcagggcgtgctggagggcaccctgaacagcaagacctatgacacagtgcaccggcggctgactgtggaggaggccacagcctctgtgtctgagggcggcggcctgcagggcatcaccatgaaggacagtgatgaggaggaggagggctag

SEQ ID NO: 145630 - DNA, 2700 bp, synthetic construct
  misc_feature 1..2700: note = Description of Artificial Sequence: Synthetic coding sequence
  source 1..2700: mol_type = other DNA
tgagaaatccagctgagcaagagtgatgtggtgctgtccttcaccctggagatcgtcatcatggaggtgcagggcctgaagtctgtggcccccaaccgcatcgtgtactgcaccatggaggtggagggggagaagctgcagacagaccaggccgaggccagccggccccagtggggcacccagggcgacttcaccaccacccaccccaggcctgtggtgaaggtgaagctgttcacagagagcactggagtgctggccctggaggacaaggagctgggccgggtcatcctgtaccccaccagcaacagcagcaagtctgctgagctgcacaggatggtggtgcccaagaacagccaggacagcgacctgaagatcaagctggccgtgaggatggacaagccagcccacatgaagcacagcggctacctgtatgccctgggccagaaggtgtggaagcgctggaagaagcgctactttgtgctggtgcaggtgtcccagtacacctttgccatgtgcagctaccgggagaagaagtctgagccccaggagctgatgcagctggagggctacacagtggactacacagacccccaccctggcctgcagggcggctgcatgttcttcaatgctgtgaaggagggggacaccgtcatctttgccagtgatgatgagcaggaccgcatcctgtgggtgcaggccatgtaccgggccaccggccagagctacaagcctgtgcctgccatccagacccagaagctgaaccccaagggcggcaccctgcacgcagatgcccagctgtatgctgaccgcttccagaagcacggcatggatgagttcatcagcgccaacccctgcaagctggaccacgccttcctgttccgcatcctgcagaggcagaccctggaccaccggctgaatgacagctacagctgcctgggctggttcagccctggccaggtgtttgtgctggatgagtactgtgcccgctatggagtgcggggctgccaccgccacctgtgctacctggccgagctgatggagcacagtgaaaatggagctgtgattgaccccaccctgctgcactacagctttgccttctgtgccagccacgtgcacggcaacagaccagatggcattggaacagtgtctgtggaggagaaggagagatttgaggagatcaaggagcggctgagcagcctgctggagaaccagatcagccacttccgctactgcttccccttcggccggcctgagggcgccctgaaggccaccctgagcctgctggagcgggtgctgatgaaggacatcgccacccccatcccagctgaggaggtgaagaaggtggtgaggaagtgcctggagaaggccgccctgatcaactacacccggctgacagaatatgccaagattgaggagaccatgaaccaggccagccctgccaggaagctggaggagatcctgcacctggccgagctgtgcatcgaggtgctgcagcagaatgaggagcaccacgccgaggcctttgcctggtggccagacctgctggccgagcacgccgagaagttctgggccctcttcaccgtggacatggacacagccctggaggcccagccccaggacagctgggacagcttccccctcttccagctgctgaacaacttcctgagaaatgacaccctgctgtgcaatggcaagttccacaagcacctgcaggagatctttgtgcccctggtggtgcgctacgtggacctgatggagagcagcatcgcccagagcatccaccggggctttgagcaggagacctggcagcctgtgaacaatggaagtgccaccagtgaagatctcttctggaagctggatgccctgcagatgtttgtgtttgacctgcactggccagagcaggagtttgcccaccacctggagcagaggctgaagctgatggccagtgacatgctggaggcctgtgtgaagaggaccaggacagcctttgagctgaagctgcagaaggccagcaagaccacagacctgcgcatcccagcctctgtgtgcaccatgtttaatgtgctggtggatgccaagaagcagagcaccaagctgtgtgccctggatggcggccaggagcagcagtaccacagcaagattgatgacctgattgacaacagcgtgaaggagatcatcagcctgctggtgtccaagtttgtgtctgtgctggagggcgtgctgagcaagctgagccgctatgatgagggcaccttcttcagcagcatcctgtccttcaccgtgaaggccgccgccaagtatgtggatgtgcccaagccaggcatggacctggccgacacctacatcatgtttgtgcggcagaaccaggacatcctgcgggagaaggtgaatgaggagatgtacatcgagaagctgtttgaccagtggtacagcagctccatgaaggtgatctgtgtgtggctgacagaccggctggacctgcagctgcacatctaccagctgaagaccctcatcaagatcgtgaagaagacctacagagacttccggctgcagggcgtgctggagggcaccctgaacagcaagacctatgacacagtgcaccggcggctgactgtggaggaggccacagcctctgtgtctgagggcggcggcctgcagggcatcaccatgaaggacagtgatgaggaggaggagggctag

SEQ ID NO: 145631 - DNA, 3768 bp, synthetic construct
  misc_feature 1..3768: note = Description of Artificial Sequence: Synthetic coding sequence
  source 1..3768: mol_type = other DNA
atgctggaccccagcagcagcgaggaggagagtgatgagggcctggaggaggagagcagagatgtgctggtggccgccggcagcagccagagggcccccccagcccccacccgggagggcagaagagatgcccctggccgggccggcggcggcggggccgcccggtctgtgagccccagccccagcgtgctgtctgagggcagagatgagccccagaggcagctggatgatgagcaggagcggcgcatccggctgcagctgtatgtgtttgtggtgcgctgcatcgcctaccccttcaatgccaagcagcccacagacatggcccggcggcagcagaagctgaacaagcagcagctgcagctgctgaaggagcgcttccaggccttcctgaatggagagacccagatcgtggctgatgaggccttctgcaatgctgtgcgcagctactatgaggtgttcctgaagagtgacagagtggccaggatggtgcagagcggcggctgcagcgccaatgacttccgggaggtgttcaagaagaacatcgagaagagggtgcgcagcctgcctgagattgatggcctgagcaaggagaccgtgctgagctcctggatcgccaagtatgatgccatctacagaggagaggaggacctgtgcaagcagcccaacaggatggccctgtctgctgtgtctgagctgatcctgagcaaggagcagctgtatgagatgttccagcagatcctgggcatcaagaagctggagcaccagctgctgtacaatgcctgccagctggacaatgctgatgagcaggccgcccagatccggcgggagctggatggccgcctgcagctggccgacaagatggccaaggagaggaagttccccaagttcatcgccaaggacatggagaacatgtacatcgaggagctgcggagctctgtgaacctgctgatggccaacctggagagcctgcctgtgtccaaaggaggccctgagttcaagctgcagaagctgaagaggagccagaacagcgccttcctggacattggagatgaaaatgagatccagctgagcaagagtgatgtggtgctgtccttcaccctggagatcgtcatcatggaggtgcagggcctgaagtctgtggcccccaacagaattgtgtactgcaccatggaggtggagggggagaagctgcagacagaccaggccgaggccagccggccccagtggggcacccagggcgacttcaccaccacccaccccaggcctgtggtgaaggtgaagctgttcacagagagcactggagtgctggccctggaggacaaggagctgggccgggtcatcctgtaccccaccagcaacagcagcaagtctgctgagctgcacaggatggtggtgcccaagaacagccaggacagcgacctgaagatcaagctggccgtgaggatggacaagccagcccacatgaagcacagcggctacctgtatgccctgggccagaaggtgtggaagcgctggaagaagcgctactttgtgctggtgcaggtgtcccagtacacctttgccatgtgcagctaccgggagaagaagtctgagccccaggagctgatgcagctggagggctacacagtggactacacagacccccaccctggcctgcagggcggctgcatgttcttcaatgctgtgaaggagggggacaccgtcatctttgccagtgatgatgagcaggaccgcatcctgtgggtgcaggccatgtaccgggccaccggccagagctacaagcctgtgcctgccatccagacccagaagctgaaccccaagggcggcaccctgcatgctgatgcccagctgtatgctgaccgcttccagaagcacggcatggatgagttcatcagcgccaacccctgcaagctggaccacgccttcctgttccgcatcctgcagaggcagaccctggaccaccggctgaatgacagctacagctgcctgggctggttcagccctggccaggtgtttgtgctggatgagtactgtgcccgctatggagtgcggggctgccaccgccacctgtgctacctggccgagctgatggagcacagtgaaaatggagctgtgattgaccccaccctgctgcactacagctttgccttctgtgccagccacgtgcacggcaacagaccagatggcatcggcaccgtgtctgtggaggagaaggagagatttgaggagatcaaggagcggctgagcagcctgctggagaaccagatcagccacttccgctactgcttccccttcggccggcctgagggcgccctgaaggccaccctgagcctgctggagcgggtgctgatgaaggacatcgccacccccatcccagctgaggaggtgaagaaggtggtgaggaagtgcctggagaaggccgccctgatcaactacacccggctgacagaatatgccaagattgaggagaccatgaaccaggccagccctgccaggaagctggaggagatcctgcacctggccgagctgtgcatcgaggtgctgcagcagaatgaggagcaccacgccgaggcctttgcctggtggccagacctgctggccgagcacgccgagaagttctgggccctcttcaccgtggacatggacacagccctggaggcccagccccaggacagctgggacagcttccccctcttccagctgctgaacaacttcctgagaaatgacaccctgctgtgcaatggcaagttccacaagcacctgcaggagatctttgtgcccctggtggtgcgctacgtggacctgatggagagcagcatcgcccagagcatccaccggggctttgagcaggagacctggcagcctgtgaacaacggcagcgccaccagcgaggacctcttctggaagctggatgccctgcagatgtttgtgtttgacctgcactggccagagcaggagtttgcccaccacctggagcagaggctgaagctgatggccagtgacatgctggaggcctgtgtgaagaggaccaggacagcctttgagctgaagctgcagaaggccagcaagaccacagacctgcgcatcccagcctctgtgtgcaccatgttcaacgtgctggtggatgccaagaagcagagcaccaagctgtgtgccctggatggcggccaggagtttggcagccagtggcagcagtaccacagcaagattgatgacctgattgacaacagcgtgaaggagatcatcagcctgctggtgtccaagtttgtgtctgtgctggagggcgtgctgagcaagctgagccgctatgatgagggcaccttcttcagcagcatcctgtccttcaccgtgaaggccgccgccaagtatgtggatgtgcccaagccaggcatggacctggccgacacctacatcatgtttgtgcggcagaaccaggacatcctgcgggagaaggtgaatgaggagatgtacatcgagaagctgtttgaccagtggtacagcagctccatgaaggtgatctgtgtgtggctgacagaccggctggacctgcagctgcacatctaccagctgaagaccctcatcaagatcgtgaagaagacctacagagacttccggctgcagggcgtgctggagggcaccctgaacagcaagacctatgacacagtgcaccggcggctgactgtggaggaggccacagcctctgtgtctgagggcggcggcctgcagggcatcaccatgaaggacagtgatgaggaggaggagggctag

SEQ ID NO: 145632 - DNA, 3906 bp, synthetic construct
  misc_feature 1..3906: note = Description of Artificial Sequence: Synthetic coding sequence
  source 1..3906: mol_type = other DNA
atgctggaccccagcagcagcgaggaggagagtgatgagggcctggaggaggagagcagagatgtgctggtggccgccggcagcagccagagggcccccccagcccccacccgggagggcagaagagatgcccctggccgggccggcggcggcggggccgcccggtctgtgagccccagccccagcgtgctgtctgagggcagagatgagccccagaggcagctggatgatgagcaggagcggcgcatccggctgcagctgtatgtgtttgtggtgcgctgcatcgcctaccccttcaatgccaagcagcccacagacatggcccggcggcagcagaagctgaacaagcagcagctgcagctgctgaaggagcgcttccaggccttcctgaatggagagacccagatcgtggctgatgaggccttctgcaatgctgtgcgcagctactatgaggtgttcctgaagagtgacagagtggccaggatggtgcagagcggcggctgcagcgccaatgacttccgggaggtgttcaagaagaacatcgagaagagggtgcgcagcctgcctgagattgatggcctgagcaaggagaccgtgctgagctcctggatcgccaagtatgatgccatctacagaggagaggaggacctgtgcaagcagcccaacaggatggccctgtctgctgtgtctgagctgatcctgagcaaggagcagctgtatgagatgttccagcagatcctgggcatcaagaagctggagcaccagctgctgtacaatgcctgccagctggacaatgctgatgagcaggccgcccagatccggcgggagctggatggccgcctgcagctggccgacaagatggccaaggagaggaagttccccaagttcatcgccaaggacatggagaacatgtacatcgaggagctgcggagctctgtgaacctgctgatggccaacctggagagcctgcctgtgtccaaaggaggccctgagttcaagctgcagaagctgaagaggagccagaacagcgccttcctggacattggagatgaaaatgagatccagctgagcaagagtgatgtggtgctgtccttcaccctggagatcgtcatcatggaggtgcagggcctgaagtctgtggcccccaacagaattgtgtactgcaccatggaggtggagggggagaagctgcagacagaccaggccgaggccagccggccccagtggggcacccagggcgacttcaccaccacccaccccaggcctgtggtgaaggtgaagctgttcacagagagcactggagtgctggccctggaggacaaggagctgggccgggtcatcctgtaccccaccagcaacagcagcaagtctgctgagctgcacaggatggtggtgcccaagaacagccaggacagcgacctgaagatcaagctggccgtgaggatggacaagccagcccacatgaagcacagcggctacctgtatgccctgggccagaaggtgtggaagcgctggaagaagcgctactttgtgctggtgcaggtgtcccagtacacctttgccatgtgcagctaccgggagaagaagtctgagccccaggagctgatgcagctggagggctacacagtggactacacagacccccaccctggcctgcagggcggctgcatgttcttcaatgctgtgaaggagggggacaccgtcatctttgccagtgatgatgagcaggaccgcatcctgtgggtgcaggccatgtaccgggccaccggccagagctacaagcctgtgcctgccatccagacccagaagctgaaccccaagggcggcaccctgcatgctgatgcccagctgtctgagttcacagatgctgaccgcttccagaagcacggcatggatgagttcatcagcgccaacccctgcaagctggaccacgccttcctgttccgcatcctgcagaggcagaccctggaccaccggctgaatgacagctacagctgcctgggctggttcagccctggccaggtgtttgtgctggatgagtactgtgcccgctatggagtgcggggctgccaccgccacctgtgctacctggccgagctgatggagcacagtgaaaatggagctgtgattgaccccaccctgctgcactacagctttgccttctgtgccagccacgtgcacggcaacagaccagatggcatcggcaccgtgtctgtggaggagaaggagagatttgaggagatcaaggagcggctgagcagcctgctggagaaccagatcagccacttccgctactgcttccccttcggccggcctgagggcgccctgaaggccaccctgagcctgctggagcgggtgctgatgaaggacatcgccacccccatcccagctgaggaggtgaagaaggtggtgaggaagtgcctggagaaggccgccctgatcaactacacccggctgacagaatatgccaagattgagggccctgctgagaaggagacagagaccatgaaccaggccagccctgccaggaagctggaggagatcctgcacctggccgagctgtgcatcgaggtgctgcagcagaatgaggagcaccacgccgaggcctttgcctggtggccagacctgctggccgagcacgccgagaagttctgggccctcttcaccgtggacatggacacagccctggaggcccagccccaggacagctgggacagcttccccctcttccagctgctgaacaacttcctgagaaatgacaccctgctgtgcaatggcaagttccacaagcacctgcaggagatctttgtgcccctggtggtgcgctacgtggacctgatggagagcagcatcgcccagagcatccaccggggctttgagcaggagacctggcagcctgtgaagaacatcgccaacagcctgcccaacgtggccctgcccaaggtgcccagcctgcccctgaacctgccccagatccccaacatcagcacagcctcctggatgcccagcctgtatgagagcaccaatggaagtgccaccagtgaagatctcttctggaagctggatgccctgcagatgtttgtgtttgacctgcactggccagagcaggagtttgcccaccacctggagcagaggctgaagctgatggccagtgacatgctggaggcctgtgtgaagaggaccaggacagcctttgagctgaagctgcagaaggccagcaagaccacagacctgcgcatcccagcctctgtgtgcaccatgtttaatgtgctggtggatgccaagaagcagagcaccaagctgtgtgccctggatggcggccaggagcagcagtaccacagcaagattgatgacctgattgacaacagcgtgaaggagatcatcagcctgctggtgtccaagtttgtgtctgtgctggagggcgtgctgagcaagctgagccgctatgatgagggcaccttcttcagcagcatcctgtccttcaccgtgaaggccgccgccaagtatgtggatgtgcccaagccaggcatggacctggccgacacctacatcatgtttgtgcggcagaaccaggacatcctgcgggagaaggtgaatgaggagatgtacatcgagaagctgtttgaccagtggtacagcagctccatgaaggtgatctgtgtgtggctgacagaccggctggacctgcagctgcacatctaccagctgaagaccctcatcaagatcgtgaagaagacctacagagacttccggctgcagggcgtgctggagggcaccctgaacagcaagacctatgacacagtgcaccggcggctgactgtggaggaggccacagcctctgtgtctgagggcggcggcctgcagggcatcaccatgaaggacagtgatgaggaggaggagggctag

SEQ ID NO: 145633 - DNA, 3891 bp, synthetic construct
  misc_feature 1..3891: note = Description of Artificial Sequence: Synthetic coding sequence
  source 1..3891: mol_type = other DNA
atgctggaccccagcagcagcgaggaggagagtgatgagggcctggaggaggagagcagagatgtgctggtggccgccggcagcagccagagggcccccccagcccccacccgggagggcagaagagatgcccctggccgggccggcggcggcggggccgcccggtctgtgagccccagccccagcgtgctgtctgagggcagagatgagccccagaggcagctggatgatgagcaggagcggcgcatccggctgcagctgtatgtgtttgtggtgcgctgcatcgcctaccccttcaatgccaagcagcccacagacatggcccggcggcagcagaagctgaacaagcagcagctgcagctgctgaaggagcgcttccaggccttcctgaatggagagacccagatcgtggctgatgaggccttctgcaatgctgtgcgcagctactatgaggtgttcctgaagagtgacagagtggccaggatggtgcagagcggcggctgcagcgccaatgacttccgggaggtgttcaagaagaacatcgagaagagggtgcgcagcctgcctgagattgatggcctgagcaaggagaccgtgctgagctcctggatcgccaagtatgatgccatctacagaggagaggaggacctgtgcaagcagcccaacaggatggccctgtctgctgtgtctgagctgatcctgagcaaggagcagctgtatgagatgttccagcagatcctgggcatcaagaagctggagcaccagctgctgtacaatgcctgccagctggacaatgctgatgagcaggccgcccagatccggcgggagctggatggccgcctgcagctggccgacaagatggccaaggagaggaagttccccaagttcatcgccaaggacatggagaacatgtacatcgaggagctgcggagctctgtgaacctgctgatggccaacctggagagcctgcctgtgtccaaaggaggccctgagttcaagctgcagaagctgaagaggagccagaacagcgccttcctggacattggagatgaaaatgagatccagctgagcaagagtgatgtggtgctgtccttcaccctggagatcgtcatcatggaggtgcagggcctgaagtctgtggcccccaacagaattgtgtactgcaccatggaggtggagggggagaagctgcagacagaccaggccgaggccagccggccccagtggggcacccagggcgacttcaccaccacccaccccaggcctgtggtgaaggtgaagctgttcacagagagcactggagtgctggccctggaggacaaggagctgggccgggtcatcctgtaccccaccagcaacagcagcaagtctgctgagctgcacaggatggtggtgcccaagaacagccaggacagcgacctgaagatcaagctggccgtgaggatggacaagccagcccacatgaagcacagcggctacctgtatgccctgggccagaaggtgtggaagcgctggaagaagcgctactttgtgctggtgcaggtgtcccagtacacctttgccatgtgcagctaccgggagaagaagtctgagccccaggagctgatgcagctggagggctacacagtggactacacagacccccaccctggcctgcagggcggctgcatgttcttcaatgctgtgaaggagggggacaccgtcatctttgccagtgatgatgagcaggaccgcatcctgtgggtgcaggccatgtaccgggccaccggccagagctacaagcctgtgcctgccatccagacccagaagctgaaccccaagggcggcaccctgcatgctgatgcccagctgagcggcaaggatgctgaccgcttccagaagcacggcatggatgagttcatcagcgccaacccctgcaagctggaccacgccttcctgttccgcatcctgcagaggcagaccctggaccaccggctgaatgacagctacagctgcctgggctggttcagccctggccaggtgtttgtgctggatgagtactgtgcccgctatggagtgcggggctgccaccgccacctgtgctacctggccgagctgatggagcacagtgaaaatggagctgtgattgaccccaccctgctgcactacagctttgccttctgtgccagccacgtgcacggcaacagaccagatggcattggaacagtgtctgtggaggagaaggagagatttgaggagatcaaggagcggctgagcagcctgctggagaaccagatcagccacttccgctactgcttccccttcggccggcctgagggcgccctgaaggccaccctgagcctgctggagcgggtgctgatgaaggacatcgccacccccatcccagctgaggaggtgaagaaggtggtgaggaagtgcctggagaaggccgccctgatcaactacacccggctgacagaatatgccaagattgaggagaccatgaaccaggccagccctgccaggaagctggaggagatcctgcacctggccgagctgtgcatcgaggtgctgcagcagaatgaggagcaccacgccgagggccgggaggcctttgcctggtggccagacctgctggccgagcacgccgagaagttctgggccctcttcaccgtggacatggacacagccctggaggcccagccccaggacagctgggacagcttccccctcttccagctgctgaacaacttcctgagaaatgacaccctgctgtgcaatggcaagttccacaagcacctgcaggagatctttgtgcccctggtggtgcgctacgtggacctgatggagagcagcatcgcccagagcatccaccggggctttgagcaggagacctggcagcctgtgaagaacatcgccaacagcctgcccaacgtggccctgcccaaggtgcccagcctgcccctgaacctgccccagatccccaacatcagcacagcctcctggatgcccagcctgtatgagagcaccaacggcagcgccaccagcgaggacctcttctggaagctggatgccctgcagatgtttgtgtttgacctgcactggccagagcaggagtttgcccaccacctggagcagaggctgaagctgatggccagtgacatgctggaggcctgtgtgaagaggaccaggacagcctttgagctgaagctgcagaaggccagcaagaccacagacctgcgcatcccagcctctgtgtgcaccatgttcaacgtgctggtggatgccaagaagcagagcaccaagctgtgtgccctggatggcggccaggagcagcagtaccacagcaagattgatgacctgattgacaacagcgtgaaggagatcatcagcctgctggtgtccaagtttgtgtctgtgctggagggcgtgctgagcaagctgagccgctatgatgagggcaccttcttcagcagcatcctgtccttcaccgtgaaggctgctgccaagtatgtggatgtgcccaagccaggcatggacctggccgacacctacatcatgtttgtgcggcagaaccaggacatcctgcgggagaaggtgaatgaggagatgtacatcgagaagctgtttgaccagtggtacagcagctccatgaaggtgatctgtgtgtggctgacagaccggctggacctgcagctgcacatctaccagctgaagaccctcatcaagatcgtgaagaagacctacagagacttccggctgcagggcgtgctggagggcaccctgaacagcaagacctatgacacagtgcaccggcggctgactgtggaggaggccacagcctctgtgtctgagggcggcggcctgcagggcatcaccatgaaggacagtgatgaggaggaggagggctag

SEQ ID NO: 145634 - DNA, 1473 bp, synthetic construct
  misc_feature 1..1473: note = Description of Artificial Sequence: Synthetic coding sequence
  source 1..1473: mol_type = other DNA
tgatacacccggctgacagaatatgccaagattgagggccctgctgagaaggagacagagaccatgaaccaggccagccctgccaggaagctggaggagatcctgcacctggccgagctgtgcatcgaggtgctgcagcagaatgaggagcaccacgccgagggccgggaggcctttgcctggtggccagacctgctggccgagcacgccgagaagttctgggccctcttcaccgtggacatggacacagccctggaggcccagccccaggacagctgggacagcttccccctcttccagctgctgaacaacttcctgagaaatgacaccctgctgtgcaatggcaagttccacaagcacctgcaggagatctttgtgcccctggtggtgcgctacgtggacctgatggagagcagcatcgcccagagcatccaccggggctttgagcaggagacctggcagcctgtgaagaacatcgccaacagcctgcccaacgtggccctgcccaaggtgcccagcctgcccctgaacctgccccagatccccaacatcagcacagcctcctggatgcccagcctgtatgagagcaccaacggcagcgccaccagcgaggacctcttctggaagctggatgccctgcagatgtttgtgtttgacctgcactggccagagcaggagtttgcccaccacctggagcagaggctgaagctgatggccagtgacatgctggaggcctgtgtgaagaggaccaggacagcctttgagctgaagctgcagaaggccagcaagaccacagacctgcgcatcccagcctctgtgtgcaccatgttcaacgtgctggtggatgccaagaagcagagcaccaagctgtgtgccctggatggcggccaggagcagcagtaccacagcaagattgatgacctgattgacaacagcgtgaaggagatcatcagcctgctggtgtccaagtttgtgtctgtgctggagggcgtgctgagcaagctgagccgctatgatgagggcaccttcttcagcagcatcctgtccttcaccgtgaaggctgctgccaagtatgtggatgtgcccaagccaggcatggacctggccgacacctacatcatgtttgtgcggcagaaccaggacatcctgcgggagaaggtgaatgaggagatgtacatcgagaagctgtttgaccagtggtacagcagctccatgaaggtgatctgtgtgtggctgacagaccggctggacctgcagctgcacatctaccagctgaagaccctcatcaagatcgtgaagaagacctacagagacttccggctgcagggcgtgctggagggcaccctgaacagcaagacctatgacacagtgcaccggcggctgactgtggaggaggccacagcctctgtgtctgagggcggcggcctgcagggcatcaccatgaaggacagtgatgaggaggaggagggctag

SEQ ID NO: 145635 - DNA, 3669 bp, synthetic construct
  misc_feature 1..3669: note = Description of Artificial Sequence: Synthetic coding sequence
  source 1..3669: mol_type = other DNA
atgctggaccccagcagcagcgaggaggagagtgatgagggcctggaggaggagagcagagatgtgctggtggccgccggcagcagccagagggcccccccagcccccacccgggagggccagctggatgatgagcaggagcggcgcatccggctgcagctgtatgtgtttgtggtgcgctgcatcgcctaccccttcaatgccaagcagcccacagacatggcccggcggcagcagaagctgaacaagcagcagctgcagctgctgaaggagcgcttccaggccttcctgaatggagagacccagatcgtggctgatgaggccttctgcaatgctgtgcgcagctactatgaggtgttcctgaagagtgacagagtggccaggatggtgcagagcggcggctgcagcgccaatgacttccgggaggtgttcaagaagaacatcgagaagagggtgcgcagcctgcctgagattgatggcctgagcaaggagaccgtgctgagctcctggatcgccaagtatgatgccatctacagaggagaggaggacctgtgcaagcagcccaacaggatggccctgtctgctgtgtctgagctgatcctgagcaaggagcagctgtatgagatgttccagcagatcctgggcatcaagaagctggagcaccagctgctgtacaatgcctgccagctggacaatgctgatgagcaggccgcccagatcagaagagagctggatggccgcctgcagctggccgacaagatggccaaggagaggaagttccccaagttcatcgccaaggacatggagaacatgtacatcgaggagctgcggagctctgtgaacctgctgatggccaacctggagagcctgcctgtgtccaagggcggccctgagttcaagctgcagaagctgaagaggagccagaacagcgccttcctggacattggagatgaaaatgagatccagctgagcaagagtgatgtggtgctgtccttcaccctggagatcgtcatcatggaggtgcagggcctgaagtctgtggcccccaaccgcatcgtgtactgcaccatggaggtggagggggagaagctgcagacagaccaggccgaggccagccggccccagtggggcacccagggcgacttcaccaccacccaccccaggcctgtggtgaaggtgaagctgttcacagagagcactggagtgctggccctggaggacaaggagctgggccgggtcatcctgtaccccaccagcaacagcagcaagtctgctgagctgcacaggatggtggtgcccaagaacagccaggacagcgacctgaagatcaagctggccgtgaggatggacaagccagcccacatgaagcacagcggctacctgtatgccctgggccagaaggtgtggaagcgctggaagaagcgctactttgtgctggtgcaggtgtcccagtacacctttgccatgtgcagctaccgggagaagaagtctgagccccaggagctgatgcagctggagggctacacagtggactacacagacccccaccctggcctgcagggcggctgcatgttcttcaatgctgtgaaggagggggacaccgtcatctttgccagtgatgatgagcaggaccgcatcctgtgggtgcaggccatgtaccgggccaccggccagagctacaagcctgtgcctgccatccagacccagaagctgaaccccaagggcggcaccctgcacgcagatgcccagctgtatgctgaccgcttccagaagcacggcatggatgagttcatcagcgccaacccctgcaagctggaccacgccttcctgttccgcatcctgcagaggcagaccctggaccaccggctgaatgacagctacagctgcctgggctggttcagccctggccaggtgtttgtgctggatgagtactgtgcccgctatggagtgcggggctgccaccgccacctgtgctacctggccgagctgatggagcacagtgaaaatggagctgtgattgaccccaccctgctgcactacagctttgccttctgtgccagccacgtgcacggcaacagaccagatggcattggaacagtgtctgtggaggagaaggagagatttgaggagatcaaggagcggctgagcagcctgctggagaaccagatcagccacttccgctactgcttccccttcggccggcctgagggcgccctgaaggccaccctgagcctgctggagcgggtgctgatgaaggacatcgccacccccatcccagctgaggaggtgaagaaggtggtgaggaagtgcctggagaaggccgccctgatcaactacacccggctgacagaatatgccaagattgaggagaccatgaaccaggccagccctgccaggaagctggaggagatcctgcacctggccgagctgtgcatcgaggtgctgcagcagaatgaggagcaccacgccgaggcctttgcctggtggccagacctgctggccgagcacgccgagaagttctgggccctcttcaccgtggacatggacacagccctggaggcccagccccaggacagctgggacagcttccccctcttccagctgctgaacaacttcctgagaaatgacaccctgctgtgcaatggcaagttccacaagcacctgcaggagatctttgtgcccctggtggtgcgctacgtggacctgatggagagcagcatcgcccagagcatccaccggggctttgagcaggagacctggcagcctgtgaacaatggaagtgccaccagtgaagatctcttctggaagctggatgccctgcagatgtttgtgtttgacctgcactggccagagcaggagtttgcccaccacctggagcagaggctgaagctgatggccagtgacatgctggaggcctgtgtgaagaggaccaggacagcctttgagctgaagctgcagaaggccagcaagaccacagacctgcgcatcccagcctctgtgtgcaccatgtttaatgtgctggtggatgccaagaagcagagcaccaagctgtgtgccctggatggcggccaggagtttggcagccagtggcagcagtaccacagcaagattgatgacctgattgacaacagcgtgaaggagatcatcagcctgctggtgtccaagtttgtgtctgtgctggagggcgtgctgagcaagctgagccgctatgatgagggcaccttcttcagcagcatcctgtccttcaccgtgaaggctgctgccaagtatgtggatgtgcccaagccaggcatggacctggccgacacctacatcatgtttgtgcggcagaaccaggacatcctgcgggagaaggtgaatgaggagatgtacatcgagaagctgtttgaccagtggtacagcagctccatgaaggtgatctgtgtgtggctgacagaccggctggacctgcagctgcacatctaccagctgaagaccctcatcaagatcgtgaagaagacctacagagacttccggctgcagggcgtgctggagggcaccctgaacagcaagacctatgacacagtgcaccggcggctgactgtggaggaggccacagcctctgtgtctgagggcggcggcctgcagggcatcaccatgaaggacagtgatgaggaggaggagggctag

SEQ ID NO: 145636 - DNA, 2367 bp, synthetic construct
  misc_feature 1..2367: note = Description of Artificial Sequence: Synthetic coding sequence
  source 1..2367: mol_type = other DNA
atgaccatccaccagttcctgctgctcttcctgttctgggtgtgcctgccccacttctgcagccctgagatcatgttccggaggacccctgtgccccagcagaggatcctgagcagccgggtgcccaggagtgatggcaagatcctgcaccggcagaagaggggctggatgtggaaccagttcttcctgctggaggagtacacaggcagtgactaccagtatgtgggcaagctgcacagcgaccaggacaagggagatggcagcctgaagtacatcctgtctggagatggagctggcaccctcttcatcattgatgagaagacaggagacatccacgccaccaggagaattgaccgggaggagaaggccttctacaccctgcgggcccaggccatcaacagaaggaccctgcggcctgtggagcctgagagcgagtttgtgatcaagatccatgacatcaatgacaatgagcccaccttccctgaggagatctacacagcctctgtgcctgagatgtctgtggtgggcacctctgtggtgcaggtgacagccacagatgctgatgaccccagctatggcaacagcgcccgggtcatctacagcatcctgcagggccagccctacttctctgtggagcctgagaccggcatcatcagaacagccctgcccaacatgaaccgggagaaccgggagcagtaccaggtggtgatccaggccaaggacatgggcggccagatgggcggcctgagcggcaccaccaccgtgaacatcaccctgacagatgtgaatgacaaccccccacgcttcccccagaacaccatccacctgcgggtgctggagagcagccctgtgggcacagccatcggctctgtgaaggccacagatgctgacaccgggaagaatgctgaggtggagtaccgcatcattgatggagatggaacagacatgtttgatattgtgacagagaaggacacccaggagggcatcatcaccgtgaagaagcccctggactatgagagcagaagactctacaccctgaaggtggaggccgagaacacccacgtggacccccgcttctactacctgggccccttcaaggacaccaccatcgtgaagatcagcattgaagatgtggatgagccccctgtgttcagccgcagcagctacctgtttgaggtgcatgaagatattgaggtgggcaccatcattggaacagtgatggcccgggaccctgacagcatcagcagccccatccgcttcagcctggacagacacacagacctggaccgcatcttcaacatccacagcggaaatggcagcctgtacaccagcaagcccctggaccgggagctgagccagtggcacaacctgactgtgattgctgctgagatcaacaaccccaaggagaccaccagggtggccgtgtttgtgcgcatcctggatgtgaatgacaatgccccccagtttgctgtgttctatgacacctttgtgtgtgaaaatgcccggcccggccagctgatccagaccatctctgctgtggacaaggatgaccccctgggcggccagaagttcttcttcagcctggccgctgtgaaccccaacttcaccgtgcaggacaatgaagacaacacagcccgcatcctgaccaggaagaatggcttcaacagacatgagatcagcacctacctgctgcctgtggtgatcagtgacaatgactaccccatccagagcagcacaggcaccctgaccatccgggtgtgtgcctgtgacagccagggcaacatgcagagctgcagcgctgaggccctgctgctgcctgctggcctgagcactggagccctgattgccatcctgctgtgcatcatcatcctgctggtgattgtggtgctgtttgctgccctgaagaggcagaggaagaaggagcccctcatcctgagcaaggaggacatccgggacaacatcgtgtcctacaatgatgaaggaggaggagaggaggacacccaggcctttgacatcggcaccctgaggaacccagctgccatcgaggagaagaagctgcggcgggacatcatccctgagaccctcttcatccccaggaggacccccacagccccagacaacacagatgtgcgggacttcatcaatgaaaggctgaaggagcatgacctggaccccacagccccaccctatgacagcctggccacctacgcctatgagggcaatgacagcattgctgagagcctgagcagcctggagagcggcaccacagaaggagaccagaactatgactacctgcgggagtggggcccccgcttcaacaagctggccgagatgtatggaggaggagagagtgacaaggacagctag

SEQ ID NO: 145637 - DNA, 2385 bp, synthetic construct
  misc_feature 1..2385: note = Description of Artificial Sequence: Synthetic coding sequence
  source 1..2385: mol_type = other DNA
atgctgaccaggaactgcctgagcctgctgctgtgggtgctgtttgatggcggcctgctgacccccctgcagccccagccccagcagaccctggccacagagcccagagaaaatgtcatccacctgcccggccagaggagccacttccagagggtgaagaggggctgggtgtggaaccagttctttgtgctggaggagtatgtgggcagcgagccccagtatgtgggcaagctgcacagcgacctggacaagggggagggcaccgtgaagtacaccctgtctggagatggagctggcaccgtcttcaccattgatgagaccaccggggacatccacgccatccgcagcctggaccgggaggagaagcccttctacaccctgcgggcccaggccgtggacatcgagaccaggaagcccctggagcctgagagcgagttcatcatcaaggtgcaggacatcaatgacaatgagcccaagttcctggatggcccctacgtggccaccgtgcctgagatgagccctgtgggcgcctacgtgctgcaggtgaaggccacagatgctgatgaccccacctacggcaacagcgcccgggtggtgtacagcatcctgcagggccagccctacttcagcattgaccccaagacaggagtcatcagaacagccctgcccaacatggaccgggaggtgaaggagcagtaccaggtgctgatccaggccaaggacatgggcggccagctgggcggcctggccggcaccaccatcgtgaacatcaccctgacagatgtgaatgacaaccccccacgcttccccaagagcatcttccacctgaaggtgcctgagagcagccccatcggcagcgccatcggccgcatccgggctgtggaccctgactttggccagaatgctgagattgagtacaacatcgtgcctggagatggcggcaacctgtttgatattgtgacagatgaggacacccaggagggcgtcatcaagctgaagaagcccctggactttgagaccaagaaggcctacaccttcaaggtggaggccagcaacctgcacctggaccaccgcttccacagcgctggccccttcaaggacacagccaccgtgaagatctctgtgctggatgtggatgagccccctgtgttcagcaagcccctgtacaccatggaggtgtatgaggacacccctgtgggcaccatcattggagctgtgacagcccaggacctggatgtgggcagcagcgctgtgcgctacttcatcgactggaagagtgatggagacagctacttcaccattgatggaaatgaaggcaccatcgccaccaatgagctgctggaccgggagagcacagcccagtacaacttcagcatcatcgccagcaaggtgagcaaccccctgctgaccagcaaggtgaacatcctgatcaacgtgctggatgtgaatgagttccccccagagatctctgtgccctatgaaacagctgtgtgtgaaaatgccaagccaggccagatcatccagatcgtgtctgctgctgaccgggacctgagccctgctggccagcagttctccttccggctgagccctgaggccgccatcaagcccaacttcaccgtgcgggacttcaggaacaacacagctggcatcgagaccaggagaaatggctacagccggcggcagcaggagctgtacttcctgcctgtggtgattgaggacagcagctaccctgtgcagagcagcaccaacaccatgaccatccgggtgtgccgctgtgacagtgatggcaccatcctgagctgcaatgtggaggccatcttcctgcctgtgggcctgagcactggagccctgattgccatcctgctgtgcatcgtcatcctgctggccatcgtggtgctgtatgtggccctgcggcggcagaagaagaaggacaccctgatgaccagcaaagaagacatccgggacaacgtcatccactatgatgatgagggcggcggggaggaggacacccaggcctttgatattggagccctgaggaaccccaaggtgattgaggagaacaagatccggcgggacatcaagccagacagcctgtgcctgccccggcagaggcctcccatggaggacaacacagacatccgggacttcatccaccagaggctgcaggagaatgatgtggaccccacagccccaccctatgacagcctggccacctacgcctatgagggcagcggctctgtggccgagagcctgagcagcattgacagcctgaccacagaagctgaccaggactatgactacctgacagactggggcccccgcttcaaggtgctggccgacatgtttggagaggaggagagctacaacccagacaaggtgacctag

SEQ ID NO: 145638 - DNA, 2385 bp, synthetic construct; identical to SEQ ID NO: 145637
  misc_feature 1..2385: note = Description of Artificial Sequence: Synthetic coding sequence
  source 1..2385: mol_type = other DNA

SEQ ID NO: 145639 - DNA, 2265 bp, synthetic construct
  misc_feature 1..2265: note = Description of Artificial Sequence: Synthetic coding sequence
  source 1..2265: mol_type = other DNA
atgctgaccaggaactgcctgagcctgctgctgtgggtgctgtttgatggcggcctgctgacccccctgcagccccagccccagcagaccctggccacagagcccagagaaaatgtcatccacctgcccggccagaggagccacttccagagggtgaagaggggctgggtgtggaaccagttctttgtgctggaggagtatgtgggcagcgagccccagtatgtgggcaagctgcacagcgacctggacaagggggagggcaccgtgaagtacaccctgtctggagatggagctggcaccgtcttcaccattgatgagaccaccggggacatccacgccatccgcagcctggaccgggaggagaagcccttctacaccctgcgggcccaggccgtggacatcgagaccaggaagcccctggagcctgagagcgagttcatcatcaaggtgcaggacatcaatgacaatgagcccaagttcctggatggcccctacgtggccaccgtgcctgagatgagccctgtgggcgtcatcagaacagccctgcccaacatggaccgggaggtgaaggagcagtaccaggtgctgatccaggccaaggacatgggcggccagctgggcggcctggccggcaccaccatcgtgaacatcaccctgacagatgtgaatgacaaccccccacgcttccccaagagcatcttccacctgaaggtgcctgagagcagccccatcggcagcgccatcggccgcatccgggctgtggaccctgactttggccagaatgctgagattgagtacaacatcgtgcctggagatggcggcaacctgtttgatattgtgacagatgaggacacccaggagggcgtcatcaagctgaagaagcccctggactttgagaccaagaaggcctacaccttcaaggtggaggccagcaacctgcacctggaccaccgcttccacagcgctggccccttcaaggacacagccaccgtgaagatctctgtgctggatgtggatgagccccctgtgttcagcaagcccctgtacaccatggaggtgtatgaggacacccctgtgggcaccatcattggagctgtgacagcccaggacctggatgtgggcagcagcgctgtgcgctacttcatcgactggaagagtgatggagacagctacttcaccattgatggaaatgaaggcaccatcgccaccaatgagctgctggaccgggagagcacagcccagtacaacttcagcatcatcgccagcaaggtgagcaaccccctgctgaccagcaaggtgaacatcctgatcaacgtgctggatgtgaatgagttccccccagagatctctgtgccctatgaaacagctgtgtgtgaaaatgccaagccaggccagatcatccagatcgtgtctgctgctgaccgggacctgagccctgctggccagcagttctccttccggctgagccctgaggccgccatcaagcccaacttcaccgtgcgggacttcaggaacaacacagctggcatcgagaccaggagaaatggctacagccggcggcagcaggagctgtacttcctgcctgtggtgattgaggacagcagctaccctgtgcagagcagcaccaacaccatgaccatccgggtgtgccgctgtgacagtgatggcaccatcctgagctgcaatgtggaggccatcttcctgcctgtgggcctgagcactggagccctgattgccatcctgctgtgcatcgtcatcctgctggccatcgtggtgctgtatgtggccctgcggcggcagaagaagaaggacaccctgatgaccagcaaagaagacatccgggacaacgtcatccactatgatgatgagggcggcggggaggaggacacccaggcctttgatattggagccctgaggaaccccaaggtgattgaggagaacaagatccggcgggacatcaagccagacagcctgtgcctgccccggcagaggcctcccatggaggacaacacagacatccgggacttcatccaccagaggctgcaggagaatgatgtggaccccacagccccaccctatgacagcctggccacctacgcctatgagggcagcggctctgtggccgagagcctgagcagcattgacagcctgaccacagaagctgaccaggactatgactacctgacagactggggcccccgcttcaaggtgctggccgacatgtttggagaggaggagagctacaacccagacaaggtgacctag

SEQ ID NO: 145640 - DNA, 2445 bp, synthetic construct
  misc_feature 1..2445: note = Description of Artificial Sequence: Synthetic coding sequence
  source 1..2445: mol_type = other DNA
atggatgctgccttcctgctggtgctgggcctgctggcccagagcctgtgcctgagcctgggcgtgcccggctggaggcggcccaccaccctgtacccctggaggcgggccccagccctgagccgggtgcggcgggcctgggtgatcccccccatctctgtgtctgagaaccacaagaggctgccctaccccctggtgcagatcaagagtgacaagcagcagctgggcagcgtcatctacagcatccagggccctggggtggatgaggagccccggggcgtcttcagcattgacaagttcaccgggaaggtgttcctgaatgccatgctggaccgggagaagacagaccgcttccggctgcgggcctttgccctggacctgggcggcagcaccctggaggaccccacagacctggagatcgtggtggtggaccagaatgacaacagacctgccttcctgcaggaggccttcaccggccgggtgctggagggcgctgtgcccggcacctacgtgaccagggctgaggccacagatgctgatgatcctgagacagacaatgctgccctgcgcttcagcatcctgcagcagggcagccctgagctgttcagcattgatgagctgaccggggagatcagaacagtgcaggtgggcctggaccgggaggtggtggccgtgtacaacctgaccctgcaggtggccgacatgtctggagatggcctgacagccacagccagcgccatcatcaccctggatgacatcaatgacaatgcccctgagttcaccagagatgagttcttcatggaggccatcgaggccgtgtctggagtggatgtgggccgcctggaggtggaggaccgggacctgcccggcagccccaactgggtggcccgcttcaccatcctggagggggaccctgatggccagttcaccatcagaacagaccccaagaccaatgaaggagtgctgagcatcgtgaaggccctggactatgagagctgtgagcactatgagctgaaggtgtctgtgcagaatgaggcccccctgcaggccgccgccctgcgggcagagcggggccaggccaaggtgcgggtgcacgtgcaggacaccaatgagccccctgtgttccaggagaaccccctgcggaccagcctggccgagggcgcccctcctggcaccctggtggccaccttcagcgcccgggaccctgacacagagcagctgcagaggctgagctacagcaaggactatgaccctgaggactggctgcaggtggatgctgccaccggccgcatccagacccagcacgtgctgagccctgccagccccttcctgaagggcggctggtaccgggccatcgtgctggcccaggatgatgccagccagcccaggacagccaccggcaccctgagcattgagatcctggaggtgaatgaccacgcccctgtgctggcccctcctcctcctggcagcctgtgcagcgagccccaccagggccctggcctgctgctgggcgccacagatgaggacctgccccctcatggagcccccttccacttccagctgagcccccggctgcctgagctgggcaggaactggagcctgagccaggtgaatgtgtcccatgcccggctgcggcccaggcaccaggtgcctgagggcctgcaccggctgagcctgctgctgcgggacagcggccagcccccccagcagcgggagcagcccctgaatgtgacagtgtgccgctgtgggaaggatggagtgtgcctgcccggggctgctgccctgctggccggcggcaccggcctgagcctgggcgccctggtgattgtgctggccagcgccctgctgctgctggtgctggtgctgctggtggccctgcgggcccgcttctggaagcagagccggggcaagggcctgctgcacggcccccaggatgacctgcgggacaacgtgctgaactatgatgagcagggcggcggggaggaggaccaggatgcctatgacatcagccagctgcggcaccccacagccctgagcctgcccctgggccccccacccctgcggagagatgccccccagggccgcctgcacccccagcccccccgggtgctgcccaccagccccctggacattgctgacttcatcaatgatggcctggaggccgctgacagcgaccccagcgtgcccccctatgacacagccctgatctatgactatgaaggagatggctctgtggccggcaccctgagcagcatcctgagcagccagggagatgaggaccaggactatgactacctgcgggactggggccccaggtttgcccggctggccgacatgtatggccacccctgtggcctggagtatggagcccgctgggaccaccaggcccgggagggcctgagccctggggccctgctgcccaggcaccggggccgcacagcctag

SEQ ID NO: 145641 - DNA, 2373 bp, synthetic construct
  misc_feature 1..2373: note = Description of Artificial Sequence: Synthetic coding sequence
  source 1..2373: mol_type = other DNA
atggtgcctgcctggctgtggctgctgtgtgtgtctgtgccccaggccctgcccaaggcccagcctgctgagctgtctgtggaggtgcctgaaaattatggaggcaacttccccctgtacctgaccaagctgcccctgccccgggagggcgctgagggccagatcgtgctgagcggggacagcggcaaggccacagagggcccctttgccatggaccctgattctggcttcctgctggtgacccgggccctggaccgggaggagcaggccgagtaccagctgcaggtgaccctggagatgcaggacggccacgtgctgtggggcccccagcctgtgctggtgcacgtgaaggatgaaaatgaccaggtgccccacttcagccaggccatctaccgggcccggctgagccggggcaccaggcctggcatccccttcctgttcctggaggccagtgacagagatgagcccggcacagccaacagcgacctgcgcttccacatcctgagccaggccccagcccagcccagcccagacatgttccagctggagccccggctgggcgccctggccctgagccccaagggcagcaccagcctggaccacgccctggagaggacctaccagctgctggtgcaggtgaaggacatgggagaccaggccagcggccaccaggccacagccaccgtggaggtgtccatcatcgagagcacctgggtgtccctggagcccatccacctggccgagaacctgaaggtgctgtacccccaccacatggcccaggtgcactggagcggaggagatgtgcactaccacctggagagccaccccccaggcccctttgaggtgaatgctgagggcaacctgtatgtgacccgggagctggaccgggaggcccaggccgagtacctgctgcaggtgcgggcccagaacagccacggggaggactatgctgcccccctggagctgcacgtgctggtgatggatgaaaatgacaacgtgcccatctgccccccccgggaccccaccgtgtccatccctgagctgagccccccaggcacagaggtgacccggctgtctgcagaagatgctgatgcccctggcagccccaacagccacgtggtgtaccagctgctgagccctgagccagaagatggagtggagggccgggccttccaggtggaccccaccagcggctctgtgaccctgggcgtgctgcccctgcgggccggccagaacatcctgctgctggtgctggccatggacctggccggggctgagggcggcttcagcagcacctgtgaggtggaggtggccgtgacagacatcaatgaccacgcccctgagttcatcaccagccagatcggccccatcagcctgcctgaagatgtggagcccggcaccctggtggccatgctgacagccattgatgctgacctggagcccgccttccggctgatggactttgccatcgagcggggggacacagagggcaccttcggcctggactgggagccagattctggccacgtgcggctgcggctgtgcaagaacctgtcctatgaggccgcccccagccatgaggtggtggtggtggtgcagagcgtggccaagctggtgggccctggccctggccctggggccacagccaccgtgacagtgctggtggagcgggtgatgcccccacccaagctggaccaggagagctatgaggcctctgtgcccatcagcgccccagctggcagcttcctgctgaccatccagcccagcgaccccatcagcaggaccctgcgcttcagcctggtgaatgacagcgagggctggctgtgcatcgagaagttcagcggggaggtgcacacagcccagagcctgcagggcgcccagcccggggacacctacacagtgctggtggaggcccaggacacagaccacggcctcatcgtgtctggccccagcaaggaccctgacctggccagcggccacggcccctacagcttcaccctgggccccaaccccaccgtgcagagggactggaggctgcagaccctgaatggcagccacgcctacctgaccctggccctgcactgggtggagccccgggagcacatcatccctgtggtggtgagccacaatgcccagatgtggcagctgctggtgcgggtgattgtgtgccgctgcaatgtggagggccagtgcatgaggaaggtgggccgcatgaagggcatgcccaccaagctgtctgctgtgggcatcctggtgggcaccctggtggccatcggcatcttcctgatcctgatcttcacccactggaccatgagcaggaagaaggaccctgaccagcctgctgacagcgtgcccctgaaggccaccgtgtag

SEQ ID NO: 145642 - DNA, 2199 bp, synthetic construct
  misc_feature 1..2199: note = Description of Artificial Sequence: Synthetic coding sequence
  source 1..2199: mol_type = other DNA
atggtgcctgcctggctgtggctgctgtgtgtgtctgtgccccaggccctgcccaaggcccagcctgctgagctgtctgtggaggtgcctgaaaattatggaggcaacttccccctgtacctgaccaagctgcccctgccccgggagggcgctgagggccagatcgtgctgagcggggacagcggcaaggccacagagggcccctttgccatggaccctgattctggcttcctgctggtgacccgggccctggaccgggaggagcaggccgagtaccagctgcaggtgaccctggagatgcaggacggccacgtgctgtggggcccccagcctgtgctggtgcacgtgaaggatgaaaatgaccaggccagcggccaccaggccacagccaccgtggaggtgtccatcatcgagagcacctgggtgtccctggagcccatccacctggccgagaacctgaaggtgctgtacccccaccacatggcccaggtgcactggagcggaggagatgtgcactaccacctggagagccaccccccaggcccctttgaggtgaatgctgagggcaacctgtatgtgacccgggagctggaccgggaggcccaggccgagtacctgctgcaggtgcgggcccagaacagccatggagaagattatgctgcccccctggagctgcacgtgctggtgatggatgaaaatgacaacgtgcccatctgccccccccgggaccccaccgtgtccatccctgagctgagccccccaggcacagaggtgacccggctgtctgcagaagatgctgatgcccctggcagccccaacagccacgtggtgtaccagctgctgagccctgagccagaagatggagtggagggccgggccttccaggtggaccccaccagcggctctgtgaccctgggcgtgctgcccctgcgggccggccagaacatcctgctgctggtgctggccatggacctggccggggctgagggcggcttcagcagcacctgtgaggtggaggtggccgtgacagacatcaatgaccacgcccctgagttcatcaccagccagatcggccccatcagcctgcctgaagatgtggagcccggcaccctggtggccatgctgacagccattgatgctgacctggagcccgccttccggctgatggactttgccatcgagcggggggacacagagggcaccttcggcctggactgggagccagacagcggccacgtgcggctgcggctgtgcaagaacctgtcctatgaagctgcccccagccatgaggtggtggtggtggtgcagagcgtggccaagctggtgggccctggccctggccctggggccacagccaccgtgacagtgctggtggagcgggtgatgcccccacccaagctggaccaggagagctatgaggcctctgtgcccatcagcgccccagctggcagcttcctgctgaccatccagcccagcgaccccatcagcaggaccctgcgcttcagcctggtgaatgattctgagggctggctgtgcatcgagaagttctctggagaggtgcacacagcccagagcctgcagggcgcccagcccggggacacctacacagtgctggtggaggcccaggacacagatgagccccggctgagcgccagcgcccccctggtgatccacttcctgaaggcccccccagccccagccctgaccctggcccctgtgcccagccagtacctgtgcaccccccggcaggaccacggcctcatcgtgtctggccccagcaaggaccctgacctggccagcggccacggcccctacagcttcaccctgggccccaaccccaccgtgcagagggactggaggctgcagaccctgaatggcagccacgcctacctgaccctggccctgcactgggtggagccccgggagcacatcatccctgtggtggtgagccacaatgcccagatgtggcagctgctggtgcgggtgattgtgtgccgctgcaatgtggagggccagtgcatgaggaaggtgggccgcatgaagggcatgcccaccaagctgtctgctgtgggcatcctggtgggcaccctggtggccatcggcatcttcctgatcctgatcttcacccactggaccatgagcaggaagaaggaccctgaccagcctgctgacagcgtgcccctgaaggccaccgtgtag

SEQ ID NO: 145643 - DNA, 2490 bp, synthetic construct
  misc_feature 1..2490: note = Description of Artificial Sequence: Synthetic coding sequence
  source 1..2490: mol_type = other DNA
atggtgcctgcctggctgtggctgctgtgtgtgtctgtgccccaggccctgcccaaggcccagcctgctgagctgtctgtggaggtgcctgaaaattatggaggcaacttccccctgtacctgaccaagctgcccctgccccgggagggcgctgagggccagatcgtgctgagcggggacagcggcaaggccacagagggcccctttgccatggaccctgattctggcttcctgctggtgacccgggccctggaccgggaggagcaggccgagtaccagctgcaggtgaccctggagatgcaggacggccacgtgctgtggggcccccagcctgtgctggtgcacgtgaaggatgaaaatgaccaggtgccccacttcagccaggccatctaccgggcccggctgagccggggcaccaggcctggcatccccttcctgttcctggaggccagtgacagagatgagcccggcacagccaacagcgacctgcgcttccacatcctgagccaggccccagcccagcccagcccagacatgttccagctggagccccggctgggcgccctggccctgagccccaagggcagcaccagcctggaccacgccctggagaggacctaccagctgctggtgcaggtgaaggacatgggagaccaggccagcggccaccaggccacagccaccgtggaggtgtccatcatcgagagcacctgggtgtccctggagcccatccacctggccgagaacctgaaggtgctgtacccccaccacatggcccaggtgcactggagcggaggagatgtgcactaccacctggagagccaccccccaggcccctttgaggtgaatgctgagggcaacctgtatgtgacccgggagctggaccgggaggcccaggccgagtacctgctgcaggtgcgggcccagaacagccacggggaggactatgctgcccccctggagctgcacgtgctggtgatggatgaaaatgacaacgtgcccatctgccccccccgggaccccaccgtgtccatccctgagctgagccccccaggcacagaggtgacccggctgtctgcagaagatgctgatgcccctggcagccccaacagccacgtggtgtaccagctgctgagccctgagccagaagatggagtggagggccgggccttccaggtggaccccaccagcggctctgtgaccctgggcgtgctgcccctgcgggccggccagaacatcctgctgctggtgctggccatggacctggccggggctgagggcggcttcagcagcacctgtgaggtggaggtggccgtgacagacatcaatgaccacgcccctgagttcatcaccagccagatcggccccatcagcctgcctgaagatgtggagcccggcaccctggtggccatgctgacagccattgatgctgacctggagcccgccttccggctgatggactttgccatcgagcggggggacacagagggcaccttcggcctggactgggagccagattctggccacgtgcggctgcggctgtgcaagaacctgtcctatgaggccgcccccagccatgaggtggtggtggtggtgcagagcgtggccaagctggtgggccctggccctggccctggggccacagccaccgtgacagtgctggtggagcgggtgatgcccccacccaagctggaccaggagagctatgaggcctctgtgcccatcagcgccccagctggcagcttcctgctgaccatccagcccagcgaccccatcagcaggaccctgcgcttcagcctggtgaatgacagcgagggctggctgtgcatcgagaagttcagcggggaggtgcacacagcccagagcctgcagggcgcccagcccggggacacctacacagtgctggtggaggcccaggacacagatgagccccggctgagcgccagcgcccccctggtgatccacttcctgaaggcccccccagccccagccctgaccctggcccctgtgcccagccagtacctgtgcaccccccggcaggaccacggcctgattgtgtctggccccagcaaggaccctgacctggccagcggccacggcccctacagcttcaccctgggccccaaccccaccgtgcagagggactggaggctgcagaccctgaatggcagccacgcctacctgaccctggccctgcactgggtggagccccgggagcacatcatccctgtggtggtgagccacaatgcccagatgtggcagctgctggtgcgggtcatcgtgtgccgctgcaatgtggagggccagtgcatgaggaaggtgggccgcatgaagggcatgcccaccaagctgtctgctgtgggcatcctggtgggcaccctggtggccatcggcatcttcctgatcctgatcttcacccactggaccatgagcaggaagaaggaccctgaccagcctgctgacagcgtgcccctgaaggccaccgtgtag

SEQ ID NO: 145644 - DNA, 2424 bp, synthetic construct
  misc_feature 1..2424: note = Description of Artificial Sequence: Synthetic coding sequence
  source 1..2424: mol_type = other DNA
atggtgcctgcctggctgtggctgctgtgtgtgtctgtgccccaggccctgcccaaggcccagcctgctgagctgtctgtggaggtgcctgaaaattatggaggcaacttccccctgtacctgaccaagctgcccctgccccgggagggcgctgagggccagatcgtgctgagcggggacagcggcaaggccacagagggcccctttgccatggaccctgattctggcttcctgctggtgacccgggccctggaccgggaggagcaggccgagtaccagctgcaggtgaccctggagatgcaggacggccacgtgctgtggggcccccagcctgtgctggtgcacgtgaaggatgaaaatgaccaggtgccccacttcagccaggccatctaccgggcccggctgagccggggcaccaggcctggcatccccttcctgttcctggaggccagtgacagagatgagcccggcacagccaacagcgacctgcgcttccacatcctgagccaggccccagcccagcccagcccagacatgttccagctggagccccggctgggcgccctggccctgagccccaagggcagcaccagcctggaccacgccctggagaggacctaccagctgctggtgcaggtgaaggacatgggagaccaggccagcggccaccaggccacagccaccgtggaggtgtccatcatcgagagcacctgggtgtccctggagcccatccacctggccgagaacctgaaggtgctgtacccccaccacatggcccaggtgcactggagcggaggagatgtgcactaccacctggagagccaccccccaggcccctttgaggtgaatgctgagggcaacctgtatgtgacccgggagctggaccgggaggcccaggccgagtacctgctgcaggtgcgggcccagaacagccacggggaggactatgctgcccccctggagctgcacgtgctggtgatggatgaaaatgacaacgtgcccatctgccccccccgggaccccaccgtgtccatccctgagctgagccccccaggcacagaggtgacccggctgtctgcagaagatgctgatgcccctggcagccccaacagccacgtggtgtaccagctgctgagccctgagccagaagatggagtggagggccgggccttccaggtggaccccaccagcggctctgtgaccctgggcgtgctgcccctgcgggccggccagaacatcctgctgctggtgctggccatggacctggccggggctgagggcggcttcagcagcacctgtgaggtggaggtggccgtgacagacatcaatgaccacgcccctgagttcatcaccagccagatcggccccatcagcctgcctgaagatgtggagcccggcaccctggtggccatgctgacagccattgatgctgacctggagcccgccttccggctgatggactttgccatcgagcggggggacacagagggcaccttcggcctggactgggagccagattctggccacgtgcggctgcggctgtgcaagaacctgtcctatgaggccgcccccagccatgaggtggtggtggtggtgcagagcgtggccaagctggtgggccctggccctggccctggggccacagccaccgtgacagtgctggtggagcgggtgatgcccccacccaagctggaccaggagagctatgaggcctctgtgcccatcagcgccccagctggcagcttcctgctgaccatccagcccagcgaccccatcagcaggaccctgcgcttcagcctggtgaatgacagcgagggctggctgtgcatcgagaagttcagcggggaggtgcacacagcccagagcctgcagggcgcccagcccggggacacctacacagtgctggtggaggcccaggacacagccctgaccctggcccctgtgcccagccagtacctgtgcaccccccggcaggaccacggcctgattgtgtctggccccagcaaggaccctgacctggccagcggccacggcccctacagcttcaccctgggccccaaccccaccgtgcagagggactggaggctgcagaccctgaatggcagccacgcctacctgaccctggccctgcactgggtggagccccgggagcacatcatccctgtggtggtgagccacaatgcccagatgtggcagctgctggtgcgggtcatcgtgtgccgctgcaatgtggagggccagtgcatgaggaaggtgggccgcatgaagggcatgcccaccaagctgtctgctgtgggcatcctggtgggcaccctggtggccatcggcatcttcctgatcctgatcttcacccactggaccatgagcaggaagaaggaccctgaccagcctgctgacagcgtgcccctgaaggccaccgtgtag

SEQ ID NO: 145645 - DNA, 2382 bp, synthetic construct
  misc_feature 1..2382: note = Description of Artificial Sequence: Synthetic coding sequence
  source 1..2382: mol_type = other DNA
atggtgcctgcctggctgtggctgctgtgtgtgtctgtgccccaggccctgcccaaggcccagcctgctgagctgtctgtggaggtgcctgaaaattatggaggcaacttccccctgtacctgaccaagctgcccctgccccgggagggcgctgagggccagatcgtgctgagcggggagcaggccgagatgcaggacggccacgtgctgtggggcccccagcctgtgctggtgcacgtgaaggatgaaaatgaccaggtgccccacttcagccaggccatctaccgggcccggctgagccggggcaccaggcctggcatccccttcctgttcctggaggccagtgacagagatgagcccggcacagccaacagcgacctgcgcttccacatcctgagccaggccccagcccagcccagcccagacatgttccagctggagccccggctgggcgccctggccctgagccccaagggcagcaccagcctggaccacgccctggagaggacctaccagctgctggtgcaggtgaaggacatgggagaccaggccagcggccaccaggccacagccaccgtggaggtgtccatcatcgagagcacctgggtgtccctggagcccatccacctggccgagaacctgaaggtgctgtacccccaccacatggcccaggtgcactggagcggaggagatgtgcactaccacctggagagccaccccccaggcccctttgaggtgaatgctgagggcaacctgtatgtgacccgggagctggaccgggaggcccaggccgagtacctgctgcaggtgcgggcccagaacagccacggggaggactatgctgcccccctggagctgcacgtgctggtgatggatgaaaatgacaacgtgcccatctgccccccccgggaccccaccgtgtccatccctgagctgagccccccaggcacagaggtgacccggctgtctgcagaagatgctgatgcccctggcagccccaacagccacgtggtgtaccagctgctgagccctgagccagaagatggagtggagggccgggccttccaggtggaccccaccagcggctctgtgaccctgggcgtgctgcccctgcgggccggccagaacatcctgctgctggtgctggccatggacctggccggggctgagggcggcttcagcagcacctgtgaggtggaggtggccgtgacagacatcaatgaccacgcccctgagttcatcaccagccagatcggccccatcagcctgcctgaagatgtggagcccggcaccctggtggccatgctgacagccattgatgctgacctggagcccgccttccggctgatggactttgccatcgagcggggggacacagagggcaccttcggcctggactgggagccagattctggccacgtgcggctgcggctgtgcaagaacctgtcctatgaggccgcccccagccatgaggtggtggtggtggtgcagagcgtggccaagctggtgggccctggccctggccctggggccacagccaccgtgacagtgctggtggagcgggtgatgcccccacccaagctggaccaggagagctatgaggcctctgtgcccatcagcgccccagctggcagcttcctgctgaccatccagcccagcgaccccatcagcaggaccctgcgcttcagcctggtgaatgacagcgagggctggctgtgcatcgagaagttcagcggggaggtgcacacagcccagagcctgcagggcgcccagcccggggacacctacacagtgctggtggaggcccaggacacagatgagccccggctgagcgccagcgcccccctggtgatccacttcctgaaggcccccccagccccagccctgaccctggcccctgtgcccagccagtacctgtgcaccccccggcaggaccacggcctgattgtgtctggccccagcaaggaccctgacctggccagcggccacggcccctacagcttcaccctgggccccaaccccaccgtgcagagggactggaggctgcagaccctgaatggcagccacgcctacctgaccctggccctgcactgggtggagccccgggagcacatcatccctgtggtggtgagccacaatgcccagatgtggcagctgctggtgcgggtcatcgtgtgccgctgcaatgtggagggccagtgcatgaggaaggtgggccgcatgaagggcatgcccaccaagctgtctgctgtgggcatcctggtgggcaccctggtggccatcggcatcttcctgatcctgatcttcacccactggaccatgagcaggaagaaggaccctgaccagcctgctgacagcgtgcccctgaaggccaccgtgtag

SEQ ID NO: 145646 - DNA, 2499 bp, synthetic construct
  misc_feature 1..2499: note = Description of Artificial Sequence: Synthetic coding sequence
  source 1..2499: mol_type = other DNA
atgatcctgcaggcccacctgcacagcctgtgcctgctgatgctgtacctggccaccggctacggccaggagggcaagttcagcggccccctgaagcccatgaccttcagcatctatgagggccaggagcccagccagatcatcttccagttcaaggccaaccccccagctgtgacctttgagctgactggagaaacagacaacatcttcgtcatcgagcgggagggcctgctgtactacaacagagccctggaccgggagaccaggagcacccacaacctgcaggtggccgccctggatgccaacggcatcatcgtggagggccctgtgcccatcaccatcaaggtgaaggacatcaatgacaaccggcccaccttcctgcagagcaaatatgagggctctgtgcggcagaacagcaggcctgggaagcccttcctgtatgtgaatgccacagacctggatgatcctgccacccccaacggccagctgtactaccagatcgtcatccagctgcccatgatcaacaacgtgatgtacttccagatcaacaacaagacaggagccatcagcctgacccgggagggcagccaggagctgaacccagccaagaaccccagctacaacctggtgatctctgtgaaggacatgggcggccagagtgaaaattccttcagtgacaccacctctgtggacatcatcgtgacagagaacatctggaaggcccccaagcctgtggagatggtggagaacagcacagacccccaccccatcaagatcacccaggtgcgctggaatgaccccggggcccagtacagcctggtggacaaggagaagctgccccgcttccccttcagcattgaccaggagggggacatctacgtgacccagcccctggaccgggaggagaaggatgcctacgtgttctatgctgtggccaaggatgaatatggcaagcccctgagctaccccctggagatccacgtgaaggtgaaggacatcaatgacaacccccccacctgccccagccctgtgacagtgtttgaggtgcaggagaatgaaaggctgggcaacagcatcggcaccctgacagcccatgacagagatgaggagaacacagccaacagcttcctgaactacagaattgtggagcagacccccaagctgcccatggatggcctcttcctgatccagacctacgccggcatgctgcagctggccaagcagagcctgaagaagcaggacaccccccagtacaacctgaccatcgaggtgtctgacaaggacttcaagaccctgtgctttgtgcagatcaacgtcatcgacatcaatgaccagatccccatctttgagaagagtgactatggcaacctgaccctggccgaggacaccaacatcggcagcaccatcctgaccatccaggccacagatgctgatgagcccttcaccggcagcagcaagatcctgtaccacatcatcaagggggacagcgagggccgcctgggcgtggacacagacccccacaccaacacaggctacgtgatcatcaagaagcccctggactttgaaacagctgctgtgagcaacatcgtgttcaaggccgagaaccctgagcccctggtgtttggagtgaagtacaatgccagcagctttgccaagttcaccctcatcgtgacagatgtgaatgaggccccccagttcagccagcacgtgttccaggccaaggtgtctgaagatgtggccatcggcaccaaggtgggcaatgtgacagccaaggaccctgagggcctggacatctcctacagcctgcggggggacacccggggctggctgaagattgaccacgtgactggagagatcttctctgtggcccccctggaccgggaggccggcagcccctacagagtgcaggtggtggccacagaggtgggcggcagcagcctgagctctgtgtctgagttccacctgatcctgatggatgtgaatgacaaccccccccggctggccaaggactacacaggcctcttcttctgccaccccctgagcgcccctggcagcctcatctttgaggccacagatgatgaccagcacctgttccggggcccccacttcaccttcagcctgggcagcggcagcctgcagaatgactgggaggtgtccaagatcaatggcacccacgcccggctgagcaccaggcacacagaatttgaggagcgggagtatgtggtgctgatccgcatcaatgatggcggccggccccccctggagggcatcgtgtccctgcctgtgaccttctgcagctgtgtggagggcagctgcttccggcctgctggccaccagacaggcatccccaccgtgggcatggctgtgggcatcctgctgaccaccctgctggtgattggcatcatcctggccgtggtgttcatccgcatcaagaaggacaagggcaaggacaacgtggagagcgcccaggccagcgaggtgaagcccctgcggagctag

SEQ ID NO: 145647 - DNA, 2499 bp, synthetic construct; identical to SEQ ID NO: 145646
  misc_feature 1..2499: note = Description of Artificial Sequence: Synthetic coding sequence
  source 1..2499: mol_type = other DNA

SEQ ID NO: 145648 - DNA, 444 bp, synthetic construct
  misc_feature 1..444: note = Description of Artificial Sequence: Synthetic coding sequence
  source 1..444: mol_type = other DNA
atgatcctgcaggcccacctgcacagcctgtgcctgctgatgctgtacctggccaccggctacggccaggagggcaagttcagcggccccctgaagcccatgaccttcagcatctatgagggccaggagcccagccagatcatcttccagttcaaggccaaccccccagctgtgacctttgagctgactggagaaacagacaacatcttcgtcatcgagcgggagggcctgctgtactacaacagagccctggaccgggagaccaggagcacccacaacctgcaggtggccgccctggatgccaacggcatcatcgtggagggccctgtgcccatcaccatcaaggtgaaggacatcaatgacaaccggcccaccttcctgcagagcaaatatgagggctctgtgcggcagaacagcaggcctgggaagcccttcctgtactag

SEQ ID NO: 145649 - DNA, 2373 bp, synthetic construct
  misc_feature 1..2373: note = Description of Artificial Sequence: Synthetic coding sequence
  source 1..2373: mol_type = other DNA
atgaagatcaccagcaccagctgcatctgccctgtgctggtgtgcctgtgctttgtgcagcgctgctatggaacagcccaccacagcagcatcaaggtgatgaggaaccagaccaagcacattgaaggagaaacagaggtgcaccaccggcccaagaggggctgggtgtggaaccagttctttgtgctggaggagcacatgggccctgacccccagtatgtgggcaagctgcacagcaacagcgacaagggagatggctctgtgaagtacatcctgactggagagggcgccggcaccatcttcatcattgatgacaccactggagacatccacagcaccaagagcctggaccgggagcagaagacccactacgtgctgcacgcccaggccatcgacaggaggaccaacaagcccctggagcctgagagcgagttcatcatcaaggtgcaggacatcaatgacaatgcccccaagttcacagatggcccctacatcgtgacagtgcctgagatgtctgacatgggcacctctgtgctgcaggtgacagccacagatgctgatgaccccacctacggcaacagcgcccgggtggtgtacagcatcctgcagggccagccctacttctctgtggaccccaagacaggagtcatcagaacagccctgcacaacatggaccgggaggcccgggagcactacagcgtggtgatccaggccaaggacatggccggccaggtgggcggcctgagcggcagcaccaccgtgaacatcaccctgacagatgtgaatgacaaccccccacgcttcccccagaagcactaccagctgtatgtgcctgagagcgcccaggtgggcagcgctgtgggcaagatcaaggccaatgatgctgacaccggcagcaatgctgacatgacctacagcatcatcaatggagatggcatgggcatcttcagcatcagcacagacaaggagacccgggagggcatcctgagcctgaagaagcccctgaactatgagaagaagaagagctacaccctgaacattgaaggagccaacacccacctggacttccgcttcagccacctgggccccttcaaggatgccaccatgctgaagatcatcgtgggagatgtggatgagcccccactcttctccatgcccagctacctgatggaggtgtatgaaaatgccaagattggcaccgtggtgggcaccgtgctggcccaggaccctgacagcaccaacagcctggtgcgctacttcatcaactacaacgtggaggatgaccgcttcttcaacattgatgccaacacaggcaccatccgcaccaccaaggtgctggaccgggaggagaccccctggtacaacatcaccgtgacagccagcgagattgacaacccagacctgctgagccacgtgacagtgggcatccgggtgctggatgtgaatgacaaccccccagagctggcccgggagtatgacatcatcgtgtgtgagaacagcaagccaggccaggtgatccacaccatcagcgccacagacaaggatgactttgccaacggcccccgcttcaacttcttcctggatgagcggctgcctgtgaaccccaacttcaccctgaaggacaatgaagacaacacagccagcatcctgaccaggagaagacgcttcagcaggacagtgcaggatgtgtactacctgcccatcatgatcagtgatggcggcatccccagcctgagcagcagcagcaccctgaccatccgggtgtgtgcctgtgaaagagatggccgggtgaggacctgccacgccgaggccttcctgagcagcgctggcctgagcactggagccctgattgccatcctgctgtgtgtgctgatcctgctggccatcgtggtgctcttcatcaccctgcggcgcagcaagaaggagcccctcatcatcagtgaagaagatgtgagagaaaatgtggtgacctatgatgatgagggcggcggggaggaggacacagaggcctttgacatcacagccctgaggaaccccagcgctgctgaggagctgaagtaccgccgggacatccggcctgaggtgaagctgacccccaggcaccagaccagcagcaccctggagagcattgatgtgcaggagttcatcaagcagaggctggccgaggccgacctggaccccagcgtgcccccctatgacagcctgcagacctacgcctatgagggccagaggtctgaggccggcagcatcagcagcctggacagcgccaccacccagagcgaccaggactaccactacctgggggactggggccctgagttcaagaagctggccgagctgtatggagaaattgagagcgagaggaccacctag

SEQ ID NO: 145650 - DNA, 2373 bp, synthetic construct; identical to SEQ ID NO: 145649
  misc_feature 1..2373: note = Description of Artificial Sequence: Synthetic coding sequence
  source 1..2373: mol_type = other DNA

SEQ ID NO: 145651 - DNA, 1725 bp, synthetic construct
  misc_feature 1..1725: note = Description of Artificial Sequence: Synthetic coding sequence
  source 1..1725: mol_type = other DNA
atgaagatcaccagcaccagctgcatctgccctgtgctggtgtgcctgtgctttgtgcagcgctgctatggaacagcccaccacagcagcatcaaggtgatgaggaaccagaccaagcacattgaaggagaaacagaggtgcaccaccggcccaagaggggctgggtgtggaaccagttctttgtgctggaggagcacatgggccctgacccccagtatgtgggcaagctgcacagcaacagcgacaagggagatggctctgtgaagtacatcctgactggagagggcgccggcaccatcttcatcattgatgacaccactggagacatccacagcaccaagagcctggaccgggagcagaagacccactacgtgctgcacgcccaggccatcgacaggaggaccaacaagcccctggagcctgagagcgagttcatcatcaaggtgcaggacatcaatgacaatgcccccaagttcacagatggcccctacatcgtgacagtgcctgagatgtctgacatgggcacctctgtgctgcaggtgacagccacagatgctgatgaccccacctacggcaacagcgcccgggtggtgtacagcatcctgcagggccagccctacttctctgtggaccccaagacaggagtcatcagaacagccctgcacaacatggaccgggaggcccgggagcactacagcgtggtgatccaggccaaggacatggccggccaggtgggcggcctgagcggcagcaccaccgtgaacatcaccctgacagatgtgaatgacaaccccccacgcttcccccagaagcactaccagctgtatgtgcctgagagcgcccaggtgggcagcgctgtgggcaagatcaaggccaatgatgctgacaccggcagcaatgctgacatgacctacagcatcatcaatggagatggcatgggcatcttcagcatcagcacagacaaggagacccgggagggcatcctgagcctgaagaagcccctgaactatgagaagaagaagagctacaccctgaacattgaaggagccaacacccacctggacttccgcttcagccacctgggccccttcaaggatgccaccatgctgaagatcatcgtgggagatgtggatgagcccccactcttctccatgcccagctacctgatggaggtgtatgaaaatgccaagattggcaccgtggtgggcaccgtgctggcccaggaccctgacagcaccaacagcctggtgcgctacttcatcaactacaacgtggaggatgaccgcttcttcaacattgatgccaacacaggcaccatccgcaccaccaaggtgctggaccgggaggagaccccctggtacaacatcaccgtgacagccagcgagattgacaacccagacctgctgagccacgtgacagtgggcatccgggtgctggatgtgaatgacaaccccccagagctggcccgggagtatgacatcatcgtgtgtgagaacagcaagccaggccaggtgatccacaccatcagcgccacagacaaggatgactttgccaacggcccccgcttcaacttcttcctggatgagcggctgcctgtgaaccccaacttcaccctgaaggacaatgaggccgccgcccccagccccagcggctttgtgcacgcccgggagatgggcgtgtgtggccctgccatgcagaagcccagctgcccccggctggtgtag

SEQ ID NO: 145652 - DNA, 2373 bp, synthetic construct; identical to SEQ ID NO: 145649
  misc_feature 1..2373: note = Description of Artificial Sequence: Synthetic coding sequence
  source 1..2373: mol_type = other DNA

SEQ ID NO: 145653 - DNA, 2373 bp, synthetic construct; identical to SEQ ID NO: 145649
  misc_feature 1..2373: note = Description of Artificial Sequence: Synthetic coding sequence
  source 1..2373: mol_type = other DNA

SEQ ID NO: 145654 - DNA, 2319 bp, synthetic construct
  misc_feature 1..2319: note = Description of Artificial Sequence: Synthetic coding sequence
  source 1..2319: mol_type = other DNA
atgaactgctacctgctgctgcgcttcatgctgggcatccccctgctgtggccctgcctgggcgccacagagaacagccagaccaagaaggtgaagcagcctgtgcgcagccacctgcgggtgaagaggggctgggtgtggaaccagttctttgtgcctgaggagatgaacaccaccagccaccacatcggccagctgcggagtgacctggacaatggaaacaacagcttccagtacaagctgctgggcgctggggccggcagcaccttcatcattgatgagaggactggagacatctatgccatccagaagctggaccgggaggagaggagcctgtacatcctgcgggcccaggtgattgacatcgccaccggccgggctgtggagcctgagagcgagtttgtgatcaaggtgtctgacatcaatgacaatgagcccaagttcctggatgagccctatgaggccatcgtgcctgagatgagccctgagggcaccctggtgatccaggtgacagccagtgatgctgatgaccccagcagcggcaacaatgcccggctgctgtacagcctgctgcagggccagccctacttctctgtggagcccaccactggagtcatccgcatcagcagcaagatggaccgggagctgcaggatgagtactgggtgatcatccaggccaaggacatgattggccagcccggggccctgagcggcaccacctctgtgctgatcaagctgagtgatgtgaatgacaacaagcccatcttcaaggagagcctgtaccgcctgactgtgtctgagagcgcccccaccggcaccagcatcggcaccatcatggcctatgacaatgacattggagaaaatgctgagatggactacagcattgaagaagatgacagccagacctttgacatcatcaccaaccacgagacccaggagggcatcgtcatcctgaagaagaaggtggactttgagcaccagaaccactacggcatccgggccaaggtgaagaaccaccacgtgcctgagcagctgatgaagtaccacacagaggccagcaccaccttcatcaagatccaggtggaggatgtggatgagcccccactcttcctgctgccctactacgtgtttgaggtgtttgaggagaccccccagggcagctttgtgggcgtggtgtctgccacagatcctgacaacaggaagagccccatccgctacagcatcaccaggagcaaggtgttcaacatcaatgacaatggcaccatcaccaccagcaacagcctggaccgggagatcagcgcctggtacaacctgagcatcacagccacagagaagtacaacatcgagcagatcagcagcatccccctgtatgtgcaggtgctgaacatcaatgaccacgcccctgagttcagccagtactatgagacctacgtgtgtgaaaatgccggcagcggccaggtgatccagaccatctctgctgtggacagagatgagagcattgaggagcaccacttctacttcaacctgtctgtggaggacaccaacaacagcagcttcaccatcatcgacaaccaggacaacacagctgtgatcctgaccaacagaacaggcttcaacctgcaggaggagcccgtcttctacatcagcatcctgattgctgacaatggcatccccagcctgaccagcaccaacaccctgaccatccacgtgtgtgactgtggggacagcggcagcacccagacctgccagtaccaggagctggtgctgtccatgggcttcaagacagaggtgatcatcgccatcctgatctgcatcatgatcatcttcggcttcatcttcctgaccctgggcctgaagcagaggaggaagcagatcctcttccctgagaagtctgaggacttccgggagaacatcttccagtatgatgatgaaggaggaggagaggaggacacagaggcctttgatattgctgagctgcggagcagcaccatcatgagggagaggaagaccaggaagaccaccagcgctgagatccgcagcctgtaccggcagagcctgcaggtgggccctgacagcgccatcttcaggaagttcatcctggagaagctggaggaggccaacacagacccctgtgcccccccatttgacagcctgcagacctacgcctttgagggcaccggcagcctggccggcagcctgagcagcctggagagcgctgtgtctgaccaggatgagagctatgactacctgaatgagctgggcccccgcttcaagaggctggcctgcatgtttggcagcgctgtgcagagcaacaactag

SEQ ID NO: 145655 - DNA, 1173 bp, synthetic construct
  misc_feature 1..1173: note = Description of Artificial Sequence: Synthetic coding sequence
  source 1..1173: mol_type = other DNA
atgaacaccaccagccaccacatcggccagctgcggagtgacctggacaatggaaacaacagcttccagtacaagctgctgggcgctggggccggcagcaccttcatcattgatgagaggactggagacatctatgccatccagaagctggaccgggaggagaggagcctgtacatcctgcgggcccaggtgattgatattgccaccggccgggctgtggagcctgagagcgagtttgtgatcaaggtgtctgacatcaatgacaatgagcccaagttcctggatgagccctatgaggccatcgtgcctgagatgagccctgagggcaccctggtgatccaggtgacagccagtgatgctgatgaccccagcagcggcaacaatgcccggctgctgtacagcctgctgcagggccagccctacttctctgtggagcccaccaccggggtcatccgcatcagcagcaagatggaccgggagctgcaggatgagtactgggtgatcatccaggccaaggacatgattggccagcccggggccctgagcggcaccacctctgtgctgatcaagctgagtgatgtgaatgacaacaagcccatcttcaaggagagcctgtaccgcctgactgtgtctgagagcgcccccaccggcaccagcatcggcaccatcatggcctatgacaatgacatcggggagaatgctgagatggactacagcattgaggaggatgacagccagacctttgacatcatcaccaaccacgagacccaggagggcatcgtcatcctgaagaagaaggtggactttgagcaccagaaccactacggcatccgggccaaggtgaagaaccaccacgtgcctgagcagctgatgaagtaccacacagaggccagcaccaccttcatcaagatccaggtggaggatgtggatgagcccccactcttcctgctgccctactacgtgtttgaggtgtttgaggagaccccccagggcagctttgtgggcgtggtgtctgccacagatcctgacaacaggaagagccccatccgctacagcatcaccaggagcaaggtgttcaacatcaatgacaatggcaccatcaccaccagcaacagcctggaccgggagatcagcgcctggtacaacctgagcatcacagccacagagaagtag

SEQ ID NO: 145656 - DNA, 1473 bp, synthetic construct
  misc_feature 1..1473: note = Description of Artificial Sequence: Synthetic coding sequence
  source 1..1473: mol_type = other DNA
atgaactgctacctgctgctgcgcttcatgctgggcatccccctgctgtggccctgcctgggcgccacagagaacagccagaccaagaaggtgaagcagcctgtgcgcagccacctgcgggtgaagaggggctgggtgtggaaccagttctttgtgcctgaggagatgaacaccaccagccaccacatcggccagctgcggagtgacctggacaatggaaacaacagcttccagtacaagctgctgggcgctggggccggcagcaccttcatcattgatgagaggactggagacatctatgccatccagaagctggaccgggaggagaggagcctgtacatcctgcgggcccaggtgattgacatcgccaccggccgggctgtggagcctgagagcgagtttgtgatcaaggtgtctgacatcaatgacaatgagcccaagttcctggatgagccctatgaggccatcgtgcctgagatgagccctgagggcaccctggtgatccaggtgacagccagtgatgctgatgaccccagcagcggcaacaatgcccggctgctgtacagcctgctgcagggccagccctacttctctgtggagcccaccactggagtcatccgcatcagcagcaagatggaccgggagctgcaggatgagtactgggtgatcatccaggccaaggacatgattggccagcccggggccctgagcggcaccacctctgtgctgatcaagctgagtgatgtgaatgacaacaagcccatcttcaaggagagcctgtaccgcctgactgtgtctgagagcgcccccaccggcaccagcatcggcaccatcatggcctatgacaatgacattggagaaaatgctgagatggactacagcattgaagaagatgacagccagacctttgacatcatcaccaaccacgagacccaggagggcatcgtcatcctgaagaagaaggtggactttgagcaccagaaccactacggcatccgggccaaggtgaagaaccaccacgtgcctgagcagctgatgaagtaccacacagaggccagcaccaccttcatcaagatccaggtggaggatgtggatgagcccccactcttcctgctgccctactacgtgtttgaggtgtttgaggagaccccccagggcagctttgtgggcgtggtgtctgccacagatcctgacaacaggaagagccccatccgctacagcatcaccaggagcaaggtgttcaacatcaatgacaatggcaccatcaccaccagcaacagcctggaccgggagatcagcgcctggtacaacctgagcatcacagccacagagaagtacaacatcgagcagatcagcagcatccccctgtatgtgcaggtgctgaacatcaatgaccacgcccctgagttcagccagtactatgagacctacgtgtgtgaaaatgccggcagcggccagggcctcttcttctag

SEQ ID NO: 145657 - DNA, 2406 bp, synthetic construct
  misc_feature 1..2406: note = Description of Artificial Sequence: Synthetic coding sequence
  source 1..2406: mol_type = other DNA
atgtggaccagcggccgcatgagcaatgccaagaactggctgggcctgggcatgagcctgtacttctggggcctgatggacctgaccaccaccgtgctgagtgacacccccaccccccagggcgagctggaggccctgctgagtgacaagccccagagccaccagaggaccaagaggtcctgggtgtggaaccagttctttgtgctggaggagtacacaggaacagaccccctgtatgtgggcaagctgcacagcgacatggacagaggagatggcagcatcaagtacatcctgtctggagagggcgccggcatcgtgttcaccattgatgacaccactggagacatccacgccatccagaggctggaccgggaggagcgggcccagtacaccctgcgggcccaggccctggacagaagaacaggccggcccatggagcctgagagcgagttcatcatcaagatccaggacatcaatgacaatgagcccaagttcctggatggcccctacgtggccaccgtgcctgagatgagccctgtgggcaccagcgtcatccaggtgacagccacagatgctgatgaccccacctacggcaacagcgcccgggtggtgtacagcatcctgcagggccagccctacttctctgtggacagcaagacaggagtcatcagaacagccctgatgaacatggaccgggaggccaaggagtactatgaggtgatcatccaggccaaggacatgggcggccagctgggcggcctggccggcaccaccaccgtgaacatcaccctgagtgatgtgaatgacaaccccccacgcttcccccagaagcactaccagatgtctgtgctggagagcgcccccatcagcagcacagtgggccgggtgtttgccaaggacctggatgagggcatcaatgctgagatgaagtacaccatcgtggatggagatggagcagatgcctttgacatcagcacagaccccaacttccaggtgggcatcatcaccgtgaagaagcccctgagctttgagagcaagaagagctacaccctgaaggtggagggcgccaacccccacctggagatgaggttcctgaacctgggccccttccaggacaccaccaccgtgcacatctctgtggaggatgtggatgagccccctgtgtttgagcccggcttctactttgtggaggtgcctgaagatgtggccatcggcaccaccatccagatcatcagcgccaaggaccctgatgtgaccaacaacagcatccgctacagcattgacaggagcagtgaccccggccgcttcttctacgtggacatcaccactggagccctgatgacagcccggcccctggaccgggaggagttctcctggcacaacatcaccgtgctggccatggagatgaacaaccccagccaggtgggctctgtgcctgtgaccatcaaggtgctggatgtgaatgacaatgcccctgagttcccccgcttctatgaggcctttgtgtgtgaaaatgccaaggccggccagctgatccagacagtgtctgctgtggaccaggatgaccccagaaatggccagcacttctactacagcctggcccctgaggccgccaacaaccccaacttcaccatccgggacaaccaggacaacacagcccgcatcctgacccggcgcagcggcttccggcagcaggagcagagcgtcttccacctgcccatcctgattgctgacagcggccagcctgtgctgagcagcacaggcaccctgaccatccaggtgtgcagctgtgatgatgatggccacgtgatgagctgcagccctgaggcctacatgctgcctgtgtccctgagcagaggagccctgattgccatcctggcctgcatctttgtgctgctggtgctggtgctgctgatcctgtccatgagaagacacaggaagcagccctacatcattgatgatgaggagaacatccacgagaacatcgtgcgctatgatgatgaaggaggaggagaggaggacacagaggcctttgatattgctgccatgtggaacccccgggaggcccaggccggggccgcccccaagacccggcaggacatgctgcctgagattgagagcctgagccgctacgtgccccagacctgtgctgtgaacagcacagtgcacagctatgtgctggccaagctgtatgaagctgacatggacctgtgggcccccccatttgacagcctgcagacctacatgtttgaaggagatggctctgtggccggcagcctgagcagcctgcagagcgccaccagtgacagcgagcagagctttgacttcctgacagactggggcccccgcttcaggaagctggccgagctgtatggagccagcgagggccctgcccccctgtggtag

SEQ ID NO: 145658 - DNA, 2406 bp, synthetic construct; identical to SEQ ID NO: 145657
  misc_feature 1..2406: note = Description of Artificial Sequence: Synthetic coding sequence
  source 1..2406: mol_type = other DNA

SEQ ID NO: 145659 - DNA, 2406 bp, synthetic construct; identical to SEQ ID NO: 145657
  misc_feature 1..2406: note = Description of Artificial Sequence: Synthetic coding sequence
  source 1..2406: mol_type = other DNA

SEQ ID NO: 145660 - DNA, 2487 bp, synthetic construct
  misc_feature 1..2487: note = Description of Artificial Sequence: Synthetic coding sequence
  source 1..2487: mol_type = other DNA
atgaggcccaggcctgagggccggggcctgcgggccggcgtggccctgagccctgccctgctgctgctgctgctgctgcccccaccacccaccctgctgggccgcctgtgggccgccggcacccccagccccagcgcccctggggcccggcaggatggagccctgggcgccggccgggtgaagaggggctgggtgtggaaccagttctttgtggtggaggagtacacaggaacagagcccctgtatgtgggcaagatccacagcgacagtgatgaaggagatggagccatcaagtacaccatcagcggggagggcgccggcaccatcttcctgattgatgagctgaccggggacatccacgccatggagcggctggaccgggagcagaagaccttctacaccctgcgggcccaggcccgggaccgggccaccaaccggctgctggagcctgagagcgagttcatcatcaaggtgcaggacatcaatgacagcgagccccgcttcctgcacggcccctacatcggctctgtggccgagctgagccccaccggcacctctgtgatgcaggtgatggccagtgatgctgatgaccccacctacggcagcagcgcccggctggtgtacagcgtgctggatggagagcaccacttcaccgtggaccccaagacaggagtcatcagaacagctgtgcctgacctggaccgggagagccaggagagatatgaggtggtgatccaggccacagacatggccggccagctgggcggcctgagcggcagcaccaccgtgaccatcgtggtgacagatgtgaatgacaaccccccacgcttcccccagaagatgtaccagttcagcatccaggagagcgcccccatcggcacagctgtgggccgggtgaaggccgaggacagtgatgtgggggagaacacagacatgacctaccacctgaaggatgagagcagcagtggaggagatgtgttcaaggtgaccacagacagcgacacccaggaggccatcatcgtggtgcagaagaggctggactttgagagccagcctgtgcacacagtcatcctggaggccctgaacaagtttgtggaccccaggtttgctgacctgggcaccttccgggaccaggccatcgtgcgggtggccgtgacagatgtggatgagcccccagagttccggccccccagcggcctgctggaggtgcaggaggatgcccaggtgggcagcctggtgggcgtggtgacagcccgggaccctgatgctgccaacagacctgtgcgctatgccatcgaccgggagagtgacctggaccagatctttgatattgatgctgacaccggggccatcgtgacaggcaagggcctggaccgggagacagctggctggcacaacatcaccgtgctggccatggaggccgacaaccacgcccagctgagccgggccagcctgcgcatccgcatcctggatgtgaatgacaaccccccagagctggccaccccctatgaagctgctgtgtgtgaagatgccaagccaggccagctgatccagaccatctctgtggtggacagagatgagccccagggcggccaccgcttctacttccggctggtgcctgaggcccccagcaacccccacttcagcctgctggacatccaggacaacacagctgctgtgcacacccagcacgtgggcttcaaccggcaggagcaggatgtgttcttcctgcccatcctggtggtggacagcggcccccccaccctgagcagcacaggcaccctgaccatccgcatctgtggctgtgacagcagcggcaccatccagagctgcaacaccacagcctttgtgatggccgccagcctgagccctggggccctgattgccctgctggtgtgtgtgctgatcctggtggtgctggtgctgctgatcctgaccctgcggcggcaccacaagagccacctgagcagtgatgaagatgaggacatgagggacaacgtcatcaagtacaatgatgagggcggcggggagcaggacacagaggcctatgacatgtctgccctgcggagcctgtatgactttggagagctgaagggaggagatggcggcggcagcgctgggggcggggccggcggcggcagcggcggcggggccggcagccccccccaggcccacctgcccagcgagcggcacagcctgccccagggcccccccagccctgagccagacttctctgtgttccgggacttcatcagcaggaaggtggccctggctgatggagacctgtctgtgcccccctatgatgccttccagacctacgcctttgaaggagctgacagccctgctgccagcctgagcagcctgcacagcggcagcagcggcagcgagcaggactttgcctacctgagctcctggggcccccgcttccggcccctggccgccctgtatgccggccacagaggagatgatgaggcccaggccagctag

SEQ ID NO: 145661 - DNA, 2487 bp, synthetic construct; identical to SEQ ID NO: 145660
  misc_feature 1..2487: note = Description of Artificial Sequence: Synthetic coding sequence
  source 1..2487: mol_type = other DNA

SEQ ID NO: 145662 - DNA, 2490 bp, synthetic construct
  misc_feature 1..2490: note = Description of Artificial Sequence: Synthetic coding sequence
  source 1..2490: mol_type = other DNA
atgggcctgccccggggccccctggccagcctgctgctgctgcaggtgtgctggctgcagtgtgccgccagcgagccctgcagagctgtgttccgggaggccgaggtgaccctggaggccggcggcgctgagcaggagcccggccaggccctgggcaaggtgttcatgggctgccccggccaggagcccgccctcttcagcacagacaatgatgacttcaccgtgagaaatggagagaccgtgcaggagcggcgcagcctgaaggagaggaaccccctgaagatcttccccagcaagaggatcctgcggcggcacaagagggactgggtggtggcccccatctctgtgcctgaaaatggcaagggccccttcccccagaggctgaaccagctgaagagcaacaaggaccgggacaccaagatcttctacagcatcaccggccctggagctgacagccccccagagggcgtgtttgctgtggagaaggagaccggctggctgctgctgaacaagcccctggaccgggaggagatcgccaagtatgagctgtttggacatgctgtgtctgaaaatggagcctctgtggaggaccccatgaacatcagcatcatcgtgacagaccagaatgaccacaagcccaagttcacccaggacaccttccggggctctgtgctggagggcgtgctgcccggcacctctgtgatgcaggtgacagccacagatgaagatgatgccatctacacctacaacggggtggtggcctacagcatccacagccaggagcccaaggacccccatgacctgatgttcaccatccacaggagcacaggcaccatcagcgtcatcagcagcggcctggaccgggagaaggtgcctgagtacaccctgaccatccaggccacagacatggatggagatggcagcaccaccacagctgtggccgtggtggagatcctggatgccaatgacaatgcccccatgtttgacccccagaagtatgaggcccacgtgcctgaaaatgctgtgggccacgaggtgcagaggctgactgtgacagacctggatgcccccaacagccctgcctggagggccacctacctgatcatgggaggagatgatggagaccacttcaccatcaccacccaccctgagagcaaccagggcatcctgaccaccaggaagggcctggactttgaggccaagaaccagcacaccctgtatgtggaggtgaccaatgaggccccctttgtgctgaagctgcccaccagcacagccaccatcgtggtgcacgtggaggatgtgaatgaggcccctgtgtttgtgccccccagcaaggtggtggaggtgcaggagggcatccccactggagagcctgtgtgtgtgtacacagcagaagatcctgacaaggagaaccagaagatctcctaccgcatcctgcgggaccctgctggctggctggccatggaccctgacagcggccaggtgacagctgtgggcaccctggaccgggaggatgagcagtttgtgaggaacaacatctatgaggtgatggtgctggccatggacaatggcagcccccccaccactggaacaggcaccctgctgctgaccctgattgatgtgaatgaccacggccctgtgcctgagccccggcagatcaccatctgcaaccagagccctgtgcggcaggtgctgaacatcacagacaaggacctgagcccccacaccagccccttccaggcccagctgacagatgacagcgacatctactggacagctgaggtgaatgaggagggggacacagtggtgctgagcctgaagaagttcctgaagcaggacacctatgatgtgcacctgagcctgagtgaccacggcaacaaggagcagctgaccgtcatccgggccaccgtgtgtgactgccacggccacgtggagacctgccccggcccctggaagggcggcttcatcctgcctgtgctgggcgctgtgctggccctgctcttcctgctgctggtgctgctgctgctggtgaggaagaagaggaagatcaaggagcccctgctgctgcctgaagatgacacccgggacaacgtgttctactatggagaggagggcggcggggaggaggaccaggactatgacatcacccagctgcaccggggcctggaggcccggcctgaggtggtgctgagaaatgatgtggcccccaccatcatccccacccccatgtaccggcccaggcctgccaacccagatgagatcggcaacttcatcatcgagaacctgaaggccgccaacacagaccccacagccccaccctatgacaccctgctggtgtttgattatgagggcagcggcagtgatgctgccagcctgagcagcctgaccagcagcgccagtgaccaggaccaggactatgactacctgaatgagtggggcagccgcttcaagaagctggccgacatgtatggaggaggagaagatgactag

SEQ ID NO: 145663 - DNA, 2355 bp, synthetic construct
  misc_feature 1..2355: note = Description of Artificial Sequence: Synthetic coding sequence
  source 1..2355: mol_type = other DNA
atgggcctgccccggggccccctggccagcctgctgctgctgcaggtgtgctggctgcagtgtgccgccagcgagccctgcagagctgtgttccgggaggccgaggtgaccctggaggccggcggcgctgagcaggagcccggccaggccctgggcaaggtgttcatgggctgccccggccaggagcccgccctcttcagcacagacaatgatgacttcaccgtgagaaatggagagaccgtgcaggagcggcgcagcctgaaggagaggaaccccctgaagatcttccccagcaagaggatcctgcggcggcacaagagggactgggtggtggcccccatctctgtgcctgaaaatggcaagggccccttcccccagaggctgaaccagctgaagagcaacaaggaccgggacaccaagatcttctacagcatcaccggccctggagctgacagccccccagagggcgtgtttgctgtggagaaggagaccggctggctgctgctgaacaagcccctggaccgggaggagatcgccaagtatgagctgtttggacatgctgtgtctgaaaatggagcctctgtggaggaccccatgaacatcagcatcatcgtgacagaccagaatgaccacaagcccaagttcacccaggacaccttccggggctctgtgctggagggcgtgctgcccggcacctctgtgatgcaggtgacagccacagatgaagatgatgccatctacacctacaacggggtggtggcctacagcatccacagccaggagcccaaggacccccatgacctgatgttcaccatccacaggagcacaggcaccatcagcgtcatcagcagcggcctggaccgggagaaggtgcctgagtacaccctgaccatccaggccacagacatggatggagatggcagcaccaccacagctgtggccgtggtggagatcctggatgccaatgacaatgcccccatgtttgacccccagaagtatgaggcccacgtgcctgaaaatgctgtgggccacgaggtgcagaggctgactgtgacagacctggatgcccccaacagccctgcctggagggccacctacctgatcatgggaggagatgatggagaccacttcaccatcaccacccaccctgagagcaaccagggcatcctgaccaccaggaagggcctggactttgaggccaagaaccagcacaccctgtatgtggaggtgaccaatgaggccccctttgtgctgaagctgcccaccagcacagccaccatcgtggtgcacgtggaggatgtgaatgaggcccctgtgtttgtgccccccagcaaggtggtggaggtgcaggagggcatccccactggagagcctgtgtgtgtgtacacagcagaagatcctgacaaggagaaccagaagatctcctaccgcatcctgcgggaccctgctggctggctggccatggaccctgacagcggccaggtgacagctgtgggcaccctggaccgggaggatgagcagtttgtgaggaacaacatctatgaggtgatggtgctggccatggacaatggcagcccccccaccactggaacaggcaccctgctgctgaccctgattgatgtgaatgaccacggccctgtgcctgagccccggcagatcaccatctgcaaccagagccctgtgcggcaggtgctgaacatcacagacaaggacctgagcccccacaccagccccttccaggcccagctgacagatgacagcgacatctactggacagctgaggtgaatgaggagggggacacagtggtgctgagcctgaagaagttcctgaagcaggacacctatgatgtgcacctgagcctgagtgaccacggcaacaaggagcagctgaccgtcatccgggccaccgtgtgtgactgccacggccacgtggagacctgccccggcccctggaagggcggcttcatcctgcctgtgctgggcgctgtgctggccctgctcttcctgctgctggtgctgctgctgctggtgaggaagaagaggaagatcaaggagcccctgctgctgcctgaagatgacacccgggacaacgtgttctactatggagaggagggcggcggggaggaggaccaggactatgacatcacccagctgcaccggggcctggaggcccggcctgaggtggtgctgagaaatgatgtggcccccaccatcatccccacccccatgtaccggcccaggcctgccaacccagatgagatcggcaacttcatcatcgagggccgcggggagcggggcagccagagaggaaatggaggcctgcagctggcccggggccgcacccggcgctcctag

SEQ ID NO: 145664 - DNA, 2325 bp, synthetic construct
  misc_feature 1..2325: note = Description of Artificial Sequence: Synthetic coding sequence
  source 1..2325: mol_type = other DNA
atgggctgccccggccaggagcccgccctcttcagcacagacaatgatgacttcaccgtgagaaatggagaaacagtgcaggagaggaggagcctgaaggagaggaaccccctgaagatcttccccagcaagaggatcctgcggcggcacaagagggactgggtggtggcccccatctctgtgcctgaaaatggcaagggccccttcccccagaggctgaaccagctgaagagcaacaaggaccgggacaccaagatcttctacagcatcactggacctggagctgacagccccccagagggcgtgtttgctgtggagaaggagaccggctggctgctgctgaacaagcccctggaccgggaggagatcgccaagtatgagctgtttggacatgctgtgtctgaaaatggagcctctgtggaggaccccatgaacatcagcatcatcgtgacagaccagaatgaccacaagcccaagttcacccaggacaccttccggggctctgtgctggagggcgtgctgcccggcacctctgtgatgcaggtgacagccacagatgaagatgatgccatctacacctacaatggagtggtggcctacagcatccacagccaggagcccaaggacccccatgacctgatgttcaccatccacaggagcacaggcaccatcagcgtcatcagcagcggcctggaccgggagaaggtgcctgagtacaccctgaccatccaggccacagacatggatggagatggcagcaccaccacagctgtggccgtggtggagatcctggatgccaatgacaatgcccccatgtttgacccccagaagtatgaggcccacgtgcctgaaaatgctgtgggccacgaggtgcagaggctgactgtgacagacctggatgcccccaacagccctgcctggagggccacctacctgatcatgggaggagatgatggagaccacttcaccatcaccacccaccctgagagcaaccagggcatcctgaccaccaggaagggcctggactttgaggccaagaaccagcacaccctgtatgtggaggtgaccaatgaggccccctttgtgctgaagctgcccaccagcacagccaccatcgtggtgcacgtggaggatgtgaatgaggcccctgtgtttgtgccccccagcaaggtggtggaggtgcaggagggcatccccaccggggagcctgtgtgtgtgtacacagctgaggaccctgacaaggagaaccagaagatctcctaccgcatcctgcgggaccctgctggctggctggccatggaccctgattctggccaggtgacagctgtgggcaccctggacagagaagatgagcagtttgtgaggaacaacatctatgaggtgatggtgctggccatggacaatggcagcccccccaccaccggcaccggcaccctgctgctgaccctgattgatgtgaatgaccacggccctgtgcctgagccccggcagatcaccatctgcaaccagagccctgtgcggcaggtgctgaacatcacagacaaggacctgagcccccacaccagccccttccaggcccagctgacagatgacagcgacatctactggacagctgaggtgaatgaggagggggacacagtggtgctgagcctgaagaagttcctgaagcaggacacctatgatgtgcacctgagcctgagtgaccacggcaacaaggagcagctgaccgtcatccgggccaccgtgtgtgactgccacggccacgtggagacctgccccggcccctggaagggcggcttcatcctgcctgtgctgggcgctgtgctggccctgctcttcctgctgctggtgctgctgctgctggtgaggaagaagaggaagatcaaggagcccctgctgctgcctgaagatgacacccgggacaacgtgttctactacggggaggagggcggcggggaggaggaccaggactatgacatcacccagctgcaccggggcctggaggcccggcctgaggtggtgctgagaaatgatgtggcccccaccatcatccccacccccatgtaccggcccaggcctgccaacccagatgaaattggcaacttcatcatcgagaacctgaaggccgccaacacagaccccacagccccaccctatgacaccctgctggtgtttgattatgagggcagcggcagtgatgctgccagcctgagcagcctgaccagcagcgccagtgaccaggaccaggactatgactacctgaatgagtggggcagccgcttcaagaagctggccgacatgtatggaggaggagaagatgactag

SEQ ID NO: 145665 - DNA, 2751 bp, synthetic construct
  misc_feature 1..2751: note = Description of Artificial Sequence: Synthetic coding sequence
  source 1..2751: mol_type = other DNA
atgacagctggagctggggtgctgctgctgctgctgagcctgagcggggccctgcgggcccacaatgaagacctgaccacccgggagacctgcaaggccggcttctctgaagatgactacacagccctgatcagccagaacatcctggagggggagaagctgctgcaggtgaagttcagcagctgtgtgggcaccaagggcacccagtatgagaccaacagcatggacttcaaggtgggcgcagatggcaccgtgtttgccacccgggagctgcaggtgcccagcgagcaggtggccttcaccgtgacagcctgggacagccagacagctgagaagtgggatgctgtggtgcggctgctggtggcccagaccagcagcccccacagcggccacaagccccagaagggcaagaaggtggtggccctggaccccagccccccacccaaggacaccctgctgccctggccccagcaccagaatgccaacggcctgcggcggaggaagagggactgggtgatcccccccatcaacgtgcctgagaacagccggggccccttcccccagcagctggtgcgcatccgcagtgacaaggacaatgacatccccatccgctacagcatcaccggggtgggcgctgaccagccccccatggaggtgttcagcattgacagcatgagcggccgcatgtatgtgacccggcccatggaccgggaggagcacgccagctaccacctgcgggcccatgctgtggacatgaatggaaacaaggtggagaaccccatcgacctgtacatctacgtgattgacatgaatgacaacagacctgagttcatcaaccaggtgtacaatggatctgtggatgagggcagcaagccaggcacctacgtgatgacagtgacagccaatgatgctgatgacagcaccacagccaacggcatggtgcgctaccgcatcgtgacccagaccccccagagccccagccagaacatgttcaccatcaacagcgagactggagacatcgtgacagtggccgccggcctggaccgggagaaggtgcagcagtacaccgtcatcgtgcaggccacagacatggagggcaacctgaactacggcctgagcaacacagccacagccatcatcaccgtgacagatgtgaatgacaaccccccagagttcaccgccagcacctttgctggggaggtgcctgaaaatagagtggagaccgtggtggccaacctgactgtgatggaccgggaccagccccacagccccaactggaatgctgtgtaccgcatcatcagcggggaccccagcggccacttctctgtgaggacagatcctgtgaccaatgaaggcatggtgacagtggtgaaggctgtggactatgagctgaacagagccttcatgctgactgtgatggtgagcaaccaggcccccctggccagcggcatccagatgtccttccagagcacagctggggtgaccatcagcatcatggacatcaatgaggccccctacttccccagcaaccacaagctgatccggctggaggagggcgtgcccccaggcaccgtgctgaccaccttctctgctgtggaccctgaccgcttcatgcagcaggccgtgcgctacagcaagctgagtgaccctgcctcctggctgcacatcaatgccaccaacggccagatcaccacagctgctgtgctggaccgggagagcctgtacaccaagaacaacgtgtatgaggccaccttcctggccgctgacaatggcatccccccagccagcggcaccggcaccctgcagatctacctgattgacatcaatgacaatgcccctgagctgctgcccaaggaggcccagatctgtgagaagcccaacctgaatgccatcaacatcacagctgctgatgctgatgtggaccccaacatcggcccctacgtgtttgagctgccctttgtgcctgctgctgtgaggaagaactggaccatcacccggctgaatggagactatgcccagctgagcctgcgcatcctgtacctggaggccggcatgtatgatgtgcccatcatcgtgacagattctggcaacccccccctgagcaacaccagcatcatcaaggtgaaggtgtgcccctgtgatgacaacggggactgcaccaccatcggggctgtggccgccgccggcctgggcaccggggccatcgtggccatcctgatctgcatcctgatcctgctgaccatggtgctgctgtttgtgatgtggatgaagaggcgggagaaggagcggcacaccaagcagctgctgattgatcctgaagatgatgtgcgggacaacatcctgaagtatgatgaggagggcggcggggaggaggaccaggactatgacctgagccagctgcagcagcctgaggccatgggccacgtgcccagcaaggcccctggggtgagaagagtggatgagaggcctgtgggcgctgagccccagtaccccatccggcccatggtgccccaccctggggacatcggggacttcatcaatgaaggcctgcgggctgctgacaatgaccccacagccccaccctatgacagcctgctggtgtttgattatgagggcagcggcagcacagctggctctgtgagcagcctgaacagcagcagcagcggggaccaggactatgactacctgaatgactggggcccccgcttcaagaagctggccgacatgtatggaggaggagaggaggactag

SEQ ID NO: 145666 - DNA, 2475 bp, synthetic construct
  misc_feature 1..2475: note = Description of Artificial Sequence: Synthetic coding sequence
  source 1..2475: mol_type = other DNA
atgcccaagagcacaggcatgctgcatggaggaagagaaaatgccggcgtgaagttcagcagctgtgtgggcaccaagggcacccagtatgagaccagcagcccccacagcggccacaagccccagaagggcaagaaggtggtggccctggaccccagccccccacccaaggacaccctgctgccctggccccagcaccagaatgccaacggcctgcggcggaggaagagggactgggtgatcccccccatcaacgtgcctgagaacagccggggccccttcccccagcagctggtgcgcatccgcagtgacaaggacaatgacatccccatccgctacagcatcaccggggtgggcgctgaccagccccccatggaggtgttcagcattgacagcatgagcggccgcatgtatgtgacccggcccatggaccgggaggagcacgccagctaccacctgcgggcccatgctgtggacatgaatggaaacaaggtggagaaccccatcgacctgtacatctacgtgattgacatgaatgacaacagacctgagttcatcaaccaggtgtacaatggatctgtggatgagggcagcaagccaggcacctacgtgatgacagtgacagccaatgatgctgatgacagcaccacagccaacggcatggtgcgctaccgcatcgtgacccagaccccccagagccccagccagaacatgttcaccatcaacagcgagactggagacatcgtgacagtggccgccggcctggaccgggagaaggtgcagcagtacaccgtcatcgtgcaggccacagacatggagggcaacctgaactacggcctgagcaacacagccacagccatcatcaccgtgacagatgtgaatgacaaccccccagagttcaccgccagcacctttgctggggaggtgcctgaaaatagagtggagaccgtggtggccaacctgactgtgatggaccgggaccagccccacagccccaactggaatgctgtgtaccgcatcatcagcggggaccccagcggccacttctctgtgaggacagatcctgtgaccaatgaaggcatggtgacagtggtgaaggctgtggactatgagctgaacagagccttcatgctgactgtgatggtgagcaaccaggcccccctggccagcggcatccagatgtccttccagagcacagctggggtgaccatcagcatcatggacatcaatgaggccccctacttccccagcaaccacaagctgatccggctggaggagggcgtgcccccaggcaccgtgctgaccaccttctctgctgtggaccctgaccgcttcatgcagcaggccgtgcgctacagcaagctgagtgaccctgcctcctggctgcacatcaatgccaccaacggccagatcaccacagctgctgtgctggaccgggagagcctgtacaccaagaacaacgtgtatgaggccaccttcctggccgctgacaatggcatccccccagccagcggcaccggcaccctgcagatctacctgattgacatcaatgacaatgcccctgagctgctgcccaaggaggcccagatctgtgagaagcccaacctgaatgccatcaacatcacagctgctgatgctgatgtggaccccaacatcggcccctacgtgtttgagctgccctttgtgcctgctgctgtgaggaagaactggaccatcacccggctgaatggagactatgcccagctgagcctgcgcatcctgtacctggaggccggcatgtatgatgtgcccatcatcgtgacagattctggcaacccccccctgagcaacaccagcatcatcaaggtgaaggtgtgcccctgtgatgacaacggggactgcaccaccatcggggctgtggccgccgccggcctgggcaccggggccatcgtggccatcctgatctgcatcctgatcctgctgaccatggtgctgctgtttgtgatgtggatgaagaggcgggagaaggagcggcacaccaagcagctgctgattgatcctgaagatgatgtgcgggacaacatcctgaagtatgatgaggagggcggcggggaggaggaccaggactatgacctgagccagctgcagcagcctgaggccatgggccacgtgcccagcaaggcccctggggtgagaagagtggatgagaggcctgtgggcgctgagccccagtaccccatccggcccatggtgccccaccctggggacatcggggacttcatcaatgaaggcctgcgggctgctgacaatgaccccacagccccaccctatgacagcctgctggtgtttgattatgagggcagcggcagcacagctggctctgtgagcagcctgaacagcagcagcagcggggaccaggactatgactacctgaatgactggggcccccgcttcaagaagctggccgacatgtatggaggaggagaggaggactag

SEQ ID NO: 145667 - DNA, 2529 bp, synthetic construct
  misc_feature 1..2529: note = Description of Artificial Sequence: Synthetic coding sequence
  source 1..2529: mol_type = other DNA
atggacttcaaggtgggcgcagatggcaccgtgtttgccacccgggagctgcaggtgcccagcgagcaggtggccttcaccgtgacagcctgggacagccagacagctgagaagtgggatgctgtggtgcggctgctggtggcccagaccagcagcccccacagcggccacaagccccagaagggcaagaaggtggtggccctggaccccagccccccacccaaggacaccctgctgccctggccccagcaccagaatgccaacggcctgcggcggaggaagagggactgggtgatcccccccatcaacgtgcctgagaacagccggggccccttcccccagcagctggtgcgcatccgcagtgacaaggacaatgacatccccatccgctacagcatcaccggggtgggcgctgaccagccccccatggaggtgttcagcattgacagcatgagcggccgcatgtatgtgacccggcccatggaccgggaggagcacgccagctaccacctgcgggcccatgctgtggacatgaatggaaacaaggtggagaaccccatcgacctgtacatctacgtgattgacatgaatgacaacagacctgagttcatcaaccaggtgtacaatggatctgtggatgagggcagcaagccaggcacctacgtgatgacagtgacagccaatgatgctgatgacagcaccacagccaacggcatggtgcgctaccgcatcgtgacccagaccccccagagccccagccagaacatgttcaccatcaacagcgagactggagacatcgtgacagtggccgccggcctggaccgggagaaggtgcagcagtacaccgtcatcgtgcaggccacagacatggagggcaacctgaactacggcctgagcaacacagccacagccatcatcaccgtgacagatgtgaatgacaaccccccagagttcaccgccagcacctttgctggggaggtgcctgaaaatagagtggagaccgtggtggccaacctgactgtgatggaccgggaccagccccacagccccaactggaatgctgtgtaccgcatcatcagcggggaccccagcggccacttctctgtgaggacagatcctgtgaccaatgaaggcatggtgacagtggtgaaggctgtggactatgagctgaacagagccttcatgctgactgtgatggtgagcaaccaggcccccctggccagcggcatccagatgtccttccagagcacagctggggtgaccatcagcatcatggacatcaatgaggccccctacttccccagcaaccacaagctgatccggctggaggagggcgtgcccccaggcaccgtgctgaccaccttctctgctgtggaccctgaccgcttcatgcagcaggccgtgcgctacagcaagctgagtgaccctgcctcctggctgcacatcaatgccaccaacggccagatcaccacagctgctgtgctggaccgggagagcctgtacaccaagaacaacgtgtatgaggccaccttcctggccgctgacaatggcatccccccagccagcggcaccggcaccctgcagatctacctgattgacatcaatgacaatgcccctgagctgctgcccaaggaggcccagatctgtgagaagcccaacctgaatgccatcaacatcacagctgctgatgctgatgtggaccccaacatcggcccctacgtgtttgagctgccctttgtgcctgctgctgtgaggaagaactggaccatcacccggctgaatggagactatgcccagctgagcctgcgcatcctgtacctggaggccggcatgtatgatgtgcccatcatcgtgacagattctggcaacccccccctgagcaacaccagcatcatcaaggtgaaggtgtgcccctgtgatgacaacggggactgcaccaccatcggggctgtggccgccgccggcctgggcaccggggccatcgtggccatcctgatctgcatcctgatcctgctgaccatggtgctgctgtttgtgatgtggatgaagaggcgggagaaggagcggcacaccaagcagctgctgattgatcctgaagatgatgtgcgggacaacatcctgaagtatgatgaggagggcggcggggaggaggaccaggactatgacctgagccagctgcagcagcctgaggccatgggccacgtgcccagcaaggcccctggggtgagaagagtggatgagaggcctgtgggcgctgagccccagtaccccatccggcccatggtgccccaccctggggacatcggggacttcatcaatgaaggcctgcgggctgctgacaatgaccccacagccccaccctatgacagcctgctggtgtttgattatgagggcagcggcagcacagctggctctgtgagcagcctgaacagcagcagcagcggggaccaggactatgactacctgaatgactggggcccccgcttcaagaagctggccgacatgtatggaggaggagaggaggactag

SEQ ID NO: 145668 - DNA, 2358 bp, synthetic construct
  misc_feature 1..2358: note = Description of Artificial Sequence: Synthetic coding sequence
  source 1..2358: mol_type = other DNA
atgaagctgggcaaggtggagttctgccacttcctgcagctgattgccctcttcctgtgcttcagcggcatgagccaggccgagctgagccgcagccgcagcaagccctacttccagagcggccgcagcaggaccaagaggtcctgggtgtggaaccagttctttgtgctggaggagtacatgggcagtgaccccctgtatgtgggcaagctgcacagtgatgtggacaagggagatggcagcatcaagtacatcctgtctggagagggcgccagcagcatcttcatcattgatgaaaatactggagacatccacgccaccaagaggctggaccgggaggagcaggcctactacaccctgcgggcccaggccctggaccggctgaccaacaagcctgtggagcctgagagcgagtttgtgatcaagatccaggacatcaatgacaatgagcccaagttcctggatggcccctacacagctggggtgcctgagatgagccctgtgggcacctctgtggtgcaggtgacagccacagatgctgatgaccccacctacggcaacagcgcccgggtggtgtacagcatcctgcagggccagccctacttctctgtggagcccaagacaggagtcatcaagacagccctgcccaacatggaccgggaggccaaggaccagtacctgctggtgatccaggccaaggacatggtgggccagaatggaggcctgagcggcaccacctctgtgacagtgaccctgacagatgtgaatgacaaccccccacgcttcccccggcgcagctaccagtacaacgtgcctgagagcctgcctgtggcctctgtggtggcccgcatcaaggctgctgatgctgacattggagccaatgctgagatggagtacaagatcgtggatggagatggcctgggcatcttcaagatctctgtggacaaggagacccaggagggcatcatcaccatccagaaggagctggactttgaggccaagaccagctacaccctgagaattgaagctgccaacaaggatgctgacccccgcttcctgagcctgggccccttcagtgacaccaccaccgtgaagatcatcgtggaggatgtggatgagccccctgtgttcagcagccccctgtaccccatggaggtgtctgaggccacccaggtgggcaacatcatcggcaccgtggccgcccatgaccctgacagcagcaacagccctgtgcgctacagcattgacaggaacacagacctggagcgctacttcaacattgatgccaacagcggggtcatcaccacagccaagagcctggaccgggagaccaatgccatccacaacatcaccgtgctggccatggagagccagaaccccagccaggtgggccggggctacgtggccatcaccatcctggacatcaatgacaatgcccctgagtttgccatggactatgagaccaccgtgtgtgaaaatgcccagcccggccaggtgatccagaagatctctgctgtggacaaggatgagcccagcaatggccaccagttctacttcagcctgaccacagatgccaccaacaaccacaacttcagcctgaaggacaacaaggacaacacagccagcatcctgaccaggagaaatggcttccggcggcaggagcagagcgtgtactacctgcccatcttcatcgtggacagcggcagccccagcctgagcagcaccaacaccctgaccatccgggtgtgtgactgtgatgctgatggagtggcccagacctgcaatgctgaggcctacgtgctgcctgctggcctgagcactggagccctgattgccatcctggcctgtgtgctgaccctgctggtgctgatcctgctgattgtgaccatgagaagaaggaagaaggagcccctcatctttgatgaggagcgggacatccgggagaacatcgtgcgctatgatgatgaaggaggaggagaggaggacacagaggcctttgacatggccgccctgaggaacctgaatgtcatccgggacaccaagaccaggagagatgtgaccccagagatccagttcctgagcaggcctgccttcaagagcatcccagacaacgtcatcttccgggagttcatctgggagcggctgaaggaggctgatgtggaccccggggccccaccctatgacagcctgcagacctacgcctttgagggcaatggatctgtggccgagagcctgagcagcctggacagcatcagcagcaacagcgaccagaactatgactacctgagtgactggggcccccgcttcaagaggctggccgacatgtatggcaccggccaggagagcctgtacagctag

SEQ ID NO: 145669 - DNA, 2358 bp, synthetic construct; identical to SEQ ID NO: 145668
  misc_feature 1..2358: note = Description of Artificial Sequence: Synthetic coding sequence
  source 1..2358: mol_type = other DNA

SEQ ID NO: 145670 - DNA, 2358 bp, synthetic construct; identical to SEQ ID NO: 145668
  misc_feature 1..2358: note = Description of Artificial Sequence: Synthetic coding sequence
  source 1..2358: mol_type = other DNA

SEQ ID NO: 145671 - DNA, 1893 bp, synthetic construct
  misc_feature 1..1893: note = Description of Artificial Sequence: Synthetic coding sequence
  source 1..1893: mol_type = other DNA
atgaagctgggcaaggtggagttctgccacttcctgcagctgattgccctcttcctgtgcttcagcggcatgagccaggccgagctgagccgcagccgcagcaagccctacttccagagcggccgcagcaggaccaagaggtcctgggtgtggaaccagttctttgtgctggaggagtacatgggcagtgaccccctgtatgtgggcaagctgcacagtgatgtggacaagggagatggcagcatcaagtacatcctgtctggagagggcgccagcagcatcttcatcattgatgaaaatactggagacatccacgccaccaagaggctggaccgggaggagcaggcctactacaccctgcgggcccaggccctggaccggctgaccaacaagcctgtggagcctgagagcgagtttgtgatcaagatccaggacatcaatgacaatgagcccaagttcctggatggcccctacacagctggggtgcctgagatgagccctgtgggcacctctgtggtgcaggtgacagccacagatgctgatgaccccacctacggcaacagcgcccgggtggtgtacagcatcctgcagggccagccctacttctctgtggagcccaagacaggagtcatcaagacagccctgcccaacatggaccgggaggccaaggaccagtacctgctggtgatccaggccaaggacatggtgggccagaatggaggcctgagcggcaccacctctgtgacagtgaccctgacagatgtgaatgacaaccccccacgcttcccccggcgcagctaccagtacaacgtgcctgagagcctgcctgtggcctctgtggtggcccgcatcaaggctgctgatgctgacattggagccaatgctgagatggagtacaagatcgtggatggagatggcctgggcatcttcaagatctctgtggacaaggagacccaggagggcatcatcaccatccagaaggagctggactttgaggccaagaccagctacaccctgagaattgaagctgccaacaaggatgctgacccccgcttcctgagcctgggccccttcagtgacaccaccaccgtgaagatcatcgtggaggatgtggatgagccccctgtgttcagcagccccctgtaccccatggaggtgtctgaggccacccaggtgggcaacatcatcggcaccgtggccgcccatgaccctgacagcagcaacagccctgtgcgctacagcattgacaggaacacagacctggagcgctacttcaacattgatgccaacagcggggtcatcaccacagccaagagcctggaccgggagaccaatgccatccacaacatcaccgtgctggccatggagagccagaaccccagccaggtgggccggggctacgtggccatcaccatcctggacatcaatgacaatgcccctgagtttgccatggactatgagaccaccgtgtgtgaaaatgcccagcccggccaggtgatccagaagatctctgctgtggacaaggatgagcccagcaatggccaccagttctacttcagcctgaccacagatgccaccaacaaccacaacttcagcctgaaggacaacaaggacaacacagccagcatcctgaccaggagaaatggcttccggcggcaggagcagagcgtgtactacctgcccatcttcatcgtggacagcggcagccccagcctgagcagcaccaacaccctgaccatccgggtgtgtgactgtgatgctgatggagtggcccagacctgcaatgctgaggcctacgtgctgcctgctggcctgagcactggagccctgattgccatcctggcctgtgtgctgaccctgctgggccgctactgcttccagggcctgctgtag

SEQ ID NO: 145672 - DNA, 2400 bp, synthetic construct
  misc_feature 1..2400: note = Description of Artificial Sequence: Synthetic coding sequence
  source 1..2400: mol_type = other DNA
atgcctgagcggctggccgagatgctgctggacctgtggacccccctcatcatcctgtggatcaccctgcccccctgcatctacatggcccccatgaaccagagccaggtgctgatgagcggcagccccctggagctgaacagcctgggggaggagcagaggatcctgaacagaagcaagaggggctgggtgtggaaccagatgtttgtgctggaggagttcagcggccctgagcccatcctggtgggccgcctgcacacagacctggaccccggcagcaagaagatcaagtacatcctgtctggagatggagctggcaccatcttccagatcaatgatgtgactggagacatccacgccatcaagaggctggaccgggaggagaaggccgagtacaccctgacagcccaggccgtggactgggagaccagcaagcccctggagcccccatctgagttcatcatcaaggtgcaggacatcaatgacaatgcccctgagttcctgaatggcccctaccacgccaccgtgcctgagatgagcatcctgggcacctctgtgaccaacgtgacagccacagatgctgatgatcctgtgtatggcaacagcgccaagctggtgtacagcatcctggagggccagccctacttcagcattgagcctgagacagccatcatcaagacagccctgcccaacatggaccgggaggccaaggaggagtacctggtggtgatccaggccaaggacatgggcggccacagcggcggcctgagcggcaccaccaccctgactgtgaccctgacagatgtgaatgacaacccccccaagtttgcccagagcctgtaccacttctctgtgcctgaagatgtggtgctgggcacagccatcggccgggtgaaggccaatgaccaggacattggagaaaatgcccagagcagctatgacatcattgatggagatggaacagccctgtttgagatcaccagtgatgcccaggcccaggacggcatcatccggctgaggaagcccctggactttgagaccaagaagagctacaccctgaaggtggaggccgccaacgtgcacatcgacccccgcttcagcggccggggccccttcaaggacacagccaccgtgaagatcgtggtggaggatgctgatgagccccctgtgttcagcagccccacctacctgctggaggtgcatgaaaatgctgccctgaacagcgtcatcggccaggtgacagcccgggaccctgacatcaccagcagccccatccgcttcagcattgacagacacacagacctggagcggcagttcaacatcaatgctgatgatggcaagatcaccctggccacccccctggaccgggagctgtctgtgtggcacaacatcaccatcatcgccacagagatccggaaccacagccagatcagccgggtgcctgtggccatcaaggtgctggatgtgaatgacaatgcccctgagtttgcctctgaatatgaggccttcctgtgtgaaaatggcaagccaggccaggtgatccagacagtgtctgccatggacaaggatgaccccaagaatggccactacttcctgtacagcctgctgcctgagatggtgaacaaccccaacttcaccatcaagaagaatgaagacaacagcctgagcatcctggccaagcacaacggcttcaaccggcagaagcaggaggtgtacctgctgcccatcatcatcagtgacagcggcaacccccccctgagcagcaccagcaccctgaccatccgggtgtgtggctgcagcaatgatggagtggtgcagagctgcaatgtggaggcctacgtgctgcccatcggcctgtccatgggcgccctgattgccatcctggcctgcatcatcctgctgctggtgattgtggtgctgtttgtgaccctgcggcggcacaagaatgagcccctcatcatcaaggatgatgaagatgtgcgggagaacatcatccgctatgatgatgaaggaggaggagaggaggacacagaggcctttgacatcgccaccctgcagaacccagatggcatcaatggcttcctgcccaggaaggacatcaagccagacctgcagttcatgccccggcagggcctggcccctgtgcccaatggagtggatgtggatgagttcatcaacgtgcggctgcacgaggccgacaatgaccccacagccccaccctatgacagcatccagatctacggctatgagggccggggctctgtggccggcagcctgagcagcctggagagcaccaccagtgacagcgaccagaactttgactacctgagtgactggggcccccgcttcaagaggctgggggagctgtacagcgtgggggagagtgacaaggagacctag

SEQ ID NO: 145673 - DNA, 2400 bp, synthetic construct; identical to SEQ ID NO: 145672
  misc_feature 1..2400: note = Description of Artificial Sequence: Synthetic coding sequence
  source 1..2400: mol_type = other DNA

SEQ ID NO: 145674 - DNA, 795 bp, synthetic construct
  misc_feature 1..795: note = Description of Artificial Sequence: Synthetic coding sequence
  source 1..795: mol_type = other DNA
atgaccaagttcagcagcttcagcctcttcttcctgattgtgggcgcctacatgacccacgtgtgcttcaacatggagatcatcggcggcaaggaggtgagcccccacagccggcccttcatggccagcatccagtatggaggccaccacgtgtgtggcggcgtgctgattgacccccagtgggtgctgacagctgcccactgccagtaccgcttcaccaagggccagagccccaccgtggtgctgggcgcccacagcctgagcaagaatgaggccagcaagcagaccctggagatcaagaagttcatccccttcagccgggtgaccagtgacccccagagcaatgacatcatgctggtgaagctgcagacagctgccaagctgaacaagcacgtgaagatgctgcacatccgcagcaagaccagcctgcggagcggcaccaagtgcaaggtgacaggctggggcgccacagatcctgacagcctgcggcccagcgacaccctgcgggaggtgacagtgacagtgctgagcaggaagctgtgcaacagccagagctactacaacggggaccccttcatcaccaaggacatggtgtgtgctggagatgccaagggccagaaggacagctgcaagggggacagcggcggccccctcatctgcaagggcgtcttccacgccatcgtgtctgggggccatgaatgtggggtggccaccaagccaggcatctacaccctgctgaccaagaagtaccagacctggatcaagagcaacctggtgcccccccacaccaactag

SEQ ID NO: 145675 - DNA, 246 bp, synthetic construct
  misc_feature 1..246: note = Description of Artificial Sequence: Synthetic coding sequence
  source 1..246: mol_type = other DNA
atgaggacctaccactacatccccctcttcatctggacctacatgttccacacagtggacaccatcctgctgcaggagaagcccaacagctacctgagcagcaagaagattgctggcctgaccaaggatgatggcaagatgctgcggaggaccaagaggggctggatgtggaaccagttcttcctgctggaggagtacacaggaacagacacccagtatgtgggcaagctgcacacagaccagtag

SEQ ID NO: 145676 - DNA, 399 bp, synthetic construct
  misc_feature 1..399: note = Description of Artificial Sequence: Synthetic coding sequence
  source 1..399: mol_type = other DNA
atgaggacctaccactacatccccctcttcatctggacctacatgttccacacagtggacaccatcctgctgcaggagaagcccaacagctacctgagcagcaagaagattgctggcctgaccaaggatgatggcaagatgctgcggaggaccaagaggggctggatgtggaaccagttcttcctgctggaggagtacacaggaacagacacccagtatgtgggcaagctgcacacagaccaggacaagggagatggcaacctgaagtacatcctgactggagatggagctggcagcctgtttgtgattgatgaaaatactggagacatccacgccgccaagaagctggaccgggaggagaagagcctgtacatcctgcgggccaaggccattgattag

SEQ ID NO: 145677 - DNA, 9045 bp, synthetic construct
  misc_feature 1..9045: note = Description of Artificial Sequence: Synthetic coding sequence
  source 1..9045: mol_type = other DNA
atggcccctcctcctcctcctgtgctgcctgtgctgctgctgctggccgctgctgctgccctgcctgccatgggcctgcgggctgctgcctgggagccccgggtgcctgggggcacccgggcctttgccctgcggcccggctgcacctatgctgtgggcgccgcctgcaccccccgggccccccgggagctgctggatgtgggcagagatggccgcctggccggcagaagaagagtgtctggggccggccggcccctgcccctgcaggtgcggctggtggcccggagcgcccccacagccctgagccggcggctgcgggcccggacccacctgcccggctgtggggcccgggcccggctgtgtggcactggagcccggctgtgtggggccctgtgcttccctgtgcctgggggctgtgccgccgcccagcacagcgccctggccgcccccaccaccctgcctgcctgccgctgccccccccggccccggccccgctgccccggccggcccatctgcctgcccccaggcggctctgtgcggctgcggctgctgtgtgccctgcggcgggctgctggagctgtgcgggtgggcctggccctggaggccgccacagctggcaccccatctgccagccccagccccagcccccccctgccccccaacctgcctgaggcccgggccggccctgcccggcgggcccggcggggcaccagcggccggggcagcctgaagttccccatgcccaactaccaggtggccctgtttgaaaatgaacctgctggcaccctcatcctgcagctgcacgcccactacaccattgaaggagaggaggagcgggtgtcctactacatggagggcctgtttgatgagaggagccggggctacttcagaattgacagcgccaccggggctgtgtccacagattctgtgctggaccgggagaccaaggagacccacgtgctgcgggtgaaggctgtggactacagcaccccacccaggtctgccaccacctacatcaccgtgctggtgaaggacaccaatgaccacagccctgtgtttgagcagagcgagtaccgggagcgggtgcgggagaacctggaggtgggctatgaggtgctgaccatccgggccagtgaccgggacagccccatcaatgccaacctgcgctacagagtgctgggcggggcctgggatgtgttccagctgaatgaaagcagcggcgtggtgtccaccagggctgtgctggaccgggaggaggccgctgagtaccagctgctggtggaggccaatgaccagggcaggaaccctggccccctgagcgccacagccaccgtgtacatcgaggtggaggatgaaaatgacaactacccccagttcagcgagcagaactacgtggtgcaggtgcctgaagatgtgggcctgaacacagctgtgctgcgggtgcaggccacagaccgggaccagggccagaatgctgccatccactacagcatcctgtctggaaatgtggccggccagttctacctgcacagcctgagcggcatcctggatgtgatcaaccccctggactttgaagatgtgcagaagtacagcctgagcatcaaggcccaggacggcggccggcccccactcatcaacagcagcggcgtggtgtctgtgcaggtgctggatgtgaatgacaatgagcccatctttgtgagcagccccttccaggccaccgtgctggagaatgtgcccctgggctaccctgtggtgcacatccaggccgtggatgctgacagcggggagaatgcccggctgcactaccgcctggtggacacagccagcaccttcctgggcggcggcagcgctggccccaagaacccagcccccaccccagacttccccttccagatccacaacagcagcggctggatcaccgtgtgtgccgagctggaccgggaggaggtggagcactacagctttggagtggaggccgtggaccacggcagcccccccatgagcagcagcacctctgtgtccatcaccgtgctggatgtgaatgacaatgaccctgtgttcacccagcccacctatgagctgcggctgaatgaagatgctgctgtgggcagctctgtgctgaccctgcaggcccgggacagagatgccaacagcgtcatcacctaccagctgactggaggcaacaccaggaacagatttgccctgagcagccagaggggcggcggcctcatcaccctggccctgcccctggactacaagcaggagcagcagtatgtgctggccgtgacagccagtgatggcaccaggagccacacagcccacgtgctgatcaacgtgacagatgccaacacccacaggcctgtgttccagagcagccactacacagtgtctgtgtctgaggacaggcctgtgggcaccagcatcgccaccctgagcgccaatgatgaggacaccggggagaatgcccgcatcacctacgtgatccaggaccctgtgccccagttcagaattgatcctgattctggcaccatgtacaccatgatggagctggactatgagaaccaggtggcctacaccctgaccatcatggcccaggacaatggcatcccccagaagagtgacaccaccaccctggagatcctgatcctggatgccaatgacaatgccccccagttcctgtgggacttctaccagggcagcatctttgaagatgccccacccagcaccagcatcctgcaggtgtctgccacagaccgggacagcggccccaacggccgcctgctgtacaccttccagggcggagatgatggagatggagacttctacatcgagcccaccagcggggtcatccgcacccagaggcggctggacagagaaaatgtggccgtgtacaacctgtgggccctggccgtggaccggggcagccccacccccctgagcgcctctgtggagatccaggtgaccatcctggacatcaatgacaatgcccccatgtttgagaaggatgagctggagctgtttgtggaggagaacaaccctgtgggctctgtggtggccaagatccgggccaatgaccctgatgagggccccaatgcccagatcatgtaccagatcgtggagggggacatgaggcacttcttccagctggacctgctgaatggagacctgcgggccatggtggagctggactttgaggtgagaagagaatatgtgctggtggtgcaggccaccagcgcccccctggtgtcccgggccaccgtgcacatcctgctggtggaccagaatgacaacccccctgtgctgcctgacttccagatcctcttcaacaactacgtgaccaacaagagcaacagcttccccactggagtcatcggctgcatcccagcccatgaccctgatgtgtctgacagcctgaactacacctttgtgcagggcaatgagctgcggctgctgctgctggaccctgccactggagagctgcagctgagccgggacctggacaacaaccggcccctggaggccctgatggaggtgtctgtgtctgatggcatccacagcgtgacagccttctgcaccctgcgggtgaccatcatcacagatgacatgctgaccaacagcatcaccgtgcggctggagaacatgagccaggagaagttcctgagccccctgctggccctgtttgtggagggcgtggccgctgtgctgagcaccaccaaggatgatgtgtttgtgttcaacgtgcagaatgacacagatgtgagcagcaacatcctgaatgtgaccttcagcgccctgctgcctggaggagtgcggggccagttcttccccagcgaggacctgcaggagcagatctacctgaacagaaccctgctgaccaccatcagcacccagagggtgctgccctttgatgacaacatctgcctgcgggagccctgtgagaactacatgaagtgtgtgtctgtgctgcgctttgacagcagcgcccccttcctgagcagcaccaccgtgctcttccggcccatccaccccatcaatggcctgcgctgccgctgccccccaggcttcaccggggactactgtgaaacagaaattgacctgtgctacagcgacccctgtggggccaacggccgctgccgcagccgggagggcggctacacctgtgagtgctttgaggacttcaccggggagcactgtgaggtggatgcccggagcggccgctgtgccaatggagtgtgcaagaatggaggcacctgtgtgaacctgctgattggaggcttccactgtgtgtgccccccaggagaatatgagcggccctactgtgaggtgaccaccaggagcttccccccccagagctttgtgaccttccggggcctgcggcagcgcttccacttcaccatcagcctgacctttgccacccaggagagaaatggcctgctgctgtacaacggccgcttcaatgagaagcatgacttcatcgccctggagatcgtggatgagcaggtgcagctgaccttctctgctggggagaccaccaccaccgtggcccccaaggtgcccagcggcgtgtctgatggccgctggcacagcgtgcaggtgcagtactacaacaagcccaacatcggccacctgggcctgccccacggccccagcggggagaagatggctgtggtgacagtggatgactgtgacaccaccatggctgtgcgctttgggaaggacatcggcaactacagctgtgccgcccagggcacccagacaggcagcaagaagagcctggacctgaccggccccctgctgctgggcggcgtgcccaacctgcctgaggacttccctgtgcacaaccggcagtttgtgggctgcatgaggaacctgtctgtggatggcaagaatgtggacatggccggcttcatcgccaacaacggcacccgggagggctgtgccgcccggaggaacttctgtgatggccgccgctgccagaatggaggcacctgtgtgaaccgctggaacatgtacctgtgtgagtgccccctgcgctttggaggcaagaactgtgagcaggccatgccccacccccagctgttctctggagagagcgtggtgtcctggagcgacctgaacatcatcatctctgtgccctggtacctgggcctgatgttccgcaccaggaaggaggacagcgtgctgatggaggccaccagcggcggccccaccagcttccggctgcagatcctgaacaactacctgcagtttgaggtgagccacggccccagtgatgtggagagcgtgatgctgagcggcctgcgggtgacagatggagagtggcaccacctgctgattgagctgaagaatgtgaaggaggacagcgagatgaagcacctggtgaccatgaccctggactatggcatggaccagaacaaggctgacattggaggcatgctgcccggcctgactgtgcgctctgtggtggtgggcggggccagcgaggacaaggtgtctgtgcggcggggcttccggggctgcatgcagggcgtgaggatgggcggcacccccaccaacgtggccaccctgaacatgaacaatgccctgaaggtgcgggtgaaggatggctgtgatgtggatgacccctgcaccagcagcccctgcccccccaacagccgctgccatgatgcctgggaggactacagctgtgtgtgtgacaagggctacctgggcatcaactgtgtggatgcctgccacctgaacccctgtgagaacatgggcgcctgtgtgcgcagccctggcagcccccagggctacgtgtgtgaatgtggccccagccactacggcccctactgtgagaacaagctggacctgccctgcccccggggctggtggggcaaccctgtgtgtggcccctgccactgtgctgtgtccaagggctttgatcctgactgcaacaagaccaacggccagtgccagtgcaaggagaactactacaagctgctggcccaggacacctgcctgccctgtgactgcttcccccacggcagccacagcaggacctgtgacatggccaccggccagtgtgcctgcaagccaggagtgattggccggcagtgcaacagatgtgacaacccctttgctgaggtgaccaccctgggctgtgaggtgatctacaacggctgccccaaggcctttgaagctggcatctggtggccccagaccaagtttggccagcctgctgctgtgccctgccccaagggctctgtgggcaatgctgtgcgccactgcagcggggagaagggctggctgcccccagagctgttcaactgcaccaccatcagctttgtggacctgcgggccatgaatgagaagctgagcagaaatgagacccaggtggatggagcccgggccctgcagctggtgcgggccctgcggagcgccacccagcacacaggcaccctgtttggaaatgatgtgaggacagcctaccagctgctgggccacgtgctgcagcacgagagctggcagcagggctttgacctggccgccacccaggatgctgacttccatgaagatgtgatccacagcggcagcgccctgctggccccagccaccagggctgcctgggagcagatccagaggtctgagggcggcacagcccagctgctgcggcggctggagggctacttcagcaatgtggccagaaatgtgcggaggacctacctgcggccctttgtgattgtgacagccaacatgatcctggccgtggacatctttgacaagttcaacttcaccggggcccgggtgcccaggtttgacaccatccacgaggagttcccccgggagctggagagctctgtgtccttccctgctgacttcttccggcccccagaggagaaggagggccccctgctgcggcctgctggccgccgcaccaccccccagaccaccaggcctggccctggaacagagcgggaggcccccatcagcagaagaagaagacacccagatgatgctggccagtttgctgtggccctggtgatcatctaccgcaccctgggccagctgctgcctgagagatatgaccctgacagaagaagcctgcggctgccccaccggcccatcatcaacacccccatggtgtccaccctggtgtacagcgagggcgcccccctgccccggcccctggagaggcctgtgctggtggagtttgccctgctggaggtggaggagaggaccaagcctgtgtgtgtgttctggaaccacagcctggccgtgggcggcactggaggctggagcgcccggggctgtgagctgctgagcaggaacagaacccacgtggcctgccagtgcagccacacagccagctttgctgtgctgatggacatcagcagaagagaaaatggagaggtgctgcccctgaagatcgtgacctacgccgctgtgtccctgagcctggccgccctgctggtggcctttgtgctgctgagcctggtgaggatgctgcggagcaacctgcacagcatccacaagcacctggccgtggccctcttcctgagccagctggtgtttgtgattggcatcaaccagacagagaaccccttcctgtgcaccgtggtggccatcctgctgcactacatctacatgagcacctttgcctggaccctggtggagagcctgcacgtgtacaggatgctgacagaggtgaggaacatcgacaccggccccatgaggttctactacgtggtgggctggggcatcccagccatcgtgacaggcctggccgtgggcctggacccccagggctacggcaacccagacttctgctggctgagcctgcaggacaccctcatctggagctttgctggccccatcggggctgtgatcatcatcaacacagtgacctctgtgctgagcgccaaggtgtcctgccagaggaagcaccactactacggcaagaagggcatcgtgtccctgctgaggacagccttcctgctgctgctgctgatcagcgccacctggctgctgggcctgctggccgtgaacagagatgccctgtccttccactacctgtttgccatcttcagcggcctgcagggcccctttgtgctgctcttccactgtgtgctgaaccaggaggtgaggaagcacctgaagggcgtgctgggcggcaggaagctgcacctggaggacagcgccaccacccgggccaccctgctgaccaggagcctgaactgcaacaccacctttggagatggccctgacatgctgaggacagacctgggggagagcacagccagcctggacagcatcgtgagagatgagggcatccagaagctgggcgtgagcagcggcctggtgcggggcagccatggagagccagatgccagcctgatgcccaggagctgcaaggaccccccaggccatgacagcgacagcgacagcgagctgagcctggatgagcagagcagcagctatgccagcagccacagcagtgacagtgaagatgatggagtgggcgctgaggagaagtgggaccctgcccggggagctgtgcacagcacccccaagggagatgctgtggccaaccacgtgcctgctggctggccagaccagagcctggccgagagtgacagcgaggaccccagcggcaagccccggctgaaggtggagaccaaggtgtctgtggagctgcaccgggaggagcagggcagccacagaggagagtaccccccagaccaggagagcggcggggccgcccggctggccagcagccagcccccagagcagaggaagggcatcctgaagaacaaggtgacctaccccccacccctgaccctgacagagcagaccctgaagggccgcctgcgggagaagctggccgactgtgagcagagccccaccagcagcaggaccagcagcctgggcagcggcggccctgactgtgccatcaccgtgaagagccctggccgggagcccggccgggaccacctgaatggagtggccatgaatgtgaggactggaagtgcccaggctgatggcagtgacagcgagaagccctag

SEQ ID NO: 145678 - DNA, 4194 bp, synthetic construct
  misc_feature 1..4194: note = Description of Artificial Sequence: Synthetic coding sequence
  source 1..4194: mol_type = other DNA
atggcccctcctcctcctcctgtgctgcctgtgctgctgctgctggccgctgctgctgccctgcctgccatgggcctgcgggctgctgcctgggagccccgggtgcctgggggcacccgggcctttgccctgcggcccggctgcacctatgctgtgggcgccgcctgcaccccccgggccccccgggagctgctggatgtgggcagagatggccgcctggccggcagaagaagagtgtctggggccggccggcccctgcccctgcaggtgcggctggtggcccggagcgcccccacagccctgagccggcggctgcgggcccggacccacctgcccggctgtggggcccgggcccggctgtgtggcactggagcccggctgtgtggggccctgtgcttccctgtgcctgggggctgtgccgccgcccagcacagcgccctggccgcccccaccaccctgcctgcctgccgctgccccccccggccccggccccgctgccccggccggcccatctgcctgcccccaggcggctctgtgcggctgcggctgctgtgtgccctgcggcgggctgctggagctgtgcgggtgggcctggccctggaggccgccacagctggcaccccatctgccagccccagccccagcccccccctgccccccaacctgcctgaggcccgggccggccctgcccggcgggcccggcggggcaccagcggccggggcagcctgaagttccccatgcccaactaccaggtggccctgtttgaaaatgaacctgctggcaccctcatcctgcagctgcacgcccactacaccattgaaggagaggaggagcgggtgtcctactacatggagggcctgtttgatgagaggagccggggctacttcagaattgacagcgccaccggggctgtgtccacagattctgtgctggaccgggagaccaaggagacccacgtgctgcgggtgaaggctgtggactacagcaccccacccaggtctgccaccacctacatcaccgtgctggtgaaggacaccaatgaccacagccctgtgtttgagcagagcgagtaccgggagcgggtgcgggagaacctggaggtgggctatgaggtgctgaccatccgggccagtgaccgggacagccccatcaatgccaacctgcgctacagagtgctgggcggggcctgggatgtgttccagctgaatgaaagcagcggcgtggtgtccaccagggctgtgctggaccgggaggaggccgctgagtaccagctgctggtggaggccaatgaccagggcaggaaccctggccccctgagcgccacagccaccgtgtacatcgaggtggaggatgaaaatgacaactacccccagttcagcgagcagaactacgtggtgcaggtgcctgaagatgtgggcctgaacacagctgtgctgcgggtgcaggccacagaccgggaccagggccagaatgctgccatccactacagcatcctgtctggaaatgtggccggccagttctacctgcacagcctgagcggcatcctggatgtgatcaaccccctggactttgaagatgtgcagaagtacagcctgagcatcaaggcccaggacggcggccggcccccactcatcaacagcagcggcgtggtgtctgtgcaggtgctggatgtgaatgacaatgagcccatctttgtgagcagccccttccaggccaccgtgctggagaatgtgcccctgggctaccctgtggtgcacatccaggccgtggatgctgacagcggggagaatgcccggctgcactaccgcctggtggacacagccagcaccttcctgggcggcggcagcgctggccccaagaacccagcccccaccccagacttccccttccagatccacaacagcagcggctggatcaccgtgtgtgccgagctggaccgggaggaggtggagcactacagctttggagtggaggccgtggaccacggcagcccccccatgagcagcagcacctctgtgtccatcaccgtgctggatgtgaatgacaatgaccctgtgttcacccagcccacctatgagctgcggctgaatgaagatgctgctgtgggcagctctgtgctgaccctgcaggcccgggacagagatgccaacagcgtcatcacctaccagctgactggaggcaacaccaggaacagatttgccctgagcagccagaggggcggcggcctcatcaccctggccctgcccctggactacaagcaggagcagcagtatgtgctggccgtgacagccagtgatggcaccaggagccacacagcccacgtgctgatcaacgtgacagatgccaacacccacaggcctgtgttccagagcagccactacacagtgtctgtgtctgaggacaggcctgtgggcaccagcatcgccaccctgagcgccaatgatgaggacaccggggagaatgcccgcatcacctacgtgatccaggaccctgtgccccagttcagaattgatcctgattctggcaccatgtacaccatgatggagctggactatgagaaccaggtggcctacaccctgaccatcatggcccaggacaatggcatcccccagaagagtgacaccaccaccctggagatcctgatcctggatgccaatgacaatgccccccagttcctgtgggacttctaccagggcagcatctttgaagatgccccacccagcaccagcatcctgcaggtgtctgccacagaccgggacagcggccccaacggccgcctgctgtacaccttccagggcggagatgatggagatggagacttctacatcgagcccaccagcggggtcatccgcacccagaggcggctggacagagaaaatgtggccgtgtacaacctgtgggccctggccgtggaccggggcagccccacccccctgagcgcctctgtggagatccaggtgaccatcctggacatcaatgacaatgcccccatgtttgagaaggatgagctggagctgtttgtggaggagaacaaccctgtgggctctgtggtggccaagatccgggccaatgaccctgatgagggccccaatgcccagatcatgtaccagatcgtggagggggacatgaggcacttcttccagctggacctgctgaatggagacctgcgggccatggtggagctggactttgaggtgagaagagaatatgtgctggtggtgcaggccaccagcgcccccctggtgtcccgggccaccgtgcacatcctgctggtggaccagaatgacaacccccctgtgctgcctgacttccagatcctcttcaacaactacgtgaccaacaagagcaacagcttccccactggagtcatcggctgcatcccagcccatgaccctgatgtgtctgacagcctgaactacacctttgtgcagggcaatgagctgcggctgctgctgctggaccctgccactggagagctgcagctgagccgggacctggacaacaaccggcccctggaggccctgatggaggtgtctgtgtctgatggcatccacagcgtgacagccttctgcaccctgcgggtgaccatcatcacagatgacatgctgaccaacagcatcaccgtgcggctggagaacatgagccaggagaagttcctgagccccctgctggccctgtttgtggagggcgtggccgctgtgctgagcaccaccaaggatgatgtgtttgtgttcaacgtgcagaatgacacagatgtgagcagcaacatcctgaatgtgaccttcagcgccctgctgcctggaggagtgcggggccagttcttccccagcgaggacctgcaggagcagatctacctgaacagaaccctgctgaccaccatcagcacccagagggtgctgccctttgatgacaacatctgcctgcgggagccctgtgagaactacatgaagtgtgtgtctgtgctgcgctttgacagcagcgcccccttcctgagcagcaccaccgtgctcttccggcccatccaccccatcaatggcctgcgctgccgctgccccccaggcttcaccggggactactgtgaaacagaaattgacctgtgctacagcgacccctgtggggccaacggccgctgccgcagccgggagggcggctacacctgtgagtgctttgaggacttcaccgctgtgtcctag

SEQ ID NO: 145679 - DNA, 2319 bp, synthetic construct
  misc_feature 1..2319: note = Description of Artificial Sequence: Synthetic coding sequence
  source 1..2319: mol_type = other DNA
tgagacttccccttccagatccacaacagcagcggctggatcaccgtgtgtgccgagctggaccgggaggaggtggagcactacagctttggagtggaggccgtggaccacggcagcccccccatgagcagcagcacctctgtgtccatcaccgtgctggatgtgaatgacaatgaccccgtcttcacccagcccacctatgagctgcggctgaatgaagatgctgctgtgggcagctctgtgctgaccctgcaggcccgggacagagatgccaacagcgtcatcacctaccagctgaccggcggcaacaccaggaacagatttgccctgagcagccagagaggaggcggcctcatcaccctggccctgcccctggactacaagcaggagcagcagtatgtgctggccgtgacagccagtgatggcaccaggagccacacagcccacgtgctgatcaacgtgacagatgccaacacccacaggcctgtgttccagagcagccactacacagtgtctgtgtctgaagatagacctgtgggcaccagcatcgccaccctgagcgccaatgatgaagatactggagaaaatgcccgcatcacctacgtgatccaggaccctgtgccccagttcagaattgatcctgacagcggcaccatgtacaccatgatggagctggactatgagaaccaggtggcctacaccctgaccatcatggcccaggacaatggcatcccccagaagagtgacaccaccaccctggagatcctgatcctggatgccaatgacaatgccccccagttcctgtgggacttctaccagggcagcatctttgaagatgccccacccagcaccagcatcctgcaggtgtctgccacagaccgggacagcggccccaacggccgcctgctgtacaccttccagggcggagatgatggagatggagacttctacatcgagcccaccagcggggtcatccgcacccagaggcggctggaccgggagaatgtggccgtgtacaacctgtgggccctggccgtggaccggggcagccccacccccctgagcgcctctgtggagatccaggtgaccatcctggacatcaatgacaatgcccccatgtttgagaaggatgagctggagctgtttgtggaggagaacaaccctgtgggctctgtggtggccaagatccgggccaatgaccctgatgagggccccaatgcccagatcatgtaccagatcgtggagggggacatgaggcacttcttccagctggacctgctgaatggagacctgcgggccatggtggagctggactttgaggtgcggcgggagtatgtgctggtggtgcaggccaccagcgcccccctggtgtcccgggccaccgtgcacatcctgctggtggaccagaatgacaacccccctgtgctgcctgacttccagatcctcttcaacaactacgtgaccaacaagagcaacagcttccccaccggggtgattggctgcatcccagcccatgaccctgatgtgtctgacagcctgaactacacctttgtgcagggcaatgagctgcggctgctgctgctggaccctgccaccggggagctgcagctgagccgggacctggacaacaaccggcccctggaggccctgatggaggtgtctgtgtctgatggcatccacagcgtgacagccttctgcaccctgcgggtgaccatcatcacagatgacatgctgaccaacagcatcaccgtgcggctggagaacatgagccaggagaagttcctgagccccctgctggccctgtttgtggagggcgtggccgctgtgctgagcaccaccaaggatgatgtgtttgtgttcaacgtgcagaatgacacagatgtgagcagcaacatcctgaatgtgaccttcagcgccctgctgcccggcggcgtgcggggccagttcttccccagcgaggacctgcaggagcagatctacctgaacagaaccctgctgaccaccatcagcacccagagggtgctgccctttgatgacaacatctgcctgcgggagccctgtgagaactacatgaagtgtgtgtctgtgctgcgctttgacagcagcgcccccttcctgagcagcaccaccgtgctcttccggcccatccaccccatcaatggcctgcgctgccgctgccccccaggcttcaccggggactactgtgaaacagaaattgacctgtgctacagcgacccctgtggggccaacggccgctgccgcagccgggagggcggctacacctgtgaatgttttgaggacttcacagagatctcctag

SEQ ID NO: 145680 - DNA, 8772 bp, synthetic construct
  misc_feature 1..8772: note = Description of Artificial Sequence: Synthetic coding sequence
  source 1..8772: mol_type = other DNA
atgaggagccctgccaccggggtgcccctgcccaccccacctccacccctgctgctgctgctgctgctgctgctgcccccacccctgctgggggaccaggtgggcccctgccgcagcctgggcagccggggccggggcagcagcggggcctgtgcccccatgggctggctgtgccccagcagcgccagcaacctgtggctgtacaccagccgctgcagagatgctggaacagagctgaccggccacctggtgccccaccatgatggcctgcgggtgtggtgcccagagagcgaggcccacatccccctgcccccagcccctgagggctgcccctggagctgccgcctgctgggcattggaggccacctgagcccccagggcaagctgaccctgcctgaggagcacccctgcctgaaggccccccggctgcgctgccagagctgcaagctggcccaggcccctggcctgcgggccggggagaggagccctgaggagagcctgggcggccgcaggaagagaaatgtgaacacagccccccagttccagcccccatcctaccaggccaccgtgcctgagaaccagcctgctggcacccctgtggccagcctgcgggccatcgaccctgatgaaggagaggccggccgcctggagtacaccatggatgccctgtttgacagccgcagcaaccagttcttcagcctggaccctgtgactggagctgtgaccacagctgaggagctggaccgggagaccaagagcacccacgtgttccgggtgacagcccaggaccacggcatgccccggcgcagcgccctggccaccctgaccatcctggtgacagacaccaatgaccatgaccctgtgtttgagcagcaggagtacaaggagagcctgcgggagaacctggaggtgggctatgaggtgctgactgtgcgggccacagatggagatgcccccccaaatgccaacatcctgtaccgcctgctggagggcagcggcggcagccccagcgaggtgtttgaaattgaccccaggtctggagtcatccgcacccggggccctgtggaccgggaggaggtggagagctaccagctgactgtggaggccagtgaccagggccgggaccccggccccaggagcaccacagctgctgtgttcctgtctgtggaggatgacaatgacaatgccccccagttcagcgagaagcgctacgtggtgcaggtgcgggaggatgtgacccctggggcccctgtgctgcgggtgacagccagtgaccgggacaagggcagcaatgctgtggtgcactacagcatcatgtctggaaatgcccggggccagttctacctggatgcccagacaggagccctggatgtggtgagccccctggactatgagaccaccaaggagtacaccctgcgggtgcgggcccaggacggcggccggccccccctgagcaatgtgtctggcctggtgacagtgcaggtgctggacatcaatgacaatgcccccatctttgtgtccacccccttccaggccaccgtgctggagagcgtgcccctgggctacctggtgctgcacgtgcaggccattgatgctgatgctggggacaatgcccggctggagtaccgcctggccggcgtgggccatgacttccccttcaccatcaacaatggaacaggctggatctctgtggccgctgagctggaccgggaggaggtggacttctacagctttggagtggaggcccgggaccacggcaccccagccctgacagccagcgcctctgtgtctgtgacagtgctggatgtgaatgacaacaaccccaccttcacccagcctgagtacacagtgcggctgaatgaagatgctgctgtgggcacctctgtggtgacagtgtctgctgtggacagagatgcccacagcgtcatcacctaccagatcaccagcggcaacaccaggaaccgcttcagcatcaccagccagagcggcggcggcctggtgtccctggccctgcccctggactacaagctggagcggcagtatgtgctggccgtgacagccagtgatggcacccggcaggacacagcccagatcgtggtgaatgtgacagatgccaacacccacaggcctgtgttccagagcagccactacacagtgaatgtgaatgaagatagacctgctggcaccaccgtggtgctgatcagcgccacagatgaagatactggagaaaatgcccgcatcacctacttcatggaggacagcatcccccagttcagaattgatgctgacaccggggctgtgaccacccaggccgagctggactatgaggaccaggtgtcctacaccctggccatcacagcccgggacaatggcatcccccagaagagtgacaccacctacctggagatcctggtgaatgatgtgaatgacaatgccccccagttcctgcgggacagctaccagggctctgtgtatgaagatgtgccccccttcacctctgtgctgcagatcagcgccacagaccgggacagcggcctgaatggccgggtcttctacaccttccagggcggagatgatggagatggagacttcatcgtggagagcaccagcggcatcgtgaggaccctgcggcggctggaccgggagaatgtggcccagtatgtgctgcgggcctatgctgtggacaagggcatgcccccagcccggacccccatggaggtgacagtgacagtgctggatgtgaatgacaacccccctgtgtttgagcaggatgaatttgatgtgtttgtggaggagaacagccccatcggcctggccgtggcccgggtgacagccacagatcctgatgagggcaccaatgcccagatcatgtaccagatcgtggagggcaacatccctgaggtgttccagctggacatcttctctggagagctgacagccctggtggacctggactatgaagatagaccagaatatgtgctggtgatccaggccaccagcgcccccctggtgtcccgggccaccgtgcacgtgcggctgctggacagaaatgacaacccccctgtgctgggcaactttgagatcctcttcaacaactacgtgaccaacagaagcagcagcttccctgggggcgccatcggccgggtgcctgcccatgaccctgacatcagtgacagcctgacctacagctttgaaagaggaaatgagctgagcctggtgctgctgaatgccagcactggagagctgaagctgagccgggccctggacaacaaccggcccctggaggccatcatgtctgtgctggtgtctgatggagtgcacagcgtgacagcccagtgtgccctgcgggtgaccatcatcacagatgagatgctgacccacagcatcaccctgcggctggaggacatgagccctgagcgcttcctgagccccctgctgggcctcttcatccaggccgtggccgccaccctggccaccccaccagaccacgtggtggtgttcaacgtgcagagggacacagatgcccctgggggccacatcctgaatgtgtccctgtctgtgggccagcccccaggccctgggggcggcccccccttcctgcccagcgaggacctgcaggagcggctgtacctgaacagaagcctgctgacagccatcagcgcccagagggtgctgccctttgatgacaacatctgcctgcgggagccctgtgagaactacatgagatgtgtgtctgtgctgcgctttgacagcagcgcccccttcatcgccagcagctctgtgctcttccggcccatccaccctgtgggcggcctgcgctgccgctgccccccaggcttcaccggggactactgtgaaacagaggtggacctgtgctacagccggccctgtggcccccacggccgctgccgcagccgggagggcggctacacctgcctgtgcagagatggctacacaggagagcactgtgaggtgtctgcccggagcggccgctgcaccccaggagtgtgcaagaatggaggcacctgtgtgaacctgctggtgggcggcttcaagtgtgactgccccagcggggactttgagaagccctactgccaggtgaccaccaggagcttccctgcccacagcttcatcaccttccggggcctgcggcagcgcttccacttcaccctggccctgagctttgccaccaaggagagagatggcctgctgctgtacaacggccgcttcaatgagaagcatgactttgtggccctggaggtgatccaggagcaggtgcagctgaccttctctgctggggagagcaccaccaccgtgagcccctttgtgcctgggggcgtgtctgatggccagtggcacacagtgcagctgaagtactacaacaagcccctgctgggccagacaggcctgccccagggccccagcgagcagaaggtggccgtggtgacagtggatggctgtgacacaggagtggccctgcgctttggatctgtgctgggcaactacagctgtgccgcccagggcacccagggcggcagcaagaagagcctggacctgaccggccccctgctgctgggcggcgtgcctgacctgcctgagagcttccctgtgaggatgaggcagtttgtgggctgcatgaggaacctgcaggtggacagccgccacatcgacatggctgacttcatcgccaacaatggaacagtgcccggctgcccagccaagaagaatgtgtgtgacagcaacacctgccacaatggaggcacctgtgtgaaccagtgggatgccttcagctgtgaatgtcccctgggctttggaggcaagagctgtgcccaggagatggccaacccccagcacttcctgggcagcagcctggtggcctggcacggcctgagcctgcccatcagccagccctggtacctgagcctgatgttccgcacccggcaggctgatggagtgctgctgcaggccatcacccggggccgcagcaccatcaccctgcagctgcgggagggccacgtgatgctgtctgtggagggcaccggcctgcaggccagcagcctgcggctggagcccggccgggccaatgatggagactggcaccacgcccagctggccctgggcgccagcggcggccctggccacgccatcctgagctttgattatggccagcagagagctgagggcaacctgggcccccggctgcacggcctgcacctgagcaacatcaccgtgggcggcatccctggccctgctggaggagtggcccggggcttccggggctgcctgcagggcgtgcgggtgtctgacaccccagagggcgtgaacagcctggaccccagccatggagagagcatcaacgtggagcagggctgcagcctgcctgacccctgtgacagcaacccctgcccagccaacagctactgcagcaatgactgggacagctacagctgcagctgtgaccccggctactacggggacaactgcaccaacgtgtgtgacctgaacccctgtgagcaccagagcgtgtgcaccaggaagcccagcgcccctcatggctacacctgtgagtgcccccccaactacctgggcccctactgtgagaccagaattgaccagccctgcccccggggctggtggggccaccccacctgtggcccctgcaactgtgatgtgtccaaaggatttgatcctgactgcaacaagaccagcggggagtgccactgcaaggagaaccactacagacctcctggcagccccacctgcctgctgtgtgactgctaccccaccggcagcctgagccgggtgtgtgaccctgaagatggccagtgcccctgcaagccaggagtcatcggccggcagtgtgacagatgtgacaacccctttgctgaggtgaccaccaacggctgtgaggtgaactatgacagctgcccccgggccatcgaggccggcatctggtggcccaggaccaggtttggcctgcctgctgctgccccctgccccaagggcagctttggaacagctgtgcgccactgtgatgagcaccggggctggctgccccccaacctcttcaactgcaccagcatcaccttcagcgagctgaagggctttgctgagcggctgcagagaaatgaaagtggcctggacagcggccgcagccagcagctggccctgctgctgagaaatgccacccagcacacagctggctacttcggcagtgatgtgaaggtggcctaccagctggccacccggctgctggcccacgagagcacccagaggggcttcggcctgagcgccacccaggatgtgcacttcacagagaacctgctgcgggtgggcagcgccctgctggacacagccaacaagaggcactgggagctgatccagcagacagagggcggcacagcctggctgctgcagcactatgaggcctatgccagcgccctggcccagaacatgaggcacacctacctgagccccttcaccatcgtgacccccaacatcgtcatctctgtggtgcggctggacaagggcaactttgctggggccaagctgcccaggtatgaggccctgcggggggagcagcccccagacctggagaccaccgtcatcctgcctgagagcgtcttccgggagaccccacctgtggtgcggcctgctggccctggagaggcccaggagcctgaggagctggcccggcggcagaggaggcaccctgagctgagccagggcgaggccgtggccagcgtcatcatctaccgcaccctggccggcctgctgccccacaactatgaccctgacaagaggagcctgcgggtgcccaagaggcccatcatcaacacccctgtggtgtccatctctgtgcatgatgatgaggagctgctgccccgggccctggacaagcctgtgacagtgcagttccggctgctggagacagaggagaggaccaagcccatctgtgtgttctggaaccacagcatcctggtgtctggaactggaggctggagcgcccggggctgtgaggtggtgttcagaaatgaaagccacgtgtcctgccagtgcaaccacatgaccagctttgctgtgctgatggatgtgtccagaagagaaaatggagagatcctgcccctgaagaccctgacctacgtggccctgggcgtgaccctggccgccctgctgctgaccttcttcttcctgaccctgctgcgcatcctgcggagcaaccagcacggcatcagaagaaacctgacagctgccctgggcctggcccagctggtgttcctgctgggcatcaaccaggccgacctgccctttgcctgcaccgtcatcgccatcctgctgcacttcctgtacctgtgcaccttctcctgggccctgctggaggccctgcacctgtaccgggccctgacagaggtgagagatgtgaacacaggccccatgaggttctactacatgctgggctggggcgtgcctgccttcatcaccggcctggccgtgggcctggaccctgagggctacggcaacccagacttctgctggctgagcatctatgacaccctcatctggagctttgctggccctgtggcctttgctgtgtccatgtctgtgttcctgtacatcctggccgcccgggccagctgtgccgcccagaggcagggctttgagaagaagggccctgtgtctggcctgcagcccagctttgctgtgctgctgctgctgagcgccacctggctgctggccctgctgtctgtgaacagcgacaccctgctcttccactacctgtttgccacctgcaactgcatccagggccccttcatcttcctgtcctatgtggtgctgagcaaggaggtgaggaaggccctgaagctggcctgcagcaggaagcccagcccagaccctgccctgaccaccaagagcaccctgaccagcagctacaactgccccagcccctatgcagatggccgcctgtaccagccctatggagacagcgctggcagcctgcacagcaccagccgcagcggcaagagccagcccagctacatccccttcctgctgcgggaggagagcgccctgaaccctggccagggccccccaggcctgggggaccccggcagcctcttcctggagggccaggaccagcagcacgaccctgacacagacagcgacagcgacctgagcctggaggatgaccagagcggcagctatgccagcacccacagcagtgacagcgaggaggaggaggaggaggaggaggaggaggccgccttccctggagagcagggctgggacagcctgctgggccctggagctgagcggctgcccctgcacagcacccccaaggatggcggccctggccctgggaaggccccctggccaggggactttggcaccacagccaaggagagcagtggaaatggagcccctgaggagcggctgagagaaaatggagatgccctgagccgggagggcagcctgggccccctgcccggcagcagcgcccagccccacaagggcatcctgaagaagaagtgcctgcccaccatcagcgagaagagcagcctgctgcggctgcccctggagcagtgcaccggcagcagccggggcagcagcgccagcgagggcagccggggcggccccccaccccggcccccaccccggcagagcctgcaggagcagctgaatggagtgatgcccatcgccatgagcatcaaggccggcaccgtggatgaggacagcagcggcagcgagttcctgttcttcaacttcctgcactag

SEQ ID NO: 145681 - DNA, 9939 bp, synthetic construct
  misc_feature 1..9939: note = Description of Artificial Sequence: Synthetic coding sequence
  source 1..9939: mol_type = other DNA
atgatggcccggcggcccccctggaggggcctgggcggccgcagcacccccatcctgctgctgctgctgctgagcctcttccccctgagccaggaggagctgggcggcggcggccaccagggctgggaccccggcctggccgccaccaccggcccccgggcccacatcggcggcggggccctggccctgtgcccagagagcagcggcgtgcgggaggatggcggccctggcctgggcgtgcgggagcccatctttgtgggcctgcggggccggcggcagagcgccaggaacagccggggccccccagagcagcccaatgaggagctgggcattgaacatggagtgcagcccctgggcagccgggagcgggagaccggccagggccctggctctgtgctgtactggaggcctgaggtgagcagctgtggccgcacaggccccctgcagaggggcagcctgagccctggggccctgagcagcggcgtgcccggcagcggcaacagcagccccctgcccagcgacttcctgatccgccaccacggccccaagcctgtgagcagccagagaaatgccggcaccggcagcaggaagagggtgggcacagcccgctgctgcggggagctgtgggccaccggcagcaagggccagggcgagcgggccaccaccagcggggctgagaggacagcccccaggaggaactgcctgcccggggccagcggcagcggccctgagctggacagcgcccccaggacagccaggacagccccagccagcggcagcgccccccgggagagcaggacagcccctgagcccgcccccaagaggatgaggagccggggcctcttccgctgccgcttcctgccccagaggcctggccccaggcctcctggcctgcctgcccggcctgaggccaggaaggtgaccagcgccaacagagcccgcttccggcgggccgccaacagacacccccagttcccccagtacaactaccagaccctggtgcctgaaaatgaagctgctggaacagctgtgctgcgggtggtggcccaggaccctgatgctggggaggccggccgcctggtgtacagcctggccgccctgatgaacagccgcagcctggagctgttcagcattgacccccagagcggcctcatcagaacagctgctgccctggaccgggagagcatggagcggcactacctgcgggtgacagcccaggaccacggcagcccccggctgagcgccaccaccatggtggccgtgacagtggccgacagaaatgaccacagccctgtgtttgagcaggcccagtaccgggagaccctgcgggagaatgtggaggagggctaccccatcctgcagctgcgggccacagatggagatgcccccccaaatgccaacctgcgctacagatttgtgggccccccagctgcccgggctgctgctgctgctgcctttgaaattgaccccaggagcggcctcatcagcaccagcggccgggtggaccgggagcacatggagagctatgagctggtggtggaggccagtgaccagggccaggagcccggccccaggtctgccaccgtgcgggtgcacatcaccgtgctggatgaaaatgacaatgccccccagttcagcgagaagcgctacgtggcccaggtgcgggaggatgtgcggccccacacagtggtgctgcgggtgacagccacagaccgggacaaggatgccaacggcctggtgcactacaacatcatcagcggcaacagccggggccactttgccatcgacagcctgactggagagatccaggtggtggcccccctggactttgaggccgagcgggagtatgccctgcgcatccgggcccaggatgctggccggccccccctgagcaacaacacaggcctggccagcatccaggtggtggacatcaatgaccacatccccatctttgtgtccacccccttccaggtgtctgtgctggagaatgcccccctgggccacagcgtcatccacatccaggccgtggatgctgaccacggggagaatgcccggctggagtacagcctgactggagtggccccagacaccccatttgtgatcaacagcgccaccggctgggtgtctgtgtctggccccctggaccgggagagcgtggagcactacttcttcggcgtggaggcccgggaccacggcagcccccccctgagcgccagcgcctctgtgacagtgacagtgctggatgtgaatgacaacagacctgagttcaccatgaaggagtaccacctgcggctgaatgaagatgctgctgtgggcacctctgtggtgtctgtgacagctgtggacagagatgccaacagcgccatctcctaccagatcaccggcggcaacaccaggaacagatttgccatcagcacccagggcggcgtgggcctggtgaccctggccctgcccctggactacaagcaggagcgctacttcaagctggtgctgacagccagtgaccgggccctgcatgaccactgctacgtgcacatcaacatcacagatgccaacacccacaggcctgtgttccagagcgcccactacagcgtgtctgtgaatgaagatcggcccatgggcagcaccatcgtggtgatcagcgccagtgatgatgatgtgggagaaaatgcccgcatcacctacctgctggaggacaacctgccccagttcagaattgatgctgacagcggggccatcaccctgcaggcccccctggactatgaggaccaggtgacctacaccctggccatcacagcccgggacaatggcatcccccagaaggctgacaccacctacgtggaggtgatggtgaatgatgtgaatgacaatgccccccagtttgtggccagccactacacaggcctggtgtctgaagatgccccacccttcacctctgtgctgcagatcagcgccacagacagagatgcccacgccaacggccgggtgcagtacaccttccagaatggagaagatggagatggagacttcaccatcgagcccaccagcggcatcgtgaggacagtgcggcggctggaccgggaggccgtgtctgtgtatgagctgacagcctatgctgtggacagaggagtgccccccctgcggacccctgtgtccatccaggtgatggtgcaggatgtgaatgacaatgcccctgtgtttcctgctgaggagtttgaggtgcgggtgaaggagaacagcatcgtgggctctgtggtggcccagatcacagctgtggaccctgatgagggccccaatgcccacatcatgtaccagatcgtggagggcaacatccctgagctgttccagatggacatcttctctggagagctgacagccctgattgacctggactatgaggcccggcaggagtatgtgattgtggtgcaggccaccagcgcccccctggtgtcccgggccaccgtgcacgtgcggctggtggaccagaatgacaacagccctgtgctgaacaacttccagatcctcttcaacaactacgtgagcaacagaagtgacaccttccccagcggcatcatcggccgcatcccagcctatgaccctgatgtgtctgaccacctgttctacagctttgaaagaggaaatgagctgcagctgctggtggtgaaccagaccagcggggagctgcggctgagcaggaagctggacaacaaccggcccctggtggcctccatgctggtgacagtgacagatggcctgcacagcgtgacagcccagtgtgtgctgcgggtggtgatcatcacagaggagctgctggccaacagcctgactgtgcggctggagaacatgtggcaggagcgcttcctgagccccctgctgggccgcttcctggagggcgtggccgctgtgctggccaccccagcagaagatgtgttcatcttcaacatccagaatgacacagatgtgggcggcaccgtgctgaatgtgtccttcagcgccctggcccccaggggggccggggccggggctgctggcccctggttcagcagcgaggagctgcaggagcagctgtatgtgagaagagctgccctggccgcccggagcctgctggatgtgctgccctttgatgacaacgtgtgcctgcgggagccctgtgagaactacatgaagtgtgtgtctgtgctgcgctttgacagcagcgcccccttcctggccagcgccagcaccctcttccggcccatccagcccatcgccggcctgcgctgccgctgccccccaggcttcaccggggacttctgtgaaacagagctggacctgtgctacagcaacccctgcagaaatggaggagcctgtgcccggcgggagggcggctacacctgtgtgtgccggccccgcttcaccggggaggactgtgagctggacacagaggccggccgctgtgtgcctggggtgtgcagaaatggaggcacctgcacagatgccccaaatggaggcttccgctgccagtgcccagctgggggcgcctttgagggcccccgctgtgaggtggccgcccgctccttcccccccagcagctttgtgatgttccggggcctgcggcagcgcttccacctgaccctgagcctgagctttgccaccgtgcagcagagcggcctgctcttctacaacggccgcctgaatgagaagcatgacttcctggccctggagctggtggccggccaggtgcggctgacctacagcactggagagagcaacacagtggtgagccccaccgtgcctgggggcctgagtgatggccagtggcacacagtgcacctgcgctactacaacaagcccaggacagatgccctgggcggggcccagggccccagcaaggacaaggtggccgtgctgtctgtggatgactgtgatgtggccgtggccctgcagtttggagctgagatcggcaactacagctgtgccgctgctggggtgcagaccagcagcaagaagagcctggacctgaccggccccctgctgctgggcggcgtgcccaacctgcctgagaacttccctgtgagccacaaggacttcatcggctgcatgagggacctgcacattgatggccggcgggtggacatggccgcctttgtggccaacaacggcaccatggccggctgccaggccaagctgcacttctgtgacagcggcccctgcaagaacagcggcttctgcagcgagcgctggggcagcttcagctgtgactgccctgtgggctttggaggcaaggactgccagctgaccatggcccacccccaccacttcagaggaaatggcaccctgtcctggaactttggaagtgacatggctgtgtctgtgccctggtacctgggcctggccttccgcacccgggccacccagggcgtgctgatgcaggtgcaggccggcccccacagcaccctgctgtgccagctggaccggggcctgctgtctgtgacagtgacccggggcagcggccgggccagccacctgctgctggaccaggtgacagtgtctgatggccgctggcatgacctgcggctggagctgcaggaggagcccggcggccggcggggccaccacgtgctgatggtgtccctggacttcagcctcttccaggacaccatggctgtgggcagcgagctgcagggcctgaaggtgaagcagctgcacgtgggcggcctgcccccaggcagcgctgaggaggccccccagggcctggtgggctgcatccagggcgtgtggctgggcagcacccccagcggcagccctgccctgctgccccccagccaccgggtgaatgctgagcccggctgtgtggtgaccaatgcctgtgccagcggcccctgcccccctcatgctgactgccgggacctgtggcagaccttcagctgcacctgccagcccggctactacggccctggctgtgtggatgcctgcctgctgaacccctgccagaaccagggcagctgccgccacctgcccggggccccccacggctacacctgtgactgtgtgggcggctacttcggccaccactgtgagcacaggatggaccagcagtgcccccggggctggtggggcagccccacctgtggcccctgcaactgtgatgtgcacaagggctttgaccccaactgcaacaagaccaacggccagtgccactgcaaggagttccactaccggccccggggcagtgacagctgcctgccctgtgactgctaccctgtgggcagcaccagccgcagctgtgccccccacagcggccagtgcccctgcaggcctggggccctgggccggcagtgcaacagctgtgacagcccctttgctgaggtgacagccagcggctgccgggtgctgtatgatgcctgccccaagagcctgcggtctggagtgtggtggccccagaccaagtttggagtgctggccaccgtgccctgccccaggggggccctgggcgctgctgtgcggctgtgtgatgaggcccagggctggctggagccagacctcttcaactgcaccagccctgccttccgggagctgagcctgctgctggatggcctggagctgaacaagacagccctggacaccatggaggccaagaagctggcccagaggctgcgggaggtgacaggccacacagaccactacttcagccaggatgtgcgggtgacagcccggctgctggcccacctgctggcctttgagagccaccagcagggcttcggcctgacagccacccaggatgcccacttcaatgaaaacctgctgtgggccggcagcgccctgctggcccctgagactggagacctgtgggccgccctgggccagagggcccctgggggcagccctggcagcgctggcctggtgcgccacctggaggagtatgctgccaccctggccaggaacatggagctgacctacctgaaccccatgggcctggtgacccccaacatcatgctgagcattgacaggatggagcaccccagcagccccaggggggcccggcgctacccccgctaccacagcaacctcttccggggccaggatgcctgggacccccacacccacgtgctgctgcccagccagagcccccggcccagccccagcgaggtgctgcccaccagcagcagcattgagaacagcaccaccagctctgtggtgcccccaccagcccctcctgagcctgagcccggcatcagcatcatcatcctgctggtgtaccgcaccctgggcggcctgctgcctgcccagttccaggccgagcggcggggggcccggctgccccagaaccctgtgatgaacagccctgtggtgtctgtggccgtgttccacggcaggaacttcctgcggggcatcctggagagccccatcagcctggagttccggctgctgcagacagccaacagaagcaaggccatctgtgtgcagtgggaccccccaggcctggccgagcagcacggcgtgtggacagcccgggactgtgagctggtgcacagaaatggcagccacgcccgctgccgctgcagcaggacaggcaccttcggcgtgctgatggatgccagcccccgggagcggctggagggggacctggagctgctggccgtgttcacccacgtggtggtggccgtgtctgtggccgccctggtgctgacagctgccatcctgctgagcctgcggagcctgaagagcaatgtgcggggcatccacgccaacgtggccgccgccctgggcgtggccgagctgctcttcctgctgggcatccacaggacccacaaccagctggtgtgcacagctgtggccatcctgctgcactacttcttcctgagcacctttgcctggctgtttgtgcagggcctgcacctgtacaggatgcaggtggagcccagaaatgtggacagaggagccatgaggttctaccacgccctgggctggggcgtgcctgctgtgctgctgggcctggccgtgggcctggaccctgagggctacggcaacccagacttctgctggatctctgtgcatgagcccctcatctggagctttgctggccctgtggtgctggtgattgtgatgaatggcaccatgttcctgctggccgcccggaccagctgcagcacaggccagcgggaggccaagaagaccagcgccctgaccctgcggagcagcttcctgctgctgctgctggtgtctgcctcctggctgtttggcctgctggccgtgaaccacagcatcctggccttccactacctgcatgctggcctgtgtggcctgcagggcctggccgtgctgctgctcttctgtgtgctgaatgctgatgcccgggccgcctggatgcctgcctgcctgggcaggaaggccgcccctgaggaggcccggcctgcccctggcctgggccctggggcctacaacaacacagccctgtttgaggagagcggcctcatccgcatcaccctgggcgccagcacagtgtcctctgtgtcctctgcccggagcggccgcacccaggaccaggacagccagaggggccgcagctacctgcgggacaacgtgctggtgagacatggcagcgctgctgaccacacagaccacagcctgcaggcccacgccggccccacagacctggatgtggccatgttccacagagatgctggagctgacagcgacagcgacagcgacctgagcctggaggaggagaggagcctgagcatccccagcagcgagagcgaggacaatggccgcacccggggccgcttccagaggcccctgtgccgggccgcccagagcgagcggctgctgacccaccccaaggatgtggatggaaatgacctgctgagctactggccagccctgggagaatgtgaggccgccccctgtgccctgcagacctggggcagcgagcggcggctgggcctggacaccagcaaggatgctgccaacaacaaccagcctgaccctgccctgaccagcggagatgagaccagcctgggccgggcccagaggcagaggaagggcatcctgaagaaccggctgcagtaccccctggtgccccagaccaggggggcccctgagctgtcctggtgccgggccgccaccctgggccacagagctgtgcctgctgccagctatggccgcatctatgctgggggcggcaccggcagcctgagccagcctgccagccgctacagcagccgggagcagctggacctgctgctgcggcggcagctgagccgggagcggctggaggaggccccagcccctgtgctgcggcccctgagcaggcctggcagccaggagtgcatggatgctgcccctggccgcctggagcccaaggaccggggcagcaccctgccccggcggcagcccccccgggactacccaggggccatggccggccgcttcggcagcagagatgccctggacctgggcgccccccgggagtggctgagcaccctgcccccacccaggaggacccgggacctggacccccagcccccacccctgcccctgagcccccagaggcagctgagccgggaccccctgctgcccagccggcccctggacagcctgagccgcagcagcaacagccgggagcagctggaccaggtgcccagccgccaccccagccgggaggccctgggccccctgccccagctgctgcgggcccgggaggacagcgtgtctggccccagccacggccccagcacagagcagctggacatcctgagcagcatcctggccagcttcaacagcagcgccctgagctctgtgcagagcagcagcacccccctgggcccccacaccacagccaccccatctgccacagcctctgtgctgggccccagcacccccaggtctgccaccagccacagcatcagcgagctgagcccagattctgaggtgcccaggtctgagggccacagctag

SEQ ID NO: 145682 - DNA, 9954 bp, synthetic construct
  misc_feature 1..9954: note = Description of Artificial Sequence: Synthetic coding sequence
  source 1..9954: mol_type = other DNA
atgatggcccggcggcccccctggaggggcctgggcggccgcagcacccccatcctgctgctgctgctgctgagcctcttccccctgagccaggaggagctgggcggcggcggccaccagggctgggaccccggcctggccgccaccaccggcccccgggcccacatcggcggcggggccctggccctgtgcccagagagcagcggcgtgcgggaggatggcggccctggcctgggcgtgcgggagcccatctttgtgggcctgcggggccggcggcagagcgccaggaacagccggggccccccagagcagcccaatgaggagctgggcattgaacatggagtgcagcccctgggcagccgggagcgggagaccggccagggccctggctctgtgctgtactggaggcctgaggtgagcagctgtggccgcacaggccccctgcagaggggcagcctgagccctggggccctgagcagcggcgtgcccggcagcggcaacagcagccccctgcccagcgacttcctgatccgccaccacggccccaagcctgtgagcagccagagaaatgccggcaccggcagcaggaagagggtgggcacagcccgctgctgcggggagctgtgggccaccggcagcaagggccagggcgagcgggccaccaccagcggggctgagaggacagcccccaggaggaactgcctgcccggggccagcggcagcggccctgagctggacagcgcccccaggacagccaggacagccccagccagcggcagcgccccccgggagagcaggacagcccctgagcccgcccccaagaggatgaggagccggggcctcttccgctgccgcttcctgccccagaggcctggccccaggcctcctggcctgcctgcccggcctgaggccaggaaggtgaccagcgccaacagagcccgcttccggcgggccgccaacagacacccccagttcccccagtacaactaccagaccctggtgcctgaaaatgaagctgctggaacagctgtgctgcgggtggtggcccaggaccctgatgctggggaggccggccgcctggtgtacagcctggccgccctgatgaacagccgcagcctggagctgttcagcattgacccccagagcggcctcatcagaacagctgctgccctggaccgggagagcatggagcggcactacctgcgggtgacagcccaggaccacggcagcccccggctgagcgccaccaccatggtggccgtgacagtggccgacagaaatgaccacagccctgtgtttgagcaggcccagtaccgggagaccctgcgggagaatgtggaggagggctaccccatcctgcagctgcgggccacagatggagatgcccccccaaatgccaacctgcgctacagatttgtgggccccccagctgcccgggctgctgctgctgctgcctttgaaattgaccccaggagcggcctcatcagcaccagcggccgggtggaccgggagcacatggagagctatgagctggtggtggaggccagtgaccagggccaggagcccggccccaggtctgccaccgtgcgggtgcacatcaccgtgctggatgaaaatgacaatgccccccagttcagcgagaagcgctacgtggcccaggtgcgggaggatgtgcggccccacacagtggtgctgcgggtgacagccacagaccgggacaaggatgccaacggcctggtgcactacaacatcatcagcggcaacagccggggccactttgccatcgacagcctgactggagagatccaggtggtggcccccctggactttgaggccgagcgggagtatgccctgcgcatccgggcccaggatgctggccggccccccctgagcaacaacacaggcctggccagcatccaggtggtggacatcaatgaccacatccccatctttgtgtccacccccttccaggtgtctgtgctggagaatgcccccctgggccacagcgtcatccacatccaggccgtggatgctgaccacggggagaatgcccggctggagtacagcctgactggagtggccccagacaccccatttgtgatcaacagcgccaccggctgggtgtctgtgtctggccccctggaccgggagagcgtggagcactacttcttcggcgtggaggcccgggaccacggcagcccccccctgagcgccagcgcctctgtgacagtgacagtgctggatgtgaatgacaacagacctgagttcaccatgaaggagtaccacctgcggctgaatgaagatgctgctgtgggcacctctgtggtgtctgtgacagctgtggacagagatgccaacagcgccatctcctaccagatcaccggcggcaacaccaggaacagatttgccatcagcacccagggcggcgtgggcctggtgaccctggccctgcccctggactacaagcaggagcgctacttcaagctggtgctgacagccagtgaccgggccctgcatgaccactgctacgtgcacatcaacatcacagatgccaacacccacaggcctgtgttccagagcgcccactacagcgtgtctgtgaatgaagatcggcccatgggcagcaccatcgtggtgatcagcgccagtgatgatgatgtgggagaaaatgcccgcatcacctacctgctggaggacaacctgccccagttcagaattgatgctgacagcggggccatcaccctgcaggcccccctggactatgaggaccaggtgacctacaccctggccatcacagcccgggacaatggcatcccccagaaggctgacaccacctacgtggaggtgatggtgaatgatgtgaatgacaatgccccccagtttgtggccagccactacacaggcctggtgtctgaagatgccccacccttcacctctgtgctgcagatcagcgccacagacagagatgcccacgccaacggccgggtgcagtacaccttccagaatggagaagatggagatggagacttcaccatcgagcccaccagcggcatcgtgaggacagtgcggcggctggaccgggaggccgtgtctgtgtatgagctgacagcctatgctgtggacagaggagtgccccccctgcggacccctgtgtccatccaggtgatggtgcaggatgtgaatgacaatgcccctgtgtttcctgctgaggagtttgaggtgcgggtgaaggagaacagcatcgtgggctctgtggtggcccagatcacagctgtggaccctgatgagggccccaatgcccacatcatgtaccagatcgtggagggcaacatccctgagctgttccagatggacatcttctctggagagctgacagccctgattgacctggactatgaggcccggcaggagtatgtgattgtggtgcaggccaccagcgcccccctggtgtcccgggccaccgtgcacgtgcggctggtggaccagaatgacaacagccctgtgctgaacaacttccagatcctcttcaacaactacgtgagcaacagaagtgacaccttccccagcggcatcatcggccgcatcccagcctatgaccctgatgtgtctgaccacctgttctacagctttgaaagaggaaatgagctgcagctgctggtggtgaaccagaccagcggggagctgcggctgagcaggaagctggacaacaaccggcccctggtggcctccatgctggtgacagtgacagatggcctgcacagcgtgacagcccagtgtgtgctgcgggtggtgatcatcacagaggagctgctggccaacagcctgactgtgcggctggagaacatgtggcaggagcgcttcctgagccccctgctgggccgcttcctggagggcgtggccgctgtgctggccaccccagcagaagatgtgttcatcttcaacatccagaatgacacagatgtgggcggcaccgtgctgaatgtgtccttcagcgccctggcccccaggggggccggggccggggctgctggcccctggttcagcagcgaggagctgcaggagcagctgtatgtgagaagagctgccctggccgcccggagcctgctggatgtgctgccctttgatgacaacgtgtgcctgcgggagccctgtgagaactacatgaagtgtgtgtctgtgctgcgctttgacagcagcgcccccttcctggccagcgccagcaccctcttccggcccatccagcccatcgccggcctgcgctgccgctgccccccaggcttcaccggggacttctgtgaaacagagctggacctgtgctacagcaacccctgcagaaatggaggagcctgtgcccggcgggagggcggctacacctgtgtgtgccggccccgcttcaccggggaggactgtgagctggacacagaggccggccgctgtgtgcctggggtgtgcagaaatggaggcacctgcacagatgccccaaatggaggcttccgctgccagtgcccagctgggggcgcctttgagggcccccgctgtgaggtggccgcccgctccttcccccccagcagctttgtgatgttccggggcctgcggcagcgcttccacctgaccctgagcctgagctttgccaccgtgcagcagagcggcctgctcttctacaacggccgcctgaatgagaagcatgacttcctggccctggagctggtggccggccaggtgcggctgacctacagcactggagagagcaacacagtggtgagccccaccgtgcctgggggcctgagtgatggccagtggcacacagtgcacctgcgctactacaacaagcccaggacagatgccctgggcggggcccagggccccagcaaggacaaggtggccgtgctgtctgtggatgactgtgatgtggccgtggccctgcagtttggagctgagatcggcaactacagctgtgccgctgctggggtgcagaccagcagcaagaagagcctggacctgaccggccccctgctgctgggcggcgtgcccaacctgcctgagaacttccctgtgagccacaaggacttcatcggctgcatgagggacctgcacattgatggccggcgggtggacatggccgcctttgtggccaacaacggcaccatggccggctgccaggccaagctgcacttctgtgacagcggcccctgcaagaacagcggcttctgcagcgagcgctggggcagcttcagctgtgactgccctgtgggctttggaggcaaggactgccagctgaccatggcccacccccaccacttcagaggaaatggcaccctgtcctggaactttggaagtgacatggctgtgtctgtgccctggtacctgggcctggccttccgcacccgggccacccagggcgtgctgatgcaggtgcaggccggcccccacagcaccctgctgtgccagctggaccggggcctgctgtctgtgacagtgacccggggcagcggccgggccagccacctgctgctggaccaggtgacagtgtctgatggccgctggcatgacctgcggctggagctgcaggaggagcccggcggccggcggggccaccacgtgctgatggtgtccctggacttcagcctcttccaggacaccatggctgtgggcagcgagctgcagggcctgaaggtgaagcagctgcacgtgggcggcctgcccccaggcagcgctgaggaggccccccagggcctggtgggctgcatccagggcgtgtggctgggcagcacccccagcggcagccctgccctgctgccccccagccaccgggtgaatgctgagcccggctgtgtggtgaccaatgcctgtgccagcggcccctgcccccctcatgctgactgccgggacctgtggcagaccttcagctgcacctgccagcccggctactacggccctggctgtgtggatgcctgcctgctgaacccctgccagaaccagggcagctgccgccacctgcccggggccccccacggctacacctgtgactgtgtgggcggctacttcggccaccactgtgagcacaggatggaccagcagtgcccccggggctggtggggcagccccacctgtggcccctgcaactgtgatgtgcacaagggctttgaccccaactgcaacaagaccaacggccagtgccactgcaaggagttccactaccggccccggggcagtgacagctgcctgccctgtgactgctaccctgtgggcagcaccagccgcagctgtgccccccacagcggccagtgcccctgcaggcctggggccctgggccggcagtgcaacagctgtgacagcccctttgctgaggtgacagccagcggctgccgggtgctgtatgatgcctgccccaagagcctgcggtctggagtgtggtggccccagaccaagtttggagtgctggccaccgtgccctgccccaggggggccctgggcctgcggggggccggggctgctgtgcggctgtgtgatgaggcccagggctggctggagccagacctcttcaactgcaccagccctgccttccgggagctgagcctgctgctggatggcctggagctgaacaagacagccctggacaccatggaggccaagaagctggcccagaggctgcgggaggtgacaggccacacagaccactacttcagccaggatgtgcgggtgacagcccggctgctggcccacctgctggcctttgagagccaccagcagggcttcggcctgacagccacccaggatgcccacttcaatgaaaacctgctgtgggccggcagcgccctgctggcccctgagaccggggacctgtgggccgccctgggccagagggcccctgggggcagccctggcagcgctggcctggtgcgccacctggaggagtatgctgccaccctggccaggaacatggagctgacctacctgaaccccatgggcctggtgacccccaacatcatgctgagcattgacaggatggagcaccccagcagccccaggggggcccggcgctacccccgctaccacagcaacctcttccggggccaggatgcctgggacccccacacccacgtgctgctgcccagccagagcccccggcccagccccagcgaggtgctgcccaccagcagcagcattgagaacagcaccaccagctctgtggtgcccccaccagcccctcctgagcctgagcccggcatcagcatcatcatcctgctggtgtaccgcaccctgggcggcctgctgcctgcccagttccaggccgagaggagaggagcccggctgccccagaaccctgtgatgaacagccctgtggtgtctgtggccgtgttccatggaagaaacttcctgcggggcatcctggagagccccatcagcctggagttccggctgctgcagacagccaacagaagcaaggccatctgtgtgcagtgggaccccccaggcctggccgagcagcacggcgtgtggacagcccgggactgtgagctggtgcacagaaatggcagccacgcccgctgccgctgcagcaggacaggcacctttggagtgctgatggatgccagcccccgggagcggctggagggggacctggagctgctggccgtgttcacccacgtggtggtggccgtgtctgtggccgccctggtgctgacagctgccatcctgctgagcctgcggagcctgaagagcaatgtgcggggcatccacgccaacgtggccgccgccctgggcgtggccgagctgctcttcctgctgggcatccacaggacccacaaccagctggtgtgcacagctgtggccatcctgctgcactacttcttcctgagcacctttgcctggctgtttgtgcagggcctgcacctgtacaggatgcaggtggagcccagaaatgtggacagaggagccatgaggttctaccacgccctgggctggggcgtgcctgctgtgctgctgggcctggccgtgggcctggaccctgagggctacggcaacccagacttctgctggatctctgtgcatgagcccctcatctggagctttgctggccctgtggtgctggtgattgtgatgaatggcaccatgttcctgctggccgcccggaccagctgcagcacaggccagcgggaggccaagaagaccagcgccctgaccctgcggagcagcttcctgctgctgctgctggtgtctgcctcctggctgtttggcctgctggccgtgaaccacagcatcctggccttccactacctgcacgccggcctgtgtggcctgcagggcctggccgtgctgctgctcttctgtgtgctgaatgctgatgcccgggccgcctggatgcctgcctgcctgggcaggaaggccgcccctgaggaggcccggcctgcccctggcctgggccctggggcctacaacaacacagccctgtttgaggagagcggcctcatccgcatcaccctgggcgccagcacagtgtcctctgtgagcagcgcccggagcggccgcacccaggaccaggacagccagaggggccgcagctacctgcgggacaacgtgctggtgcgccacggcagcgctgctgaccacacagaccacagcctgcaggcccatgctggccccacagacctggatgtggccatgttccacagagatgctggagctgacagcgacagcgacagcgacctgagcctggaggaggagaggagcctgagcatccccagcagcgagagtgaagataatggaagaacccggggccgcttccagaggcccctgtgcagagctgcccagagcgagcggctgctgacccaccccaaggatgtggatggaaatgacctgctgagctactggccagccctgggggagtgtgaggccgccccctgtgccctgcagacctggggcagcgagcggcggctgggcctggacaccagcaaggatgctgccaacaacaaccagcctgaccctgccctgaccagcggagatgagaccagcctgggccgggcccagaggcagaggaagggcatcctgaagaaccggctgcagtaccccctggtgccccagaccaggggggcccctgagctgtcctggtgcagagctgccaccctgggccacagagctgtgcctgctgccagctatggccgcatctatgccggcggcggcaccggcagcctgagccagcctgccagccgctacagcagccgggagcagctggacctgctgctgcggcggcagctgagccgggagcggctggaggaggccccagcccctgtgctgcggcccctgagccggcccggcagccaggagtgcatggatgctgcccctggccgcctggagcccaaggaccggggcagcaccctgccccggcggcagcccccccgggactacccaggggccatggccggccgcttcggcagcagagatgccctggacctgggcgccccccgggagtggctgagcaccctgcccccacccaggaggacccgggacctggacccccagcccccacccctgcccctgagcccccagaggcagctgagccgggaccccctgctgcccagccggcccctggacagcctgagccgcagcagcaacagccgggagcagctggaccaggtgcccagccgccaccccagccgggaggccctgggccccctgccccagctgctgcgggccagagaagattctgtgtctggccccagccacggccccagcacagagcagctggacatcctgagcagcatcctggccagcttcaacagcagcgccctgagctctgtgcagagcagcagcacccccctgggcccccacaccacagccacccccagcgccacagcctctgtgctgggccccagcacccccaggtctgccaccagccacagcatcagcgagctgagcccagacagcgaggtgcccaggtctgagggccacagctag

SEQ ID NO: 145683 - DNA, 1557 bp, synthetic construct
  misc_feature 1..1557: note = Description of Artificial Sequence: Synthetic coding sequence
  source 1..1557: mol_type = other DNA
atggccttctgggccggcggcagccccagcgtggtggactacttccccagcgaggacttctaccgctgtggctactgcaagaatgaaagtggcagccgcagcaatggcatgtgggcccacagcatgacagtgcaggactaccaggacctgattgaccggggctggaggagaagtggcaagtatgtgtacaagcctgtgatgaaccagacctgctgcccccagtacaccatccgctgccggcccctgcagttccagcccagcaagagccacaagaaggtgctgaagaagatgctgaagttcctggccaagggggaggtgcccaagggcagctgtgaagatgagcccatggacagcaccatggatgatgctgtggccggggactttgccctgatcaacaagctggacatccagtgtgacctgaagaccctgagtgatgacatcaaggagagcctggagagcgagggcaagaacagcaagaaggaggagccccaggagctgctgcagagccaggactttgtgggggagaagctgggcagcggggagcccagccacagcgtgaaggtgcacacagtgcccaagccaggaaaaggagctgacctgagcaagccaccctgcaggaaggccaaggagatcaggaaggagaggaagaggctgaagctgatgcagcagaacccagctggggagctggagggcttccaggcccagggccacccccccagcctcttcccccccaaggccaagagcaaccagcccaagagcctggaggacctgatctttgagagcctgcctgaaaatgccagccacaagctggaggtgcgggtggtgcgcagcagcccccccagcagccagttcaaggccaccctgctggagagctaccaggtgtacaagcgctaccagatggtgatccacaagaaccccccagacacccccacagagagccagttcacccgcttcctgtgcagcagccccctggaggccgagaccccaccaaatggaccagactgtggctacggcagcttccaccagcagtactggctggatggcaagatcatcgctgtgggcgtcatcgacatcctgcccaactgtgtgtcctctgtgtacctgtactatgaccctgactacagcttcctgagcctgggcgtgtacagcgccctgcgggagatcgccttcacccggcagctgcacgagaagaccagccagctgagctactactacatgggcttctacatccacagctgccccaagatgaagtacaagggccagtaccggcccagcgacctgctgtgcccagagacctacgtgtgggtgcccatcgagcagtgcctgcccagcctggagaacagcaagtactgccgcttcaaccaggaccctgaggccgtggatgaggacaggagcacagagccagaccggctgcaggtgttccacaagagggccatcatgccctacggcgtgtacaagaagcagcagaaggaccccagcgaggaggccgctgtgctgcagtatgccagcctggtgggccagaagtgcagcgagaggatgctgctcttcagaaattag

SEQ ID NO: 145684 - DNA, 3195 bp, synthetic construct
  misc_feature 1..3195: note = Description of Artificial Sequence: Synthetic coding sequence
  source 1..3195: mol_type = other DNA
atgggccgccacgtggccaccagctgccacgtggcctggctgctggtgctgatcagcggctgctggggccaggtgaaccggctgcccttcttcaccaaccacttctttgacacctacctgctgatcagcgaggacacccctgtgggcagctctgtgacccagctgctggcccaggacatggacaatgaccccctggtgtttggagtgtctggagaggaggccagccgcttctttgctgtggagccagacaccggggtggtgtggctgcggcagcccctggaccgggagaccaagtctgagttcaccgtggagttctctgtgtctgaccaccagggcgtcatcaccaggaaggtgaacatccaggtgggagatgtgaatgacaatgcccccaccttccacaaccagccctacagcgtgcgcatccctgaggtgggcgccactggaaacacccctgtgggcacccccatcttcatcgtgaatgccacagatcctgacctgggcgctgggggctctgtgctgtacagcttccagccccccagccagttctttgccattgattctgcccggggcatcgtgaccgtcatccgggagctggactatgagaccacccaggcctaccagctgactgtgaatgccacagaccaggacaagacccggcccctgagcaccctggccaacctggccatcatcatcacagatgtgcaggacatggaccccatcttcatcaacctgccctacagcaccaacatctatgagcacagccccccaggcaccaccgtgcgcatcatcacagccatcgaccaggacaagggccggccccggggcatcggctacaccatcgtgtctggcaacaccaacagcatctttgccctggactacatctctggagtgctgaccctgaatggcctgctggaccgggagaaccccctgtacagccacggcttcatcctgactgtgaagggcacagagctgaatgatgacaggacccccagtgatgccaccgtgaccaccaccttcaacatcctggtgattgacatcaatgacaatgcccctgagttcaacagcagcgagtacagcgtggccatcacagagctggcccaggtgggctttgccctgcccctcttcatccaggtggtggacaaggatgagggcctgaacagcatgtttgaggtgtacctggtgggcaacaacagccaccacttcatcatcagccccacctctgtgcagggcaaggctgacatccgcatccgggtggccatccccctggactatgagaccgtggacagatatgactttgacctgtttgccaatgaatctgtgcctgaccacgtgggctacgccaaggtgaagatcaccctcatcaatgaaaatgacaaccggcccatcttcagccagcccctgtacaacatcagcctgtatgaaaatgtgacagtgggcacctctgtgctgactgtgctggccacagacaatgatgctggcacctttggagaggtgtcctacttcttcagtgatgatcctgaccgcttcagcctggacaaggacaccggcctcatcatgctgattgcccggctggactatgagctgatccagcgcttcaccctgaccatcatcgccagagatggcggcggggaggagaccaccggccgggtgcgcatcaacgtgctggatgtgaatgacaacgtgcccaccttccagaaggatgcctacgtgggcgccctgagagaaaatgagcccagcgtgacccagctggtgcggctgcgggccacagatgaggacagcccccccaacaaccagatcacctacagcatcgtgtctgccagcgccttcggcagctactttgacatcagcctgtatgagggctatggagtcatctctgtgtcccggcccctggactatgagcagatcagcaatggcctcatctacctgactgtgatggccatggatgctggcaacccccccctgaacagcacagtgcctgtgaccatcgaggtgtttgatgaaaatgacaacccccccaccttcagcaagccagcctactttgtgtctgtggtggagaacatcatggccggggccaccgtgctcttcctgaatgccacagacctggacaggagccgggagtatggccaggagagcatcatctacagcctggagggcagcacccagttccgcatcaatgcccggagcggggagatcaccaccaccagcctgctggaccgggagaccaagtctgagtacatcctgattgtgcgggctgtggatggaggagtgggccacaaccagaagacaggcatcgccaccgtgaacatcaccctgctggacatcaatgacaaccaccccacctggaaggatgccccctactacatcaacctggtggagatgaccccaccagacagtgatgtgaccaccgtggtggccgtggaccctgacctgggggagaatggcaccctggtgtacagcatccagccccccaacaagttctacagcctgaacagcaccaccgggaagatccgcaccacccacgccatgctggaccgggagaacccagacccccatgaagctgagctgatgaggaagatcgtggtgtctgtgacagactgtggccggccccccctgaaggccaccagcagcgccaccgtgtttgtgaacctgctggacctgaatgacaatgaccccaccttccagaacctgccctttgtggccgaggtgctggagggcatcccagctggggtgtccatctaccaggtggtggccatcgacctggatgagggcctgaatggcctggtgtcctacaggatgcctgtgggcatgcccaggatggacttcctgatcaacagcagcagtggagtggtggtgaccaccacagagctggaccgggagagaattgctgagtaccagctgcgggtggtggccagtgatgctggcacccccaccaagagcagcaccagcaccctgaccatccacgtgctggatgtgaatgatgagacccccaccttcttccctgctgtgtacaacgtgtctgtgtctgaagatgtgccccgggagttccgggtggtgtggctgaactgcacagacaatgatgtgggcctgaatgctgagctgagctacttcatcaccggggccgccccagccagcgcccacctgtgccggcccccaggggccctgcccccacccctgcctgatggccagcctgactag

SEQ ID NO: 145685 - DNA, 3345 bp, synthetic construct
  misc_feature 1..3345: note = Description of Artificial Sequence: Synthetic coding sequence
  source 1..3345: mol_type = other DNA
atggtgaagagccccatgaaccgggagctggtggccacctatgaggtgaccctgtctgtgattgacaatgccagtgacctgcctgagaggtctgtgtctgtgcccaatgccaagctgactgtgaatgtgctggatgtgaatgacaacaccccccagttcaagcccttcggcatcacctactacatggagcgcatcctggagggcgccaccccaggcaccaccctgattgctgtggccgctgtggaccctgacaagggcctgaatggcctggtgacctacaccctgctggacctggtgcccccaggctacgtgcagctggaggacagcagcgctgggaaggtgattgccaacagaacagtggactatgaggaggtgcactggctgaacttcaccgtgcgggccagtgacaatggcagcccccccagggctgctgagatccctgtgtacctggagatcgtggacatcaatgacaacaaccccatctttgaccagcccagctaccaggaggccgtgtttgaagatgtgcctgtgggcaccatcatcctgactgtgacagccacagatgctgacagcggcaactttgccctgattgagtacagcctgggagatggagagagcaagtttgccatcaaccccaccaccggggacatctacgtgctgagcagcctggaccgggagaagaaggaccactacatcctgacagccctggccaaggacaaccctggagatgtggccagcaacagaagagagaacagcgtgcaggtggtgatccaggtgctggatgtgaatgactgccggccccagttcagcaagccccagttcagcacctctgtgtatgaaaatgaacctgctggcaccagcgtcatcaccatgatggccacagaccaggatgagggccccaatggagagctgacctacagcctggagggccctggggtggaggccttccacgtggacatggacagcggcctggtgaccacccagaggcccctgcagagctatgagaagttcagcctgactgtggtggccacagatggaggagagccccccctgtggggcaccaccatgctgctggtggaggtgattgatgtgaatgacaacagacctgtgtttgtgcggccccccaacggcaccatcctgcacatccgggaggagatccccctgcggagcaatgtgtatgaggtgtatgccacagacaaggatgagggcctgaatggagctgtgcgctacagcttcctgaagacagctggcaacagagactgggagttcttcatcatcgaccccatcagcggcctcatccagacagcccagaggctggaccgggagagccaggccgtgtacagcctcatcctggtggccagtgacctgggccagcctgtgccctatgagaccatgcagcccctgcaggtggccctggaggacattgatgacaatgagcccctgtttgtgcggccccccaagggcagcccccagtaccagctgctgactgtgcctgagcacagcccccggggcaccctggtgggcaatgtgactggagctgtggatgctgatgagggccccaatgccatcgtgtactacttcatcgctgctggaaatgaggagaagaacttccacctgcagccagatggctgcctgctggtgctgcgggacctggaccgggagcgggaggccatcttctccttcatcgtgaaggccagcagcaacagatcctggaccccaccccggggccccagccccaccctggacctggtggccgacctgaccctgcaggaggtgcgggtggtgctggaggacatcaatgaccagcccccacgcttcaccaaggccgagtacacagctggggtggccacagatgccaaggtgggcagcgagctgatccaggtgctggccctggatgctgacatcggcaacaacagcctggtgttctacagcatcctggccatccactacttccgggccctggccaatgacagtgaagatgtgggccaggtgttcaccatgggctccatggatggcatcctgcggacctttgacctcttcatggcctacagccctggctactttgtggtggacatcgtggcccgggacctggccggccacaatgacacagccatcatcggcatctacatcctgagagatgaccagagggtgaagatcgtcatcaatgagatcccagacagagtgcggggctttgaggaggagttcatccacctgctgagcaacatcactggagccatcgtgaacacagacaacgtgcagttccacgtggacaagaagggccgggtgaactttgcccagacagagctgctgatccacgtggtgaacagagacaccaaccgcatcctggatgtggacagagtcatccagatgattgatgagaacaaggagcagctgaggaacctcttcaggaactacaacgtgctggatgtgcagcctgccatctctgtgcggctgcctgatgacatgtctgccctgcagatggccatcatcgtgctggccatcctgctcttcctggccgccatgctgtttgtgctgatgaactggtactacagaacagtgcacaagaggaagctgaaggccatcgtggccggcagcgctggcaacagaggcttcatcgacatcatggacatgcccaacaccaacaagtacagctttgatggagccaaccctgtgtggctggaccccttctgcaggaacctggagctggccgcccaggccgagcatgaagatgacctgcctgagaacctgtctgaaattgctgacctgtggaacagccccaccaggacccacggcaccttcggccgggagcctgctgctgtgaagccagatgatgaccgctacctgcgggccgccatccaggagtatgacaacatcgccaagctgggccagatcatccgggagggccccatcaagggcagcctgctgaaggtggtgctggaggactacctgcggctgaagaagctgtttgcccagaggatggtgcagaaggccagcagctgccacagcagcatcagcgagctgatccagacagagctggatgaggagcccggggaccacagccctggccagggcagcctgcgcttccgccacaagccccctgtggagctgaagggcccagatggcatccacgtggtgcacggcagcacaggcaccctgctggccacagacctgaacagcctgcctgaggaggaccagaagggcctgggccgcagcctggagaccctgacagctgctgaggccacagcctttgaaagaaatgccaggacagaaagtgccaagagcacccccctgcacaagctgagagatgtgatcatggagacccccctggagatcacagagctgtag

SEQ ID NO: 145686 - DNA, 1368 bp, synthetic construct
  misc_feature 1..1368: note = Description of Artificial Sequence: Synthetic coding sequence
  source 1..1368: mol_type = other DNA
atgagggccagcctgggcgtgtgtggcacagccagctccatggtgattgtgtatgtggaggacatcaatgatgaggcccctgtgttcacccagcagcagtacagccggctgggcctgcgggagacagctggcatcggcaccagcgtcatcgtggtgcaggccacagaccgggacagcggagatggcggcctggtgaactaccgcatcctgtctggagctgagggcaagtttgaaattgatgagagcacaggcctcatcatcaccgtgaactacctggactatgagaccaagaccagctacatgatgaatgtgtctgccacagaccaggccccacccttcaaccagggcttctgcagcgtgtacatcaccctgctgaatgagctggatgaagctgtgcagttcagcaatgccagctatgaagctgccatcctggagaacctggccctgggcacagaaattgtgcgggtgcaggcctacagcattgacaacctgaaccagatcacctaccgcttcaatgcctacaccagcacccaggccaaggccctcttcaagattgatgccatcactggagtcatcaccgtgcagggcctggtggaccgggagaagggggacttctacaccctgactgtggtggctgatgatggcggccccaaggtggacagcacagtggtgtacatcaccgtgctggatgaaaatgacaacagccccaggtttgacttcaccagtgacagcgctgtgtccatccctgaggactgccctgtgggccagagggtggccaccgtgaaggcctgggaccctgatgctggcagcaatggccaggtggtgttcagcctggccagcggcaacattgctggggcctttgaaattgtgaccaccaatgacagcatcggggaggtgtttgtggcccggcccctggaccgggaggagctggaccactacatcctgcaggtggtggccagtgaccggggcaccccacccaggaagaaggaccacatcctgcaggtgaccatcctggacatcaatgacaacccccctgtgattgagagccccttcggctacaacgtgtctgtgaatgaaaatgtgggcggcggcacagctgtggtgcaggtgcgggccacagaccgggacatcggcatcaacagcgtgctgagctactacatcacagagggcaacaaggacatggccttcaggatggaccgcatcagcggggagatcgccaccaggcctgcccccccagaccgggagcggcagagcttctaccacctggtggccaccgtggaggatgagggcacccccaccctgtctgtgtctgatggcggcggccaccgggaggagcgggtgggccagggcagcagcgccagcgagtag

SEQ ID NO: 145687 - DNA, 1593 bp, synthetic construct
  misc_feature 1..1593: note = Description of Artificial Sequence: Synthetic coding sequence
  source 1..1593: mol_type = other DNA
atgggccgccacgtggccaccagctgccacgtggcctggctgctggtgctgatcagcggctgctggggccaggtgaaccggctgcccttcttcaccaaccacttctttgacacctacctgctgatcagcgaggacacccctgtgggcagctctgtgacccagctgctggcccaggacatggacaatgaccccctggtgtttggagtgtctggagaggaggccagccgcttctttgctgtggagccagacaccggggtggtgtggctgcggcagcccctggaccgggagaccaagtctgagttcaccgtggagttctctgtgtctgaccaccagggcgtcatcaccaggaaggtgaacatccaggtgggagatgtgaatgacaatgcccccaccttccacaaccagccctacagcgtgcgcatccctgagaacacccctgtgggcacccccatcttcatcgtgaatgccacagatcctgacctgggcgccggcggctctgtgctgtacagcttccagccccccagccagttctttgccatcgacagcgcccggggcatcgtgaccgtcatccgggagctggactatgagaccacccaggcctaccagctgactgtgaatgccacagaccaggacaagacccggcccctgagcaccctggccaacctggccatcatcatcacagatgtgcaggacatggaccccatcttcatcaacctgccctacagcaccaacatctatgagcacagccccccaggcaccaccgtgcgcatcatcacagccatcgaccaggacaagggccggccccggggcatcggctacaccatcgtgtctggcaacaccaacagcatctttgccctggactacatcagcggcgtgctgaccctgaatggcctgctggaccgggagaaccccctgtacagccacggcttcatcctgactgtgaagggcacagagctgaatgatgacaggacccccagtgatgccaccgtgaccaccaccttcaacatcctggtgattgacatcaatgacaatgcccctgagttcaacagcagcgagtacagcgtggccatcacagagctggcccaggtgggctttgccctgcccctcttcatccaggtggtggacaaggatgagaacctgggcctgaacagcatgtttgaggtgtacctggtgggcaacaacagccaccacttcatcatcagccccacctctgtgcagggcaaggctgacatccgcatccgggtggccatccccctggactatgaaacagtggacagatatgactttgacctgtttgccaatgaatctgtgcctgaccacgtgggctacgccaaggtgaagatcaccctcatcaatgaaaatgacaaccggcccatcttcagccagcccctgtacaacatcagcctgtatgaaaatgtgacagtgggcacctctgtgctgactgtgctggtgagcccccgcttcaccgctggccccctgagcagccctggccccaccgtggtgcgccaccctgagggcttctgcccccgggacctgagcaaccagggcagaagacacccccagatccctgagctgtgcctgctggtgtactag

SEQ ID NO: 145688 - DNA, 3639 bp, synthetic construct
  misc_feature 1..3639: note = Description of Artificial Sequence: Synthetic coding sequence
  source 1..3639: mol_type = other DNA
atgggccgccacgtggccaccagctgccacgtggcctggctgctggtgctgatcagcggctgctggggccaggtgaaccggctgcccttcttcaccaaccacttctttgacacctacctgctgatcagcgaggacacccctgtgggcagctctgtgacccagctgctggcccaggacatggacaatgaccccctggtgtttggagtgtctggagaggaggccagccgcttctttgctgtggagccagacaccggggtggtgtggctgcggcagcccctggaccgggagaccaagtctgagttcaccgtggagttctctgtgtctgaccaccagggcgtcatcaccaggaaggtgaacatccaggtgggagatgtgaatgacaatgcccccaccttccacaaccagccctacagcgtgcgcatccctgagaacacccctgtgggcacccccatcttcatcgtgaatgccacagatcctgacctgggcgccggcggctctgtgctgtacagcttccagccccccagccagttctttgccatcgacagcgcccggggcatcgtgaccgtcatccgggagctggactatgagaccacccaggcctaccagctgactgtgaatgccacagaccaggacaagacccggcccctgagcaccctggccaacctggccatcatcatcacagatgtgcaggacatggaccccatcttcatcaacctgccctacagcaccaacatctatgagcacagccccccaggcaccaccgtgcgcatcatcacagccatcgaccaggacaagggccggccccggggcatcggctacaccatcgtgtctggcaacaccaacagcatctttgccctggactacatcagcggcgtgctgaccctgaatggcctgctggaccgggagaaccccctgtacagccacggcttcatcctgactgtgaagggcacagagctgaatgatgacaggacccccagtgatgccaccgtgaccaccaccttcaacatcctggtgattgacatcaatgacaatgcccctgagttcaacagcagcgagtacagcgtggccatcacagagctggcccaggtgggctttgccctgcccctcttcatccaggtggtggacaaggatgagacccagggcctgaacagcatgtttgaggtgtacctggtgggcaacaacagccaccacttcatcatcagccccacctctgtgcagggcaaggctgacatccgcatccgggtggccatccccctggactatgaaacagtggacagatatgactttgacctgtttgccaatgaatctgtgcctgaccacgtgggctacgccaaggtgaagatcaccctcatcaatgaaaatgacaaccggcccatcttcagccagcccctgtacaacatcagcctgtatgaaaatgtgacagtgggcacctctgtgctgactgtgctggccacagacaatgatgctggcaccttcggggaggtgtcctacttcttcagtgatgatcctgaccgcttcagcctggacaaggacaccggcctcatcatgctgattgcccggctggactatgagctgatccagcgcttcaccctgaccatcatcgccagagatggcggcggggaggagaccaccggccgggtgcgcatcaacgtgctggatgtgaatgacaacgtgcccaccttccagaaggatgcctacgtgggcgccctgcgggagaatgagcccagcgtgacccagctggtgcggctgcgggccacagatgaggacagcccccccaacaaccagatcacctacagcatcgtgtctgccagcgccttcggcagctactttgacatcagcctgtatgagggctacggcgtcatctctgtgtcccggcccctggactatgagcagatcagcaatggcctcatctacctgactgtgatggccatggatgctggcaacccccccctgaacagcacagtgcctgtgaccatcgaggtgtttgatgaaaatgacaacccccccaccttcagcaagccagcctactttgtgtctgtggtggagaacatcatggccggggccaccgtgctcttcctgaatgccacagacctggacaggagccgggagtatggccaggagagcatcatctacagcctggagggcagcacccagttccgcatcaatgcccggtctggagagatcaccaccaccagcctgctggaccgggagaccaagtctgagtacatcctgattgtgcgggctgtggatggcggcgtgggccacaaccagaagacaggaattgccaccgtgaacatcaccctgctggacatcaatgacaaccaccccacctggaaggatgccccctactacatcaacctggtggagatgaccccaccagacagtgatgtgaccaccgtggtggccgtggaccctgacctgggagaaaatggcaccctggtgtacagcatccagccccccaacaagttctacagcctgaacagcaccaccgggaagatccgcaccacccacgccatgctggacagagaaaatccagacccccatgaggccgagctgatgaggaagatcgtggtgtctgtgacagactgtggccggccccccctgaaggccaccagcagcgccaccgtgtttgtgaacctgctggacctgaatgacaatgaccccaccttccagaacctgccctttgtggccgaggtgctggagggcatcccagctggggtgtccatctaccaggtggtggccatcgacctggatgagggcctgaatggcctggtgtcctacaggatgcctgtgggcatgcccaggatggacttcctgatcaacagcagcagcggcgtggtggtgaccaccacagagctggaccgggagagaattgctgagtaccagctgcgggtggtggccagtgatgctggcacccccaccaagagcagcaccagcaccctgaccatccacgtgctggatgtgaatgatgagacccccaccttcttccctgctgtgtacaacgtgtctgtgtctgaagatgtgccccgggagttccgggtggtgtggctgaactgcacagacaatgatgtgggcctgaatgctgagctgagctacttcatcactggaggaaatgtggatggcaagttctctgtgggctacagagatgctgtggtgaggacagtggtgggcctggaccgggagaccacagctgcctacatgctgatcctggaggccatcgacaatggacctgtgggcaagaggcacactggaacagccaccgtgtttgtgacagtgctggatgtgaatgacaaccggcccatcttcctgcagagcagctatgaggcctctgtgcctgaggacatccctgagggccacagcatcctgcaggaggaggacctggccagcccctgcatcagccctgccccaccccggcgggccttccagagcagcggggagaaggagaccagccagtttcctgggaaggagctgcggcgggagcccggccccagcaaggcccagaacagagctgccttcacagagcccctggccgaggcccccctgctgggcagcaagcaggcccaggaggagcgggcccccctgccccgggagcaggcccagcagctgcagggcagcgagggggagaagggcggcccctag

SEQ ID NO: 145689 - DNA, 1593 bp, synthetic construct
  misc_feature 1..1593: note = Description of Artificial Sequence: Synthetic coding sequence
  source 1..1593: mol_type = other DNA
atgggccgccacgtggccaccagctgccacgtggcctggctgctggtgctgatcagcggctgctggggccaggtgaaccggctgcccttcttcaccaaccacttctttgacacctacctgctgatcagcgaggacacccctgtgggcagctctgtgacccagctgctggcccaggacatggacaatgaccccctggtgtttggagtgtctggagaggaggccagccgcttctttgctgtggagccagacaccggggtggtgtggctgcggcagcccctggaccgggagaccaagtctgagttcaccgtggagttctctgtgtctgaccaccagggcgtcatcaccaggaaggtgaacatccaggtgggagatgtgaatgacaatgcccccaccttccacaaccagccctacagcgtgcgcatccctgagaacacccctgtgggcacccccatcttcatcgtgaatgccacagatcctgacctgggcgccggcggctctgtgctgtacagcttccagccccccagccagttctttgccatcgacagcgcccggggcatcgtgaccgtcatccgggagctggactatgagaccacccaggcctaccagctgactgtgaatgccacagaccaggacaagacccggcccctgagcaccctggccaacctggccatcatcatcacagatgtgcaggacatggaccccatcttcatcaacctgccctacagcaccaacatctatgagcacagccccccaggcaccaccgtgcgcatcatcacagccatcgaccaggacaagggccggccccggggcatcggctacaccatcgtgtctggcaacaccaacagcatctttgccctggactacatcagcggcgtgctgaccctgaatggcctgctggaccgggagaaccccctgtacagccacggcttcatcctgactgtgaagggcacagagctgaatgatgacaggacccccagtgatgccaccgtgaccaccaccttcaacatcctggtgattgacatcaatgacaatgcccctgagttcaacagcagcgagtacagcgtggccatcacagagctggcccaggtgggctttgccctgcccctcttcatccaggtggtggacaaggatgagacctggggcctgaacagcatgtttgaggtgtacctggtgggcaacaacagccaccacttcatcatcagccccacctctgtgcagggcaaggctgacatccgcatccgggtggccatccccctggactatgaaacagtggacagatatgactttgacctgtttgccaatgaatctgtgcctgaccacgtgggctacgccaaggtgaagatcaccctcatcaatgaaaatgacaaccggcccatcttcagccagcccctgtacaacatcagcctgtatgaaaatgtgacagtgggcacctctgtgctgactgtgctggtgagcccccgcttcaccgctggccccctgagcagccctggccccaccgtggtgcgccaccctgagggcttctgcccccgggacctgagcaaccagggcagaagacacccccagatccctgagctgtgcctgctggtgtactag

SEQ ID NO: 145690 - DNA, 9960 bp, synthetic construct
  misc_feature 1..9960: note = Description of Artificial Sequence: Synthetic coding sequence
  source 1..9960: mol_type = other DNA
atgggccgccacgtggccaccagctgccacgtggcctggctgctggtgctgatcagcggctgctggggccaggtgaaccggctgcccttcttcaccaaccacttctttgacacctacctgctgatcagcgaggacacccctgtgggcagctctgtgacccagctgctggcccaggacatggacaatgaccccctggtgtttggagtgtctggagaggaggccagccgcttctttgctgtggagccagacaccggggtggtgtggctgcggcagcccctggaccgggagaccaagtctgagttcaccgtggagttctctgtgtctgaccaccagggcgtcatcaccaggaaggtgaacatccaggtgggagatgtgaatgacaatgcccccaccttccacaaccagccctacagcgtgcgcatccctgagaacacccctgtgggcacccccatcttcatcgtgaatgccacagatcctgacctgggcgccggcggctctgtgctgtacagcttccagccccccagccagttctttgccatcgacagcgcccggggcatcgtgaccgtcatccgggagctggactatgagaccacccaggcctaccagctgactgtgaatgccacagaccaggacaagacccggcccctgagcaccctggccaacctggccatcatcatcacagatgtgcaggacatggaccccatcttcatcaacctgccctacagcaccaacatctatgagcacagccccccaggcaccaccgtgcgcatcatcacagccatcgaccaggacaagggccggccccggggcatcggctacaccatcgtgtctggcaacaccaacagcatctttgccctggactacatcagcggcgtgctgaccctgaatggcctgctggaccgggagaaccccctgtacagccacggcttcatcctgactgtgaagggcacagagctgaatgatgacaggacccccagtgatgccaccgtgaccaccaccttcaacatcctggtgattgacatcaatgacaatgcccctgagttcaacagcagcgagtacagcgtggccatcacagagctggcccaggtgggctttgccctgcccctcttcatccaggtggtggacaaggatgagacccagggcctgaacagcatgtttgaggtgtacctggtgggcaacaacagccaccacttcatcatcagccccacctctgtgcagggcaaggctgacatccgcatccgggtggccatccccctggactatgaaacagtggacagatatgactttgacctgtttgccaatgaatctgtgcctgaccacgtgggctacgccaaggtgaagatcaccctcatcaatgaaaatgacaaccggcccatcttcagccagcccctgtacaacatcagcctgtatgaaaatgtgacagtgggcacctctgtgctgactgtgctggccacagacaatgatgctggcaccttcggggaggtgtcctacttcttcagtgatgatcctgaccgcttcagcctggacaaggacaccggcctcatcatgctgattgcccggctggactatgagctgatccagcgcttcaccctgaccatcatcgccagagatggcggcggggaggagaccaccggccgggtgcgcatcaacgtgctggatgtgaatgacaacgtgcccaccttccagaaggatgcctacgtgggcgccctgcgggagaatgagcccagcgtgacccagctggtgcggctgcgggccacagatgaggacagcccccccaacaaccagatcacctacagcatcgtgtctgccagcgccttcggcagctactttgacatcagcctgtatgagggctacggcgtcatctctgtgtcccggcccctggactatgagcagatcagcaatggcctcatctacctgactgtgatggccatggatgctggcaacccccccctgaacagcacagtgcctgtgaccatcgaggtgtttgatgaaaatgacaacccccccaccttcagcaagccagcctactttgtgtctgtggtggagaacatcatggccggggccaccgtgctcttcctgaatgccacagacctggacaggagccgggagtatggccaggagagcatcatctacagcctggagggcagcacccagttccgcatcaatgcccggtctggagagatcaccaccaccagcctgctggaccgggagaccaagtctgagtacatcctgattgtgcgggctgtggatggcggcgtgggccacaaccagaagacaggaattgccaccgtgaacatcaccctgctggacatcaatgacaaccaccccacctggaaggatgccccctactacatcaacctggtggagatgaccccaccagacagtgatgtgaccaccgtggtggccgtggaccctgacctgggagaaaatggcaccctggtgtacagcatccagccccccaacaagttctacagcctgaacagcaccaccgggaagatccgcaccacccacgccatgctggacagagaaaatccagacccccatgaggccgagctgatgaggaagatcgtggtgtctgtgacagactgtggccggccccccctgaaggccaccagcagcgccaccgtgtttgtgaacctgctggacctgaatgacaatgaccccaccttccagaacctgccctttgtggccgaggtgctggagggcatcccagctggggtgtccatctaccaggtggtggccatcgacctggatgagggcctgaatggcctggtgtcctacaggatgcctgtgggcatgcccaggatggacttcctgatcaacagcagcagcggcgtggtggtgaccaccacagagctggaccgggagagaattgctgagtaccagctgcgggtggtggccagtgatgctggcacccccaccaagagcagcaccagcaccctgaccatccacgtgctggatgtgaatgatgagacccccaccttcttccctgctgtgtacaacgtgtctgtgtctgaagatgtgccccgggagttccgggtggtgtggctgaactgcacagacaatgatgtgggcctgaatgctgagctgagctacttcatcactggaggaaatgtggatggcaagttctctgtgggctacagagatgctgtggtgaggacagtggtgggcctggaccgggagaccacagctgcctacatgctgatcctggaggccatcgacaatggacctgtgggcaagaggcacactggaacagccaccgtgtttgtgacagtgctggatgtgaatgacaaccggcccatcttcctgcagagcagctatgaggcctctgtgcctgaggacatccctgagggccacagcatcctgcagctgaaggccacagatgctgatgaaggagaatttggccgggtgtggtaccgcatcctgcacggcaaccacggcaacaacttccgcatccacgtgtccaatggcctgctgatgaggggcccccggcccctggaccgggagaggaacagcagccacgtgctgattgtggaggcctacaaccacgacctgggccccatgaggagctctgtgcgggtgattgtgtatgtggaggacatcaatgatgaggcccctgtgttcacccagcagcagtacagccggctgggcctgcgggagacagctggcatcggcacctctgtgattgtggtgcaggccacagaccgggacagcggagatggcggcctggtgaactaccgcatcctgagcggggctgagggcaagtttgaaattgatgagagcacaggcctcatcatcaccgtgaactacctggactatgagaccaagaccagctacatgatgaatgtgtctgccacagaccaggccccacccttcaaccagggcttctgcagcgtgtacatcaccctgctgaatgagctggatgaggccgtgcagttcagcaatgccagctatgaggccgccatcctggagaacctggccctgggcacagagatcgtgcgggtgcaggcctacagcattgacaacctgaaccagatcacctaccgcttcaatgcctacaccagcacccaggccaaggccctcttcaagattgatgccatcaccggggtcatcaccgtgcagggcctggtggaccgggagaagggggacttctacaccctgactgtggtggctgatgatggcggccccaaggtggacagcacagtgcaggtgtacatcaccgtgctggatgaaaatgacaacagccccaggtttgacttcaccagtgacagcgctgtgtccatccctgaggactgccctgtgggccagagggtggccaccgtgaaggcctgggaccctgatgctggcagcaatggccaggtggtgttcagcctggccagcggcaacattgctggggcctttgaaattgtgaccaccaatgacagcatcggggaggtgtttgtggcccggcccctggaccgggaggagctggaccactacatcctgcaggtggtggccagtgaccggggcaccccacccaggaagaaggaccacatcctgcaggtgaccatcctggacatcaatgacaacccccctgtgattgagagccccttcggctacaacgtgtctgtgaatgaaaatgtgggcggcggcacagctgtggtgcaggtgcgggccacagaccgggacatcggcatcaacagcgtgctgagctactacatcacagagggcaacaaggacatggccttcaggatggaccgcatcagcggggagatcgccaccaggcctgcccccccagaccgggagcggcagagcttctaccacctggtggccaccgtggaggatgagggcacccccaccctgagcgccaccacccacgtgtatgtgaccatcgtggatgaaaatgacaatgcccccatgttccagcagccccactatgaggtgctgctggatgagggccctgacaccctgaacaccagcctcatcaccatccaggccctggacctggatgagggccccaatggaacagtgacctacgccatcgtggccggcaacatcgtgaacaccttcagaattgacagacacatgggcgtcatcacagctgccaaggagctggactatgagatcagccacggccgctacaccctcatcgtgacagccacagaccagtgccccatcctgagccaccggctgaccagcaccaccaccgtgctggtgaatgtgaatgacatcaatgacaacgtgcccaccttcccccgggactatgagggcccctttgaggtgacagagggccagcccggcccccgggtgtggaccttcctggcccatgaccgggacagcggccccaacggccaggtggagtacagcatcatggatggagaccccctgggggagtttgtgatcagccctgtggagggcgtgctgcgggtgaggaaggatgtggagctggaccgggagaccatcgccttctacaacctgaccatctgtgcccgggaccggggcatgccacccctgagcagcaccatgctggtgggcatccgggtgctggacatcaatgacaatgaccctgtgctgctgaacctgcccatgaacatcaccatcagcgagaacagccctgtgagcagctttgtggcccacgtgctggccagtgatgctgacagcggctgcaatgcccggctgaccttcaacatcacagctggcaaccgggagcgggccttcttcatcaatgccaccactggaattgtgacagtgaaccggcccctggaccgggagcgcatccctgagtacaagctgaccatctctgtgaaggacaaccctgagaaccccagaattgcccggcgggactatgacctgctgctgatcttcctgagtgatgaaaatgacaaccaccccctcttcaccaagagcacctaccaggccgaggtgatggagaacagccctgctggcacccccctgactgtgctgaatggccccatcctggccctggatgctgaccaggacatctatgctgtggtgacctaccagctgctgggcgcccagagcggcctgtttgacatcaacagcagcactggagtggtgacagtgcgctctggagtcatcatcgaccgggaggccttcagcccccccatcctggagctgctgctgctggccgaggacatcggcctgctgaacagcacagcccacctgctgatcaccatcctggatgacaatgacaaccggcccaccttctccccagccaccctgactgtgcacctgctggagaactgccccccaggcttctctgtgctgcaggtgacagccacagatgaggacagcggcctgaatggagagctggtgtaccgcatcgaggccggggcccaggaccgcttcctgatccacctggtgactggagtcatccgggtgggcaatgccaccatcgaccgggaggagcaggagagctaccgcctgactgtggtggccacagaccggggcaccgtgcccctgtctggaacagccatcgtgaccatcctgattgatgacatcaatgacagcaggcctgagttcctgaaccccatccagacagtgtctgtgctggagagcgctgagcccggcaccgtgattgccaacatcacagccatcgaccatgacctgaaccccaagctggagtaccacatcgtgggcatcgtggccaaggatgacacagaccggctggtgcccaaccaggaggatgcctttgctgtgaacatcaacacaggctctgtgatggtgaagagccccatgaaccgggagctggtggccacctatgaggtgaccctgtctgtgattgacaatgccagtgacctgcctgagaggtctgtgtctgtgcccaatgccaagctgactgtgaatgtgctggatgtgaatgacaacaccccccagttcaagcccttcggcatcacctactacatggagcgcatcctggagggcgccaccccaggcaccaccctgattgctgtggccgctgtggaccctgacaagggcctgaatggcctggtgacctacaccctgctggacctggtgcccccaggctacgtgcagctggaggacagcagcgctgggaaggtgattgccaacagaacagtggactatgaggaggtgcactggctgaacttcaccgtgcgggccagtgacaatggcagcccccccagggctgctgagatccctgtgtacctggagatcgtggacatcaatgacaacaaccccatctttgaccagcccagctaccaggaggccgtgtttgaagatgtgcctgtgggcaccatcatcctgactgtgacagccacagatgctgacagcggcaactttgccctgattgagtacagcctgggagatggagagagcaagtttgccatcaaccccaccaccggggacatctacgtgctgagcagcctggaccgggagaagaaggaccactacatcctgacagccctggccaaggacaaccctggagatgtggccagcaacagaagagagaacagcgtgcaggtggtgatccaggtgctggatgtgaatgactgccggccccagttcagcaagccccagttcagcacctctgtgtatgaaaatgaacctgctggcaccagcgtcatcaccatgatggccacagaccaggatgagggccccaatggagagctgacctacagcctggagggccctggggtggaggccttccacgtggacatggacagcggcctggtgaccacccagaggcccctgcagagctatgagaagttcagcctgactgtggtggccacagatggaggagagccccccctgtggggcaccaccatgctgctggtggaggtgattgatgtgaatgacaacagacctgtgtttgtgcggccccccaacggcaccatcctgcacatccgggaggagatccccctgcggagcaatgtgtatgaggtgtatgccacagacaaggatgagggcctgaatggagctgtgcgctacagcttcctgaagacagctggcaacagagactgggagttcttcatcatcgaccccatcagcggcctcatccagacagcccagaggctggaccgggagagccaggccgtgtacagcctcatcctggtggccagtgacctgggccagcctgtgccctatgagaccatgcagcccctgcaggtggccctggaggacattgatgacaatgagcccctgtttgtgcggccccccaagggcagcccccagtaccagctgctgactgtgcctgagcacagcccccggggcaccctggtgggcaatgtgactggagctgtggatgctgatgagggccccaatgccatcgtgtactacttcatcgctgctggaaatgaggagaagaacttccacctgcagccagatggctgcctgctggtgctgcgggacctggaccgggagcgggaggccatcttctccttcatcgtgaaggccagcagcaacagatcctggaccccaccccggggccccagccccaccctggacctggtggccgacctgaccctgcaggaggtgcgggtggtgctggaggacatcaatgaccagcccccacgcttcaccaaggccgagtacacagctggggtggccacagatgccaaggtgggcagcgagctgatccaggtgctggccctggatgctgacatcggcaacaacagcctggtgttctacagcatcctggccatccactacttccgggccctggccaatgacagtgaagatgtgggccaggtgttcaccatgggctccatggatggcatcctgcggacctttgacctcttcatggcctacagccctggctactttgtggtggacatcgtggcccgggacctggccggccacaatgacacagccatcatcggcatctacatcctgagagatgaccagagggtgaagatcgtcatcaatgagatcccagacagagtgcggggctttgaggaggagttcatccacctgctgagcaacatcactggagccatcgtgaacacagacaacgtgcagttccacgtggacaagaagggccgggtgaactttgcccagacagagctgctgatccacgtggtgaacagagacaccaaccgcatcctggatgtggacagagtcatccagatgattgatgagaacaaggagcagctgaggaacctcttcaggaactacaacgtgctggatgtgcagcctgccatctctgtgcggctgcctgatgacatgtctgccctgcagatggccatcatcgtgctggccatcctgctcttcctggccgccatgctgtttgtgctgatgaactggtactacagaacagtgcacaagaggaagctgaaggccatcgtggccggcagcgctggcaacagaggcttcatcgacatcatggacatgcccaacaccaacaagtacagctttgatggagccaaccctgtgtggctggaccccttctgcaggaacctggagctggccgcccaggccgagcatgaagatgacctgcctgagaacctgtctgaaattgctgacctgtggaacagccccaccaggacccacggcaccttcggccgggagcctgctgctgtgaagccagatgatgaccgctacctgcgggccgccatccaggagtatgacaacatcgccaagctgggccagatcatccgggagggccccatcaagctgatccagacagagctggatgaggagcccggggaccacagccctggccagggcagcctgcgcttccgccacaagccccctgtggagctgaagggcccagatggcatccacgtggtgcacggcagcacaggcaccctgctggccacagacctgaacagcctgcctgaggaggaccagaagggcctgggccgcagcctggagaccctgacagctgctgaggccacagcctttgaaagaaatgccaggacagagagcgccaagagcacccccctgcacaagctgagagatgtgatcatggagacccccctggagatcacagagctgtag

SEQ ID NO: 145691 - DNA, 10080 bp, synthetic construct
  misc_feature 1..10080: note = Description of Artificial Sequence: Synthetic coding sequence
  source 1..10080: mol_type = other DNA
atgggccgccacgtggccaccagctgccacgtggcctggctgctggtgctgatcagcggctgctggggccaggtgaaccggctgcccttcttcaccaaccacttctttgacacctacctgctgatcagcgaggacacccctgtgggcagctctgtgacccagctgctggcccaggacatggacaatgaccccctggtgtttggagtgtctggagaggaggccagccgcttctttgctgtggagccagacaccggggtggtgtggctgcggcagcccctggaccgggagaccaagtctgagttcaccgtggagttctctgtgtctgaccaccagggcgtcatcaccaggaaggtgaacatccaggtgggagatgtgaatgacaatgcccccaccttccacaaccagccctacagcgtgcgcatccctgaggtgggcgccactggaaacacccctgtgggcacccccatcttcatcgtgaatgccacagatcctgacctgggcgctgggggctctgtgctgtacagcttccagccccccagccagttctttgccattgattctgcccggggcatcgtgaccgtcatccgggagctggactatgagaccacccaggcctaccagctgactgtgaatgccacagaccaggacaagacccggcccctgagcaccctggccaacctggccatcatcatcacagatgtgcaggacatggaccccatcttcatcaacctgccctacagcaccaacatctatgagcacagccccccaggcaccaccgtgcgcatcatcacagccatcgaccaggacaagggccggccccggggcatcggctacaccatcgtgtctgtggccggcaacaccaacagcatctttgccctggactacatctctggagtgctgaccctgaatggcctgctggaccgggagaaccccctgtacagccacggcttcatcctgactgtgaagggcacagagctgaatgatgacaggacccccagtgatgccaccgtgaccaccaccttcaacatcctggtgattgacatcaatgacaatgcccctgagttcaacagcagcgagtacagcgtggccatcacagagctggcccaggtgggctttgccctgcccctcttcatccaggtggtggacaaggatgagggcctgaacagcatgtttgaggtgtacctggtgggcaacaacagccaccacttcatcatcagccccacctctgtgcagggcaaggctgacatccgcatccgggtggccatccccctggactatgagaccgtggacagatatgactttgacctgtttgccaatgaatctgtgcctgaccacgtgggctacgccaaggtgaagatcaccctcatcaatgaaaatgacaaccggcccatcttcagccagcccctgtacaacatcagcctgtatgaaaatgtgacagtgggcacctctgtgctgactgtgctggccacagacaatgatgctggcacctttggagaggtgtcctacttcttcagtgatgatcctgaccgcttcagcctggacaaggacaccggcctcatcatgctgattgcccggctggactatgagctgatccagcgcttcaccctgaccatcatcgccagagatggcggcggggaggagaccaccggccgggtgcgcatcaacgtgctggatgtgaatgacaacgtgcccaccttccagaaggatgcctacgtgggcgccctgagagaaaatgagcccagcgtgacccagctggtgcggctgcgggccacagatgaggacagcccccccaacaaccagatcacctacagcatcgtgtctgccagcgccttcggcagctactttgacatcagcctgtatgagggctatggagtcatctctgtgtcccggcccctggactatgagcagatcagcaatggcctcatctacctgactgtgatggccatggatgctggcaacccccccctgaacagcacagtgcctgtgaccatcgaggtgtttgatgaaaatgacaacccccccaccttcagcaagccagcctactttgtgtctgtggtggagaacatcatggccggggccaccgtgctcttcctgaatgccacagacctggacaggagccgggagtatggccaggagagcatcatctacagcctggagggcagcacccagttccgcatcaatgcccggagcggggagatcaccaccaccagcctgctggaccgggagaccaagtctgagtacatcctgattgtgcgggctgtggatggaggagtgggccacaaccagaagacaggcatcgccaccgtgaacatcaccctgctggacatcaatgacaaccaccccacctggaaggatgccccctactacatcaacctggtggagatgaccccaccagacagtgatgtgaccaccgtggtggccgtggaccctgacctgggggagaatggcaccctggtgtacagcatccagccccccaacaagttctacagcctgaacagcaccaccgggaagatccgcaccacccacgccatgctggaccgggagaacccagacccccatgaagctgagctgatgaggaagatcgtggtgtctgtgacagactgtggccggccccccctgaaggccaccagcagcgccaccgtgtttgtgaacctgctggacctgaatgacaatgaccccaccttccagaacctgccctttgtggccgaggtgctggagggcatcccagctggggtgtccatctaccaggtggtggccatcgacctggatgagggcctgaatggcctggtgtcctacaggatgcctgtgggcatgcccaggatggacttcctgatcaacagcagcagtggagtggtggtgaccaccacagagctggaccgggagagaattgctgagtaccagctgcgggtggtggccagtgatgctggcacccccaccaagagcagcaccagcaccctgaccatccacgtgctggatgtgaatgatgagacccccaccttcttccctgctgtgtacaacgtgtctgtgtctgaagatgtgccccgggagttccgggtggtgtggctgaactgcacagacaatgatgtgggcctgaatgctgagctgagctacttcatcaccggcggcaatgtggatggcaagttctctgtgggctacagagatgctgtggtgaggacagtggtgggcctggaccgggagaccacagctgcctacatgctgatcctggaggccatcgacaatggacctgtgggcaagaggcacactggaacagccaccgtgtttgtgacagtgctggatgtgaatgacaaccggcccatcttcctgcagagcagctatgaggcctctgtgcctgaggacatccctgagggccacagcatcctgcagctgaaggccacagatgctgatgaaggagaatttggccgggtgtggtaccgcatcctgcacggcaaccacggcaacaacttccgcatccacgtgtccaatggcctgctgatgaggggcccccggcccctggaccgggagaggaacagcagccacgtgctgattgtggaggcctacaaccacgacctgggccccatgaggagctctgtgcgggtcatcgtgtatgtggaggacatcaatgatgaggcccctgtgttcacccagcagcagtacagccggctgggcctgcgggagacagctggcatcggcaccagcgtcatcgtggtgcaggccacagaccgggacagcggagatggcggcctggtgaactaccgcatcctgtctggagctgagggcaagtttgaaattgatgagagcacaggcctcatcatcaccgtgaactacctggactatgagaccaagaccagctacatgatgaatgtgtctgccacagaccaggccccacccttcaaccagggcttctgcagcgtgtacatcaccctgctgaatgagctggatgaagctgtgcagttcagcaatgccagctatgaagctgccatcctggagaacctggccctgggcacagaaattgtgcgggtgcaggcctacagcattgacaacctgaaccagatcacctaccgcttcaatgcctacaccagcacccaggccaaggccctcttcaagattgatgccatcactggagtcatcaccgtgcagggcctggtggaccgggagaagggggacttctacaccctgactgtggtggctgatgatggcggccccaaggtggacagcacagtgcaggtgtacatcaccgtgctggatgaaaatgacaacagccccaggtttgacttcaccagtgacagcgctgtgtccatccctgaggactgccctgtgggccagagggtggccaccgtgaaggcctgggaccctgatgctggcagcaatggccaggtggtgttcagcctggccagcggcaacattgctggggcctttgagatcgtgaccaccaatgacagcattggagaggtgtttgtggcccggcccctggaccgggaggagctggaccactacatcctgcaggtggtggccagtgaccggggcaccccacccaggaagaaggaccacatcctgcaggtgaccatcctggacatcaatgacaacccccctgtgattgagagccccttcggctacaacgtgtctgtgaatgaaaatgtgggcggcggcacagctgtggtgcaggtgcgggccacagaccgggacatcggcatcaacagcgtgctgagctactacatcacagagggcaacaaggacatggccttcaggatggaccgcatctctggagagatcgccaccaggcctgcccccccagaccgggagcggcagagcttctaccacctggtggccaccgtggaggatgagggcacccccaccctgagcgccaccacccacgtgtatgtgaccatcgtggatgaaaatgacaatgcccccatgttccagcagccccactatgaggtgctgctggatgagggccctgacaccctgaacaccagcctcatcaccatccaggccctggacctggatgagggccccaacggcaccgtgacctacgccatcgtggccggcaacatcgtgaacaccttcagaattgacagacacatgggcgtcatcacagctgccaaggagctggactatgagatcagccacggccgctacaccctgattgtgacagccacagaccagtgccccatcctgagccaccggctgaccagcaccaccaccgtgctggtgaatgtgaatgacatcaatgacaacgtgcccaccttcccccgggactatgagggcccctttgaggtgacagagggccagcccggcccccgggtgtggaccttcctggcccatgaccgggacagcggccccaacggccaggtggagtacagcatcatggatggagaccccctgggggagtttgtgatcagccctgtggagggcgtgctgcgggtgaggaaggatgtggagctggaccgggagaccatcgccttctacaacctgaccatctgtgcccgggaccggggcatgccacccctgagcagcaccatgctggtgggcatccgggtgctggacatcaatgacaatgaccctgtgctgctgaacctgcccatgaacatcaccatcagcgagaacagccctgtgtcctcctttgtggcccacgtgctggccagtgatgctgacagcggctgcaatgcccggctgaccttcaacatcacagctggcaaccgggagcgggccttcttcatcaatgccaccaccggcatcgtgacagtgaaccggcccctggaccgggagcgcatccctgagtacaagctgaccatctctgtgaaggacaaccctgagaacccccgcatcgcccggcgggactatgacctgctgctgatcttcctgagtgatgaaaatgacaaccaccccctcttcaccaagagcacctaccaggccgaggtgatggagaacagccctgctggcacccccctgactgtgctgaatggccccatcctggccctggatgctgaccaggacatctatgctgtggtgacctaccagctgctgggcgcccagagcggcctgtttgacatcaacagcagcactggagtggtgacagtgcgcagcggggtcatcatcgaccgggaggccttcagcccccccatcctggagctgctgctgctggctgaagatattggcctgctgaacagcacagcccacctgctgatcaccatcctggatgacaatgacaaccggcccaccttcagccctgccaccctgactgtgcacctgctggagaactgccccccaggcttctctgtgctgcaggtgacagccacagatgaagattctggcctgaatggagagctggtgtacagaattgaagctggggcccaggaccgcttcctgatccacctggtgactggagtcatccgggtgggcaatgccaccatcgaccgggaggagcaggagagctaccgcctgactgtggtggccacagaccggggcaccgtgcccctgagcggcacagccatcgtgaccatcctgattgatgacatcaatgacagcaggcctgagttcctgaaccccatccagacagtgtctgtgctggagagcgctgagcccggcaccgtcatcgccaacatcacagccatcgaccatgacctgaaccccaagctggagtaccacatcgtgggcatcgtggccaaggatgacacagaccggctggtgcccaaccaggaggatgcctttgctgtgaacatcaacacaggctctgtgatggtgaagagccccatgaaccgggagctggtggccacctatgaggtgaccctgagcgtcatcgacaatgccagtgacctgcctgagaggtctgtgtctgtgcccaatgccaagctgactgtgaatgtgctggatgtgaatgacaacaccccccagttcaagcccttcggcatcacctactacatggagcgcatcctggagggcgccaccccaggcaccaccctgattgctgtggccgctgtggaccctgacaagggcctgaatggcctggtgacctacaccctgctggacctggtgcccccaggctacgtgcagctggaggacagcagcgctgggaaggtgattgccaacagaacagtggactatgaggaggtgcactggctgaacttcaccgtgcgggccagtgacaatggcagcccccccagggctgctgagatccctgtgtacctggagatcgtggacatcaatgacaacaaccccatctttgaccagcccagctaccaggaggccgtgtttgaagatgtgcctgtgggcaccatcatcctgactgtgacagccacagatgctgacagcggcaactttgccctgattgagtacagcctgggagatggagagagcaagtttgccatcaaccccaccactggagacatctacgtgctgagcagcctggaccgggagaagaaggaccactacatcctgacagccctggccaaggacaaccctggagatgtggccagcaacagaagagaaaattctgtgcaggtggtgatccaggtgctggatgtgaatgactgccggccccagttcagcaagccccagttcagcacctctgtgtatgaaaatgaacctgctggcaccagcgtcatcaccatgatggccacagaccaggatgagggccccaacggggagctgacctacagcctggagggccctggggtggaggccttccacgtggacatggattctggcctggtgaccacccagaggcccctgcagagctatgagaagttcagcctgactgtggtggccacagatggaggagagccccccctgtggggcaccaccatgctgctggtggaggtgattgatgtgaatgacaacagacctgtgtttgtgcggcccccaaatggcaccatcctgcacatccgggaggagatccccctgcggagcaatgtgtatgaggtgtatgccacagacaaggatgagggcctgaatggagctgtgcgctacagcttcctgaagacagctggcaacagagactgggagttcttcatcatcgaccccatcagcggcctcatccagacagcccagaggctggaccgggagagccaggccgtgtacagcctcatcctggtggccagtgacctgggccagcctgtgccctatgagaccatgcagcccctgcaggtggccctggaggacattgatgacaatgagcccctgtttgtgcggccccccaagggcagcccccagtaccagctgctgactgtgcctgagcacagcccccggggcaccctggtgggcaatgtgactggagctgtggatgctgatgagggccccaatgccatcgtgtactacttcatcgctgctggaaatgaggagaagaacttccacctgcagccagatggctgcctgctggtgctgcgggacctggaccgggagcgggaggccatcttctccttcatcgtgaaggccagcagcaacagatcctggaccccaccccggggccccagccccaccctggacctggtggccgacctgaccctgcaggaggtgcgggtggtgctggaggacatcaatgaccagcccccacgcttcaccaaggccgagtacacagctggggtggccacagatgccaaggtgggcagcgagctgatccaggtgctggccctggatgctgacatcggcaacaacagcctggtgttctacagcatcctggccatccactacttccgggccctggccaatgattctgaagatgtgggccaggtgttcaccatgggctccatggatggcatcctgcggacctttgacctcttcatggcctacagccctggctactttgtggtggacatcgtggcccgggacctggccggccacaatgacacagccatcatcggcatctacatcctgagagatgaccagagggtgaagatcgtcatcaatgagatcccagacagagtgcggggctttgaggaggagttcatccacctgctgagcaacatcaccggggccatcgtgaacacagacaacgtgcagttccacgtggacaagaagggccgggtgaactttgcccagacagagctgctgattcatgtggtgaacagagacaccaaccgcatcctggatgtggacagagtcatccagatgattgatgagaacaaggagcagctgaggaacctcttcaggaactacaacgtgctggatgtgcagcctgccatctctgtgcggctgcctgatgacatgtctgccctgcagatggccatcatcgtgctggccatcctgctcttcctggccgccatgctgtttgtgctgatgaactggtactacagaacagtgcacaagaggaagctgaaggccatcgtggccggcagcgctggcaacagaggcttcatcgacatcatggacatgcccaacaccaacaagtacagctttgatggagccaaccctgtgtggctggaccccttctgcaggaacctggagctggccgcccaggccgagcatgaagatgacctgcctgagaacctgtctgaaattgctgacctgtggaacagccccaccaggacccacggcaccttcggccgggagcctgctgctgtgaagccagatgatgaccgctacctgcgggccgccatccaggagtatgacaacatcgccaagctgggccagatcatccgggagggccccatcaagggcagcctgctgaaggtggtgctggaggactacctgcggctgaagaagctgtttgcccagaggatggtgcagaaggccagcagctgccacagcagcatcagcgagctgatccagacagagctggatgaggagcccggggaccacagccctggccagggcagcctgcgcttccgccacaagccccctgtggagctgaagggcccagatggcatccacgtggtgcacggcagcacaggcaccctgctggccacagacctgaacagcctgcctgaggaggaccagaagggcctgggccgcagcctggagaccctgacagctgctgaggccacagcctttgaaagaaatgccaggacagagagcgccaagagcacccccctgcacaagctgagagatgtgatcatggagacccccctggagatcacagagctgtag

SEQ ID NO: 145692 - DNA, 1338 bp, synthetic construct
  misc_feature 1..1338: note = Description of Artificial Sequence: Synthetic coding sequence
  source 1..1338: mol_type = other DNA
atggacaatgaccccctggtgtttggagtgtctggagaggaggccagccgcttctttgctgtggagccagacacaggagtggtgtggctgcggcagcccctggaccgggagaccaagtctgagttcaccgtggagttctctgtgtctgaccaccagggcgtcatcaccaggaaggtgaacatccaggtgggagatgtgaatgacaatgcccccaccttccacaaccagccctacagcgtgcgcatccctgagaacacccctgtgggcacccccatcttcatcgtgaatgccacagatcctgacctgggcgctgggggctctgtgctgtacagcttccagccccccagccagttctttgccattgattctgcccggggcatcgtgaccgtcatccgggagctggactatgagaccacccaggcctaccagctgactgtgaatgccctggccatcatcatcaccaacctgccctacagcaccaacatctatgagcacagccccccaggcaccaccgtgcgcatcatcacagccatcgaccaggacaagggccggccccggggcatcggctacaccatcgtgtctggcaacaccaacagcatctttgccctggactacatctctggagtgctgaccctgaatggcctgctggaccgggagaaccccctgtacagccacggcttcatcctgactgtgaagggcacagagctgaatgatgacaggacccccagtgatgccaccgtgaccaccaccttcaacatcctggtgattgacatcaatgacaatgcccctgagttcaacagcagcgagtacagcgtggccatcacagagctggcccaggtgggctttgccctgcccctcttcatccaggtggtggacaaggatgagggcctgaacagcatgtttgaggtgtacctggtgggcaacaacagccaccacttcatcatcagccccacctctgtgcagggcaaggctgacatccgcatccgggtggccatccccctggactatgagaccgtggacagatatgactttgacctgtttgccaatgaatctgtgcctgaccacgtgggctacgccaaggtgaagatcaccctcatcaatgaaaatgacaaccggcccatcttcagccagcccctgtacaacatcagcctgtatgaaaatgtgacagtgggcacctctgtgctgactgtgctggtgagcccccgcttcaccgctggccccctgagcagccctggccccaccgtggtgcgccaccctgagggcttctgcccccgggacctgagcaaccagggccgccgccacccccagatccctgagctgtgcctgctggtgtactag

SEQ ID NO: 145693 - DNA, 2187 bp, synthetic construct
  misc_feature 1..2187: note = Description of Artificial Sequence: Synthetic coding sequence
  source 1..2187: mol_type = other DNA
gccacagacaatgatgctggcacctttggagaggtgtcctacttcttcagtgatgatcctgaccgcttcagcctggacaaggacaccggcctcatcatgctgattgcccggctggactatgagctgatccagcgcttcaccctgaccatcatcgccagagatggcggcggggaggagaccaccggccgggtgcgcatcaacgtgctggatgtgaatgacaacgtgcccaccttccagaaggatgcctacgtgggcgccctgagagaaaatgagcccagcgtgacccagctggtgcggctgcgggccacagatgaggacagcccccccaacaaccagatcacctacagcatcgtgtctgccagcgccttcggcagctactttgacatcagcctgtatgagggctatggagtcatctctgtgtcccggcccctggactatgagcagatcagcaatggcctcatctacctgactgtgatggccatggatgctggcaacccccccctgaacagcacagtgcctgtgaccatcgaggtgtttgatgaaaatgacaacccccccaccttcagcaagccagcctactttgtgtctgtggtggagaacatcatggccggggccaccgtgctcttcctgaatgccacagacctggacaggagccgggagtatggccaggagagcatcatctacagcctggagggcagcacccagttccgcatcaatgcccggagcggggagatcaccaccaccagcctgctggaccgggagaccaagtctgagtacatcctgattgtgcgggctgtggatggaggagtgggccacaaccagaagacaggcatcgccaccgtgaacatcaccctgctggacatcaatgacaaccaccccacctggaaggatgccccctactacatcaacctggtggagatgaccccaccagacagtgatgtgaccaccgtggtggccgtggaccctgacctgggggagaatggcaccctggtgtacagcatccagccccccaacaagttctacagcctgaacagcaccaccgggaagatccgcaccacccacgccatgctggaccgggagaacccagacccccatgaagctgagctgatgaggaagatcgtggtgtctgtgacagactgtggccggccccccctgaaggccaccagcagcgccaccgtgtttgtgaacctgctggacctgaatgacaatgaccccaccttccagaacctgccctttgtggccgaggtgctggagggcatcccagctggggtgtccatctaccaggtggtggccatcgacctggatgagggcctgaatggcctggtgtcctacaggatgcctgtgggcatgcccaggatggacttcctgatcaacagcagcagtggagtggtggtgaccaccacagagctggaccgggagagaattgctgagtaccagctgcgggtggtggccagtgatgctggcacccccaccaagagcagcaccagcaccctgaccatccacgtgctggatgtgaatgatgagacccccaccttcttccctgctgtgtacaacgtgtctgtgtctgaagatgtgccccgggagttccgggtggtgtggctgaactgcacagacaatgatgtgggcctgaatgctgagctgagctacttcatcaccggcggcaatgtggatggcaagttctctgtgggctacagagatgctgtggtgaggacagtggtgggcctggaccgggagaccacagctgcctacatgctgatcctggaggccatcgacaatggacctgtgggcaagaggcacactggaacagccaccgtgtttgtgacagtgctggatgtgaatgacaaccggcccatcttcctgcagagcagctatgaggcctctgtgcctgaggacatccctgagggccacagcatcctgcaggaggacctggccagcccctgcatcagccctgccccaccccggcgggccttccagagcagcggggagaaggagaccagccagtttcctgggaaggagctgcggcgggagcccggccccagcaaggcccagaacagagctgccttcacagagcccctggccgaggcccccctgctgggcagcaagcaggcccaggaggagcgggcccccctgccccgggagcaggcccagcagctgcagggcagcgagggggagaagggcggcccctag

SEQ ID NO: 145694 - DNA, 2238 bp, synthetic construct
  misc_feature 1..2238: note = Description of Artificial Sequence: Synthetic coding sequence
  source 1..2238: mol_type = other DNA
atgaggcgctgccgctgggccgccctggccctgggcctgctgcggctgtgcctggcccaggccaactttgccccccacttctttgacaacggggtgggcagcaccaacggcaacatggccctcttcagcctgcctgaggacacccctgtgggcagccacgtgtacaccctgaatggaacagatcctgagggggaccccatctcctaccacatcagctttgaccccagcaccaggtctgtgttttctgtggaccccacctttggaaacatcaccctggtggaggagctggaccgggagagagaagatgaaattgaggccatcatcagcatcagtgatggcctgaacctggtggccgagaaggtggtgatcctggtgacagatgccaatgatgaggccccccgcttcatccaggagccctacgtggccctggtgcctgaggacatcccagctggcagcatcatcttcaaggtgcatgctgtggaccgggacaccggcagcggcggctctgtgacctacttcctgcagaacctgcacagcccctttgctgtggacagacattctggagtgctgcggctgcaggccggggccaccctggactatgaaagaagcaggacccactacatcaccgtggtggccaaggatggcggcggccgcctgcacggggctgatgtggtgttttctgccaccaccaccgtgacagtgaatgtggaggatgtgcaggacatggcccctgtgtttgtgggcaccccctactacggctacgtgtatgaggacaccctgcccggcagcgaggtgctgaaggtggtggccatggatggagaccggggcaagcccaaccgcatcctgtacagcctggtgaatggaaatgatggagcctttgagatcaatgagaccagcggggccatcagcatcacccagagccctgcccagctgcagcgggaggtgtatgagctgcacgtgcaggtgacagagatgagccctgctggcagccctgctgcccaggccaccgtgcctgtgaccatcagaattgtggacctgaacaaccacccccccaccttctacggggagagcggcccccagaacagatttgagctgtccatgaatgagcaccccccccagggcgagatcctgcggggcctgaagatcaccgtgaatgacagcgaccagggcgccaatgccaagttcaacctgcagctggtgggcccccggggcatcttccgggtggtgccccagacagtgctgaatgaggcccaggtgaccatcatcgtggagaacagcgctgccatcgactttgagaagagcaaggtgctgaccttcaagctgctggccgtggaggtgaacaccccagagaagttcagcagcacagcagatgtggtgatccagctgctggacaccaatgacaacgtgcccaagtttgacagcctgtactacgtggcccgcatcccagaaaatgcccctgggggcagctctgtggtggccgtgacagctgtggaccctgacaccggcccctggggcgaggtgaagtacagcacctacggcaccggggctgacctcttcctgatccaccccagcacaggcctcatctacacccagccctgggccagcctggatgctgaggccacagcccgctacaacttctacgtgaaggccgaggacatggagggcaagtacagcgtggccgaggtgttcatcaccctgctggatgtgaatgaccaccccccccagtttgggaagtctgtgcagaagaagaccatggtgctgggcacccctgtgaagattgaggccattgatgaagatgctgaggagcccaacaacctggtggactacagcatcacccacgccgagcccgccaacgtgtttgacatcaacagccacactggagagatctggctgaagaacagcatccgcagcctggatgccctgcacaacatcaccccaggccgggactgcctgtggagcctggaggtgcaggccaaggaccggggcagccccagcttcagcaccacagccctgctgaagattgacatcacagatgctgaggtgcggcggctgcgctacatgaagaacagcaacttccctggcaccaccaagtctgtgaggaagcccaagttcaagcccaagaagccccacagcagccagggcctcttcctgcacccccactgtgaaattgccctcttcaacctgagcaatgtgaacctgtacagcagggtcttccagggcgccgcccaggccagctag

SEQ ID NO: 145695 - DNA, 2580 bp, synthetic construct
  misc_feature 1..2580: note = Description of Artificial Sequence: Synthetic coding sequence
  source 1..2580: mol_type = other DNA
atgaggcgctgccgctgggccgccctggccctgggcctgctgcggctgtgcctggcccaggccaactttgccccccacttctttgacaacggggtgggcagcaccaacggcaacatggccctcttcagcctgcctgaggacacccctgtgggcagccacgtgtacaccctgaatggaacagatcctgagggggaccccatctcctaccacatcagctttgaccccagcaccaggtctgtgttttctgtggaccccacctttggaaacatcaccctggtggaggagctggaccgggagagagaagatgaaattgaggccatcatcagcatcagtgatggcctgaacctggtggccgagaaggtggtgatcctggtgacagatgccaatgatgaggccccccgcttcatccaggagccctacgtggccctggtgcctgaggacatcccagctggcagcatcatcttcaaggtgcatgctgtggaccgggacaccggcagcggcggctctgtgacctacttcctgcagaacctgcacagcccctttgctgtggacagacattctggagtgctgcggctgcaggccggggccaccctggactatgaaagaagcaggacccactacatcaccgtggtggccaaggatggcggcggccgcctgcacggggctgatgtggtgttttctgccaccaccaccgtgacagtgaatgtggaggatgtgcaggacatggcccctgtgtttgtgggcaccccctactacggctacgtgtatgaggacaccctgcccggcagcgaggtgctgaaggtggtggccatggatggagaccggggcaagcccaaccgcatcctgtacagcctggtgaatggaaatgatggagcctttgagatcaatgagaccagcggggccatcagcatcacccagagccctgcccagctgcagcgggaggtgtatgagctgcacgtgcaggtgacagagatgagccctgctggcagccctgctgcccaggccaccgtgcctgtgaccatcagaattgtggacctgaacaaccacccccccaccttctacggggagagcggcccccagaacagatttgagctgtccatgaatgagcaccccccccagggcgagatcctgcggggcctgaagatcaccgtgaatgacagcgaccagggcgccaatgccaagttcaacctgcagctggtgggcccccggggcatcttccgggtggtgccccagacagtgctgaatgaggcccaggtgaccatcatcgtggagaacagcgctgccatcgactttgagaagagcaaggtgctgaccttcaagctgctggccgtggaggtgaacaccccagagaagttcagcagcacagcagatgtggtgatccagctgctggacaccaatgacaacgtgcccaagtttgacagcctgtactacgtggcccgcatcccagaaaatgcccctgggggcagctctgtggtggccgtgacagctgtggaccctgacaccggcccctggggcgaggtgaagtacagcacctacggcaccggggctgacctcttcctgatccaccccagcacaggcctcatctacacccagccctgggccagcctggatgctgaggccacagcccgctacaacttctacgtgaaggccgaggacatggagggcaagtacagcgtggccgaggtgttcatcaccctgctggatgtgaatgaccaccccccccagtttgggaagtctgtgcagaagaagaccatggtgctgggcacccctgtgaagattgaggccattgatgaagatgctgaggagcccaacaacctggtggactacagcatcacccacgccgagcccgccaacgtgtttgacatcaacagccacactggagagatctggctgaagaacagcatccgcagcctggatgccctgcacaacatcaccccaggccgggactgcctgtggagcctggaggtgcaggccaaggaccggggcagccccagcttcagcaccacagccctgctgaagattgacatcacagatgctgagaccctgagccgcagccccatggccgccttcctgatccagaccaaggacaaccccatgaaggctgtgggcgtgctggccggcaccatggccaccgtggtggccatcaccgtgctgatcagcacagccaccttctggaggaacaagaagagcaacaaggtgctgcccatgagaagagtgctgaggaagaggcccagccctgcccccaggaccatcagaattgagtggctgaagagcaagagcaccaaggccgccaccaagttcatgctgaaggagaagcccccaaatgaaaactgcaacaacaacagccctgagagcagcctgctgccccgggccccagccctgcccccacctccttctgtggcccccagcactggagctgcccagtggacagtgcccaccgtgtctggcagcctgaccccccagcccacccagcccccacccaagcccaagaccatgggcagccctgtgcagagcaccctcatcagcgagctgaagcagaagtttgagaagaagtctgtgcacaacaaggcctacttctag

SEQ ID NO: 145696 - DNA, 1692 bp, synthetic construct
  misc_feature 1..1692: note = Description of Artificial Sequence: Synthetic coding sequence
  source 1..1692: mol_type = other DNA
atggcccctgtgtttgtgggcaccccctactacggctacgtgtatgaggacaccctgcccggcagcgaggtgctgaaggtggtggccatggatggagaccggggcaagcccaaccgcatcctgtacagcctggtgaatggaaatgatggagcctttgagatcaatgagaccagcggggccatcagcatcacccagagccctgcccagctgcagcgggaggtgtatgagctgcacgtgcaggtgacagagatgagccctgctggcagccctgctgcccaggccaccgtgcctgtgaccatccgcatcgtggacctgaacaaccacccccccaccttctatggagagagcggcccccagaacagatttgagctgtccatgaatgagcaccccccccagggcgagatcctgcggggcctgaagatcaccgtgaatgacagcgaccagggcgccaatgccaagttcaacctgcagctggtgggcccccggggcatcttccgggtggtgccccagacagtgctgaatgaggcccaggtgaccatcatcgtggagaacagcgctgccatcgactttgagaagagcaaggtgctgaccttcaaggctgtggaccctgacaccggcccctggggcgaggtgaagtacagcacctacggcaccggggctgacctcttcctgatccaccccagcacaggcctcatctacacccagccctgggccagcctggatgctgaggccacagcccgctacaacttctacgtgaaggccgaggacatggagggcaagtacagcgtggccgaggtgttcatcaccctgctggatgtgaatgaccaccccccccagtttgggaagtctgtgcagaagaagaccatggtgctgggcacccctgtgaagattgaggccattgatgaagatgctgaggagcccaacaacctggtggactacagcatcacccacgccgagcccgccaacgtgtttgacatcaacagccacactggagagatctggctgaagaacagcatccgcagcctggatgccctgcacaacatcaccccaggccgggactgcctgtggagcctggaggtgcaggccaaggaccggggcagccccagcttcagcaccacagccctgctgaagattgacatcacagatgctgagaccctgagccgcagccccatggccgccttcctgatccagaccaaggacaaccccatgaaggctgtgggcgtgctggccggcaccatggccaccgtggtggccatcaccgtgctgatcagcacagccaccttctggaggaacaagaagagcaacaaggtgctgcccatgagaagagtgctgaggaagaggcccagccctgcccccaggaccatcagaattgagtggctgaagagcaagagcaccaaggccgccaccaagttcatgctgaaggagaagcccccaaatgaaaactgcaacaacaacagccctgagagcagcctgctgccccgggccccagccctgcccccacctccttctgtggcccccagcactggagctgcccagtggacagtgcccaccgtgtctggcagcctgaccccccagcccacccagcccccacccaagcccaagaccatgggcagccctgtgcagagcaccctcatcagcgagctgaagcagaagtttgagaagaagtctgtgcacaacaaggcctacttctag

SEQ ID NO: 145697 - DNA, 1464 bp, synthetic construct
  misc_feature 1..1464: note = Description of Artificial Sequence: Synthetic coding sequence
  source 1..1464: mol_type = other DNA
atgggctcctgggccctgctgtggccacccctgctcttcaccggcctgctggtgcggcccccaggcaccatggcccaggcccagtactgcagcgtgaacaaggacatctttgaggtggaggagaacaccaacgtgacagagcccctggtggacatccacgtgcctgagggccaggaggtgaccctgggcgccctgagcaccccatttgccttccgcatccagggcaaccagctgttcctgaatgtgaccccagactatgaggagaagagcctgctggaggcccagctgctgtgccagagcggcggcaccctggtgacccagctgcgggtgtttgtgtctgtgctggatgtgaatgacaatgcccctgagttccccttcaagaccaaggagatccgggtggaggaggacaccaaggtgaacagcaccgtcatccctgagacccagctgcaggccgaggaccgggacaaggatgacatcctcttctacaccctgcaggagatgacagctggggccagtgactacttcagcctggtgtctgtgaacagacctgccctgcggctggaccggcccctggacttctatgaaagacccaacatgaccttctggctgctggtgcgggacaccccaggagaaaatgtggagcccagccacacagccacagccaccctggtgctgaatgtggtgcctgctgacctgcggcccccctggttcctgccctgcaccttcagtgatggctacgtgtgcatccaggcccagtaccacggggctgtgcccaccggccacatcctgcccagccccctggtgctgcggcccggccccatctatgcagaagatggagaccggggcatcaaccagcccatcatctacagcatcttcagaggaaatgtgaatggcaccttcatcatccacccagacagcggcaacctgactgtggcccggtctgtgcccagccccatgaccttcctgctgctggtgaagggccagcaggccgacctggcccgctacagcgtgacccaggtgacagtggaggccgtggccgccgccggcagccccccacgcttcccccagaggctgtaccggggcaccgtggcccggggagctggagctggggtggtggtgaaggatgctgctgcccccagccagcccctgcgcatccaggcccaggaccctgagttcagtgacctgaacagcgccatcacctaccgcatcaccaaccacagccacttcaggatggagggggaggtggtgctgaccaccaccaccctggcccaggccggggccttctacgccgagccccccacctgcaccggggacctgcggcacccagcccacctgcggcccccagccccagaccccacccagaggctgcctggagaggccgaggagcccatgcagacccccaaggccacccacctgggcgctgggggcctgaagcacctgcccggggtgctggtgcccttctag

SEQ ID NO: 145698 - DNA, 1956 bp, synthetic construct
  misc_feature 1..1956: note = Description of Artificial Sequence: Synthetic coding sequence
  source 1..1956: mol_type = other DNA
atgggctcctgggccctgctgtggccacccctgctcttcaccggcctgctggtgcggcccccaggcaccatggcccaggcccagtactgcagcgtgaacaaggacatctttgaggtggaggagaacaccaacgtgacagagcccctggtggacatccacgtgcctgagggccaggaggtgaccctgggcgccctgagcaccccatttgccttccgcatccagggcaaccagctgttcctgaatgtgaccccagactatgaggagaagagcctgctggaggcccagctgctgtgccagagcggcggcaccctggtgacccagctgcgggtgtttgtgtctgtgctggatgtgaatgacaatgcccctgagttccccttcaagaccaaggagatccgggtggaggaggacaccaaggtgaacagcaccgtcatccctgagacccagctgcaggccgaggaccgggacaaggatgacatcctcttctacaccctgcaggagatgacagctggggccagtgactacttcagcctggtgtctgtgaacagacctgccctgcggctggaccggcccctggacttctatgaaagacccaacatgaccttctggctgctggtgcgggacaccccaggagaaaatgtggagcccagccacacagccacagccaccctggtgctgaatgtggtgcctgctgacctgcggcccccctggttcctgccctgcaccttcagtgatggctacgtgtgcatccaggcccagtaccacggggctgtgcccaccggccacatcctgcccagccccctggtgctgcggcccggccccatctatgcagaagatggagaccggggcatcaaccagcccatcatctacagcatcttcagaggaaatgtgaatggcaccttcatcatccacccagacagcggcaacctgactgtggcccggtctgtgcccagccccatgaccttcctgctgctggtgaagggccagcaggccgacctggcccgctacagcgtgacccaggtgacagtggaggccgtggccgccgccggcagccccccacgcttcccccagaggctgtaccggggcaccgtggcccggggagctggagctggggtggtggtgaaggatgctgctgcccccagccagcccctgcgcatccaggcccaggaccctgagttcagtgacctgaacagcgccatcacctaccgcatcaccaaccacagccacttcaggatggagggggaggtggtgctgaccaccaccaccctggcccaggccggggccttctacgccgaggtggaggcccacaacacagtgaccagcggcacagccaccaccgtgattgagatccaggtgtctgagcaggagccccccagcactggaggcggccccagcgaggacaagcgcttctctgtggtggacatggccgccctgggcggcgtgctgggcgccctgctgctgctggccctgctgggcctggccgtgctggtgcacaagcactacggcccccggctgaagtgctgctgcggcaaggcccctgagccccagccccagggctttgacaaccaggccttcctgcctgaccacaaggccaactgggcccctgtgcccagccccacccatgaccccaagccagctgaggcccccatgcctgctgagcccgcccctcctggccctgccagccctggaggagcccctgagcccccagctgctgcccgggccggcggcagccccacagctgtgcgcagcatcctgaccaaggagcggcggcctgagggcggctacaaggctgtgtggtttggagaagatattggaacagaagcagatgtggtggtgctgaatgcccccaccctggatgtggatggagccagtgacagcggcagcggagatgaaggagagggcgccggccggggcggcggcccctatgatgcccctggaggagatgacagctacatctag

SEQ ID NO: 145699 - DNA, 2538 bp, synthetic construct
  misc_feature 1..2538: note = Description of Artificial Sequence: Synthetic coding sequence
  source 1..2538: mol_type = other DNA
atgggctcctgggccctgctgtggccacccctgctcttcaccggcctgctggtgcggcccccaggcaccatggcccaggcccagtactgcagcgtgaacaaggacatctttgaggtggaggagaacaccaacgtgacagagcccctggtggacatccacgtgcctgagggccaggaggtgaccctgggcgccctgagcaccccatttgccttccgcatccagggcaaccagctgttcctgaatgtgaccccagactatgaggagaagagcctgctggaggcccagctgctgtgccagagcggcggcaccctggtgacccagctgcgggtgtttgtgtctgtgctggatgtgaatgacaatgcccctgagttccccttcaagaccaaggagatccgggtggaggaggacaccaaggtgaacagcaccgtcatccctgagacccagctgcaggccgaggaccgggacaaggatgacatcctcttctacaccctgcaggagatgacagctggggccagtgactacttcagcctggtgtctgtgaacagacctgccctgcggctggaccggcccctggacttctatgaaagacccaacatgaccttctggctgctggtgcgggacaccccaggagaaaatgtggagcccagccacacagccacagccaccctggtgctgaatgtggtgcctgctgacctgcggcccccctggttcctgccctgcaccttcagtgatggctacgtgtgcatccaggcccagtaccacggggctgtgcccaccggccacatcctgcccagccccctggtgctgcggcccggccccatctatgcagaagatggagaccggggcatcaaccagcccatcatctacagcatcttcagaggaaatgtgaatggcaccttcatcatccacccagacagcggcaacctgactgtggcccggtctgtgcccagccccatgaccttcctgctgctggtgaagggccagcaggccgacctggcccgctacagcgtgacccaggtgacagtggaggccgtggccgccgccggcagccccccacgcttcccccagaggctgtaccggggcaccgtggcccggggagctggagctggggtggtggtgaaggatgctgctgcccccagccagcccctgcgcatccaggcccaggaccctgagttcagtgacctgaacagcgccatcacctaccgcatcaccaaccacagccacttcaggatggagggggaggtggtgctgaccaccaccaccctggcccaggccggggccttctacgccgaggtggaggcccacaacacagtgaccagcggcacagccaccaccgtgattgagatccaggtgtctgagcaggagccccccagcacagatgtgccccccagccctgaggccggcggcaccaccggcccctggaccagcaccaccagcgaggtgccccggcccccagagcccagccagggccccagcaccaccagcagcggcggcggcaccggcccccacccccccagcggcaccaccctgcggccccccaccagcagcacccctgggggccccccaggagctgagaacagcaccagccaccagcctgccaccccaggaggagacacagcccagacccccaagccaggcaccagccagcccatgcctcctggggtgggcaccagcaccagccaccagcctgccaccccatctgggggcacagcccagaccccagagcccggcaccagccagcccatgcctccttccatgggcaccagcaccagccaccagcctgccaccccaggcggcggcacagcccagaccccagaggccggcaccagccagcccatgcctcctggcatgggcaccagcaccagccaccagcccaccacccctgggggcggcacagcccagaccccagagcccggcaccagccagcccatgcccctgagcaagagcacccccagcagcggcggcggccccagcgaggacaagcgcttctctgtggtggacatggccgccctgggcggcgtgctgggcgccctgctgctgctggccctgctgggcctggccgtgctggtgcacaagcactacggcccccggctgaagtgctgctgcggcaaggcccctgagccccagccccagggctttgacaaccaggccttcctgcctgaccacaaggccaactgggcccctgtgcccagccccacccatgaccccaagccagctgaggcccccatgcctgctgagcccgcccctcctggccctgccagccctggaggagcccctgagcccccagctgctgcccgggccggcggcagccccacagctgtgcgcagcatcctgaccaaggagcggcggcctgagggcggctacaaggctgtgtggtttggagaagatattggaacagaagcagatgtggtggtgctgaatgcccccaccctggatgtggatggagccagtgacagcggcagcggagatgaaggagagggcgccggccggggcggcggcccctatgatgcccctggaggagatgacagctacatctag

SEQ ID NO: 145700 - DNA, 2538 bp, synthetic construct; identical to SEQ ID NO: 145699
  misc_feature 1..2538: note = Description of Artificial Sequence: Synthetic coding sequence
  source 1..2538: mol_type = other DNA

SEQ ID NO: 145701 - DNA, 786 bp, synthetic construct
  misc_feature 1..786: note = Description of Artificial Sequence: Synthetic coding sequence
  source 1..786: mol_type = other DNA
atggccgagagccacctgcagagcagcctcatcacagccagccagttctttgagatctggctgcactttgatgctgatggcagcggctacctggagggcaaggagctgcagaacctgatccaggagctgcagcaggccaggaagaaggccggcctggagctgagccctgagatgaagacctttgtggaccagtatggccagagagatgatggcaagattggaattgtggagctggcccacgtgctgcccacagaggagaacttcctgctgctcttccgctgccagcagctgaagagctgtgaggagttcatgaagacctggaggaaatatgacacagaccacagcggcttcatcgagacagaggagctgaagaacttcctgaaggacctgctggagaaggccaacaagacagtggatgacaccaagctggccgagtacacagacctgatgctgaagctgtttgacagcaacaatgatggcaagctggagctgacagagatggcccggctgctgcctgtgcaggagaacttcctgctgaagttccagggcatcaagatgtgtgggaaggagttcaacaaggcctttgagctgtatgaccaggatggaaatggctacattgatgaaaatgagctggatgccctgctgaaggacctgtgtgagaagaacaagcaggacctggacatcaacaacatcaccacctacaagaagaacatcatggccctgagtgatggcggcaagctgtacagaacagacctggccctgatcctgtgtgccggggacaactag

SEQ ID NO: 145702 - DNA, 615 bp, synthetic construct
  misc_feature 1..615: note = Description of Artificial Sequence: Synthetic coding sequence
  source 1..615: mol_type = other DNA
atgaagacctttgtggaccagtatggccagagagatgatggcaagattggcatcgtggagctggcccacgtgctgcccacagaggagaacttcctgctgctcttccgctgccagcagctgaagagctgtgaggagttcatgaagacctggaggaaatatgacacagaccacagcggcttcattgaaacagaggagctgaagaacttcctgaaggacctgctggagaaggccaacaagacagtggatgacaccaagctggccgagtacacagacctgatgctgaagctgtttgacagcaacaatgatggcaagctggagctgacagagatggcccggctgctgcctgtgcaggagaacttcctgctgaagttccagggcatcaagatgtgtgggaaggagttcaacaaggcctttgagctgtatgaccaggatggaaatggctacattgatgaaaatgagctggatgccctgctgaaggacctgtgtgagaagaacaagcaggacctggacatcaacaacatcaccacctacaagaagaacatcatggccctgagtgatggcggcaagctgtacagaacagacctggccctgatcctgtgtgccggggacaactag

SEQ ID NO: 145703 - DNA, 816 bp, synthetic construct
  misc_feature 1..816: note = Description of Artificial Sequence: Synthetic coding sequence
  source 1..816: mol_type = other DNA
atggccggcccccagcagcagcccccctacctgcacctggccgagctgacagccagccagttcctggagatctggaagcactttgatgctgatggaaatggctacatcgagggcaaggagctggagaacttcttccaggagctggagaaggccaggaaaggaagtggcatgatgagcaagagtgacaactttggagagaagatgaaggagttcatgcagaagtatgacaagaacagtgatggcaagattgagatggccgagctggcccagatcctgcccacagaggagaacttcctgctgtgcttccggcagcacgtgggcagcagcgctgagttcatggaggcctggaggaaatatgacacagacaggagcggctacatcgaggccaatgagctgaagggcttcctgagtgacctgctgaagaaggccaaccggccctatgatgagcccaagctgcaggagtacacccagaccatcctgaggatgtttgacctgaatggagatggcaagctgggcctgtctgagatgagccggctgctgcctgtgcaggagaacttcctgctgaagttccagggcatgaagctgaccagcgaggagttcaatgccatcttcaccttctatgacaaggacaggagcggctacattgatgagcacgagctggatgccctgctgaaggacctgtatgagaagaacaagaaggagatgaacatccagcagctgaccaactacaggaagtctgtgatgagcctggccgaggccggcaagctgtacaggaaggacctggagatcgtgctgtgcagcgagccccccatgtag

SEQ ID NO: 145704 - DNA, 579 bp, synthetic construct
  misc_feature 1..579: note = Description of Artificial Sequence: Synthetic coding sequence
  source 1..579: mol_type = other DNA
atggccggcccccagcagcagcccccctacctgcacctggccgagctgacagccagccagttcctggagatctggaagcactttgatgctgatggaaatggctacatcgagggcaaggagctggagaacttcttccaggagctggagaaggccaggaaaggaagtggcatgatgagcaagagtgacaactttggagagaagatgaaggagttcatgcagaagtatgacaagaacagtgatggcaagattgagatggccgagctggcccagatcctgcccacagaggagaacttcctgctgtgcttccggcagcacgtgggcagcagcgctgagttcatggaggcctggaggaaatatgacacagacaggagcggctacatcgaggccaatgagctgaagggcttcctgagtgacctgctgaagaaggccaaccggccctatgatgagcccaagctgcaggagtacacccagaccatcctgaggatgtttgacctgaatggagatggcaagctgggcctgtctgagatgagcagaattgaagctgccaccctgacctccatgtcctggatgcccttctag

SEQ ID NO: 145705 - DNA, 6663 bp, synthetic construct
  misc_feature 1..6663: note = Description of Artificial Sequence: Synthetic coding sequence
  source 1..6663: mol_type = other DNA
atgatcagaattgctgccctgaatgccagcagcaccattgaagatgaccacgagggcagcttcaagagccacaagacccagaccaaggaggcccaggaggccgaggcctttgccctgtaccacaaggccctggacctgcagaagcatgacagatttgaggagagcgccaaggcctaccacgagctgctggaggccagcctgctgcgggaggccgtgtcctctggagatgagaaggagggcctgaagcaccctggcctcatcctgaagtacagcacctacaagaacctggcccagctggccgcccagcgggaggacctggagacagccatggagttctacctggaggccgtgatgctggacagcacagatgtgaacctgtggtacaagattggccacgtggccctgcggctcatccgcatccccctggcccggcatgcctttgaggagggcctgcgctgcaacccagaccactggccctgcctggacaacctgatcaccgtgctgtacaccctgagtgactacaccacctgcctgtacttcatctgcaaggccctggagaaggactgccgctacagcaagggcctggtgctgaaggagaagatctttgaggagcagccctgcctgaggaaggacagcctgaggatgttcctgaagtgtgacatgagcatccatgatgtgtctgtgtctgctgctgagacccaggccatcgtggatgaggccctgggcctgaggaagaagaggcaggccctgattgtgcgggagaaggagccagacctgaagctggtgcagcccatccccttcttcacctggaagtgcctgggggagagcctgctggccatgtacaaccacctgaccacctgtgagcccccccggcccagcctgggcaagagaattgacctgagtgactaccaggaccccagccagcccctggagagctccatggtggtgacccctgtgaatgtcatccagcccagcacagtgtccaccaacccagctgtggccgtggccgagcctgtggtgtcctacacctctgtggccaccaccagcttccccctgcacagccctggcctgctggagaccggggcccctgtgggggacatcagcggcggggacaagagcaagaagggcgtgaagaggaagaagatcagcgaggagagcggggagacagccaagagaagaagtgcccgggtgaggaacaccaagtgcaagaaggaggagaaggtggacttccaggagctgctgatgaagttcctgcccagccggctgaggaagctggaccctgaggaggaggatgacagcttcaacaactatgaggtgcagagcgaggccaagctggagagcttccccagcatcggcccccagaggctgagctttgacagcgccaccttcatggagagcgagaagcaggatgtgcatgagttcctgctggagaacctgaccaatggaggcatcctggagctgatgatgagatacctgaaggccatgggccacaagttcctggtgcgctggcccccaggcctggccgaggtggtgctgtctgtgtaccacagctggaggaggcacagcaccagcctgcccaaccccctgctgcgggactgcagcaacaagcacatcaaggacatgatgctgatgagcctgagctgcatggagctgcagctggaccagtggctgctgaccaagggccgcagcagcgctgtgagccccaggaactgcccagctggcatggtgaatggccgcttcggccctgacttccctggcacccactgcctgggggacctgctgcagctgagctttgccagcagccagagggacctgtttgaagatggctggctggagtttgtggtgcgggtgtactggctgaaggcccgcttcctggccctgcagggcgacatggagcaggccctggagaactatgacatctgcacagagatgctgcagagcagcacagccatccaggtggaggccggggctgagcggcgggacatcgtcatccggctgcccaacctgcacaatgattctgtggtgtccctggaggagattgacaagaacctgaagagcctggagcgctgccagagcctggaggagatccagaggctgtatgaggccggggactacaaggctgtggtgcacctgctgcggcccaccctgtgcaccagcggctttgaccgggccaagcacctggagttcatgaccagcatccctgagaggcctgcccagctgctgctgctgcaggacagcctgctgcggctgaaggactaccggcagtgctttgagtgcagtgatgtggccctgaatgaagctgtgcagcagatggtgaacagcggggaggccgccgccaaggaggagtgggtggccaccgtgacccagctgctgatgggcatcgagcaggccctgtctgctgacagcagcggcagcatcctgaaggtgagcagcagcaccaccggcctggtgcggctgaccaacaacctgatccaggtgattgactgcagcatggctgtgcaggaggaggccaaggagccccacgtgtcctctgtgctgccctggatcatcctgcaccgcatcatctggcaggaggaggacaccttccacagcctgtgccaccagcagcagctgcagaacccagctgaggagggcatgtctgagacccccatgctgcccagcagcctgatgctgctgaacacagcccacgagtacctgggcagaagatcctggtgctgcaacagtgatggagccctgctgcgcttctacgtgcgggtgctgcagaaggagctggccgccagcaccagcgaggacacccacccctacaaggaggagctggagacagccctggagcagtgcttctactgcctgtacagcttccccagcaagaagagcaaggcccgctacctggaggagcacagcgcccagcaggtggacctgatctgggaggatgccctcttcatgtttgagtacttcaagcccaagaccctgcctgagtttgacagctacaagaccagcacagtgtctgctgacctggccaacctgctgaagagaattgccaccatcgtgcccaggacagagaggcctgccctgagcctggacaaggtgtctgcctacatcgagggcaccagcacagaggtgccctgcctgcctgagggcgctgaccccagcccccctgtggtgaatgagctgtactacctgctggccgactaccacttcaagaacaaggagcagagcaaggccatcaagttctacatgcatgacatctgcatctgccccaacagatttgacagctgggccggcatggccctggcccgggccagccgcatccaggacaagctgaacagcaatgagctgaagagtgatggccccatctggaagcacgccacccctgtgctgaactgcttccggcgggccctggagattgacagcagcaacctgagcctgtggattgaatatggcaccatgtcctatgccctgcacagctttgccagccggcagctgaagcagtggagaggagagctgcccccagagctggtgcagcagatggagggcagaagagacagcatgctggagacagccaagcactgcttcaccagcgctgcccgctgtgaaggagatggagatgaggaggagtggctgatccactacatgctgggcaaggtggccgagaagcagcagcagccccccaccgtgtacctgctgcactaccggcaggccggccactacctgcacgaggaggccgcccgctaccccaagaagatccactaccacaaccccccagagctggccatggaggccctggaggtgtacttccggctgcacgccagcatcctgaagctgctgggcaagccagacagcggcgtgggcgctgaggtgctggtgaacttcatgaaggaggccgctgagggcccctttgcccggggggaggagaagaacacccccaaggccagcgagaaggagaaggcctgcctggtggatgaggacagccacagcagcgctggcaccctgcccggccctggggccagcctgcccagcagcagcggccctggcctgaccagccccccctacacagccacccccatcgaccatgactatgtgaagtgcaagaagccccaccagcaggccaccccagatgacaggagccaggacagcacagctgtggccctgagtgacagcagcagcacccaggacttcttcaatgagcccaccagcctgctggagggcagcaggaagagctacacagagaagaggctgcccatcctgagcagccaggccggggccaccgggaaggacctgcagggcgccacagaggagcggggcaagaatgaggagagcctggagagcacagagggcttccgggctgctgagcagggcgtgcagaagccagctgctgagaccccagccagcgcctgcatccctgggaagcccagcgccagcacccccaccctgtgggatggcaagaagagaggagacctgcctggagagcctgtggccttcccccagggcctgcctgctggagctgaggagcagaggcagttcctgacagagcagtgcatcgccagcttccggctgtgcctgagccgcttcccccagcactacaagagcctgtaccgcctggccttcctgtacacctacagcaagacccacaggaacctgcagtgggccagagatgtgctgctgggcagcagcatcccctggcagcagctgcagcacatgcctgcccagggcctcttctgtgaaagaaacaagaccaacttcttcaacggcatctggagaattcctgtggatgaaattgacaggcctggcagctttgcctggcacatgaacagaagcatcgtgctgctgctgaaggtgctggcccagctgcgggaccacagcaccctgctgaaggtgtcctccatgctgcagaggaccccagaccagggcaagaagtacctgagagatgctgaccggcaggtgctggcccagagggccttcatcctgactgtgaaggtgctggaggacaccctgtctgagctggccgagggcagcgagcggcccggccccaaggtgtgtggcctgcccggggccaggatgaccacagatgtgagccacaaggccagcccagaagatggccaggagggcctgccccagcccaagaagccacccctggctgatggcagcggccctggccctgagcccggcggcaaggtgggcctgctgaaccacaggcctgtggccatggatgctggggacagcgctgaccagagcggggagaggaaggacaaggagagccccagggctggccccacagagcccatggacaccagcgaggccaccgtgtgccacagcgacctggagaggaccccacccctgctgcccggccggcctgcccgggaccggggccctgagagccggcccacagagctgagcctggaggagctgagcatcagcgcccggcagcagcccacccccctgaccccagcccagcctgccccagccccagccccagccaccaccaccggcacccgggccggcggccaccctgaggagcccctgagccggctgagcaggaagaggaagctgctggaggacacagaaagtggcaagaccctgctgctggatgcctacagagtgtggcagcagggccagaagggcgtggcctatgacctgggccgggtggagcgcatcatgtctgagacctacatgctgatcaagcaggtggatgaggaggccgccctggagcaggccgtgaagttctgccaggtgcacctgggcgctgctgcccagaggcaggccagcggggacacccccaccacccccaagcaccccaaggacagccgggagaacttcttccctgtgacagtggtgcccacagccccagaccctgtgcctgctgacagcgtgcagaggcccagtgatgcccacaccaagcccaggcctgccctggccgccgccaccaccatcatcacctgcccccccagcgccagcgccagcaccctggaccagagcaaggaccccggccccccccggccccacaggcctgaggccacccccagcatggccagcctgggccctgagggggaggagctggcccgggtggccgagggcaccagcttccccccccaggagcccaggcacagcccccaggtgaagatggcccccaccagcagccctgctgagccccactgctggccagctgaggccgccctgggcaccggggctgagcccacctgcagccaggagggcaagctgcggcctgagcccaggagagatggagaggcccaggaggccgccagcgagacccagcccctgagcagccccccaacagctgccagcagcaaggcccccagcagcggcagcgcccagcccccagagggccaccctgggaagccagagcccagccgggccaagagccggcccctgcccaacatgcccaagctggtgatccccagcgctgccaccaagtttcctcctgagatcaccgtgaccccacccacccccaccctgctgagccccaagggcagcatcagcgaggagaccaagcagaagctgaagagcgccatcctgagcgcccagagcgctgccaacgtgaggaaggagagcctgtgccagcctgccctggaggtgctggagaccagcagccaggagagcagcctggagagcgagacagatgaagatgatgactacatggacatctag

SEQ ID NO: 145706 - DNA, 6663 bp, synthetic construct; identical to SEQ ID NO: 145705
  misc_feature 1..6663: note = Description of Artificial Sequence: Synthetic coding sequence
  source 1..6663: mol_type = other DNA

SEQ ID NO: 145707 - DNA, 1770 bp, synthetic construct
  misc_feature 1..1770: note = Description of Artificial Sequence: Synthetic coding sequence
  source 1..1770: mol_type = other DNA
atgcccaggaggagccggcggggcatctggagaattcctgtggatgaaattgaccggcccggcagctttgcctggcacatgaacagaagcatcgtgctgctgctgaaggtgctggcccagctgcgggaccacagcaccctgctgaaggtgtcctccatgctgcagaggaccccagaccagggcaagaagtacctgagagatgctgaccggcaggtgctggcccagagggccttcatcctgactgtgaaggtgctggaggacaccctgtctgagctggccgagggcagcgagaggcctggccccaaggtgtgtggcctgcccggggccaggatgaccacagatgtgagccacaaggccagcccagaagatggccaggagggcctgccccagcccaagaagccacccctggctgatggcagcggccctggccctgagcccggcggcaaggtgggcctgctgaaccacaggcctgtggccatggatgctggggacagcgctgaccagagcggggagaggaaggacaaggagagcccccgggccggccccacagagcccatggacaccagcgaggccaccgtgtgccacagcgacctggagaggaccccacccctgctgcccggccgcccagcccgggaccggggccctgagagccggcccacagagctgagcctggaggagctgagcatcagcgcccggcagcagcccacccccctgaccccagcccagcctgccccagccccagccccagccaccaccaccggcaccagggctgggggccaccctgaggagcccctgagccggctgagcaggaagaggaagctgctggaggacacagagagcggcaagaccctgctgctggatgcctacagagtgtggcagcagggccagaagggcgtggcctatgacctgggccgggtggagcgcatcatgtctgagacctacatgctgatcaagcaggtggatgaggaggccgccctggagcaggccgtgaagttctgccaggtgcacctgggcctgcccccccgggaccggccccgggacacccccaccacccccaagcaccccaaggacagccgggagaacttcttccctgtgacagtggtgcccacagccccagaccctgtgcctgctgacagcgtgcagaggcccagtgatgcccacaccaagcccaggcctgccctggccgccgccaccaccatcatcacctgcccccccagcgccagcgccagcaccctggaccagagcaaggaccccggccccccccggccccacaggcctgaggccacccccagcatggccagcctgggccctgagggcaagctgcggcctgagcccaggagagatggagaggcccaggaggccgccagcgagacccagcccctgagcagccccccaacagctgccagcagcaaggcccccagcagcggcagcgcccagcccccagagggccaccctgggaagccagagcccagccgggccaagagccggcccctgcccaacatgcccaagctggtgatccccagcgctgccaccaagttccccccagagatcaccgtgaccccacccacccccaccctgctgagccccaagggcagcatcagcgaggagaccaagcagaagctgaagagcgccatcctgagcgcccagagcgctgccaacgtgaggaaggagagcctgtgccagcctgccctggaggtgctggagaccagcagccaggagagcagcctggagagcgagacagatgaagatgatgactacatggacatctag

SEQ ID NO: 145708 - DNA, 1224 bp, synthetic construct
  misc_feature 1..1224: note = Description of Artificial Sequence: Synthetic coding sequence
  source 1..1224: mol_type = other DNA
atgatcagaattgctgccctgaatgccagcagcaccattgaagatgaccacgagggcagcttcaagagccacaagacccagaccaaggaggcccaggaggccgaggcctttgccctgtaccacaaggccctggacctgcagaagcatgacagatttgaggagagcgccaaggcctaccacgagctgctggaggccagcctgctgcgggaggccgtgtcctctggagatgagaaggagggcctgaagcaccctggcctcatcctgaagtacagcacctacaagaacctggcccagctggccgcccagcgggaggacctggagacagccatggagttctacctggaggccgtgatgctggacagcacagatgtgaacctgtggtacaagattggccacgtggccctgcggctcatccgcatccccctggcccggcatgcctttgaggagggcctgcgctgcaacccagaccactggccctgcctggacaacctgatcaccgtgctgtacaccctgagtgactacaccacctgcctgtacttcatctgcaaggccctggagaaggactgccgctacagcaagggcctggtgctgaaggagaagatctttgaggagcagccctgcctgaggaaggacagcctgaggatgttcctgaagtgtgacatgagcatccatgatgtgtctgtgtctgctgctgagacccaggccatcgtggatgaggccctgggcctgaggaagaagaggcaggccctgattgtgcgggagaaggagccagacctgaagctggtgcagcccatccccttcttcacctggaagtgcctgggggagagcctgctggccatgtacaaccacctgaccacctgtgagcccccccggcccagcctgggcaagagaattgacctgagtgactaccaggaccccagccagcccctggagagctccatggtggtgacccctgtgaatgtcatccagcccagcacagtgtccaccaacccagctgtggccgtggccgagcctgtggtgtcctacacctctgtggccaccaccagcttccccctgcacagccctggcctgctggagaccggggcccctgtgggggacatcagcggcggggacaagagcaagaagggcgtgaagaggaagaagatcagcgaggagagcggggagacagccaagagaagaagtgcccgggtgaggaacaccaagtgcaagaaggaggagaagtag

SEQ ID NO: 145709 - DNA, 1527 bp, synthetic construct
  misc_feature 1..1527: note = Description of Artificial Sequence: Synthetic coding sequence
  source 1..1527: mol_type = other DNA
atgcagttcagcggggagaagatcagcggccagagggacctgcagaagagcaagatgaggttcaccttcaccagccgctgcctggccctcttcctgctgctgaaccaccccacccccatcctgcctgccttcagcaaccagacctaccccaccatcgagcccaagcccttcctgtatgtggtgggcaggaagaagatgatggatgcccagtacaagtgctatgacaggatgcagcagctgcctgcctaccagggcgagggcccctactgcaacagaacctgggatggctggctgtgctgggatgacaccccagctggggtgctgagctaccagttctgcccagactacttcccagactttgaccccagcgagaaggtgaccaagtactgtgatgagaagggcgtgtggttcaagcaccctgagaacaacagaacctggagcaactacaccatgtgcaatgccttcaccccagagaagctgaagaatgcctacgtgctgtactacctggccatcgtgggccacagcctgagcatcttcaccctggtgatcagcctgggcatctttgtgttcttcaggaagctgaccaccatcttccccctgaactggaagtacaggaaggccctgagcctgggctgccagagggtgaccctgcacaagaacatgttcctgacctacatcctgaacagcatgatcatcatcatccacctggtggaggtggtgcccaacggggagctggtgagaagagatcctgtgtcctgcaagatcctgcacttcttccaccagtacatgatggcctgcaactacttctggatgctgtgtgagggcatctacctgcacaccctcatcgtggtggccgtgttcacagagaagcagaggctgcgctggtactacctgctgggctggggcttccccctggtgcccaccaccatccacgccatcaccagggctgtgtacttcaatgacaactgctggctgtctgtggagacccacctgctgtacatcatccacggccctgtgatggccgccctggtggtgaacttcttcttcctgctgaacatcgtgcgggtgctggtgaccaagatgagggagacccatgaagctgagagccacatgtacctgaaggctgtgaaggccaccatgatcctggtgcccctgctgggcatccagtttgtggtgttcccctggaggcccagcaacaagatgctgggcaagatctatgactatgtgatgcacagcctcatccacttccagggcttctttgtggccaccatctactgcttctgcaacaatgaggtgcagaccaccgtgaagaggcagtgggcccagttcaagatccagtggaaccagcgctggggcagaagacccagcaacagaagtgcccgggctgctgctgctgctgctgaggccggggacatccccatctacatctgccaccaggagctgagaaatgaaccagccaacaaccagggcgaggagagcgctgagatcatccccctgaacatcatcgagcaggagagcagcgcctag

SEQ ID NO: 145710 - DNA, 1473 bp, synthetic construct
  misc_feature 1..1473: note = Description of Artificial Sequence: Synthetic coding sequence
  source 1..1473: mol_type = other DNA
atgaggttcaccttcaccagccgctgcctggccctcttcctgctgctgaaccaccccacccccatcctgcctgccttcagcaaccagacctaccccaccatcgagcccaagcccttcctgtatgtggtgggcaggaagaagatgatggatgcccagtacaagtgctatgacaggatgcagcagctgcctgcctaccagggcgagggcccctactgcaacagaacctgggatggctggctgtgctgggatgacaccccagctggggtgctgagctaccagttctgcccagactacttcccagactttgaccccagcgagaaggtgaccaagtactgtgatgagaagggcgtgtggttcaagcaccctgagaacaacagaacctggagcaactacaccatgtgcaatgccttcaccccagagaagctgaagaatgcctacgtgctgtactacctggccatcgtgggccacagcctgagcatcttcaccctggtgatcagcctgggcatctttgtgttcttcaggaagctgaccaccatcttccccctgaactggaagtacaggaaggccctgagcctgggctgccagagggtgaccctgcacaagaacatgttcctgacctacatcctgaacagcatgatcatcatcatccacctggtggaggtggtgcccaacggggagctggtgagaagagatcctgtgtcctgcaagatcctgcacttcttccaccagtacatgatggcctgcaactacttctggatgctgtgtgagggcatctacctgcacaccctcatcgtggtggccgtgttcacagagaagcagaggctgcgctggtactacctgctgggctggggcttccccctggtgcccaccaccatccacgccatcaccagggctgtgtacttcaatgacaactgctggctgtctgtggagacccacctgctgtacatcatccacggccctgtgatggccgccctggtggtgaacttcttcttcctgctgaacatcgtgcgggtgctggtgaccaagatgagggagacccatgaagctgagagccacatgtacctgaaggctgtgaaggccaccatgatcctggtgcccctgctgggcatccagtttgtggtgttcccctggaggcccagcaacaagatgctgggcaagatctatgactatgtgatgcacagcctcatccacttccagggcttctttgtggccaccatctactgcttctgcaacaatgaggtgcagaccaccgtgaagaggcagtgggcccagttcaagatccagtggaaccagcgctggggcagaagacccagcaacagaagtgcccgggctgctgctgctgctgctgaggccggggacatccccatctacatctgccaccaggagctgagaaatgaaccagccaacaaccagggcgaggagagcgctgagatcatccccctgaacatcatcgagcaggagagcagcgcctag

SEQ ID NO: 145711 - DNA, 1425 bp, synthetic construct
  misc_feature 1..1425: note = Description of Artificial Sequence: Synthetic coding sequence
  source 1..1425: mol_type = other DNA
atgaggttcaccttcaccagccgctgcctggccctcttcctgctgctgaaccaccccacccccatcctgcctgccttcagcaaccagacctaccccaccatcgagcccaagcccttcctgtatgtggtgggcaggaagaagatgatggatgcccagtacaagtgctatgacaggatgcagcagctgcctgcctaccagggcgagggcccctactgcaacagaacctgggatggctggctgtgctgggatgacaccccagctggggtgctgagctaccagttctgcccagactacttcccagactttgaccccagcgagaaggtgaccaagtactgtgatgagaagggcgtgtggttcaagcaccctgagaacaacagaacctggagcaactacaccatgtgcaatgccttcaccccagagaagctgaagaatgcctacgtgctgtactacctggccatcgtgggccacagcctgagcatcttcaccctggtgatcagcctgggcatctttgtgttcttccgcagcctgggctgccagagggtgaccctgcacaagaacatgttcctgacctacatcctgaacagcatgatcatcatcatccacctggtggaggtggtgcccaacggggagctggtgagaagagatcctgtgtcctgcaagatcctgcacttcttccaccagtacatgatggcctgcaactacttctggatgctgtgtgagggcatctacctgcacaccctcatcgtggtggccgtgttcacagagaagcagaggctgcgctggtactacctgctgggctggggcttccccctggtgcccaccaccatccacgccatcaccagggctgtgtacttcaatgacaactgctggctgtctgtggagacccacctgctgtacatcatccacggccctgtgatggccgccctggtggtgaacttcttcttcctgctgaacatcgtgcgggtgctggtgaccaagatgagggagacccatgaagctgagagccacatgtacctgaaggctgtgaaggccaccatgatcctggtgcccctgctgggcatccagtttgtggtgttcccctggaggcccagcaacaagatgctgggcaagatctatgactatgtgatgcacagcctcatccacttccagggcttctttgtggccaccatctactgcttctgcaacaatgaggtgcagaccaccgtgaagaggcagtgggcccagttcaagatccagtggaaccagcgctggggcagaagacccagcaacagaagtgcccgggctgctgctgctgctgctgaggccggggacatccccatctacatctgccaccaggagctgagaaatgaaccagccaacaaccagggcgaggagagcgctgagatcatccccctgaacatcatcgagcaggagagcagcgcctag

SEQ ID NO: 145712 - DNA, 825 bp, synthetic construct
  misc_feature 1..825: note = Description of Artificial Sequence: Synthetic coding sequence
  source 1..825: mol_type = other DNA
atgaggttcaccttcaccagccgctgcctggccctcttcctgctgctgaaccaccccacccccatcctgcctgccttcagcaaccagacctaccccaccatcgagcccaagcccttcctgtatgtggtgggcaggaagaagatgatggatgcccagtacaagtgctatgacaggatgcagcagctgcctgcctaccagggcgagggcccctactgcaacagaacctgggatggctggctgtgctgggatgacaccccagctggggtgctgagctaccagttctgcccagactacttcccagactttgaccccagcgagaaggtgaccaagtactgtgatgagaagggcgtgtggttcaagcaccctgagaacaacagaacctggagcaactacaccatgtgcaatgccttcaccccagagaagctgaagaatgcctacgtgctgtactacctggccatcgtgggccacagcctgagcatcttcaccctggtgatcagcctgggcatctttgtgttcttccgcagcctgggctgccagagggtgaccctgcacaagaacatgttcctgacctacatcctgaacagcatgatcatcatcatccacctggtggaggtggtgcccaacggggagctggtgagaagagatcctgtgtcctgcaagatcctgcacttcttccaccagtacatgatggcctgcaactacttctggatgctgtgtgagggcatctacctgcacaccctcatcgtggtggccgtgttcacagagaagcagaggctgcgctggtactacctgctgggctgggccccagccttccaccgggactag

SEQ ID NO: 145713 - DNA, 1473 bp, synthetic construct; identical to SEQ ID NO: 145710
  misc_feature 1..1473: note = Description of Artificial Sequence: Synthetic coding sequence
  source 1..1473: mol_type = other DNA

SEQ ID NO: 145714 - DNA, 873 bp, synthetic construct
  misc_feature 1..873: note = Description of Artificial Sequence: Synthetic coding sequence
  source 1..873: mol_type = other DNA
atgaggttcaccttcaccagccgctgcctggccctcttcctgctgctgaaccaccccacccccatcctgcctgccttcagcaaccagacctaccccaccatcgagcccaagcccttcctgtatgtggtgggcaggaagaagatgatggatgcccagtacaagtgctatgacaggatgcagcagctgcctgcctaccagggcgagggcccctactgcaacagaacctgggatggctggctgtgctgggatgacaccccagctggggtgctgagctaccagttctgcccagactacttcccagactttgaccccagcgagaaggtgaccaagtactgtgatgagaagggcgtgtggttcaagcaccctgagaacaacagaacctggagcaactacaccatgtgcaatgccttcaccccagagaagctgaagaatgcctacgtgctgtactacctggccatcgtgggccacagcctgagcatcttcaccctggtgatcagcctgggcatctttgtgttcttcaggaagctgaccaccatcttccccctgaactggaagtacaggaaggccctgagcctgggctgccagagggtgaccctgcacaagaacatgttcctgacctacatcctgaacagcatgatcatcatcatccacctggtggaggtggtgcccaacggggagctggtgagaagagatcctgtgtcctgcaagatcctgcacttcttccaccagtacatgatggcctgcaactacttctggatgctgtgtgagggcatctacctgcacaccctcatcgtggtggccgtgttcacagagaagcagaggctgcgctggtactacctgctgggctgggccccagccttccaccgggactag

SEQ ID NO: 145715 - DNA, 1425 bp, synthetic construct; identical to SEQ ID NO: 145711
  misc_feature 1..1425: note = Description of Artificial Sequence: Synthetic coding sequence
  source 1..1425: mol_type = other DNA

SEQ ID NO: 145716 - DNA, 489 bp, synthetic construct
  misc_feature 1..489: note = Description of Artificial Sequence: Synthetic coding sequence
  source 1..489: mol_type = other DNA
atgaggttcaccttcaccagccgctgcctggccctcttcctgctgctgaaccaccccacccccatcctgcctgccttcagcaaccagacctaccccaccatcgagcccaagcccttcctgtatgtggtgggcaggaagaagatgatggatgcccagtacaagtgctatgacaggatgcagcagctgcctgcctaccagggcgagggcccctactgcaacagaacctgggatggctggctgtgctgggatgacaccccagctggggtgctgagctaccagttctgcccagactacttcccagactttgaccccagcgagaaggtgaccaagtactgtgatgagaagggcgtgtggttcaagcaccctgagaacaacagaacctggagcaactacaccatgtgcaatgccttcaccccagagaagctgaagaatgcctacgtgctgtactacctggccatcgtgggccacagctgccagttcagcccctag

SEQ ID NO: 145717 - DNA, 1386 bp, synthetic construct
  misc_feature 1..1386: note = Description of Artificial Sequence: Synthetic coding sequence
  source 1..1386: mol_type = other DNA
atggagaagaagtgcaccctgaacttcctggtgctgctgcccttcttcatgatcctggtgacagctgagctggaggagagcccagaagattccatccagctgggcgtgaccaggaacaagatcatgacagcccagtatgagtgctaccagaagatcatgcaggaccccatccagcaggccgagggcgtgtactgcaacagaacctgggatggctggctgtgctggaatgatgtggccgccggcacagagagcatgcagctgtgcccagactacttccaggactttgaccccagcgagaaggtgaccaagatctgtgaccaggacggcaactggttccgccacccagccagcaacagaacctggaccaactacacccagtgcaatgtgaacacccatgagaaggtgaagacagccctgaacctcttctacctgaccatcattggacatggcctgagcatcgccagcctgctgatcagcctgggcatcttcttctacttcaagagcctgagctgccagaggatcaccctgcacaagaacctcttcttctcctttgtgtgcaacagcgtggtgaccatcatccacctgacagctgtggccaacaaccaggccctggtggccaccaaccctgtgtcctgcaaggtgtcccagttcatccacctgtacctgatgggctgcaactacttctggatgctgtgtgagggcatctacctgcacaccctgattgtggtggccgtgtttgctgagaagcagcacctgatgtggtactacttcctgggctggggcttccccctcatcccagcctgcatccacgccatcgcccggagcctgtactacaatgacaactgctggatcagcagtgacacccacctgctgtacatcatccacggccccatctgtgccgccctgctggtgaacctcttcttcctgctgaacatcgtgcgggtgctgatcaccaagctgaaggtgacccaccaggccgagagcaacctgtacatgaaggctgtgcgggccaccctcatcctggtgcccctgctgggcattgaatttgtgctgatcccctggaggcctgagggcaagattgctgaggaggtgtatgactacatcatgcacatcctgatgcacttccagggcctgctggtgtccaccatcttctgcttcttcaacggggaggtgcaggccatcctgcggaggaactggaaccagtacaagatccagtttggaaacagcttcagcaacagcgaggccctgcggagcgccagctacacagtgtccaccatcagtgatggccctggctacagccatgactgccccagcgagcacctgaatggcaagagcatccatgacattgaaaatgtgctgctgaagccagaaaatctctacaactag

SEQ ID NO: 145718 - DNA, 1386 bp, synthetic construct; identical to SEQ ID NO: 145717
  misc_feature 1..1386: note = Description of Artificial Sequence: Synthetic coding sequence
  source 1..1386: mol_type = other DNA

SEQ ID NO: 145719 - DNA, 1386 bp, synthetic construct; identical to SEQ ID NO: 145717
  misc_feature 1..1386: note = Description of Artificial Sequence: Synthetic coding sequence
  source 1..1386: mol_type = other DNA

SEQ ID NO: 145720 - DNA, 114 bp, synthetic construct
  misc_feature 1..114: note = Description of Artificial Sequence: Synthetic coding sequence
  source 1..114: mol_type = other DNA
atggagaagaagtgcaccctgaacttcctggtgctgctgcccttcttcatgatcctggtgacagctgagctggaggagagcccagaagattccatccagctgggcgtgacctag

SEQ ID NO: 145721 - DNA, 237 bp, synthetic construct
  misc_feature 1..237: note = Description of Artificial Sequence: Synthetic coding sequence
  source 1..237: mol_type = other DNA
atggagaagaagtgcaccctgaacttcctggtgctgctgcccttcttcatgatcctggtgacagctgagctggaggagagcccagaagattccatccagctgggcgtgaccaggaacaagatcatgacagcccagtatgagtgctaccagaagatcatgcaggaccccatccagcaggccgagggcgtgtactgcaacagaacctgggatggctggctgtgctggaatgatgtgtag

SEQ ID NO: 145722 - DNA, 426 bp, synthetic construct
  misc_feature 1..426: note = Description of Artificial Sequence: Synthetic coding sequence
  source 1..426: mol_type = other DNA
atgggcttccagaagttcagccccttcctggccctgagcatcctggtgctgctgcaggccggcagcctgcatgctgcccccttccgcagcgccctggagagcagccctgctgaccctgccaccctgtctgaagatgaggcccggctgctgctggccgccctggtgcagaactacgtgcagatgaaggccagcgagctggagcaggagcaggagcgggagggcagcagcctggacagccccaggagcaagagatgtggcaacctgagcacctgcatgctgggcacctacacccaggacttcaacaagttccacaccttcccccagacagccatcggcgtgggcgcccctgggaagaagagggacatgagcagtgacctggagcgggaccaccggccccacgtgtccatgccccagaatgccaactag

SEQ ID NO: 145723 - DNA, 426 bp, synthetic construct
  misc_feature 1..426: note = Description of Artificial Sequence: Synthetic coding sequence
  source 1..426: mol_type = other DNA
atgggcttccagaagttcagccccttcctggccctgagcatcctggtgctgctgcaggccggcagcctgcatgctgcccccttccgcagcgccctggagagcagccctgctgaccctgccaccctgtctgaagatgaggcccggctgctgctggccgccctggtgcagaactacgtgcagatgaaggccagcgagctggagcaggagcaggagcgggagggcagcagcctggacagccccaggagcaagagatgtggcaacctgagcacctgcatgctgggcacctacacccaggacttcaacaagttccacaccttcccccagacagccatcggcgtgggcgcccctgggaagaagagggacatgagcagtgacctggagcgggaccaccggccccacaaccactgcccagaggagagcctgtag

SEQ ID NO: 145724 - DNA, 387 bp, synthetic construct
  misc_feature 1..387: note = Description of Artificial Sequence: Synthetic coding sequence
  source 1..387: mol_type = other DNA
atgggcttccagaagttcagccccttcctggccctgagcatcctggtgctgctgcaggccggcagcctgcatgctgcccccttccgcagcgccctggagagcagccctgctgaccctgccaccctgtctgaagatgaggcccggctgctgctggccgccctggtgcagaactacgtgcagatgaaggccagcgagctggagcaggagcaggagcgggagggcagccgcatcatcgcccagaagagggcctgtgacacagccacctgtgtgacccaccggctggccggcctgctgagccgctctggaggagtggtgaagaacaactttgtgcccaccaacgtgggcagcaaggcctttggaagaagaagaagagacctgcaggcctag

SEQ ID NO: 145725 - DNA, 426 bp, synthetic construct; identical to SEQ ID NO: 145722
  misc_feature 1..426: note = Description of Artificial Sequence: Synthetic coding sequence
  source 1..426: mol_type = other DNA

SEQ ID NO: 145726 - DNA, 387 bp, synthetic construct; identical to SEQ ID NO: 145724
  misc_feature 1..387: note = Description of Artificial Sequence: Synthetic coding sequence
  source 1..387: mol_type = other DNA

SEQ ID NO: 145727 - DNA, 384 bp, synthetic construct
  misc_feature 1..384: note = Description of Artificial Sequence: Synthetic coding sequence
  source 1..384: mol_type = other DNA
atgggcttcaggaagttcagccccttcctggccctgagcatcctggtgctgtaccaggccggcagcctgcaggccgcccccttccgcagcgccctggagagcagcccagaccctgccaccctgagcaaggaggatgcccggctgctgctggccgccctggtgcaggactatgtgcagatgaaggccagcgagctgaagcaggagcaggagacccagggcagcagcagcgctgcccagaagagggcctgcaacacagccacctgtgtgacccaccggctggccggcctgctgagccgcagcggcggcatggtgaagagcaactttgtgcccaccaacgtgggcagcaaggccttcggcagaagaagaagagacctgcaggcctag

SEQ ID NO: 145728 - DNA, 417 bp, synthetic construct
  misc_feature 1..417: note = Description of Artificial Sequence: Synthetic coding sequence
  source 1..417: mol_type = other DNA
atgaagaaggaggccaacctgcagaggggcggcatgggcttcaggaagttcagccccttcctggccctgagcatcctggtgctgtaccaggccggcagcctgcaggccgcccccttccgcagcgccctggagagcagcccagaccctgccaccctgagcaaagaagatgcccggctgctgctggccgccctggtgcaggactatgtgcagatgaaggccagcgagctgaagcaggagcaggagacccagggcagcagcagcgctgcccagaagagggcctgcaacacagccacctgtgtgacccaccggctggccggcctgctgagccgcagcggcggcatggtgaagagcaactttgtgcccaccaacgtgggcagcaaggcctttggaagaagaagaagagacctgcaggcctag

SEQ ID NO: 145729 - DNA, 384 bp, synthetic construct; identical to SEQ ID NO: 145727
  misc_feature 1..384: note = Description of Artificial Sequence: Synthetic coding sequence
  source 1..384: mol_type = other DNA

SEQ ID NO: 145730 - DNA, 1206 bp, synthetic construct
  misc_feature 1..1206: note = Description of Artificial Sequence: Synthetic coding sequence
  source 1..1206: mol_type = other DNA
atgcctgtgcagctgtctgagcaccctgagtggaatgaatccatgcacagcctgcgcatctctgtgggcggcctgcctgtgctggcctccatgaccaaggctgctgacccccgcttccggccccgctggaaggtgatcctgaccttctttgtgggcgccgccatcctgtggctgctgtgcagccacaggcctgcccctggccggccccccacccacaatgcccacaactggaggctgggccaggccccagccaactggtacaatgacacctaccccctgagccccccccagaggaccccagctggcatccgctacagaattgctgtgattgctgacctggacacagagagccgggcccaggaggagaacacctggttctcctacctgaagaagggctacctgaccctgagtgacagcggggacaaggtggccgtggagtgggacaaggaccatggagtgctggagagccacctggccgagaagggccggggcatggagctgagtgacctgattgtgttcaacgggaagctgtacagcgtggatgacagaactggagtggtgtaccagatcgagggcagcaaggctgtgccctgggtgatcctgagtgatggagatggcaccgtggagaagggcttcaaggccgagtggctggccgtgaaggatgagcggctgtatgtgggcggcctgggcaaggagtggaccaccaccactggagatgtggtgaatgaaaatcctgagtgggtgaaggtggtgggctacaagggctctgtggaccacgagaactgggtgagcaactacaatgccctgcgggctgctgctggcatccagcccccaggctacctgattcatgaaagtgcctgctggagcgacaccctgcagcgctggttcttcctgccccggcgggccagccaggagcgctacagcgagaaggatgatgagaggaaaggagccaacctgctgctgagcgccagcccagactttggagacattgctgtgagccacgtgggcgctgtggtgcccacccacggcttcagcagcttcaagttcatccccaacacagatgaccagatcatcgtggccctgaagtcagaagaagattctggccgggtggccagctacatcatggccttcaccctggatggccgcttcctgctgcctgagaccaagattggctctgtgaagtatgagggcatcgagttcatctag

SEQ ID NO: 145731 - DNA, 1053 bp, synthetic construct
  misc_feature 1..1053: note = Description of Artificial Sequence: Synthetic coding sequence
  source 1..1053: mol_type = other DNA
atgcctgtgcagctgtctgagcaccctgagtggaatgaatccatgcacagcctgcgcatctctgtgggcggcctgcctgtgctggcctccatgaccaaggctgctgacccccgcttccggcccaggagccccccccagaggaccccagctggcatccgctacagaattgctgtgattgctgacctggacacagagagccgggcccaggaggagaacacctggttctcctacctgaagaagggctacctgaccctgagtgacagcggggacaaggtggccgtggagtgggacaaggaccacggcgtgctggagagccacctggccgagaagggccggggcatggagctgagtgacctgattgtgttcaacgggaagctgtacagcgtggatgacagaactggagtggtgtaccagatcgagggcagcaaggctgtgccctgggtgatcctgagtgatggagatggcaccgtggagaagggcttcaaggccgagtggctggccgtgaaggatgagcggctgtatgtgggcggcctgggcaaggagtggaccaccaccactggagatgtggtgaatgaaaatcctgagtgggtgaaggtggtgggctacaagggctctgtggaccacgagaactgggtgagcaactacaatgccctgcgggctgctgctggcatccagcccccaggctacctgatccacgagagcgcctgctggagcgacaccctgcagcgctggttcttcctgccccggcgggccagccaggagcgctacagcgagaaggatgatgagaggaagggggccaacctgctgctgagcgccagcccagactttggagacattgctgtgagccacgtgggcgctgtggtgcccacccacggcttcagcagcttcaagttcatccccaacacagatgaccagatcatcgtggccctgaagtctgaggaggacagcggccgggtggccagctacatcatggccttcaccctggatggccgcttcctgctgcctgagaccaagattggctctgtgaagtatgagggcatcgagttcatctag

SEQ ID NO: 145732 - DNA, 1206 bp, synthetic construct; identical to SEQ ID NO: 145730
  misc_feature 1..1206: note = Description of Artificial Sequence: Synthetic coding sequence
  source 1..1206: mol_type = other DNA

SEQ ID NO: 145733 - DNA, 738 bp, synthetic construct
  misc_feature 1..738: note = Description of Artificial Sequence: Synthetic coding sequence
  source 1..738: mol_type = other DNA
atgcctgtgcagctgtctgagcaccctgagtggaatgaatccatgcacagcctgcgcatctctgtgggcggcctgcctgtgctggcctccatgaccaaggctgctgacccccgcttccggccccgctggaaggtgatcctgaccttctttgtgggcgccgccatcctgtggctgctgtgcagccacaggcctgcccctggccggccccccacccacaatgcccacaactggaggctgggccaggccccagccaactggtacaatgacacctaccccctgagccccccccagaggaccccagctggcatccgctacagaattgctgtgattgctgacctggacacagagagccgggcccaggaggagaacacctggttctcctacctgaagaagggctacctgaccctgagtgacagcggggacaaggtggccgtggagtgggacaaggaccatggagtgctggagagccacctggccgagaagggccggggcatggagctgagtgacctgattgtgttcaacgggaagctgtacagcgtggatgacagaactggagtggtgtaccagatcgagggcagcaaggctgtgccctgggtgatcctgagtgatggagatggcaccgtggagaagggcgtgggcggggagtgggaggccgtgcgggagatcgtgaggaagcgctggaggctggtgaagcaggtgagccacgtgggcgtgctgggccagtggatccagaggtag

SEQ ID NO: 145734 - DNA, 663 bp, synthetic construct
  misc_feature 1..663: note = Description of Artificial Sequence: Synthetic coding sequence
  source 1..663: mol_type = other DNA
atgggcaactgtgccaagaggccctggaggcggggccccaaggaccccctgcagtggctgggcagccccccccggggcagctgccccagccccagcagcagccccaaggagcagggcgaccctgcccctggggtgcagggctacagcgtgctgaacagcctggtgggccctgcctgcatcttcctgcggcccagcattgctgccacccagctggaccgggagctgcggcctgaggagattgaggagctgcaggtggccttccaggagtttgaccgggacagagatggctacatcggctgccgggagctgggcgcctgcatgaggaccctgggctacatgcccacagagatggagctgattgagatcagccagcagatcagcggcggcaaggtggactttgaggactttgtggagctgatgggccccaagctgctggccgagacagctgacatgattggagtgcgggagctgagagatgccttccgggagtttgacaccaatggagatggccgcatctctgtgggggagctgcgggccgccctgaaggccctgctgggggagcggctgagccagcgggaggtggatgagatcctgcaggatgtggacctgaatggagatggcctggtggactttgaggagtttgtgaggatgatgagcaggtag

SEQ ID NO: 145735 - DNA, 1026 bp, synthetic construct
  misc_feature 1..1026: note = Description of Artificial Sequence: Synthetic coding sequence
  source 1..1026: mol_type = other DNA
atgcccttcccctttgggaagagccacaagagccctgctgacatcgtgaagaacctgaaggagagcatggctgtgctggagaagcaggacatcagtgacaagaaggccgagaaggccacagaggaggtgtccaagaacctggtggccatgaaggagatcctgtatggcaccaatgagaaggagccccagacagaggccgtggcccagctggcccaggagctgtacaacagcggcctgctgagcaccctggtggccgacctgcagctgattgactttgagggcaagaaggatgtggcccagatcttcaacaacatcctgcggcggcagatcggcaccaggacccccaccgtggagtacatctgcacccagcagaacatcctcttcatgctgctgaagggctatgagagccctgagatcgccctgaactgtggcatcatgctgcgggagtgcatcagacatgagcccctggccaagatcatcctgtggagcgagcagttctatgacttcttccgctacgtggagatgagcacctttgacatcgccagtgatgcctttgccaccttcaaggacctgctgaccaggcacaagctgctgtctgctgagttcctggagcagcactatgaccgcttcttctctgaatatgagaagctgctgcacagtgaaaattatgtgaccaagaggcagagcctgaagctgctgggggagctgctgctggacagacacaacttcaccatcatgaccaagtacatcagcaagccagagaacctgaagctgatgatgaacctgctgcgggacaagagcaggaacatccagtttgaggccttccacgtgttcaaggtgtttgtggccaaccccaacaagacccagcccatcctggacatcctgctgaagaaccaggccaagctgattgagttcctgagcaagttccagaatgacagaacagaagatgagcagttcaatgatgagaagacctacctggtgaagcagatccgggacctgaagaggcctgcccagcaggaggcctag

SEQ ID NO: 145736 - DNA, 1026 bp, synthetic construct; identical to SEQ ID NO: 145735
  misc_feature 1..1026: note = Description of Artificial Sequence: Synthetic coding sequence
  source 1..1026: mol_type = other DNA

SEQ ID NO: 145737 - DNA, 1026 bp, synthetic construct; identical to SEQ ID NO: 145735
  misc_feature 1..1026: note = Description of Artificial Sequence: Synthetic coding sequence
  source 1..1026: mol_type = other DNA

SEQ ID NO: 145738 - DNA, 1014 bp, synthetic construct
  misc_feature 1..1014: note = Description of Artificial Sequence: Synthetic coding sequence
  source 1..1014: mol_type = other DNA
atgaagaagatgcccctcttcagcaagagccacaagaacccagctgagatcgtgaagatcctgaaggacaacctggccatcctggagaagcaggacaagaagacagacaaggccagcgaggaggtgtccaagagcctgcaggccatgaaggagatcctgtgtggcaccaatgagaaggagcccccaacagaagctgtggcccagctggcccaggagctgtacagcagcggcctgctggtgaccctgattgctgacctgcagctgattgactttgagggcaagaaggatgtgacccagatcttcaacaacatcctgcggcggcagatcggcaccaggagccccaccgtggagtacatcagcgcccacccccacatcctcttcatgctgctgaagggctatgaggccccccagatcgccctgcgctgtggcatcatgctgcgggagtgcatcagacatgagcccctggccaagatcatcctcttcagcaaccagttccgggacttcttcaagtatgtggagctgagcacctttgatattgccagtgatgcctttgccaccttcaaggacctgctgaccaggcacaaggtgctggtggccgacttcctggagcagaactatgacaccatctttgaagattatgagaagctgctgcagagcgagaactacgtgaccaagaggcagagcctgaagctgctgggggagctgatcctggacagacacaactttgccatcatgaccaagtacatcagcaagccagagaacctgaagctgatgatgaacctgctgcgggacaagagccccaacatccagtttgaggccttccacgtgttcaaggtgtttgtggccagcccccacaagacccagcccatcgtggagatcctgctgaagaaccagcccaagctgattgagttcctgagcagcttccagaaggagaggacagatgatgagcagtttgctgatgagaagaactacctgatcaagcagatccgggacctgaagaagacagccccctag

SEQ ID NO: 145739 - DNA, 1014 bp, synthetic construct; identical to SEQ ID NO: 145738
  misc_feature 1..1014: note = Description of Artificial Sequence: Synthetic coding sequence
  source 1..1014: mol_type = other DNA

SEQ ID NO: 145740 - DNA, 945 bp, synthetic construct
  misc_feature 1..945: note = Description of Artificial Sequence: Synthetic coding sequence
  source 1..945: mol_type = other DNA
atgcccctcttcagcaagagccacaagaacccagctgagatcgtgaagatcctgaaggacaacctggccatcctggagaagcaggacaagaagacagacaaggccagcgaggaggtgtccaagagcctgcaggccatgaaggagatcctgtgtggcaccaatgagaaggagcccccaacagaggccgtggcccagctggcccaggagctgtacagcagcggcctgctggtgaccctgattgctgacctgcagctgattgactttgagggcaagaaggatgtgacccagatcttcaacaacatcctgcggcggcagatcggcaccaggagccccaccgtggagtacatcagcgcccacccccacatcctcttcatgctgctgaagggctatgaggccccccagatcgccctgcgctgtggcatcatgctgcgggagtgcatcagacatgagcccctggccaagatcatcctcttcagcaaccagttccgggacttcttcaagtatgtggagctgagcacctttgacatcgccagtgatgcctttgccaccttcaagatctttgaggactatgagaagctgctgcagagtgaaaattatgtgaccaagaggcagagcctgaagctgctgggggagctgatcctggacagacacaactttgccatcatgaccaagtacatcagcaagccagagaacctgaagctgatgatgaacctgctgcgggacaagagccccaacatccagtttgaggccttccacgtgttcaaggtgtttgtggccagcccccacaagacccagcccatcgtggagatcctgctgaagaaccagcccaagctgattgagttcctgagcagcttccagaaggagaggacagatgatgagcagtttgctgatgagaagaactacctgatcaagcagatccgggacctgaagaagacagccccctag

SEQ ID NO: 145741 - DNA, 282 bp, synthetic construct
  misc_feature 1..282: note = Description of Artificial Sequence: Synthetic coding sequence
  source 1..282: mol_type = other DNA
atgaagaagatgcccctcttcagcaagagccacaagaacccagctgagatcgtgaagatcctgaaggacaacctggccatcctggagaagcaggacaagaagacagacaaggccagcgaggaggtgtccaagagcctgcaggccatgaaggagatcctgtgtggcaccaatgagaaggagcccccaacagaagctgtggcccagctggcccaggagctgtacagcagcggcctgctggtgaccctgattgctgacctgcagctgattgactttgaggtgtag

SEQ ID NO: 145742 - DNA, 1014 bp, synthetic construct; identical to SEQ ID NO: 145738
  misc_feature 1..1014: note = Description of Artificial Sequence: Synthetic coding sequence
  source 1..1014: mol_type = other DNA

SEQ ID NO: 145743 - DNA, 1014 bp, synthetic construct; identical to SEQ ID NO: 145738
  misc_feature 1..1014: note = Description of Artificial Sequence: Synthetic coding sequence
  source 1..1014: mol_type = other DNA

SEQ ID NO: 145744 - DNA, 387 bp, synthetic construct
  misc_feature 1..387: note = Description of Artificial Sequence: Synthetic coding sequence
  source 1..387: mol_type = other DNA
atgaagaagatgcccctcttcagcaagagccacaagaacccagctgagatcgtgaagatcctgaaggacaacctggccatcctggagaagcaggacaagaagacagacaaggccagcgaggaggtgtccaagagcctgcaggccatgaaggagatcctgtgtggcaccaatgagaaggagcccccaacagaagctgtggcccagctggcccaggagctgtacagcagcggcctgctggtgaccctgattgctgacctgcagctgattgactttgagggcaagaaggatgtgacccagatcttcaacaacatcctgcggcggcagatcggcaccaggagccccaccgtggagtacatcagcgcccacccccacatcctcttcatgtag

SEQ ID NO: 145745 - DNA, 567 bp, synthetic construct
  misc_feature 1..567: note = Description of Artificial Sequence: Synthetic coding sequence
  source 1..567: mol_type = other DNA
atgaagaagatgcccctcttcagcaagagccacaagaacccagctgagatcgtgaagatcctgaaggacaacctggccatcctggagaagcaggacaagaagacagacaaggccagcgaggaggtgtccaagagcctgcaggccatgaaggagatcctgtgtggcaccaatgagaaggagcccccaacagaagctgtggcccagctggcccaggagctgtacagcagcggcctgctggtgaccctgattgctgacctgcagctgattgactttgagggcaagaaggatgtgacccagatcttcaacaacatcctgcggcggcagatcggcaccaggagccccaccgtggagtacatcagcgcccacccccacatcctcttcatgctgctgaagggctatgaggccccccagatcgccctgcgctgtggcatcatgctgcgggagtgcatcagacatgagcccctggccaagatcatcctcttcagcaaccagttccgggacttcttcaagtatgtggagctgagcacctttgatattgccagtgatgcctttgccaccttcaagtag

SEQ ID NO: 145746 - DNA, 828 bp, synthetic construct
  misc_feature 1..828: note = Description of Artificial Sequence: Synthetic coding sequence
  source 1..828: mol_type = other DNA
atgaccacagagcaggcccggggccagcagggccccaacctggccatcggccggcagaagcccccagctggggtggtgacccccaagagtgatgctgaggagccccccctgaccaggaagaggagcaagaaggagcggggcctgcggggcagcaggaagaggacaggcagcagcggggagcagacaggccctgaggcccctggcagcagcaacaacccccccagcactggagagggccctgctggggcccccccagccagccctggccctgccagcagccggcagagccaccgccacaggccagacagcctgcatgatgctgcccagaggacctacggccccctgctgaacagagtgtttgggaaggaccgggagctgggccctgaggagctggatgagctgcaggccgcctttgaggagtttgacacagacagagatggctacatcagccaccgggagctgggggactgcatgaggaccctgggctacatgcccacagagatggagctgctggaggtgtcccagcacatcaagatgaggatgggcggccgggtggactttgaggagtttgtggagctgattggccccaagctgcgggaggagacagcccacatgctgggcgtgcgggagctgagaattgccttccgggagtttgaccgggacagagatggccgcatcaccgtggccgagctgcgggaggccgtgcctgccctgctgggggagcccctggccggccctgagctggatgagatgctgcgggaggtggacctgaatggagatggcaccgtggactttgatgaatttgtgatgatgctgagccgccactag

SEQ ID NO: 145747 - DNA, 513 bp, synthetic construct
  misc_feature 1..513: note = Description of Artificial Sequence: Synthetic coding sequence
  source 1..513: mol_type = other DNA
atgacagagccctggctggccctgggcacctcctggaccctgcccctgcaggaccgggagctgggccctgaggagctggatgagctgcaggccgcctttgaggagtttgacacagacagagatggctacatcagccaccgggagctgggggactgcatgaggaccctgggctacatgcccacagagatggagctgctggaggtgtcccagcacatcaagatgaggatgggcggccgggtggactttgaggagtttgtggagctgattggccccaagctgcgggaggagacagcccacatgctgggcgtgcgggagctgcgcatcgccttccgggagtttgaccgggacagagatggccgcatcaccgtggccgagctgcgggaggccgtgcctgccctgctgggggagcccctggccggccctgagctggatgagatgctgcgggaggtggacctgaatggagatggcaccgtggactttgatgaatttgtgatgatgctgagccgccactag

SEQ ID NO: 145748 - DNA, 522 bp, synthetic construct
  misc_feature 1..522: note = Description of Artificial Sequence: Synthetic coding sequence
  source 1..522: mol_type = other DNA
atgcagttccccatgggccctgcctgcatcttcctgaggaagggcattgctgagaagcagcgggagcggcccctgggccaggatgaaattgaggagctgcgggaggccttcctggagtttgacaaggacagagatggcttcatcagctgcaaggacctgggcaacctgatgaggaccatgggctacatgcccacagagatggagctgattgagctgggccagcagatccgcatgaacctgggcggccgggtggactttgatgactttgtggagctgatgacccccaagctgctggccgagacagctggcatgattggagtgcaggagatgagagatgccttcaaggagtttgacaccaatggagatggagagatcaccctggtggagctgcagcaggccatgcagaggctgctgggggagcggctgaccccccgggagatcagcgaggtggtgcgggaggctgatgtgaatggagatggcaccgtggactttgaggagtttgtgaagatgatgagcaggtag

SEQ ID NO: 145749 - DNA, 846 bp, synthetic construct
  misc_feature 1..846: note = Description of Artificial Sequence: Synthetic coding sequence
  source 1..846: mol_type = other DNA
atggagaagagcacagacacagatgaagataatgtgaccaggacagagtacagcgacaagaccacccagttccccagcgtgtatgctgtgcctggaacagagcagacagaggccgtgggcggcctgagcagcaagccagccacccccaagaccaccaccccacccagcagccccccacccacagctgtgtccccagagtttgcctacgtgcctgctgaccctgcccagctggccgcccagatgctggccatggccaccagcgagcggggccagcccccaccctgcagcaacatgtggaccctgtactgcctgacagacaagaaccagcagggccaccccagccccccaccagcccctggccccttcccccaggccaccctgtacctgcccaaccccaaggacccccagttccagcagcacccccccaaggtgaccttccccacctacgtgatgggagacaccaagaagaccagcgccccacccttcatcctggtgggcagcaatgtgcaggaggcccagggctggaagcccctgcccggccatgctgtggtgtcccagagtgatgtgctgcgctacgtggccatgcaggtgcccatcgctgtgcctgcagatgagaagtaccagaagcacaccctgagcccccagaatgccaaccccccatctggccaggatgtgccccggcccaagagccctgtgttcctgtctgtggccttccctgtggaggatgtggccaagaagagcagcggcagcggggacaagtgtgcccccttcggcagctatggaattgctggggaggtgacagtgaccacagcccacaagaggaggaaggccgagacagagaactag

SEQ ID NO: 145750 - DNA, 1188 bp, synthetic construct
  misc_feature 1..1188: note = Description of Artificial Sequence: Synthetic coding sequence
  source 1..1188: mol_type = other DNA
atggagaagagcacagacacagatgaagataatgtgaccaggacagagtacagcgacaagaccacccagttccccagcgtgtatgctgtgcctggaacagagcagacagaggccgtgggcggcctgagcagcaagccagccacccccaagaccaccaccccacccagcagccccccacccacagctgtgtccccagagtttgcctacgtgcctgctgaccctgcccagctggccgcccagatgctgggcaaggtgagcagcatccacagcgaccagagtgatgtgctgatggtggatgtggccacctccatgcctgtggtgatcaaggaggtgcccagcagcgaggccgcagaagatgtgatggtggccgcccccctggtgtgcagcggcaaggtgctggaggtgcaggtggtgaaccagacctctgtgcacgtggacctgggcagccagcccaaggaaaatgaggccgagcccagcacagccagctctgtgcccctgcaggatgagcaggagcccccagcctatgaccaggcccctgaggtgaccctgcaggccgacatcgaggtgatgagcacagtgcacatcagctctgtgtacaatgatgtgcctgtgacagaaggagtggtgtacatcgagcagctgcctgagcagatcgtcatccccttcacagaccaggtggcctgcctgaaggaaaatgagcagagcaaagaaaatgagcagagcccccgggtgagccccaagtctgtggtggagaagaccaccagcggcatgagcaagaagtctgtggagagcgtgaagctggcccagctggaggagaatgccaagtacagctctgtgtacatggaggccgaggccacagccctgctgagtgacaccagcctgaagggccagcctgaggtgcctgcccagctgctggatgctgagggcgccatcaagattggcagcgagaagagcctgcacctggaggtggagatcaccagcatcgtgtctgacaacacaggccaggaggagagcggggagaacagcgtgccccaggagatggagggcaagcctgtgctgagcggggaggccgctgaggccgtgcacagcggcacctctgtgaagagcagcagcggccccttccccccagcccctgagggcctgacagcccctgagattgagcctgagggggagagcacagctgagtag

SEQ ID NO: 145751 - DNA, 1140 bp, synthetic construct
  misc_feature 1..1140: note = Description of Artificial Sequence: Synthetic coding sequence
  source 1..1140: mol_type = other DNA
atgatcagcagcaagccccggctggtggtgccctacggcctgaagaccctgctggagggcatcagcagagctgtgctgaagaccaaccccagcaacatcaaccagtttgctgctgcctacttccaggagctgaccatgtaccggggcaacaccaccatggacatcaaggacctggtgaagcagttccaccagatcaaggtggagaagtggagcgagggcaccaccccccagaagaagctggagtgcctgaaggagcccgggaagacctctgtggagagcaaggtgcccacccagatggagaagagcacagacacagatgaagataatgtgaccaggacagagtacagcgacaagaccacccagttccccagcgtgtatgctgtgcctggaacagagcagacagaggccgtgggcggcctgagcagcaagccagccacccccaagaccaccaccccacccagcagccccccacccacagctgtgtccccagagtttgcctacgtgcctgctgaccctgcccagctggccgcccagatgctggccatggccaccagcgagcggggccagcccccaccctgcagcaacatgtggaccctgtactgcctgacagacaagaaccagcagggccaccccagccccccaccagcccctggccccttcccccaggccaccctgtacctgcccaaccccaaggacccccagttccagcagcacccccccaaggtgaccttccccacctacgtgatgggagacaccaagaagaccagcgccccacccttcatcctggtgggcagcaatgtgcaggaggcccagggctggaagcccctgcccggccatgctgtggtgtcccagagtgatgtgctgcgctacgtggccatgcaggtgcccatcgctgtgcctgcagatgagaagtaccagaagcacaccctgagcccccagaatgccaaccccccatctggccaggatgtgccccggcccaagagccctgtgttcctgtctgtggccttccctgtggaggatgtggccaagaagagcagcggcagcggggacaagtgtgcccccttcggcagctatggaattgctggggaggtgacagtgaccacagcccacaagaggaggaaggccgagacagagaactag

SEQ ID NO: 145752 - DNA, 1140 bp, synthetic construct; identical to SEQ ID NO: 145751
  misc_feature 1..1140: note = Description of Artificial Sequence: Synthetic coding sequence
  source 1..1140: mol_type = other DNA

SEQ ID NO: 145753 - DNA, 666 bp, synthetic construct
  misc_feature 1..666: note = Description of Artificial Sequence: Synthetic coding sequence
  source 1..666: mol_type = other DNA
atgatcagcagcaagccccggctggtggtgccctacggcctgaagaccctgctggagggcatcagcagagctgtgctgaagaccaaccccagcaacatcaaccagtttgctgctgcctacttccaggagctgaccatgtaccggggcaacaccaccatggacatcaaggacctggtgaagcagttccaccagatcaaggtggagaagtggagcgagggcaccaccccccagaagaagctggagtgcctgaaggagcccgggaagacctctgtggagagcaaggtgcccacccagatggagaagagcacagacacagatgaagataatgtgaccaggacagagtacagcgacaagaccacccagttccccagcgtgtatgctgtgcctggaacagagcagacagaggccgtgggcggcctgagcagcaagccagccacccccaagaccaccaccccacccagcagccccccacccacagctgtgtccccagagtttgcctacgtgcctgctgaccctgcccagctggccgcccagatgctggaggatgtggccaagaagagcagcggcagcggggacaagtgtgcccccttcggcagctatggaattgctggggaggtgacagtgaccacagcccacaagaggaggaaggccgagacagagaactag

SEQ ID NO: 145754 - DNA, 1482 bp, synthetic construct
  misc_feature 1..1482: note = Description of Artificial Sequence: Synthetic coding sequence
  source 1..1482: mol_type = other DNA
atgatcagcagcaagccccggctggtggtgccctacggcctgaagaccctgctggagggcatcagcagagctgtgctgaagaccaaccccagcaacatcaaccagtttgctgctgcctacttccaggagctgaccatgtaccggggcaacaccaccatggacatcaaggacctggtgaagcagttccaccagatcaaggtggagaagtggagcgagggcaccaccccccagaagaagctggagtgcctgaaggagcccgggaagacctctgtggagagcaaggtgcccacccagatggagaagagcacagacacagatgaagataatgtgaccaggacagagtacagcgacaagaccacccagttccccagcgtgtatgctgtgcctggaacagagcagacagaggccgtgggcggcctgagcagcaagccagccacccccaagaccaccaccccacccagcagccccccacccacagctgtgtccccagagtttgcctacgtgcctgctgaccctgcccagctggccgcccagatgctgggcaaggtgagcagcatccacagcgaccagagtgatgtgctgatggtggatgtggccacctccatgcctgtggtgatcaaggaggtgcccagcagcgaggccgcagaagatgtgatggtggccgcccccctggtgtgcagcggcaaggtgctggaggtgcaggtggtgaaccagacctctgtgcacgtggacctgggcagccagcccaaggaaaatgaggccgagcccagcacagccagctctgtgcccctgcaggatgagcaggagcccccagcctatgaccaggcccctgaggtgaccctgcaggccgacatcgaggtgatgagcacagtgcacatcagctctgtgtacaatgatgtgcctgtgacagaaggagtggtgtacatcgagcagctgcctgagcagatcgtcatccccttcacagaccaggtggcctgcctgaaggaaaatgagcagagcaaagaaaatgagcagagcccccgggtgagccccaagtctgtggtggagaagaccaccagcggcatgagcaagaagtctgtggagagcgtgaagctggcccagctggaggagaatgccaagtacagctctgtgtacatggaggccgaggccacagccctgctgagtgacaccagcctgaagggccagcctgaggtgcctgcccagctgctggatgctgagggcgccatcaagattggcagcgagaagagcctgcacctggaggtggagatcaccagcatcgtgtctgacaacacaggccaggaggagagcggggagaacagcgtgccccaggagatggagggcaagcctgtgctgagcggggaggccgctgaggccgtgcacagcggcacctctgtgaagagcagcagcggccccttccccccagcccctgagggcctgacagcccctgagattgagcctgagggggagagcacagctgagtag

SEQ ID NO: 145755 - DNA, 1428 bp, synthetic construct
  misc_feature 1..1428: note = Description of Artificial Sequence: Synthetic coding sequence
  source 1..1428: mol_type = other DNA
atgatcagcagcaagccccggctggtggtgccctacggcctgaagaccctgctggagggcatcagcagagctgtgctgaagaccaaccccagcaacatcaaccagtttgctgctgcctacttccaggagctgaccatgtacagagtggagaagtggagcgagggcaccaccccccagaagaagctggagtgcctgaaggagcccgggaagacctctgtggagagcaaggtgcccacccagatggagaagagcacagacacagatgaagataatgtgaccaggacagagtacagcgacaagaccacccagttccccagcgtgtatgctgtgcctggaacagagcagacagaggccgtgggcggcctgagcagcaagccagccacccccaagaccaccaccccacccagcagccccccacccacagctgtgtccccagagtttgcctacgtgcctgctgaccctgcccagctggccgcccagatgctgggcaaggtgagcagcatccacagcgaccagagtgatgtgctgatggtggatgtggccacctccatgcctgtggtgatcaaggaggtgcccagcagcgaggccgcagaagatgtgatggtggccgcccccctggtgtgcagcggcaaggtgctggaggtgcaggtggtgaaccagacctctgtgcacgtggacctgggcagccagcccaaggaaaatgaggccgagcccagcacagccagctctgtgcccctgcaggatgagcaggagcccccagcctatgaccaggcccctgaggtgaccctgcaggccgacatcgaggtgatgagcacagtgcacatcagctctgtgtacaatgatgtgcctgtgacagaaggagtggtgtacatcgagcagctgcctgagcagatcgtcatccccttcacagaccaggtggcctgcctgaaggaaaatgagcagagcaaagaaaatgagcagagcccccgggtgagccccaagtctgtggtggagaagaccaccagcggcatgagcaagaagtctgtggagagcgtgaagctggcccagctggaggagaatgccaagtacagctctgtgtacatggaggccgaggccacagccctgctgagtgacaccagcctgaagggccagcctgaggtgcctgcccagctgctggatgctgagggcgccatcaagattggcagcgagaagagcctgcacctggaggtggagatcaccagcatcgtgtctgacaacacaggccaggaggagagcggggagaacagcgtgccccaggagatggagggcaagcctgtgctgagcggggaggccgctgaggccgtgcacagcggcacctctgtgaagagcagcagcggccccttccccccagcccctgagggcctgacagcccctgagattgagcctgagggggagagcacagctgagtag

SEQ ID NO: 145756 - DNA, 1452 bp, synthetic construct
  misc_feature 1..1452: note = Description of Artificial Sequence: Synthetic coding sequence
  source 1..1452: mol_type = other DNA
atgtccttcagtgacagcagcgccaccttcctgctgaatgaaggcagcgctgacagctacaccagccggcccagcctggacagtgatgtgtccctggaggaggaccgggagagcgcccggcgggaggtggagagccaggcccagcagcagctggagcgggccaagcacaagcctgtggcctttgctgtgaggaccaacgtgtcctactgcggcgtgctggatgaggagtgccctgtgcagggcagcggcgtgaactttgaggccaaggacttcctgcacatcaaggagaagtacagcaatgactggtggattggccgcctggtgaaggagggcggggacatcgccttcatccccagcccccagaggctggagagcatccggctgaagcaggagcagaaggccaggagaagtggcaaccccagcagcctgagtgacatcggcaacagaagaagccccccacccagcctggccaagcagaagcagaagcaggccgagcacgtgcccccctatgatgtggtgcccagcatgaggcctgtggtgctggtgggccccagcctgaagggctatgaggtgacagacatgatgcagaaggccctgtttgacttcctgaagcacagatttgatggccgcatcagcatcaccagggtgacagctgacctgagcctggccaagaggtctgtgctgaacaaccctgggaagaggaccatcatcgagaggagcagcgcccggagcagcattgctgaggtgcagagcgagattgagcgcatctttgagctggccaagagcctgcagctggtggtgctggatgctgacaccatcaaccacccagcccagctggccaagaccagcctggcccccatcatcgtgtttgtgaaggtgagcagccccaaggtgctgcagaggctcatccgcagccggggcaagagccagatgaagcacctgactgtgcagatgatggcctatgacaagctggtgcagtgccccccagagagctttgatgtgatcctggatgagaaccagctggaggatgcctgtgagcacctggccgagtacctggaggtgtactggagggccacccaccacccagcccctggccctggcctgctgggccccccatctgccatccctggcctgcagaaccagcagctgctgggggagcggggggaggagcacagccccctggagcgggacagcctgatgcccagtgatgaggccagcgagagcagccggcaggcctggacaggcagcagccagaggagcagccgccacctggaggaggactatgcagatgcctaccaggacctgtaccagccccaccggcagcacaccagcggcctgcccagcgccaacggccatgacccccaggaccggctgctggcccaggacagcgagcacaaccacagcgacaggaactggcagaggaaccggccctggcccaaggacagctactag

SEQ ID NO: 145757 - DNA, 1416 bp, synthetic construct
  misc_feature 1..1416: note = Description of Artificial Sequence: Synthetic coding sequence
  source 1..1416: mol_type = other DNA
atggagggcagcgctgacagctacaccagccggcccagcctggacagtgatgtgtccctggaggaggaccgggagagcgcccggcgggaggtggagagccaggcccagcagcagctggagcgggccaagcacaagcctgtggcctttgctgtgaggaccaacgtgtcctactgcggcgtgctggatgaggagtgccctgtgcagggcagcggcgtgaactttgaggccaaggacttcctgcacatcaaggagaagtacagcaatgactggtggattggccgcctggtgaaggagggcggggacatcgccttcatccccagcccccagaggctggagagcatccggctgaagcaggagcagaaggccaggagaagtggcaaccccagcagcctgagtgacatcggcaacagaagaagccccccacccagcctggccaagcagaagcagaagcaggccgagcacgtgcccccctatgatgtggtgcccagcatgaggcctgtggtgctggtgggccccagcctgaagggctatgaggtgacagacatgatgcagaaggccctgtttgacttcctgaagcacagatttgatggccgcatcagcatcaccagggtgacagctgacctgagcctggccaagaggtctgtgctgaacaaccctgggaagaggaccatcatcgagaggagcagcgcccggagcagcattgctgaggtgcagagcgagattgagcgcatctttgagctggccaagagcctgcagctggtggtgctggatgctgacaccatcaaccacccagcccagctggccaagaccagcctggcccccatcatcgtgtttgtgaaggtgagcagccccaaggtgctgcagaggctcatccgcagccggggcaagagccagatgaagcacctgactgtgcagatgatggcctatgacaagctggtgcagtgccccccagagagctttgatgtgatcctggatgagaaccagctggaggatgcctgtgagcacctggccgagtacctggaggtgtactggagggccacccaccacccagcccctggccctggcctgctgggccccccatctgccatccctggcctgcagaaccagcagctgctgggggagcggggggaggagcacagccccctggagcgggacagcctgatgcccagtgatgaggccagcgagagcagccggcaggcctggacaggcagcagccagaggagcagccgccacctggaggaggactatgcagatgcctaccaggacctgtaccagccccaccggcagcacaccagcggcctgcccagcgccaacggccatgacccccaggaccggctgctggcccaggacagcgagcacaaccacagcgacaggaactggcagaggaaccggccctggcccaaggacagctactag

SEQ ID NO: 145758 - DNA, 1332 bp, synthetic construct
  misc_feature 1..1332: note = Description of Artificial Sequence: Synthetic coding sequence
  source 1..1332: mol_type = other DNA
atgtatgatgacagctatgtgcccggctttgaagattctgaggccggcagcgctgacagctacaccagccggcccagcctggacagtgatgtgtccctggaggaggaccgggagagcgcccggcgggaggtggagagccaggcccagcagcagctggagcgggccaagaagtacagcaatgactggtggattggccgcctggtgaaggagggcggggacatcgccttcatccccagcccccagaggctggagagcatccggctgaagcaggagcagaaggccaggagaagtggcaaccccagcagcctgagtgacatcggcaacagaagaagccccccacccagcctggccaagcagaagcagaagcaggccgagcacgtgcccccctatgatgtggtgcccagcatgaggcctgtggtgctggtgggccccagcctgaagggctatgaggtgacagacatgatgcagaaggccctgtttgacttcctgaagcacagatttgatggccgcatcagcatcaccagggtgacagctgacctgagcctggccaagaggtctgtgctgaacaaccctgggaagaggaccatcatcgagaggagcagcgcccggagcagcattgctgaggtgcagagcgagattgagcgcatctttgagctggccaagagcctgcagctggtggtgctggatgctgacaccatcaaccacccagcccagctggccaagaccagcctggcccccatcatcgtgtttgtgaaggtgagcagccccaaggtgctgcagaggctcatccgcagccggggcaagagccagatgaagcacctgactgtgcagatgatggcctatgacaagctggtgcagtgccccccagagagctttgatgtgatcctggatgagaaccagctggaggatgcctgtgagcacctggccgagtacctggaggtgtactggagggccacccaccacccagcccctggccctggcctgctgggccccccatctgccatccctggcctgcagaaccagcagctgctgggggagcggggggaggagcacagccccctggagcgggacagcctgatgcccagtgatgaggccagcgagagcagccggcaggcctggacaggcagcagccagaggagcagccgccacctggaggaggactatgcagatgcctaccaggacctgtaccagccccaccggcagcacaccagcggcctgcccagcgccaacggccatgacccccaggaccggctgctggcccaggacagcgagcacaaccacagcgacaggaactggcagaggaaccggccctggcccaaggacagctactag

SEQ ID NO: 145759 - DNA, 1377 bp, synthetic construct
  misc_feature 1..1377: note = Description of Artificial Sequence: Synthetic coding sequence
  source 1..1377: mol_type = other DNA
atgagcagcagcagctatgccaagaatggaacagcagatggcccccacagccccaccagccaggtggcccggggcaccaccaccaggaggagccggctgaagagaagtgatggcagcaccaccagcaccagcttcatcctgcggcagggcagcgctgacagctacaccagccggcccagcgacagtgatgtgtccctggaggaggaccgggaggccatccggcaggagcgggagcagcaggccgccatccagctggagcgggccaagagcaagcctgtggcctttgctgtgaagaccaacgtgtcctactgtggggccctggatgaagatgtgcctgtgcccagcacagccatcagctttgatgccaaggacttcctgcacatcaaggagaagtacaacaatgactggtggattggccgcctggtgaaggagggctgtgagatcggcttcatccccagccccctgcggctggagaacatccgcatccagcaggagcagaagaggggccgcttccacggcggcaagagcagcggcaacagcagcagcagcctgggggagatggtgtctggcaccttccgggccacccccaccagcacagccaagcagaagcagaaggtgacagagcacatccccccctatgatgtggtgcccagcatgaggcctgtggtgctggtgggccccagcctgaagggctatgaggtgacagacatgatgcagaaggccctgtttgacttcctgaagcacagatttgatggccgcatcagcatcaccagggtgacagctgacatcagcctggccaagaggtctgtgctgaacaaccccagcaagagggccatcatcgagaggagcaacaccaggagcagcctggccgaggtgcagagcgagattgaaagaatttttgagctggcccggagcctgcagctggtggtgctggatgctgacaccatcaaccacccagcccagctgatcaagaccagcctggcccccatcatcgtgcacgtgaaggtgagcagccccaaggtgctgcagaggctcatcaagagccggggcaagagccagagcaagcacctgaatgtgcagctggtggccgctgacaagctggcccagtgcccccccagccagaggatgaggcacagcaaccacagcacagagaacagccccatcgagcggcgcagcctgatgaccagtgatgagaactaccacaatgaaagagccaggaagagcaggaaccggctgagcagcagcagccagcacagccgggaccactaccccctggtggaggaggactacccagacagctaccaggacacctacaagccccacaggaacagaggcagccctgggggctacagccatgacagccgccaccggctgtag

SEQ ID NO: 145760 - DNA, 1509 bp, synthetic construct
  misc_feature 1..1509: note = Description of Artificial Sequence: Synthetic coding sequence
  source 1..1509: mol_type = other DNA
atggatgtggtggcccggggcaccaccaccaggaggagccggctgaagagaagtgatggcagcaccaccagcaccagcttcatcctgcggcagggcagcgctgacagctacaccagccggcccagcgacagtgatgtgtccctggaggaggaccgggaggccatccggcaggagcgggagcagcaggccgccatccagctggagcgggccaagagcaagcctgtggcctttgctgtgaagaccaacgtgtcctactgtggggccctggatgaagatgtgcctgtgcccagcacagccatcagctttgatgccaaggacttcctgcacatcaaggagaagtacaacaatgactggtggattggccgcctggtgaaggagggctgtgagatcggcttcatccccagccccctgcggctggagaacatccgcatccagcaggagcagaagaggggccgcttccacggcggcaagagcagcggcaacagcagcagcagcctgggggagatggtgtctggcaccttccgggccacccccaccagcacagccaagcagaagcagaaggtgacagagcacatccccccctatgatgtggtgcccagcatgaggcctgtggtgctggtgggccccagcctgaagggctatgaggtgacagacatgatgcagaaggccctgtttgacttcctgaagcacagatttgatggccgcatcagcatcaccagggtgacagctgacatcagcctggccaagaggtctgtgctgaacaaccccagcaagagggccatcatcgagaggagcaacaccaggagcagcctggccgaggtgcagagcgagattgaaagaatttttgagctggcccggagcctgcagctggtggtgctggatgctgacaccatcaaccacccagcccagctgatcaagaccagcctggcccccatcatcgtgcacgtgaaggtgagcagccccaaggtgctgcagaggctcatcaagagccggggcaagagccagagcaagcacctgaatgtgcagctggtggccgctgacaagctggcccagtgccccccagagatgtttgatgtgatcctggatgagaaccagctggaggatgcctgtgagcacctgggggagtacctggaggcctactggagggccacccacaccaccagcagcacccccatgacccccctgctgggcaggaacctgggcagcacagccctgagcccctaccccacagccatcagcggcctgcagagccagaggatgaggcacagcaaccacagcacagagaacagccccatcgagcggcgcagcctgatgaccagtgatgagaactaccacaatgaaagagccaggaagagcaggaaccggctgagcagcagcagccagcacagccgggaccactaccccctggtggaggaggactacccagacagctaccaggacacctacaagccccacaggaacagaggcagccctgggggctacagccatgacagccgccaccggctgtag

SEQ ID NO: 145761 - DNA, 3438 bp, synthetic construct
  misc_feature 1..3438: note = Description of Artificial Sequence: Synthetic coding sequence
  source 1..3438: mol_type = other DNA
atggctgtgcctgcccggacctgtggggccagcaggcctggccctgccaggacagcccggccctggccaggctgcggcccccaccctggccctggcacccggcggcccaccagcggccccccccggcccctgtggctgctgctgcccctgctgcccctgctggccgcccctggggccagcgcctacagcttcccccagcagcacaccatgcagcactgggcccggcggctggagcaggaggtggatggagtgatgaggatctttggaggagtgcagcagctgcgggagatctacaaggacaacagaaacctgtttgaggtgcaggagaatgagccccagaagctggtggagaaggtggccggggacatcgagagcctgctggacaggaaggtgcaggccctgaagaggctggctgatgctgctgagaacttccagaaggcccaccgctggcaggacaacatcaaggaggaggacatcgtgtactatgatgccaaggcagatgctgagctggatgatcctgagagtgaagatgtggagcggggcagcaaggccagcaccctgcggctggacttcatcgaggaccccaacttcaagaacaaggtgaactacagctatgctgctgtgcagatccccacagacatctacaagggcagcaccgtcatcctgaatgagctgaactggacagaggccctggagaatgtgttcatggagaacagacggcaggaccccaccctgctgtggcaggtgtttggcagcgccaccggggtgacccgctactacccagccaccccctggagggcccccaagaagattgacctgtatgatgtgagaagaagaccctggtacatccagggcgccagcagccccaaggacatggtgatcatcgtggatgtgtctggctctgtgtctggcctgaccctgaagctgatgaagacctctgtgtgtgagatgctggacaccctgagtgatgatgattatgtgaatgtggccagcttcaatgagaaggcccagcctgtgtcctgcttcacccacctggtgcaggccaacgtgaggaacaagaaggtgttcaaggaggccgtgcagggcatggtggccaagggcaccaccggctacaaggccggctttgaatatgcctttgaccagctgcagaacagcaacatcacccgggccaactgcaacaagatgatcatgatgttcacagatggaggagaggacagagtgcaggatgtgtttgagaagtacaactggcccaacagaacagtgcgggtcttcaccttctctgtgggccagcacaactatgatgtgacccccctgcagtggatggcctgtgccaacaagggctactactttgagatccccagcattggagccatccgcatcaacacccaggagtacctggatgtgctgggccggcccatggtgctggccggcaaggaggccaagcaggtgcagtggaccaacgtgtatgaagatgccctgggcctgggcctggtggtgacaggcaccctgcccgtcttcaacctgacccaggacggccctggagagaagaagaaccagctgatcctgggcgtgatgggcattgatgtggccctgaatgacatcaagaggctgacccccaactacaccctgggcgccaacggctacgtgtttgccatcgacctgaatggctacgtgctgctgcaccccaacctgaagccccagaccaccaacttccgggagcctgtgaccctggacttcctggatgctgagctggaggatgagaacaaggaggagatcagaagatccatgattgatggcaacaagggccacaagcagatccgcaccctggtgaagagcctggatgagcgctacattgatgaggtgaccaggaactacacctgggtgcccatccgcagcaccaactacagcctgggcctggtgctgcccccctacagcaccttctacctgcaggccaacctgagtgaccagatcctgcaggtgaagtactttgagttcctgctgcccagcagctttgaaagtgagggccacgtgttcatcgccccccgggagtactgcaaggacctgaatgccagtgacaacaacacagagttcctgaagaacttcatcgagctgatggagaaggtgaccccagacagcaagcagtgcaacaacttcctgctgcacaacctgatcctggacaccggcatcacccagcagctggtggagcgggtgtggagggaccaggacctgaacacctacagcctgctggccgtgtttgctgccacagatggcggcatcaccagggtcttccccaacaaggctgctgaggactggacagaaaatcctgagcccttcaatgccagcttctaccgccgcagcctggacaaccacggctacgtgttcaagccaccccaccaggatgccctgctgcggcccctggagctggagaatgacacagtgggcatcctggtgtccacagctgtggagctgagcctgggccgccgcaccctgcggcctgctgtggtgggcgtgaagctggacctggaggcctgggccgagaagttcaaggtgctggccagcaacagaacccaccaggaccagccccagaagtgtggccccaacagccactgtgagatggactgtgaggtgaacaatgaagacctgctgtgtgtgctgattgatgatggcggcttcctggtgctgagcaaccagaaccaccagtgggaccaggtgggccgcttcttcagcgaggtggatgccaacctgatgctggccctgtacaacaacagcttctacaccaggaaggagagctatgactaccaggccgcctgtgccccccagcccccaggcaacctgggcgccgccccccggggcgtgtttgtgcccaccgtggccgacttcctgaacctggcctggtggaccagcgctgctgcctggagcctcttccagcagctgctgtatggcctcatctaccacagctggttccaggccgaccctgctgaggccgagggcagccctgagacccgggagagcagctgtgtgatgaagcagacccagtactactttggatctgtgaatgccagctacaatgccatcatcgactgtggcaactgcagccgcctcttccacgcccagaggctgaccaacaccaacctgctgtttgtggtggccgagaagcccctgtgcagccagtgtgaggccggccgcctgctgcagaaggagacccactgcccagcagatggccctgagcagtgtgagctggtgcagaggccccgctacagaagaggcccccacatctgctttgactacaatgccacagaggacaccagtgactgtggccgcggggccagcttcccccccagcctgggcgtgctggtgtccctgcagctgctgctgctgctgggcctgcccccccggccccagccccaggtgctggtgcacgccagccggcggctgtag

SEQ ID NO: 145762 - DNA, 3231 bp, synthetic construct
  misc_feature 1..3231: note = Description of Artificial Sequence: Synthetic coding sequence
  source 1..3231: mol_type = other DNA
atgcagcactgggcccggcggctggagcaggaggtggatggagtgatgaggatctttggaggagtgcagcagctgcgggagatctacaaggacaacagaaacctgtttgaggtgcaggagaatgagccccagaagctggtggagaaggtggccggggacatcgagagcctgctggacaggaaggtgcaggccctgaagaggctggctgatgctgctgagaacttccagaaggcccaccgctggcaggacaacatcaaggaggaggacatcgtgtactatgatgccaaggcagatgctgagctggatgatcctgagagtgaagatgtggagcggggcagcaaggccagcaccctgcggctggacttcatcgaggaccccaacttcaagaacaaggtgaactacagctatgctgctgtgcagatccccacagacatctacaagggcagcaccgtcatcctgaatgagctgaactggacagaggccctggagaatgtgttcatggagaacagacggcaggaccccaccctgctgtggcaggtgtttggaagtgccactggagtgacccgctactacccagccaccccctggagggcccccaagaagattgacctgtatgatgtgagaagaagaccctggtacatccagggcgccagcagccccaaggacatggtgatcatcgtggatgtgtctggctctgtgtctggcctgaccctgaagctgatgaagacctctgtgtgtgagatgctggacaccctgagtgatgatgattatgtgaatgtggccagcttcaatgagaaggcccagcctgtgtcctgcttcacccacctggtgcaggccaacgtgaggaacaagaaggtgttcaaggaggccgtgcagggcatggtggccaagggcaccaccggctacaaggccggctttgaatatgcctttgaccagctgcagaacagcaacatcacccgggccaactgcaacaagatgatcatgatgttcacagatggaggagaagatagagtgcaggatgtgtttgagaagtacaactggcccaacagaacagtgcgggtcttcaccttctctgtgggccagcacaactatgatgtgacccccctgcagtggatggcctgtgccaacaagggctactactttgagatccccagcatcggggccatccgcatcaacacccaggagtacctggatgtgctgggccggcccatggtgctggccggcaaggaggccaagcaggtgcagtggaccaacgtgtatgaagatgccctgggcctgggcctggtggtgacaggcaccctgcctgtgttcaacctgacccaggacggccctggagagaagaagaaccagctgatcctgggcgtgatgggcattgatgtggccctgaatgacatcaagaggctgacccccaactacaccctgggcgccaacggctacgtgtttgccatcgacctgaatggctacgtgctgctgcaccccaacctgaagccccagaccaccaacttccgggagcctgtgaccctggacttcctggatgctgagctggaggatgagaacaaggaggagatccgccgctccatgattgatggcaacaagggccacaagcagatccgcaccctggtgaagagcctggatgagcgctacattgatgaggtgaccaggaactacacctgggtgcccatccgcagcaccaactacagcctgggcctggtgctgcccccctacagcaccttctacctgcaggccaacctgagtgaccagatcctgcaggtgaagtactttgagttcctgctgcccagcagctttgagagcgagggccacgtgttcatcgccccccgggagtactgcaaggacctgaatgccagtgacaacaacacagagttcctgaagaacttcatcgagctgatggagaaggtgaccccagacagcaagcagtgcaacaacttcctgctgcacaacctgatcctggacaccggcatcacccagcagctggtggagcgggtgtggagggaccaggacctgaacacctacagcctgctggccgtgtttgctgccacagatggcggcatcaccagggtcttccccaacaaggctgctgaggactggacagagaaccctgagcccttcaatgccagcttctacagaagaagcctggacaaccacggctacgtgttcaagccaccccaccaggatgccctgctgcggcccctggagctggagaatgacacagtgggcatcctggtgtccacagctgtggagctgagcctgggccgccgcaccctgcggcctgctgtggtgggcgtgaagctggacctggaggcctgggccgagaagttcaaggtgctggccagcaacagaacccaccaggaccagccccagaagtgtggccccaacagccactgtgagatggactgtgaggtgaacaatgaagacctgctgtgtgtgctgattgatgatggcggcttcctggtgctgagcaaccagaaccaccagtgggaccaggtgggccgcttcttcagcgaggtggatgccaacctgatgctggccctgtacaacaacagcttctacaccaggaaggagagctatgactaccaggccgcctgtgccccccagcccccaggcaacctgggcgccgccccccggggcgtgtttgtgcccaccgtggccgacttcctgaacctggcctggtggaccagcgctgctgcctggagcctcttccagcagctgctgtatggcctcatctaccacagctggttccaggccgaccctgctgaggccgagggcagccctgagacccgggagagcagctgtgtgatgaagcagacccagtactacttcggctctgtgaatgccagctacaatgccatcatcgactgtggcaactgcagccgcctcttccacgcccagaggctgaccaacaccaacctgctgtttgtggtggccgagaagcccctgtgcagccagtgtgaggccggccgcctgctgcagaaggagacccactgcccagcagatggccctgagcagtgtgagctggtgcagaggccccgctaccgccggggcccccacatctgctttgactacaatgccacagaggacaccagtgactgtggccgcggggccagcttcccccccagcctgggcgtgctggtgtccctgcagctgctgctgctgctgggcctgcccccccggccccagccccaggtgctggtgcacgccagccggcggctgtag

SEQ ID NO: 145763 - DNA, 3441 bp, synthetic construct
  misc_feature 1..3441: note = Description of Artificial Sequence: Synthetic coding sequence
  source 1..3441: mol_type = other DNA
atggctgtgcctgcccggacctgtggggccagcaggcctggccctgccaggacagcccggccctggccaggctgcggcccccaccctggccctggcacccggcggcccaccagcggccccccccggcccctgtggctgctgctgcccctgctgcccctgctggccgcccctggggccagcgcctacagcttcccccagcagcacaccatgcagcactgggcccggcggctggagcaggaggtggatggagtgatgaggatctttggaggagtgcagcagctgcgggagatctacaaggacaacagaaacctgtttgaggtgcaggagaatgagccccagaagctggtggagaaggtggccggggacatcgagagcctgctggacaggaaggtgcaggccctgaagaggctggctgatgctgctgagaacttccagaaggcccaccgctggcaggacaacatcaaggaggaggacatcgtgtactatgatgccaaggcagatgctgagctggatgatcctgagagtgaagatgtggagcggggcagcaaggccagcaccctgcggctggacttcatcgaggaccccaacttcaagaacaaggtgaactacagctatgctgctgtgcagatccccacagacatctacaagggcagcaccgtcatcctgaatgagctgaactggacagaggccctggagaatgtgttcatggagaacagacggcaggaccccaccctgctgtggcaggtgtttggcagcgccaccggggtgacccgctactacccagccaccccctggagggcccccaagaagattgacctgtatgatgtgagaagaagaccctggtacatccagggcgccagcagccccaaggacatggtgatcatcgtggatgtgtctggctctgtgtctggcctgaccctgaagctgatgaagacctctgtgtgtgagatgctggacaccctgagtgatgatgattatgtgaatgtggccagcttcaatgagaaggcccagcctgtgtcctgcttcacccacctggtgcaggccaacgtgaggaacaagaaggtgttcaaggaggccgtgcagggcatggtggccaagggcaccaccggctacaaggccggctttgaatatgcctttgaccagctgcagaacagcaacatcacccgggccaactgcaacaagatgatcatgatgttcacagatggaggagaggacagagtgcaggatgtgtttgagaagtacaactggcccaacagaacagtgcgggtcttcaccttctctgtgggccagcacaactatgatgtgacccccctgcagtggatggcctgtgccaacaagggctactactttgagatccccagcattggagccatccgcatcaacacccaggagtacctggatgtgctgggccggcccatggtgctggccggcaaggaggccaagcaggtgcagtggaccaacgtgtatgaagatgccctgggcctgggcctggtggtgacaggcaccctgcccgtcttcaacctgacccaggacggccctggagagaagaagaaccagctgatcctgggcgtgatgggcattgatgtggccctgaatgacatcaagaggctgacccccaactacaccctgggcgccaacggctacgtgtttgccatcgacctgaatggctacgtgctgctgcaccccaacctgaagccccagaccaccaacttccgggagcctgtgaccctggacttcctggatgctgagctggaggatgagaacaaggaggagatcagaagatccatgattgatggcaacaagggccacaagcagatccgcaccctggtgaagagcctggatgagcgctacattgatgaggtgaccaggaactacacctgggtgcccatccgcagcaccaactacagcctgggcctggtgctgcccccctacagcaccttctacctgcaggccaacctgagtgaccagatcctgcaggtgaagtactttgagttcctgctgcccagcagctttgaaagtgagggccacgtgttcatcgccccccgggagtactgcaaggacctgaatgccagtgacaacaacacagagttcctgaagaacttcatcgagctgatggagaaggtgaccccagacagcaagcagtgcaacaacttcctgctgcacaacctgatcctggacaccggcatcacccagcagctggtggagcgggtgtggagggaccaggacctgaacacctacagcctgctggccgtgtttgctgccacagatggcggcatcaccagggtcttccccaacaaggctgctgaggactggacagaaaatcctgagcccttcaatgccagcttctaccgccgcagcctggacaaccacggctacgtgttcaagccaccccaccaggatgccctgctgcggcccctggagctggagaatgacacagtgggcatcctggtgtccacagctgtggagctgagcctgggccgccgcaccctgcggcctgctgtggtgggcgtgaagctggacctggaggcctgggccgagaagttcaaggtgctggccagcaacagaacccaccaggaccagccccagaagtgtggccccaacagccactgtgagatggactgtgaggtgaacaatgaagacctgctgtgtgtgctgattgatgatggcggcttcctggtgctgagcaaccagaaccaccagtgggaccaggtgggccgcttcttcagcgaggtggatgccaacctgatgctggccctgtacaacaacagcttctacaccaggaaggagagctatgactaccaggccgcctgtgccccccagcccccaggcaacctgggcgccgccccccggggcgtgtttgtgcccaccgtggccgacttcctgaacctggcctggtggaccagcgctgctgcctggagcctcttccagcagctgctgtatggcctcatctaccacagctggttccaggccgaccctgctgaggccgagggcagccctgagacccgggagagcagctgtgtgatgaagcagacccagtactactttggatctgtgaatgccagctacaatgccatcatcgactgtggcaactgcagccgcctcttccacgcccagaggctgaccaacaccaacctgctgtttgtggtggccgagaagcccctgtgcagccagtgtgaggccggccgcctgctgcagaaggagacccactgctgcccagcagatggccctgagcagtgtgagctggtgcagaggccccgctaccgccggggcccccacatctgctttgactacaatgccacagaggacaccagtgactgtggccgcggggccagcttcccccccagcctgggcgtgctggtgtccctgcagctgctgctgctgctgggcctgcccccccggccccagccccaggtgctggtgcacgccagccggcggctgtag

SEQ ID NO: 145764 - DNA, 3432 bp, synthetic construct
  misc_feature 1..3432: note = Description of Artificial Sequence: Synthetic coding sequence
  source 1..3432: mol_type = other DNA
atggctgtgcctgcccggacctgtggggccagcaggcctggccctgccaggacagcccggccctggccaggctgcggcccccaccctggccctggcacccggcggcccaccagcggccccccccggcccctgtggctgctgctgcccctgctgcccctgctggccgcccctggggccagcgcctacagcttcccccagcagcacaccatgcagcactgggcccggcggctggagcaggaggtggatggagtgatgaggatctttggaggagtgcagcagctgcgggagatctacaaggacaacagaaacctgtttgaggtgcaggagaatgagccccagaagctggtggagaaggtggccggggacatcgagagcctgctggacaggaaggtgcaggccctgaagaggctggctgatgctgctgagaacttccagaaggcccaccgctggcaggacaacatcaaggaggaggacatcgtgtactatgatgccaaggcagatgctgagctggatgatcctgagagtgaagatgtggagcggggcagcaaggccagcaccctgcggctggacttcatcgaggaccccaacttcaagaacaaggtgaactacagctatgctgctgtgcagatccccacagacatctacaagggcagcaccgtcatcctgaatgagctgaactggacagaggccctggagaatgtgttcatggagaacagacggcaggaccccaccctgctgtggcaggtgtttggcagcgccaccggggtgacccgctactacccagccaccccctggagggcccccaagaagattgacctgtatgatgtgagaagaagaccctggtacatccagggcgccagcagccccaaggacatggtgatcatcgtggatgtgtctggctctgtgtctggcctgaccctgaagctgatgaagacctctgtgtgtgagatgctggacaccctgagtgatgatgattatgtgaatgtggccagcttcaatgagaaggcccagcctgtgtcctgcttcacccacctggtgcaggccaacgtgaggaacaagaaggtgttcaaggaggccgtgcagggcatggtggccaagggcaccaccggctacaaggccggctttgaatatgcctttgaccagctgcagaacagcaacatcacccgggccaactgcaacaagatgatcatgatgttcacagatggaggagaggacagagtgcaggatgtgtttgagaagtacaactggcccaacagaacagtgcgggtcttcaccttctctgtgggccagcacaactatgatgtgacccccctgcagtggatggcctgtgccaacaagggctactactttgagatccccagcattggagccatccgcatcaacacccaggagtacctggatgtgctgggccggcccatggtgctggccggcaaggaggccaagcaggtgcagtggaccaacgtgtatgaagatgccctgggcctgggcctggtggtgacaggcaccctgcccgtcttcaacctgacccaggacggccctggagagaagaagaaccagctgatcctgggcgtgatgggcattgatgtggccctgaatgacatcaagaggctgacccccaactacaccctgggcgccaacggctacgtgtttgccatcgacctgaatggctacgtgctgctgcaccccaacctgaagccccagaccaccaacttccgggagcctgtgaccctggacttcctggatgctgagctggaggatgagaacaaggaggagatcagaagatccatgattgatggcaacaagggccacaagcagatccgcaccctggtgaagagcctggatgagcgctacattgatgaggtgaccaggaactacacctgggtgcccatccgcagcaccaactacagcctgggcctggtgctgcccccctacagcaccttctacctgcaggccaacctgagtgaccagatcctgcaggtgaagtactttgagttcctgctgcccagcagctttgaaagtgagggccacgtgttcatcgccccccgggagtactgcaaggacctgaatgccagtgacaacaacacagagttcctgaagaacttcatcgagctgatggagaaggtgaccccagacagcaagcagtgcaacaacttcctgctgcacaacctgatcctggacaccggcatcacccagcagctggtggagcgggtgtggagggaccaggacctgaacacctacagcctgctggccgtgtttgctgccacagatggcggcatcaccagggtcttccccaacaaggctgctgaggactggacagaaaatcctgagcccttcaatgccagcttctaccgccgcagcctggacaaccacggctacgtgttcaagccaccccaccaggatgccctgctgcggcccctggagctggagaatgacacagtgggcatcctggtgtccacagctgtggagctgagcctgggccgccgcaccctgcggcctgctgtggtgggcgtgaagctggacctggaggcctgggccgagaagttcaaggtgctggccagcaacagaacccaccaggaccagccccagaagtgtggccccaacagccactgtgagatggactgtgaggtgaacaatgaagacctgctgtgtgtgctgattgatgatggcggcttcctggtgctgagcaaccagaaccaccagtgggaccaggtgggccgcttcttcagcgaggtggatgccaacctgatgctggccctgtacaacaacagcttctacaccaggaaggagagctatgactaccaggccgcctgtgccccccagcccccaggcaacctgggcgccgccccccggggcgtgtttgtgcccaccgtggccgacttcctgaacctggcctggtggaccagcgctgctgcctggagcctcttccagcagctgctgtatggcctcatctaccacagctggttccaggccgaccctgctgaggccgagggcagccctgagacccgggagagcagctgtgtgatgaagcagacccagtactactttggatctgtgaatgccagctacaatgccatcatcgactgtggcaactgcagccgcctcttccacgcccagaggctgaccaacaccaacctgctgtttgtggtggccgagaagcccctgtgcagccagtgtgaggccggccgcctgctgcagaaggagacccacagtgatggccctgagcagtgtgagctggtgcagaggccccgctacagaagaggcccccacatctgctttgactacaatgccacagaggacaccagtgactgtggccgcggggccagcttcccccccagcctgggcgtgctggtgtccctgcagctgctgctgctgctgggcctgcccccccggccccagccccaggtgctggtgcacgccagccggcggctgtag

SEQ ID NO: 145765 - DNA, 3462 bp, synthetic construct
  misc_feature 1..3462: note = Description of Artificial Sequence: Synthetic coding sequence
  source 1..3462: mol_type = other DNA
atggctgtgcctgcccggacctgtggggccagcaggcctggccctgccaggacagcccggccctggccaggctgcggcccccaccctggccctggcacccggcggcccaccagcggccccccccggcccctgtggctgctgctgcccctgctgcccctgctggccgcccctggggccagcgcctacagcttcccccagcagcacaccatgcagcactgggcccggcggctggagcaggaggtggatggagtgatgaggatctttggaggagtgcagcagctgcgggagatctacaaggacaacagaaacctgtttgaggtgcaggagaatgagccccagaagctggtggagaaggtggccggggacatcgagagcctgctggacaggaaggtgcaggccctgaagaggctggctgatgctgctgagaacttccagaaggcccaccgctggcaggacaacatcaaggaggaggacatcgtgtactatgatgccaaggcagatgctgagctggatgatcctgagagtgaagatgtggagcggggcagcaaggccagcaccctgcggctggacttcatcgaggaccccaacttcaagaacaaggtgaactacagctatgctgctgtgcagatccccacagacatctacaagggcagcaccgtcatcctgaatgagctgaactggacagaggccctggagaatgtgttcatggagaacagacggcaggaccccaccctgctgtggcaggtgtttggcagcgccaccggggtgacccgctactacccagccaccccctggagggcccccaagaagattgacctgtatgatgtgagaagaagaccctggtacatccagggcgccagcagccccaaggacatggtgatcatcgtggatgtgtctggctctgtgtctggcctgaccctgaagctgatgaagacctctgtgtgtgagatgctggacaccctgagtgatgatgattatgtgaatgtggccagcttcaatgagaaggcccagcctgtgtcctgcttcacccacctggtgcaggccaacgtgaggaacaagaaggtgttcaaggaggccgtgcagggcatggtggccaagggcaccaccggctacaaggccggctttgaatatgcctttgaccagctgcagaacagcaacatcacccgggccaactgcaacaagatgatcatgatgttcacagatggaggagaggacagagtgcaggatgtgtttgagaagtacaactggcccaacagaacagtgcgggtcttcaccttctctgtgggccagcacaactatgatgtgacccccctgcagtggatggcctgtgccaacaagggctactactttgagatccccagcattggagccatccgcatcaacacccaggagtacctggatgtgctgggccggcccatggtgctggccggcaaggaggccaagcaggtgcagtggaccaacgtgtatgaagatgccctgggcctgggcctggtggtgacaggcaccctgcccgtcttcaacctgacccaggacggccctggagagaagaagaaccagctgatcctgggcgtgatgggcattgatgtggccctgaatgacatcaagaggctgacccccaactacaccctgggcgccaacggctacgtgtttgccatcgacctgaatggctacgtgctgctgcaccccaacctgaagccccagaccaccaacttccgggagcctgtgaccctggacttcctggatgctgagctggaggatgagaacaaggaggagatcagaagatccatgattgatggcaacaagggccacaagcagatccgcaccctggtgaagagcctggatgagcgctacattgatgaggtgaccaggaactacacctgggtgcccatccgcagcaccaactacagcctgggcctggtgctgcccccctacagcaccttctacctgcaggccaacctgagtgaccagatcctgcaggtgaagctgcccatcagcaagctgaaggactttgagttcctgctgcccagcagctttgagagcgagggccacgtgttcatcgccccccgggagtactgcaaggacctgaatgccagtgacaacaacacagagttcctgaagaacttcatcgagctgatggagaaggtgaccccagacagcaagcagtgcaacaacttcctgctgcacaacctgatcctggacaccggcatcacccagcagctggtggagcgggtgtggagggaccaggacctgaacacctacagcctgctggccgtgtttgctgccacagatggcggcatcaccagggtcttccccaacaaggctgctgaggactggacagagaaccctgagcccttcaatgccagcttctacagaagaagcctggacaaccacggctacgtgttcaagccaccccaccaggatgccctgctgcggcccctggagctggagaatgacacagtgggcatcctggtgtccacagctgtggagctgagcctgggccgccgcaccctgcggcctgctgtggtgggcgtgaagctggacctggaggcctgggccgagaagttcaaggtgctggccagcaacagaacccaccaggaccagccccagaagtgtggccccaacagccactgtgagatggactgtgaggtgaacaatgaagacctgctgtgtgtgctgattgatgatggcggcttcctggtgctgagcaaccagaaccaccagtgggaccaggtgggccgcttcttcagcgaggtggatgccaacctgatgctggccctgtacaacaacagcttctacaccaggaaggagagctatgactaccaggccgcctgtgccccccagcccccaggcaacctgggcgccgccccccggggcgtgtttgtgcccaccgtggccgacttcctgaacctggcctggtggaccagcgctgctgcctggagcctcttccagcagctgctgtatggcctcatctaccacagctggttccaggccgaccctgctgaggccgagggcagccctgagacccgggagagcagctgtgtgatgaagcagacccagtactacttcggctctgtgaatgccagctacaatgccatcatcgactgtggcaactgcagccgcctcttccacgcccagaggctgaccaacaccaacctgctgtttgtggtggccgagaagcccctgtgcagccagtgtgaggccggccgcctgctgcagaaggagacccactgctgcccagcagatggccctgagcagtgtgagctggtgcagaggccccgctacagaagaggcccccacatctgctttgactacaatgccacagaggacaccagtgactgtggccgcggggccagcttcccccccagcctgggcgtgctggtgtccctgcagctgctgctgctgctgggcctgcccccccggccccagccccaggtgctggtgcacgccagccggcggctgtag

SEQ ID NO: 145766 - DNA, 3453 bp, synthetic construct
  misc_feature 1..3453: note = Description of Artificial Sequence: Synthetic coding sequence
  source 1..3453: mol_type = other DNA
atggctgtgcctgcccggacctgtggggccagcaggcctggccctgccaggacagcccggccctggccaggctgcggcccccaccctggccctggcacccggcggcccaccagcggccccccccggcccctgtggctgctgctgcccctgctgcccctgctggccgcccctggggccagcgcctacagcttcccccagcagcacaccatgcagcactgggcccggcggctggagcaggaggtggatggagtgatgaggatctttggaggagtgcagcagctgcgggagatctacaaggacaacagaaacctgtttgaggtgcaggagaatgagccccagaagctggtggagaaggtggccggggacatcgagagcctgctggacaggaaggtgcaggccctgaagaggctggctgatgctgctgagaacttccagaaggcccaccgctggcaggacaacatcaaggaggaggacatcgtgtactatgatgccaaggcagatgctgagctggatgatcctgagagtgaagatgtggagcggggcagcaaggccagcaccctgcggctggacttcatcgaggaccccaacttcaagaacaaggtgaactacagctatgctgctgtgcagatccccacagacatctacaagggcagcaccgtcatcctgaatgagctgaactggacagaggccctggagaatgtgttcatggagaacagacggcaggaccccaccctgctgtggcaggtgtttggcagcgccaccggggtgacccgctactacccagccaccccctggagggcccccaagaagattgacctgtatgatgtgagaagaagaccctggtacatccagggcgccagcagccccaaggacatggtgatcatcgtggatgtgtctggctctgtgtctggcctgaccctgaagctgatgaagacctctgtgtgtgagatgctggacaccctgagtgatgatgattatgtgaatgtggccagcttcaatgagaaggcccagcctgtgtcctgcttcacccacctggtgcaggccaacgtgaggaacaagaaggtgttcaaggaggccgtgcagggcatggtggccaagggcaccaccggctacaaggccggctttgaatatgcctttgaccagctgcagaacagcaacatcacccgggccaactgcaacaagatgatcatgatgttcacagatggaggagaggacagagtgcaggatgtgtttgagaagtacaactggcccaacagaacagtgcgggtcttcaccttctctgtgggccagcacaactatgatgtgacccccctgcagtggatggcctgtgccaacaagggctactactttgagatccccagcattggagccatccgcatcaacacccaggagtacctggatgtgctgggccggcccatggtgctggccggcaaggaggccaagcaggtgcagtggaccaacgtgtatgaagatgccctgggcctgggcctggtggtgacaggcaccctgcccgtcttcaacctgacccaggacggccctggagagaagaagaaccagctgatcctgggcgtgatgggcattgatgtggccctgaatgacatcaagaggctgacccccaactacaccctgggcgccaacggctacgtgtttgccatcgacctgaatggctacgtgctgctgcaccccaacctgaagccccagaccaccaacttccgggagcctgtgaccctggacttcctggatgctgagctggaggatgagaacaaggaggagatcagaagatccatgattgatggcaacaagggccacaagcagatccgcaccctggtgaagagcctggatgagcgctacattgatgaggtgaccaggaactacacctgggtgcccatccgcagcaccaactacagcctgggcctggtgctgcccccctacagcaccttctacctgcaggccaacctgagtgaccagatcctgcaggtgaagctgcccatcagcaagctgaaggactttgagttcctgctgcccagcagctttgagagcgagggccacgtgttcatcgccccccgggagtactgcaaggacctgaatgccagtgacaacaacacagagttcctgaagaacttcatcgagctgatggagaaggtgaccccagacagcaagcagtgcaacaacttcctgctgcacaacctgatcctggacaccggcatcacccagcagctggtggagcgggtgtggagggaccaggacctgaacacctacagcctgctggccgtgtttgctgccacagatggcggcatcaccagggtcttccccaacaaggctgctgaggactggacagagaaccctgagcccttcaatgccagcttctacagaagaagcctggacaaccacggctacgtgttcaagccaccccaccaggatgccctgctgcggcccctggagctggagaatgacacagtgggcatcctggtgtccacagctgtggagctgagcctgggccgccgcaccctgcggcctgctgtggtgggcgtgaagctggacctggaggcctgggccgagaagttcaaggtgctggccagcaacagaacccaccaggaccagccccagaagtgtggccccaacagccactgtgagatggactgtgaggtgaacaatgaagacctgctgtgtgtgctgattgatgatggcggcttcctggtgctgagcaaccagaaccaccagtgggaccaggtgggccgcttcttcagcgaggtggatgccaacctgatgctggccctgtacaacaacagcttctacaccaggaaggagagctatgactaccaggccgcctgtgccccccagcccccaggcaacctgggcgccgccccccggggcgtgtttgtgcccaccgtggccgacttcctgaacctggcctggtggaccagcgctgctgcctggagcctcttccagcagctgctgtatggcctcatctaccacagctggttccaggccgaccctgctgaggccgagggcagccctgagacccgggagagcagctgtgtgatgaagcagacccagtactacttcggctctgtgaatgccagctacaatgccatcatcgactgtggcaactgcagccgcctcttccacgcccagaggctgaccaacaccaacctgctgtttgtggtggccgagaagcccctgtgcagccagtgtgaggccggccgcctgctgcagaaggagacccacagtgatggccctgagcagtgtgagctggtgcagaggccccgctaccgccggggcccccacatctgctttgactacaatgccacagaggacaccagtgactgtggccgcggggccagcttcccccccagcctgggcgtgctggtgtccctgcagctgctgctgctgctgggcctgcccccccggccccagccccaggtgctggtgcacgccagccggcggctgtag

SEQ ID NO: 145767 - DNA, 3276 bp, synthetic construct
  misc_feature 1..3276: note = Description of Artificial Sequence: Synthetic coding sequence
  source 1..3276: mol_type = other DNA
atggccggccctggcagcccccggcgggccagcagaggagccagcgccctgctggccgccgccctgctgtatgctgccctgggagatgtggtgcgctctgagcagcagatccccctgtctgtggtgaagctgtgggccagcgcctttggaggagagatcaagagcattgctgccaagtacagcggcagccagctgctgcagaagaagtacaaggagtatgagaaggatgtggccatcgaggagattgatggcctgcagctggtgaagaagctggccaagaacatggaggagatgttccacaagaagtctgaggccgtgcggcggctggtggaggccgctgaggaggcccacctgaagcatgaatttgatgctgacctgcagtatgagtacttcaatgctgtgctgatcaatgaaagagacaaggatggcaacttcctggagctgggcaaggagttcatcctggccccaaatgaccacttcaacaacctgcctgtgaacatcagcctgagtgatgtgcaggtgcccaccaacatgtacaacaaggaccctgccatcgtgaatggagtgtactggagcgagagcctgaacaaggtgtttgtggacaactttgaccgggaccccagcctcatctggcagtacttcggcagcgccaagggcttcttccggcagtacccaggcatcaagtgggagccagatgaaaatggagtgattgcctttgactgcaggaacaggaagtggtacatccaggccgccaccagccccaaggatgtggtgatcctggtggatgtgtctggctccatgaagggcctgcggctgaccatcgccaagcagacagtgagcagcatcctggacaccctgggagatgatgacttcttcaacatcatcgcctacaatgaggagctgcactacgtggagccctgcctgaatggcaccctggtgcaggccgacaggaccaacaaggagcacttccgggagcacctggacaagctgtttgccaagggcatcggcatgctggacatcgccctgaatgaggccttcaacatcctgagtgacttcaaccacacaggccagggcagcatctgcagccaggccatcatgctgatcacagatggagctgtggacacctatgacaccatctttgccaagtacaactggccagacaggaaggtgcgcatcttcacctacctgattggccgggaggccgcctttgctgacaacctgaagtggatggcctgtgccaacaagggcttcttcacccagatcagcaccctggctgatgtgcaggagaatgtgatggagtacctgcacgtgctgagccggcccaaggtgattgaccaggagcatgatgtggtgtggacagaggcctacatcgacagcaccctgccccaggcccagaagctgacagatgaccagggccctgtgctgatgaccaccgtggccatgcctgtgttcagcaagcagaatgagaccaggagcaagggcatcctgctgggcgtggtgggcacagatgtgcctgtgaaggagctgctgaagaccatccccaagtacaagctgggcatccacggctacgcctttgccatcaccaacaacggctacatcctgacccaccctgagctgcggctgctgtatgaggagggcaagaagaggaggaagcccaactacagctctgtggacctgtctgaggtggagtgggaggacagagatgatgtgctgagaaatgccatggtgaacaggaagacaggcaagttctccatggaggtgaagaagacagtggacaagggcaagagggtgctggtgatgaccaatgactactactacacagacatcaagggcacccccttcagcctgggcgtggccctgagccggggccacggcaagtacttcttcagaggaaatgtgaccatcgaggagggcctgcatgacctggagcacccagatgtgtccctggctgatgagtggagctactgcaacacagacctgcaccctgagcaccgccacctgagccagctggaggccatcaagctgtacctgaagggcaaggagcccctgctgcagtgtgacaaggagctgatccaggaggtgctgtttgatgctgtggtgtctgcccccatcgaggcctactggaccagcctggccctgaacaagtcagaaaattctgacaagggcgtggaggtggccttcctgggcaccaggacaggcctgagccgcatcaacctgtttgtgggcgctgagcagctgaccaaccaggacttcctgaaggccggggacaaggagaacatcttcaatgctgaccacttccccctgtggtacagaagagctgctgagcagatccctggcagctttgtgtacagcatccccttcagcactggacctgtgaacaagagcaatgtggtgacagccagcaccagcatccagctgctggatgagaggaagagccctgtggtggccgctgtgggcatccagatgaagctggagttcttccagaggaagttctggacagccagccggcagtgtgccagcctggatggcaagtgcagcatcagctgtgatgatgaaacagtgaactgctacctgattgacaacaacggcttcatcctggtgtctgaggactacacccagacaggagacttcttcggggagattgaaggagctgtgatgaacaagctgctgaccatgggcagcttcaagaggatcaccctgtatgactaccaggccatgtgccgggccaacaaggagagcagtgatggagcccacggcctgctggacccctacaatgccttcctgtctgctgtgaagtggatcatgacagagctggtgctcttcctggtggagttcaacctgtgctcctggtggcacagcgacatgacagccaaggcccagaagctgaagcagaccctggagccctgtgacacagagtacccagcctttgtgtctgagaggaccatcaaggagaccaccggcaacatcgcctgtgaggactgcagcaagagctttgtgatccagcagatccccagcagcaacctcttcatggtggtggtggacagcagctgcctgtgtgagagcgtggcccccatcaccatggcccccatcgagatccgctacaatgaaagcctgaagtgtgagcggctgaaggcccagaagatcagaagaagacctgagagctgccacggcttccaccctgaggagaatgcccgggagtgtggcggggcccccagcctgcaggcccagacagtgctgctgctgctgcccctgctgctgatgctgttcagcaggtag

SEQ ID NO: 145768 - DNA, 2997 bp, synthetic construct
  misc_feature 1..2997: note = Description of Artificial Sequence: Synthetic coding sequence
  source 1..2997: mol_type = other DNA
atgggagagctgcggcaggagaggagcacagccctgcagaggctggtggaggccgctgaggaggcccacctgaagcatgaatttgatgctgacctgcagtatgagtacttcaatgctgtgctgatcaatgaaagagacaaggatggcaacttcctggagctgggcaaggagttcatcctggccccaaatgaccacttcaacaacctgcctgtgaacatcagcctgagtgatgtgcaggtgcccaccaacatgtacaacaaggaccctgccatcgtgaatggagtgtactggagcgagagcctgaacaaggtgtttgtggacaactttgaccgggaccccagcctcatctggcagtacttcggcagcgccaagggcttcttccggcagtacccaggcatcaagtgggagccagatgaaaatggagtgattgcctttgactgcaggaacaggaagtggtacatccaggccgccaccagccccaaggatgtggtgatcctggtggatgtgtctggctccatgaagggcctgcggctgaccatcgccaagcagacagtgagcagcatcctggacaccctgggagatgatgacttcttcaacatcatcgcctacaatgaggagctgcactacgtggagccctgcctgaatggcaccctggtgcaggccgacaggaccaacaaggagcacttccgggagcacctggacaagctgtttgccaagggcatcggcatgctggacatcgccctgaatgaggccttcaacatcctgagtgacttcaaccacacaggccagggcagcatctgcagccaggccatcatgctgatcacagatggagctgtggacacctatgacaccatctttgccaagtacaactggccagacaggaaggtgcgcatcttcacctacctgattggccgggaggccgcctttgctgacaacctgaagtggatggcctgtgccaacaagggcttcttcacccagatcagcaccctggctgatgtgcaggagaatgtgatggagtacctgcacgtgctgagccggcccaaggtgattgaccaggagcatgatgtggtgtggacagaggcctacatcgacagcacagtgtcccaggccgagcagctgacagatgaccagggccctgtgctgatgaccaccgtggccatgcctgtgttcagcaagcagaatgagaccaggagcaagggcatcctgctgggcgtggtgggcacagatgtgcctgtgaaggagctgctgaagaccatccccaagtacaagctgggcatccacggctacgcctttgccatcaccaacaacggctacatcctgacccaccctgagctgcggctgctgtatgaggagggcaagaagaggaggaagcccaactacagctctgtggacctgtctgaggtggagtgggaggacagagatgatgtgctgagaaatgccatggtgaacaggaagacaggcaagttctccatggaggtgaagaagacagtggacaagggcaagagggtgctggtgatgaccaatgactactactacacagacatcaagggcacccccttcagcctgggcgtggccctgagccggggccacggcaagtacttcttcagaggaaatgtgaccatcgaggagggcctgcatgacctggagcacccagatgtgtccctggctgatgagtggagctactgcaacacagacctgcaccctgagcaccgccacctgagccagctggaggccatcaagctgtacctgaagggcaaggagcccctgctgcagtgtgacaaggagctgatccaggaggtgctgtttgatgctgtggtgtctgcccccatcgaggcctactggaccagcctggccctgaacaagtcagaaaattctgacaagggcgtggaggtggccttcctgggcaccaggacaggcctgagccgcatcaacctgtttgtgggcgctgagcagctgaccaaccaggacttcctgaaggccggggacaaggagaacatcttcaatgctgaccacttccccctgtggtacagaagagctgctgagcagatccctggcagctttgtgtacagcatccccttcagcactggacctgtgaacaagagcaatgtggtgacagccagcaccagcatccagctgctggatgagaggaagagccctgtggtggccgctgtgggcatccagatgaagctggagttcttccagaggaagttctggacagccagccggcagtgtgccagcctggatggcaagtgcagcatcagctgtgatgatgaaacagtgaactgctacctgattgacaacaacggcttcatcctggtgtctgaggactacacccagacaggagacttcttcggggagattgaaggagctgtgatgaacaagctgctgaccatgggcagcttcaagaggatcaccctgtatgactaccaggccatgtgccgggccaacaaggagagcagtgatggagcccacggcctgctggacccctacaatgccttcctgtctgctgtgaagtggatcatgacagagctggtgctcttcctggtggagttcaacctgtgctcctggtggcacagcgacatgacagccaaggcccagaagctgaagcagaccctggagccctgtgacacagagtacccagcctttgtgtctgagaggaccatcaaggagaccaccggcaacatcgcctgtgaggactgcagcaagagctttgtgatccagcagatccccagcagcaacctcttcatggtggtggtggacagcagctgcctgtgtgagagcgtggcccccatcaccatggcccccatcgagatcagccagcacaatgaaagcctgaagtgtgagcggctgaaggcccagaagatcagaagaagacctgagagctgccacggcttccacccagaagaaaatgccagagaatgtggcggggcccccagcctgcaggcccagacagtgctgctgctgctgcccctgctgctgatgctgttcagcaggtag

SEQ ID NO: 145769 - DNA, 3276 bp, synthetic construct; identical to SEQ ID NO: 145767
  misc_feature 1..3276: note = Description of Artificial Sequence: Synthetic coding sequence
  source 1..3276: mol_type = other DNA

SEQ ID NO: 145770 - DNA, 1557 bp, synthetic construct
  misc_feature 1..1557: note = Description of Artificial Sequence: Synthetic coding sequence
  source 1..1557: mol_type = other DNA
gagatcctcttccaccagatgcagaaccagatcaagaggctggtggaggccgctgaggaggcccacctgaagcatgaatttgatgctgacctgcagtatgagtacttcaatgctgtgctgatcaatgaaagagacaaggatggcaacttcctggagctgggcaaggagttcatcctggccccaaatgaccacttcaacaacctgcctgtgaacatcagcctgagtgatgtgcaggtgcccaccaacatgtacaacaaggaccctgccatcgtgaatggagtgtactggagcgagagcctgaacaaggtgtttgtggacaactttgaccgggaccccagcctcatctggcagtactttggaagtgccaagggcttcttccggcagtacccaggcatcaagtgggagccagatgaaaatggagtcatcgcctttgactgcaggaacaggaagtggtacatccaggccgccaccagccccaaggatgtggtgatcctggtggatgtgtctggctccatgaagggcctgcggctgaccatcgccaagcagacagtgagcagcatcctggacaccctgggagatgatgacttcttcaacatcatcgcctacaatgaggagctgcactacgtggagccctgcctgaatggcaccctggtgcaggccgacaggaccaacaaggagcacttccgggagcacctggacaagctgtttgccaagggcatcggcatgctggacatcgccctgaatgaggccttcaacatcctgagtgacttcaaccacacaggccagggcagcatctgcagccaggccatcatgctgatcacagatggagctgtggacacctatgacaccatctttgccaagtacaactggccagacaggaaggtgcgcatcttcacctacctgattggccgggaggccgcctttgctgacaacctgaagtggatggcctgtgccaacaagggcttcttcacccagatcagcaccctggctgatgtgcaggagaatgtgatggagtacctgcacgtgctgagccggcccaaggtgattgaccaggagcatgatgtggtgtggacagaggcctacatcgacagcaccctgacagatgaccagggccctgtgctgatgaccaccgtggccatgcctgtgttcagcaagcagaatgagaccaggagcaagggcatcctgctgggcgtggtgggcacagatgtgcctgtgaaggagctgctgaagaccatccccaagtacaagctgggcatccacggctacgcctttgccatcaccaacaacggctacatcctgacccaccctgagctgcggctgctgtatgaggagggcaagaagaggaggaagcccaactacagctctgtggacctgtctgaggtggagtgggaggacagagatgatgtgctgagaaatgccatggtgaacaggaagacaggcaagttctccatggaggtgaagaagacagtggacaagggcttccgctgtggggccttccagaggtcctgggagatcttcctgccccgggagtgcaaccacagaagaagacctgcctag

SEQ ID NO: 145771 - DNA, 3276 bp, synthetic construct; identical to SEQ ID NO: 145767
  misc_feature 1..3276: note = Description of Artificial Sequence: Synthetic coding sequence
  source 1..3276: mol_type = other DNA

SEQ ID NO: 145772 - DNA, 1578 bp, synthetic construct
  misc_feature 1..1578: note = Description of Artificial Sequence: Synthetic coding sequence
  source 1..1578: mol_type = other DNA
atggaggagatgttccacaagaagtctgaggccgtgcggcggctggtggaggccgctgaggaggcccacctgaagcatgaatttgatgctgacctgcagtatgagtacttcaatgctgtgctgatcaatgaaagagacaaggatggcaacttcctggagctgggcaaggagttcatcctggccccaaatgaccacttcaacaacctgcctgtgaacatcagcctgagtgatgtgcaggtgcccaccaacatgtacaacaaggaccctgccatcgtgaatggagtgtactggagcgagagcctgaacaaggtgtttgtggacaactttgaccgggaccccagcctcatctggcagtacttcggcagcgccaagggcttcttccggcagtacccaggcatcaagtgggagccagatgaaaatggagtgattgcctttgactgcaggaacaggaagtggtacatccaggccgccaccagccccaaggatgtggtgatcctggtggatgtgtctggctccatgaagggcctgcggctgaccatcgccaagcagacagtgagcagcatcctggacaccctgggagatgatgacttcttcaacatcatcgcctacaatgaggagctgcactacgtggagccctgcctgaatggcaccctggtgcaggccgacaggaccaacaaggagcacttccgggagcacctggacaagctgtttgccaagggcatcggcatgctggacatcgccctgaatgaggccttcaacatcctgagtgacttcaaccacacaggccagggcagcatctgcagccaggccatcatgctgatcacagatggagctgtggacacctatgacaccatctttgccaagtacaactggccagacaggaaggtgcgcatcttcacctacctgattggccgggaggccgcctttgctgacaacctgaagtggatggcctgtgccaacaagggcttcttcacccagatcagcaccctggctgatgtgcaggagaatgtgatggagtacctgcacgtgctgagccggcccaaggtgattgaccaggagcatgatgtggtgtggacagaggcctacatcgacagcaccctgccccaggcccagaagctgacagatgaccagggccctgtgctgatgaccaccgtggccatgcctgtgttcagcaagcagaatgagaccaggagcaagggcatcctgctgggcgtggtgggcacagatgtgcctgtgaaggagctgctgaagaccatccccaagtacaagctgggcatccacggctacgcctttgccatcaccaacaacggctacatcctgacccaccctgagctgcggctgctgtatgaggagggcaagaagaggaggaagcccaactacagctctgtggacctgtctgaggtggagtgggaggacagagatgatgtgctgagaaatgccatggtgaacaggaagacaggcaagttctccatggaggtgaagaagacagtggacaagggcttccgctgtggggccttccagaggtcctgggagatcttcctgccccgggagtgcaaccacagaagaagacctgcctag

SEQ ID NO: 145773 - DNA, 2994 bp, synthetic construct
  misc_feature 1..2994: note = Description of Artificial Sequence: Synthetic coding sequence
  source 1..2994: mol_type = other DNA
atggaggagatgttccacaagaagtctgaggccgtgcggcggctggtggaggccgctgaggaggcccacctgaagcatgaatttgatgctgacctgcagtatgagtacttcaatgctgtgctgatcaatgaaagagacaaggatggcaacttcctggagctgggcaaggagttcatcctggccccaaatgaccacttcaacaacctgcctgtgaacatcagcctgagtgatgtgcaggtgcccaccaacatgtacaacaaggaccctgccatcgtgaatggagtgtactggagcgagagcctgaacaaggtgtttgtggacaactttgaccgggaccccagcctcatctggcagtacttcggcagcgccaagggcttcttccggcagtacccaggcatcaagtgggagccagatgaaaatggagtgattgcctttgactgcaggaacaggaagtggtacatccaggccgccaccagccccaaggatgtggtgatcctggtggatgtgtctggctccatgaagggcctgcggctgaccatcgccaagcagacagtgagcagcatcctggacaccctgggagatgatgacttcttcaacatcatcgcctacaatgaggagctgcactacgtggagccctgcctgaatggcaccctggtgcaggccgacaggaccaacaaggagcacttccgggagcacctggacaagctgtttgccaagggcatcggcatgctggacatcgccctgaatgaggccttcaacatcctgagtgacttcaaccacacaggccagggcagcatctgcagccaggccatcatgctgatcacagatggagctgtggacacctatgacaccatctttgccaagtacaactggccagacaggaaggtgcgcatcttcacctacctgattggccgggaggccgcctttgctgacaacctgaagtggatggcctgtgccaacaagggcttcttcacccagatcagcaccctggctgatgtgcaggagaatgtgatggagtacctgcacgtgctgagccggcccaaggtgattgaccaggagcatgatgtggtgtggacagaggcctacatcgacagcaccctgccccaggcccagaagctgacagatgaccagggccctgtgctgatgaccaccgtggccatgcctgtgttcagcaagcagaatgagaccaggagcaagggcatcctgctgggcgtggtgggcacagatgtgcctgtgaaggagctgctgaagaccatccccaagtacaagctgggcatccacggctacgcctttgccatcaccaacaacggctacatcctgacccaccctgagctgcggctgctgtatgaggagggcaagaagaggaggaagcccaactacagctctgtggacctgtctgaggtggagtgggaggacagagatgatgtgctgagaaatgccatggtgaacaggaagacaggcaagttctccatggaggtgaagaagacagtggacaagggcaagagggtgctggtgatgaccaatgactactactacacagacatcaagggcacccccttcagcctgggcgtggccctgagccggggccacggcaagtacttcttcagaggaaatgtgaccatcgaggagggcctgcatgacctggagcacccagatgtgtccctggctgatgagtggagctactgcaacacagacctgcaccctgagcaccgccacctgagccagctggaggccatcaagctgtacctgaagggcaaggagcccctgctgcagtgtgacaaggagctgatccaggaggtgctgtttgatgctgtggtgtctgcccccatcgaggcctactggaccagcctggccctgaacaagtcagaaaattctgacaagggcgtggaggtggccttcctgggcaccaggacaggcctgagccgcatcaacctgtttgtgggcgctgagcagctgaccaaccaggacttcctgaaggccggggacaaggagaacatcttcaatgctgaccacttccccctgtggtacagaagagctgctgagcagatccctggcagctttgtgtacagcatccccttcagcactggacctgtgaacaagagcaatgtggtgacagccagcaccagcatccagctgctggatgagaggaagagccctgtggtggccgctgtgggcatccagatgaagctggagttcttccagaggaagttctggacagccagccggcagtgtgccagcctggatggcaagtgcagcatcagctgtgatgatgaaacagtgaactgctacctgattgacaacaacggcttcatcctggtgtctgaggactacacccagacaggagacttcttcggggagattgaaggagctgtgatgaacaagctgctgaccatgggcagcttcaagaggatcaccctgtatgactaccaggccatgtgccgggccaacaaggagagcagtgatggagcccacggcctgctggacccctacaatgccttcctgtctgctgtgaagtggatcatgacagagctggtgctcttcctggtggagttcaacctgtgctcctggtggcacagcgacatgacagccaaggcccagaagctgaagcagaccctggagccctgtgacacagagtacccagcctttgtgtctgagaggaccatcaaggagaccaccggcaacatcgcctgtgaggactgcagcaagagctttgtgatccagcagatccccagcagcaacctcttcatggtggtggtggacagcagctgcctgtgtgagagcgtggcccccatcaccatggcccccatcgagatccgctacaatgaaagcctgaagtgtgagcggctgaaggcccagaagatcagaagaagacctgagagctgccacggcttccaccctgaggagaatgcccgggagtgtggcggggcccccagcctgcaggcccagacagtgctgctgctgctgcccctgctgctgatgctgttcagcaggtag

SEQ ID NO: 145774 - DNA, 381 bp, synthetic construct
  misc_feature 1..381: note = Description of Artificial Sequence: Synthetic coding sequence
  source 1..381: mol_type = other DNA
atggaggagatgttccacaagaagtctgaggccgtgcggcggctggtggaggccgctgaggaggcccacctgaagcatgaatttgatgctgacctgcagtatgagtacttcaatgctgtgctgatcaatgaaagagacaaggatggcaacttcctggagctgggcaaggagttcatcctggccccaaatgaccacttcaacaacctgcctgtgaacatcagcctgagtgatgtgcaggtgcccaccaacatgtacaacaaggaccctgccatcgtgaatggagtgtactggagcgagagcctgaacaaggtgtttgtggacaactttgaccgggaccccagcctcatctggcagtacttcggcagcgccaagggcttctag

SEQ ID NO: 145775 - DNA, 2925 bp, synthetic construct
  misc_feature 1..2925: note = Description of Artificial Sequence: Synthetic coding sequence
  source 1..2925: mol_type = other DNA
atggtgtgtggctgcagcgccctgctgcccctgcccaacccccggcccaccatgcctgccacccccaacttcctggccaaccccagcagcagcagccgctggatccccctgcagcccatgcctgtggcctgggcctttgtgcagaagaccagcgccctgctgtggctgctgctgctgggcaccagcctgagccctgcctggggccaggccaagatccccctggagaccgtgaagctgtgggccgacaccttcggcggggacctgtacaacacagtgaccaagtacagcggcagcctgctgctgcagaagaagtacaaggatgtggagagcagcctgaagattgaggaggtggatggcctggagctggtgaggaagttcagcgaggacatggagaacatgctgcggaggaaggtggaggccgtgcagaacctggtggaggccgctgaggaggccgacctgaaccacgagttcaatgaaagcctggtgtttgactactacaacagcgtgctgatcaatgaaagagatgagaagggcaactttgtggagctgggcgctgagttcctgctggagagcaatgcccacttcagcaacctgcctgtgaacaccagcatcagctctgtgcagctgcccaccaacgtgtacaacaaggaccctgacatcctgaatggagtgtacatgtctgaggccctgaatgctgtgtttgtggagaacttccagagggaccccaccctgacctggcagtactttggaagtgccaccggcttcttccgcatctacccaggcatcaagtggaccccagatgaaaatggagtcatcacctttgactgcaggaacagaggctggtacatccaggccgccaccagccccaaggacatcgtcatcctggtggatgtgtctggctccatgaagggcctgaggatgaccatcgccaagcacaccatcaccaccatcctggacaccctgggagaaaatgacttcatcaacatcatcgcctacaatgactatgtgcactacatcgagccctgcttcaagggcatcctggtgcaggccgaccgggacaaccgggagcacttcaagctgctggtggaggagctgatggtgaagggcgtgggcgtggtggaccaggccctgcgggaggccttccagatcctgaagcagttccaggaggccaagcagggcagcctgtgcaaccaggccatcatgctgatcagtgatggagctgtggaggactatgagcctgtgtttgagaagtacaactggccagactgcaaggtgcgggtcttcacctacctgattggccgggaggtgtcctttgctgacaggatgaagtggatcgcctgcaacaacaagggctactacacccagatcagcaccctggccgacacccaggagaatgtgatggagtacctgcacgtgctgagccggcccatggtgatcaaccacgaccatgacatcatctggacagaggcctacatggacagcaagctgctgagcagccaggcccagagcctgaccctgctgaccaccgtggccatgcctgtgttcagcaagaagaatgagaccaggagccacggcatcctgctgggcgtggtgggcagtgatgtggccctgcgggagctgatgaagctggccccccgctacaagctgggcgtgcacggctacgccttcctgaacaccaacaacggctacatcctgagccacccagacctgcggcccctgtaccgggagggcaagaagctgaagcccaagcccaactacaacagcgtggacctgtctgaggtggagtgggaggaccaggccgagagcctgaggacagccatgatcaaccgggagaccggcaccctgtccatggatgtgaaggtgcccatggacaagggcaagagggtgctcttcctgaccaatgactacttcttcacagacatcagtgacacccccttcagcctgggcgtggtgctgagccggggccacggggagtacatcctgctgggcaacacctctgtggaggagggcctgcatgacctgctgcacccagacctggccctggccggggactggatctactgcatcacagacatcgaccctgaccacaggaagctgagccagctggaggccatgatccgcttcctgaccaggaaggaccctgacctggagtgtgatgaggagctggtgcgggaggtgctgtttgatgctgtggtgacagcccccatggaggcctactggacagccctggccctgaacatgtctgaggagagcgagcacgtggtggacatggccttcctgggcacccgggccggcctgctgcggagcagcctgtttgtgggcagcgagaaggtgtctgacaggaagttcctgaccccagaagatgaggcctctgtgttcaccctggaccgcttccccctgtggtaccggcaggccagcgagcaccctgctggcagctttgtgttcaacctgcgctgggccgagggccctgagagcgctggggagcccatggtggtgacagccagcacagctgtggccgtgacagtggacaagaggacagccatcgctgctgctgctggggtgcagatgaagctggagttcctgcagaggaagttctgggccgccacccggcagtgcagcacagtggatggcccctgcacccagagctgtgaggacagcgacctggactgctttgtgattgacaacaacggcttcatcctgatcagcaagaggagccgggagaccggccgcttcctgggggaggtggatggagctgtgctgacccagctgctgtccatgggcgtcttcagccaggtgaccatgtatgactaccaggccatgtgcaagcccagcagccaccaccacagcgctgcccagcccctggtgagccccatcagcgccttcctgacagccacccgctggctgctgcaggagctggtgctgtag

SEQ ID NO: 145776 - DNA, 3414 bp, synthetic construct
  misc_feature 1..3414: note = Description of Artificial Sequence: Synthetic coding sequence
  source 1..3414: mol_type = other DNA
atggtgtgtggctgcagcgccctgctgcccctgcccaacccccggcccaccatgcctgccacccccaacttcctggccaaccccagcagcagcagccgctggatccccctgcagcccatgcctgtggcctgggcctttgtgcagaagaccagcgccctgctgtggctgctgctgctgggcaccagcctgagccctgcctggggccaggccaagatccccctggagaccgtgaagctgtgggccgacaccttcggcggggacctgtacaacacagtgaccaagtacagcggcagcctgctgctgcagaagaagtacaaggatgtggagagcagcctgaagattgaggaggtggatggcctggagctggtgaggaagttcagcgaggacatggagaacatgctgcggaggaaggtggaggccgtgcagaacctggtggaggccgctgaggaggccgacctgaaccacgagttcaatgaaagcctggtgtttgactactacaacagcgtgctgatcaatgaaagagatgagaagggcaactttgtggagctgggcgctgagttcctgctggagagcaatgcccacttcagcaacctgcctgtgaacaccagcatcagctctgtgcagctgcccaccaacgtgtacaacaaggaccctgacatcctgaatggagtgtacatgtctgaggccctgaatgctgtgtttgtggagaacttccagagggaccccaccctgacctggcagtactttggaagtgccaccggcttcttccgcatctacccaggcatcaagtggaccccagatgaaaatggagtcatcacctttgactgcaggaacagaggctggtacatccaggccgccaccagccccaaggacatcgtcatcctggtggatgtgtctggctccatgaagggcctgaggatgaccatcgccaagcacaccatcaccaccatcctggacaccctgggagaaaatgacttcatcaacatcatcgcctacaatgactatgtgcactacatcgagccctgcttcaagggcatcctggtgcaggccgaccgggacaaccgggagcacttcaagctgctggtggaggagctgatggtgaagggcgtgggcgtggtggaccaggccctgcgggaggccttccagatcctgaagcagttccaggaggccaagcagggcagcctgtgcaaccaggccatcatgctgatcagtgatggagctgtggaggactatgagcctgtgtttgagaagtacaactggccagactgcaaggtgcgggtcttcacctacctgattggccgggaggtgtcctttgctgacaggatgaagtggatcgcctgcaacaacaagggctactacacccagatcagcaccctggccgacacccaggagaatgtgatggagtacctgcacgtgctgagccggcccatggtgatcaaccacgaccatgacatcatctggacagaggcctacatggacagcaagctgctgagcagccaggcccagagcctgaccctgctgaccaccgtggccatgcctgtgttcagcaagaagaatgagaccaggagccacggcatcctgctgggcgtggtgggcagtgatgtggccctgcgggagctgatgaagctggccccccgctacaagctgggcgtgcacggctacgccttcctgaacaccaacaacggctacatcctgagccacccagacctgcggcccctgtaccgggagggcaagaagctgaagcccaagcccaactacaacagcgtggacctgtctgaggtggagtgggaggaccaggccgagagcctgaggacagccatgatcaaccgggagaccggcaccctgtccatggatgtgaaggtgcccatggacaagggcaagagggtgctcttcctgaccaatgactacttcttcacagacatcagtgacacccccttcagcctgggcgtggtgctgagccggggccacggggagtacatcctgctgggcaacacctctgtggaggagggcctgcatgacctgctgcacccagacctggccctggccggggactggatctactgcatcacagacatcgaccctgaccacaggaagctgagccagctggaggccatgatccgcttcctgaccaggaaggaccctgacctggagtgtgatgaggagctggtgcgggaggtgctgtttgatgctgtggtgacagcccccatggaggcctactggacagccctggccctgaacatgtctgaggagagcgagcacgtggtggacatggccttcctgggcacccgggccggcctgctgcggagcagcctgtttgtgggcagcgagaaggtgtctgacaggaagttcctgaccccagaagatgaggcctctgtgttcaccctggaccgcttccccctgtggtaccggcaggccagcgagcaccctgctggcagctttgtgttcaacctgcgctgggccgagggccctgagagcgctggggagcccatggtggtgacagccagcacagctgtggccgtgacagtggacaagaggacagccatcgctgctgctgctggggtgcagatgaagctggagttcctgcagaggaagttctgggccgccacccggcagtgcagcacagtggatggcccctgcacccagagctgtgaggacagcgacctggactgctttgtgattgacaacaacggcttcatcctgatcagcaagaggagccgggagaccggccgcttcctgggggaggtggatggagctgtgctgacccagctgctgtccatgggcgtcttcagccaggtgaccatgtatgactaccaggccatgtgcaagcccagcagccaccaccacagcgctgcccagcccctggtgagccccatcagcgccttcctgacagccacccgctggctgctgcaggagctggtgctcttcctgctggagtggagcgtgtggggctcctggtatgacagaggagctgaggccaagagcgtcttccaccacagccacaagcacaagaagcaggaccccctgcagccctgtgacacagagtaccctgtgtttgtgtaccagcctgccatccgggaggccaacggcatcgtggagtgtggcccctgccagaaggtgtttgtggtgcagcagatccccaacagcaacctgctgctgctggtgacagaccccacctgtgactgcagcatcttcccccctgtgctgcaggaggccacagaggtgaagtacaatgcctctgtgaagtgtgacaggatgaggagccagaagctgcggcggcggccagacagctgccacgccttccaccctgaggagaatgcccaggactgtggcggggccagtgacaccagcgccagcccccccctgctgctgctgcctgtgtgtgcctggggcctgctgccccagctgctgaggtag

SEQ ID NO: 145777 - DNA, 3222 bp, synthetic construct
  misc_feature 1..3222: note = Description of Artificial Sequence: Synthetic coding sequence
  source 1..3222: mol_type = other DNA
atggctgtggccctgggcaccaggagaagagacagagtgaagctgtgggccgacaccttcggcggggacctgtacaacacagtgaccaagtacagcggcagcctgctgctgcagaagaagtacaaggatgtggagagcagcctgaagattgaggaggtggatggcctggagctggtgaggaagttcagcgaggacatggagaacatgctgcggaggaaggtggaggccgtgcagaacctggtggaggccgctgaggaggccgacctgaaccacgagttcaatgaaagcctggtgtttgactactacaacagcgtgctgatcaatgaaagagatgagaagggcaactttgtggagctgggcgctgagttcctgctggagagcaatgcccacttcagcaacctgcctgtgaacaccagcatcagctctgtgcagctgcccaccaacgtgtacaacaaggaccctgacatcctgaatggagtgtacatgtctgaggccctgaatgctgtgtttgtggagaacttccagagggaccccaccctgacctggcagtactttggaagtgccaccggcttcttccgcatctacccaggcatcaagtggaccccagatgaaaatggagtcatcacctttgactgcaggaacagaggctggtacatccaggccgccaccagccccaaggacatcgtcatcctggtggatgtgtctggctccatgaagggcctgaggatgaccatcgccaagcacaccatcaccaccatcctggacaccctgggagaaaatgacttcatcaacatcatcgcctacaatgactatgtgcactacatcgagccctgcttcaagggcatcctggtgcaggccgaccgggacaaccgggagcacttcaagctgctggtggaggagctgatggtgaagggcgtgggcgtggtggaccaggccctgcgggaggccttccagatcctgaagcagttccaggaggccaagcagggcagcctgtgcaaccaggccatcatgctgatcagtgatggagctgtggaggactatgagcctgtgtttgagaagtacaactggccagactgcaaggtgcgggtcttcacctacctgattggccgggaggtgtcctttgctgacaggatgaagtggatcgcctgcaacaacaagggctactacacccagatcagcaccctggccgacacccaggagaatgtgatggagtacctgcacgtgctgagccggcccatggtgatcaaccacgaccatgacatcatctggacagaggcctacatggacagcaagctgctgagcagccaggcccagagcctgaccctgctgaccaccgtggccatgcctgtgttcagcaagaagaatgagaccaggagccacggcatcctgctgggcgtggtgggcagtgatgtggccctgcgggagctgatgaagctggccccccgctacaagctgggcgtgcacggctacgccttcctgaacaccaacaacggctacatcctgagccacccagacctgcggcccctgtaccgggagggcaagaagctgaagcccaagcccaactacaacagcgtggacctgtctgaggtggagtgggaggaccaggccgagagcctgaggacagccatgatcaaccgggagaccggcaccctgtccatggatgtgaaggtgcccatggacaagggcaagagggtgctcttcctgaccaatgactacttcttcacagacatcagtgacacccccttcagcctgggcgtggtgctgagccggggccacggggagtacatcctgctgggcaacacctctgtggaggagggcctgcatgacctgctgcacccagacctggccctggccggggactggatctactgcatcacagacatcgaccctgaccacaggaagctgagccagctggaggccatgatccgcttcctgaccaggaaggaccctgacctggagtgtgatgaggagctggtgcgggaggtgctgtttgatgctgtggtgacagcccccatggaggcctactggacagccctggccctgaacatgtctgaggagagcgagcacgtggtggacatggccttcctgggcacccgggccggcctgctgcggagcagcctgtttgtgggcagcgagaaggtgtctgacaggaagttcctgaccccagaagatgaggcctctgtgttcaccctggaccgcttccccctgtggtaccggcaggccagcgagcaccctgctggcagctttgtgttcaacctgcgctgggccgagggccctgagagcgctggggagcccatggtggtgacagccagcacagctgtggccgtgacagtggacaagaggacagccatcgctgctgctgctggggtgcagatgaagctggagttcctgcagaggaagttctgggccgccacccggcagtgcagcacagtggatggcccctgcacccagagctgtgaggacagcgacctggactgctttgtgattgacaacaacggcttcatcctgatcagcaagaggagccgggagaccggccgcttcctgggggaggtggatggagctgtgctgacccagctgctgtccatgggcgtcttcagccaggtgaccatgtatgactaccaggccatgtgcaagcccagcagccaccaccacagcgctgcccagcccctggtgagccccatcagcgccttcctgacagccacccgctggctgctgcaggagctggtgctcttcctgctggagtggagcgtgtggggctcctggtatgacagaggagctgaggccaagagcgtcttccaccacagccacaagcacaagaagcaggaccccctgcagccctgtgacacagagtaccctgtgtttgtgtaccagcctgccatccgggaggccaacggcatcgtggagtgtggcccctgccagaaggtgtttgtggtgcagcagatccccaacagcaacctgctgctgctggtgacagaccccacctgtgactgcagcatcttcccccctgtgctgcaggaggccacagaggtgaagtacaatgcctctgtgaagtgtgacaggatgaggagccagaagctgcggcggcggccagacagctgccacgccttccaccctgaggagaatgcccaggactgtggcggggccagtgacaccagcgccagcccccccctgctgctgctgcctgtgtgtgcctggggcctgctgccccagctgctgaggtag

SEQ ID NO: 145778 - DNA, 615 bp, synthetic construct
  misc_feature 1..615: note = Description of Artificial Sequence: Synthetic coding sequence
  source 1..615: mol_type = other DNA
atgtatgactaccaggccatgtgcaagcccagcagccaccaccacagcgctgcccagcccctggtgagccccatcagcgccttcctgacagccacccgctggctgctgcaggagctggtgctcttcctgctggagtggagcgtgtggggctcctggtatgacagaggagctgaggccaagtctgtgttccaccacagccacaagcacaagaagcaggaccccctgcagccctgtgacacagagtaccctgtgtttgtgtaccagcctgccatccgggaggccaatggaattgtggagtgtggcccctgccagaaggtgtttgtggtgcagcagatccccaacagcaacctgctgctgctggtgacagaccccacctgtgactgcagcatcttcccccctgtgctgcaggaggccacagaggtgaagtacaatgcctctgtgaagtgtgacaggatgaggagccagaagctgcggcggcggccagacagctgccacgccttccacccagaagaaaatgcccaggactgtggcggggccagtgacaccagcgccagcccccccctgctgctgctgcctgtgtgtgcctggggcctgctgccccagctgctgaggtag

SEQ ID NO: 145779 - DNA, 615 bp, synthetic construct; identical to SEQ ID NO: 145778
  misc_feature 1..615: note = Description of Artificial Sequence: Synthetic coding sequence
  source 1..615: mol_type = other DNA

SEQ ID NO: 145780 - DNA, 804 bp, synthetic construct
  misc_feature 1..804: note = Description of Artificial Sequence: Synthetic coding sequence
  source 1..804: mol_type = other DNA
atgaagctggagttcctgcagaggaagttctgggccgccacccggcaggacctggactgctttgtgattgacaacaacggcttcatcctgatcagcaagaggagccgggagaccggccgcttcctgggggaggtggatggagctgtgctgacccagctgctgtccatgggcgtcttcagccaggtgaccatgtatgactaccaggccatgtgcaagcccagcagccaccaccacagcgctgcccagcccctggtgagccccatcagcgccttcctgacagccacccgctggctgctgcaggagctggtgctcttcctgctggagtggagcgtgtggggctcctggtatgacagaggagctgaggccaagagcgtcttccaccacagccacaagcacaagaagcaggaccccctgcagccctgtgacacagagtaccctgtgtttgtgtaccagcctgccatccgggaggccaacggcatcgtggagtgtggcccctgccagaaggtgtttgtggtgcagcagatccccaacagcaacctgctgctgctggtgacagaccccacctgtgactgcagcatcttcccccctgtgctgcaggaggccacagaggtgaagtacaatgcctctgtgaagtgtgacaggatgaggagccagaagctgcggcggcggccagacagctgccacgccttccaccctgaggagaatgcccaggactgtggcggggccagtgacaccagcgccagcccccccctgctgctgctgcctgtgtgtgcctggggcctgctgccccagctgctgaggtag

SEQ ID NO: 145781 - DNA, 615 bp, synthetic construct; identical to SEQ ID NO: 145778
  misc_feature 1..615: note = Description of Artificial Sequence: Synthetic coding sequence
  source 1..615: mol_type = other DNA

SEQ ID NO: 145782 - DNA, 1572 bp, synthetic construct
  misc_feature 1..1572: note = Description of Artificial Sequence: Synthetic coding sequence
  source 1..1572: mol_type = other DNA
atggtgcagaagacctccatgagccggggcccctacccacccagccaggagatccccatggaggtgtttgaccccagcccccagggcaagtacagcaagaggaagggccgcttcaagagaagtgatggcagcaccagcagtgacaccaccagcaacagctttgtgcggcagggcagcgctgagagctacaccagccggcccagcgacagtgatgtgtccctggaggaggaccgggaggccctgaggaaggaggccgagcggcaggccctggcccagctggagaaggccaagaccaagcctgtggcctttgctgtgaggaccaacgtgggctacaaccccagccctggagatgaggtgcctgtgcagggcgtggccatcacctttgagcccaaggacttcctgcacatcaaggagaagtacaacaatgactggtggattggccgcctggtgaaggagggctgtgaggtgggcttcatccccagccctgtgaagctggacagcctgcggctgctgcaggagcagaagctgcggcagaaccggctgggcagcagcaagagcggggacaacagcagcagcagcctgggagatgtggtgacaggcacccggcggcccaccccaccagccagcggaaatgagatgaccaacctggcctttgagctggaccccctggagctggaggaggaggaggccgagctgggggagcagagcggcagcgccaagacctctgtgtcctctgtgaccaccccaccaccccacggcaagaggatccccttcttcaagaagacagagcacgtgcccccctatgatgtggtgcccagcatgaggcccatcatcctggtgggccccagcctgaagggctatgaggtgacagacatgatgcagaaggccctgtttgacttcctgaagcacagatttgatggccgcatcagcatcaccagggtgacagctgacatcagcctggccaagaggtctgtgctgaacaaccccagcaagcacatcatcatcgagaggagcaacaccaggagcagcctggccgaggtgcagagcgagattgagcgcatctttgagctggcccggaccctgcagctggtggccctggatgctgacaccatcaaccacccagcccagctgagcaagaccagcctggcccccatcatcgtgtacatcaagatcaccagccccaaggtgctgcagaggctcatcaagagccggggcaagagccagagcaagcacctgaatgtgcagattgctgccagcgagaagctggcccagtgccccccagagatgtttgacatcatcctggatgagaaccagctggaggatgcctgtgagcacctggccgagtacctggaggcctactggaaggccacccacccccccagcagcaccccacccaaccccctgctgaacagaaccatggccacagctgccctggccgccagccctgcccctgtgagcaacctgcaggtgcaggtgctgaccagcctgcggaggaacctgggcttctggggcggcctggagagcagccagaggggctctgtggtgccccaggagcaggagcacgccatgtag

SEQ ID NO: 145783 - DNA, 1797 bp, synthetic construct
  misc_feature 1..1797: note = Description of Artificial Sequence: Synthetic coding sequence
  source 1..1797: mol_type = other DNA
atggtgcagaagacctccatgagccggggcccctacccacccagccaggagatccccatggaggtgtttgaccccagcccccagggcaagtacagcaagaggaagggccgcttcaagagaagtgatggcagcaccagcagtgacaccaccagcaacagctttgtgcggcagggcagcgctgagagctacaccagccggcccagcgacagtgatgtgtccctggaggaggaccgggaggccctgaggaaggaggccgagcggcaggccctggcccagctggagaaggccaagaccaagcctgtggcctttgctgtgaggaccaacgtgggctacaaccccagccctggagatgaggtgcctgtgcagggcgtggccatcacctttgagcccaaggacttcctgcacatcaaggagaagtacaacaatgactggtggattggccgcctggtgaaggagggctgtgaggtgggcttcatccccagccctgtgaagctggacagcctgcggctgctgcaggagcagaagctgcggcagaaccggctgggcagcagcaagagcggggacaacagcagcagcagcctgggagatgtggtgacaggcacccggcggcccaccccaccagccagcgccaagcagaagcagaagagcacagaacatgtgcccccctatgatgtggtgcccagcatgaggcccatcatcctggtgggccccagcctgaagggctatgaggtgacagacatgatgcagaaggccctgtttgacttcctgaagcacagatttgatggccgcatcagcatcaccagggtgacagctgacatcagcctggccaagaggtctgtgctgaacaaccccagcaagcacatcatcatcgagaggagcaacaccaggagcagcctggccgaggtgcagagcgagattgaaagaatttttgagctggcccggaccctgcagctggtggccctggatgctgacaccatcaaccacccagcccagctgagcaagaccagcctggcccccatcatcgtgtacatcaagatcaccagccccaaggtgctgcagaggctcatcaagagccggggcaagagccagagcaagcacctgaatgtgcagattgctgccagcgagaagctggcccagtgccccccagagatgtttgacatcatcctggatgagaaccagctggaggatgcctgtgagcacctggccgagtacctggaggcctactggaaggccacccacccccccagcagcaccccacccaaccccctgctgaacagaaccatggccacagctgccctggccgccagccctgcccctgtgagcaacctgcagggcccctacctggccagcggggaccagcccctggagcgggccactggagagcacgcctccatgcatgagtacccaggagagctgggccagcccccaggcctgtaccccagcagccaccccccaggccgggccggcaccctgcgggccctgagccggcaggacacctttgatgctgacaccccaggcagcaggaacagcgcctacacagagctgggggacagctgtgtggacatggagacagaccccagcgagggccctggcctgggggaccctgctgggggcggcaccccaccagcccggcagggctcctgggaggatgaggaggaggactatgaggaggagctgacagacaacagaaacagaggaagaaacaaggcccgctactgtgccgagggcggcggccctgtgctgggcaggaacaagaatgagctggagggctggggccggggcgtgtacatcagatag

SEQ ID NO: 145784 - DNA, 1437 bp, synthetic construct
  misc_feature 1..1437: note = Description of Artificial Sequence: Synthetic coding sequence
  source 1..1437: mol_type = other DNA
atggtgcagaagacctccatgagccggggcccctacccacccagccaggagatccccatggaggtgtttgaccccagcccccagggcaagtacagcaagaggaagggccgcttcaagagaagtgatggcagcaccagcagtgacaccaccagcaacagctttgtgcggcagggcagcgctgagagctacaccagccggcccagcgacagtgatgtgtccctggaggaggaccgggaggccctgaggaaggaggccgagcggcaggccctggcccagctggagaaggccaagaccaagcctgtggcctttgctgtgaggaccaacgtgggctacaaccccagccctggagatgaggtgcctgtgcagggcgtggccatcacctttgagcccaaggacttcctgcacatcaaggagaagtacaacaatgactggtggattggccgcctggtgaaggagggctgtgaggtgggcttcatccccagccctgtgaagctggacagcctgcggctgctgcaggagcagaagctgcggcagaaccggctgggcagcagcaagagcggggacaacagcagcagcagcctgggagatgtggtgacaggcacccggcggcccaccccaccagccagcgccaagcagaagcagaagagcacagaacatgtgcccccctatgatgtggtgcccagcatgaggcccatcatcctggtgggccccagcctgaagggctatgaggtgacagacatgatgcagaaggccctgtttgacttcctgaagcacagatttgatggccgcatcagcatcaccagggtgacagctgacatcagcctggccaagaggtctgtgctgaacaaccccagcaagcacatcatcatcgagaggagcaacaccaggagcagcctggccgaggtgcagagcgagattgaaagaatttttgagctggcccggaccctgcagctggtggccctggatgctgacaccatcaaccacccagcccagctgagcaagaccagcctggcccccatcatcgtgtacatcaagatcaccagccccaaggtgctgcagaggctcatcaagagccggggcaagagccagagcaagcacctgaatgtgcagattgctgccagcgagaagctggcccagtgccccccagagatgtttgacatcatcctggatgagaaccagctggaggatgcctgtgagcacctggccgagtacctggaggcctactggaaggccacccacccccccagcagcaccccacccaaccccctgctgaacagaaccatggccacagctgccctggccgccagccctgcccctgtgagcaacctgcaggtgcaggtgctgaccagcctgcggaggaacctgggcttctggggcggcctggagagcagccagaggggctctgtggtgccccaggagcaggagcacgccatgtag

SEQ ID NO: 145785 - DNA, 1290 bp, synthetic construct
  misc_feature 1..1290: note = Description of Artificial Sequence: Synthetic coding sequence
  source 1..1290: mol_type = other DNA
atggaggcccccagcaggacagtggtggtgggcagcgctgagagctacaccagccggcccagcgacagtgatgtgtccctggaggaggaccgggaggccctgaggaaggaggccgagcggcaggccctggcccagctggagaaggccaagaccaagcctgtggcctttgctgtgaggaccaacgtgggctacaaccccagccctggagatgaggtgcctgtgcagggcgtggccatcacctttgagcccaaggacttcctgcacatcaaggagaagtacaacaatgactggtggattggccgcctggtgaaggagggctgtgaggtgggcttcatccccagccctgtgaagctggacagcctgcggctgctgcaggagcagaagctgcggcagaaccggctgggcagcagcaagagcggggacaacagcagcagcagcctgggagatgtggtgacaggcacccggcggcccaccccaccagccagtgacagccctgtgcagacagagcacgtgcccccctatgatgtggtgcccagcatgaggcccatcatcctggtgggccccagcctgaagggctatgaggtgacagacatgatgcagaaggccctgtttgacttcctgaagcacagatttgatggccgcatcagcatcaccagggtgacagctgacatcagcctggccaagaggtctgtgctgaacaaccccagcaagcacatcatcatcgagaggagcaacaccaggagcagcctggccgaggtgcagagcgagattgagcgcatctttgagctggcccggaccctgcagctggtggccctggatgctgacaccatcaaccacccagcccagctgagcaagaccagcctggcccccatcatcgtgtacatcaagatcaccagccccaaggtgctgcagaggctcatcaagagccggggcaagagccagagcaagcacctgaatgtgcagattgctgccagcgagaagctggcccagtgccccccagagatgtttgacatcatcctggatgagaaccagctggaggatgcctgtgagcacctggccgagtacctggaggcctactggaaggccacccacccccccagcagcaccccacccaaccccctgctgaacagaaccatggccacagctgccctggccgccagccctgcccctgtgagcaacctgcaggtgcaggtgctgaccagcctgcggaggaacctgggcttctggggcggcctggagagcagccagaggggctctgtggtgccccaggagcaggagcacgccatgtag

SEQ ID NO: 145786 - DNA, 1647 bp, synthetic construct
  misc_feature 1..1647: note = Description of Artificial Sequence: Synthetic coding sequence
  source 1..1647: mol_type = other DNA
tctggcagcctgtacttccagggcagcgctgagagctacaccagccggcccagcgacagtgatgtgtccctggaggaggaccgggaggccctgaggaaggaggccgagcggcaggccctggcccagctggagaaggccaagaccaagcctgtggcctttgctgtgaggaccaacgtgggctacaaccccagccctggagatgaggtgcctgtgcagggcgtggccatcacctttgagcccaaggacttcctgcacatcaaggagaagtacaacaatgactggtggattggccgcctggtgaaggagggctgtgaggtgggcttcatccccagccctgtgaagctggacagcctgcggctgctgcaggagcagaagctgcggcagaaccggctgggcagcagcaagagcggggacaacagcagcagcagcctgggagatgtggtgacaggcacccggcggcccaccccaccagccagcggcaagagccacagacatgccacagaacatgtgcccccctatgatgtggtgcccagcatgaggcccatcatcctggtgggccccagcctgaagggctatgaggtgacagacatgatgcagaaggccctgtttgacttcctgaagcacagatttgatggccgcatcagcatcaccagggtgacagctgacatcagcctggccaagaggtctgtgctgaacaaccccagcaagcacatcatcatcgagaggagcaacaccaggagcagcctggccgaggtgcagagcgagattgaaagaatttttgagctggcccggaccctgcagctggtggccctggatgctgacaccatcaaccacccagcccagctgagcaagaccagcctggcccccatcatcgtgtacatcaagatcaccagccccaaggtgctgcagaggctcatcaagagccggggcaagagccagagcaagcacctgaatgtgcagattgctgccagcgagaagctggcccagtgccccccagagatgtttgacatcatcctggatgagaaccagctggaggatgcctgtgagcacctggccgagtacctggaggcctactggaaggccacccacccccccagcagcaccccacccaaccccctgctgaacagaaccatggccacagctgccctggccgccagccctgcccctgtgagcaacctgcagggcccctacctggccagcggggaccagcccctggagcgggccactggagagcacgcctccatgcatgagtacccaggagagctgggccagcccccaggcctgtaccccagcagccaccccccaggccgggccggcaccctgcgggccctgagccggcaggacacctttgatgctgacaccccaggcagcaggaacagcgcctacacagagctgggggacagctgtgtggacatggagacagaccccagcgagggccctggcctgggggaccctgctgggggcggcaccccaccagcccggcagggctcctgggaggatgaggaggaggactatgaggaggagctgacagacaacagaaacagaggaagaaacaaggcccgctactgtgccgagggcggcggccctgtgctgggcaggaacaagaatgagctggagggctggggccggggcgtgtacatcagatag

SEQ ID NO: 145787 - DNA, 1899 bp, synthetic construct
  misc_feature 1..1899: note = Description of Artificial Sequence: Synthetic coding sequence
  source 1..1899: mol_type = other DNA
atgaaccagggcagcggcctggacctgctgaagatctcctatggcaagggggcccggaggaagaaccgcttcaagggcagtgatggcagcaccagcagtgacaccaccagcaacagctttgtgcggcagggcagcgctgacagctacaccagccggcccagcgacagtgatgtgtccctggaggaggaccgggaggccgtgcggcgggaggccgagcggcaggcccaggcccagctggagaaggccaagaccaagcctgtggcctttgctgtgaggaccaacgtgtcctacagcgctgcccatgaagatgatgtgcctgtgcccggcatggccatcagctttgaggccaaggacttcctgcacgtgaaggagaagttcaacaatgactggtggattggccgcctggtgaaggagggctgtgagatcggcttcatccccagccctgtgaagctggagaacatgaggctgcagcacgagcagagggccaagcagggcaagttctacagcagcaagagcggcggcaacagcagcagcagcctgggggacatcgtgcccagcagcaggaagagcaccccacccagcagcgccattgatattgatgccaccggcctggatgctgaggagaatgacatcccagccaaccacaggagccccaagcccagcgccaacagcgtgaccagcccccacagcaaggagaagaggatgcccttcttcaagaagacagagcacaccccaccctatgatgtggtgcccagcatgaggcctgtggtgctggtgggccccagcctgaagggctatgaggtgacagacatgatgcagaaggccctgtttgacttcctgaagcacagatttgagggccgcatcagcatcaccagggtgacagctgacatcagcctggccaagaggtctgtgctgaacaaccccagcaagcacgccatcatcgagaggagcaacaccaggagcagcctggccgaggtgcagagcgagattgaaagaatttttgagctggcccggaccctgcagctggtggtgctggatgctgacaccatcaaccacccagcccagctgagcaagaccagcctggcccccatcatcgtgtatgtgaagatcagcagccccaaggtgctgcagaggctcatcaagagccggggcaagagccaggccaagcacctgaatgtgcagatggtggccgctgacaagctggcccagtgccccccagagctgtttgatgtgatcctggatgagaaccagctggaggatgcctgtgagcacctggccgactacctggaggcctactggaaggccacccacccccccagcagcagcctgcccaaccccctgctgagcaggaccctggccaccagcagcctgcccctgagccccaccctggccagcaacagccagggcagccagggcgaccagaggacagacagaagtgcccccatccgcagcgccagccaggccgaggaggagcccagcgtggagcctgtgaagaagagccagcacaggagcagcagcagcgccccccaccacaaccacaggagcggcaccagccggggcctgagccggcaggagacctttgattctgagacccaggagagccgggacagcgcctacgtggagcccaaggaggactacagccatgaccacgtggaccactacgccagccaccgggaccacaaccacagagatgagacccacggcagcagtgaccaccgccaccgggagagccgccacaggagcagagatgtggaccgggagcaggaccacaatgaatgcaacaagcagaggagccgccacaagagcaaggaccgctactgtgagaaggatggagaggtgatcagcaagaagagaaatgaagctggggagtggaacagagatgtgtacatccggcagtag

SEQ ID NO: 145788 - DNA, 1983 bp, synthetic construct
  misc_feature 1..1983: note = Description of Artificial Sequence: Synthetic coding sequence
  source 1..1983: mol_type = other DNA
atggtgcagagggacatgagcaagagccccccaacagctgctgctgctgtggcccaggagatccagatggagctgctggagaatgtggccccagctggggccctgggcgccgccgcccagagctatggcaagggggcccggaggaagaaccgcttcaagggcagtgatggcagcaccagcagtgacaccaccagcaacagctttgtgcggcagggcagcgctgacagctacaccagccggcccagcgacagtgatgtgtccctggaggaggaccgggaggccgtgcggcgggaggccgagcggcaggcccaggcccagctggagaaggccaagaccaagcctgtggcctttgctgtgaggaccaacgtgtcctacagcgctgcccatgaagatgatgtgcctgtgcccggcatggccatcagctttgaggccaaggacttcctgcacgtgaaggagaagttcaacaatgactggtggattggccgcctggtgaaggagggctgtgagatcggcttcatccccagccctgtgaagctggagaacatgaggctgcagcacgagcagagggccaagcagggcaagttctacagcagcaagagcggcggcaacagcagcagcagcctgggggacatcgtgcccagcagcaggaagagcaccccacccagcagcgccattgatattgatgccaccggcctggatgctgaggagaatgacatcccagccaaccacaggagccccaagcccagcgccaacagcgtgaccagcccccacagcaaggagaagaggatgcccttcttcaagaagacagagcacaccccaccctatgatgtggtgcccagcatgaggcctgtggtgctggtgggccccagcctgaagggctatgaggtgacagacatgatgcagaaggccctgtttgacttcctgaagcacagatttgagggccgcatcagcatcaccagggtgacagctgacatcagcctggccaagaggtctgtgctgaacaaccccagcaagcacgccatcatcgagaggagcaacaccaggagcagcctggccgaggtgcagagcgagattgaaagaatttttgagctggcccggaccctgcagctggtggtgctggatgctgacaccatcaaccacccagcccagctgagcaagaccagcctggcccccatcatcgtgtatgtgaagatcagcagccccaaggtgctgcagaggctcatcaagagccggggcaagagccaggccaagcacctgaatgtgcagatggtggccgctgacaagctggcccagtgccccccagagctgtttgatgtgatcctggatgagaaccagctggaggatgcctgtgagcacctggccgactacctggaggcctactggaaggccacccacccccccagcagcagcctgcccaaccccctgctgagcaggaccctggccaccagcagcctgcccctgagccccaccctggccagcaacagccagggcagccagggcgaccagaggacagacagaagtgcccccatccgcagcgccagccaggccgaggaggagcccagcgtggagcctgtgaagaagagccagcacaggagcagcagcagcgccccccaccacaaccacaggagcggcaccagccggggcctgagccggcaggagacctttgattctgagacccaggagagccgggacagcgcctacgtggagcccaaggaggactacagccatgaccacgtggaccactacgccagccaccgggaccacaaccacagagatgagacccacggcagcagtgaccaccgccaccgggagagccgccacaggagcagagatgtggaccgggagcaggaccacaatgaatgcaacaagcagaggagccgccacaagagcaaggaccgctactgtgagaaggatggagaggtgatcagcaagaagagaaatgaagctggggagtggaacagagatgtgtacatccggcagtag

SEQ ID NO: 145789 - DNA, 1911 bp, synthetic construct
  misc_feature 1..1911: note = Description of Artificial Sequence: Synthetic coding sequence
  source 1..1911: mol_type = other DNA
atggtgcagagggacatgagcaagagccccccaacagctgctgctgctgtggcccaggagatccagatggagctgctggagaatgtggccccagctggggccctgggcgccgccgcccagagctatggcaagggggcccggaggaagaaccgcttcaagggcagtgatggcagcaccagcagtgacaccaccagcaacagctttgtgcggcagggcagcgctgacagctacaccagccggcccagcgacagtgatgtgtccctggaggaggaccgggaggccgtgcggcgggaggccgagcggcaggcccaggcccagctggagaaggccaagaccaagcctgtggcctttgctgtgaggaccaacgtgtcctacagcgctgcccatgaagatgatgtgcctgtgcccggcatggccatcagctttgaggccaaggacttcctgcacgtgaaggagaagttcaacaatgactggtggattggccgcctggtgaaggagggctgtgagatcggcttcatccccagccctgtgaagctggagaacatgaggctgcagcacgagcagagggccaagcagggcaagttctacagcagcaagagcggcggcaacagcagcagcagcctgggggacatcgtgcccagcagcaggaagagcaccccacccagcagcggggccaagtctgcagatgagcaggaccagtggaagacagctggcctcttctggaggttcaccacagagcacaccccaccctatgatgtggtgcccagcatgaggcctgtggtgctggtgggccccagcctgaagggctatgaggtgacagacatgatgcagaaggccctgtttgacttcctgaagcacagatttgagggccgcatcagcatcaccagggtgacagctgacatcagcctggccaagaggtctgtgctgaacaaccccagcaagcacgccatcatcgagaggagcaacaccaggagcagcctggccgaggtgcagagcgagattgaaagaatttttgagctggcccggaccctgcagctggtggtgctggatgctgacaccatcaaccacccagcccagctgagcaagaccagcctggcccccatcatcgtgtatgtgaagatcagcagccccaaggtgctgcagaggctcatcaagagccggggcaagagccaggccaagcacctgaatgtgcagatggtggccgctgacaagctggcccagtgccccccagagctgtttgatgtgatcctggatgagaaccagctggaggatgcctgtgagcacctggccgactacctggaggcctactggaaggccacccacccccccagcagcagcctgcccaaccccctgctgagcaggaccctggccaccagcagcctgcccctgagccccaccctggccagcaacagccagggcagccagggcgaccagaggacagacagaagtgcccccatccgcagcgccagccaggccgaggaggagcccagcgtggagcctgtgaagaagagccagcacaggagcagcagcagcgccccccaccacaaccacaggagcggcaccagccggggcctgagccggcaggagacctttgattctgagacccaggagagccgggacagcgcctacgtggagcccaaggaggactacagccatgaccacgtggaccactacgccagccaccgggaccacaaccacagagatgagacccacggcagcagtgaccaccgccaccgggagagccgccacaggagcagagatgtggaccgggagcaggaccacaatgaatgcaacaagcagaggagccgccacaagagcaaggaccgctactgtgagaaggatggagaggtgatcagcaagaagagaaatgaagctggggagtggaacagagatgtgtacatccggcagtag

SEQ ID NO: 145790 - DNA, 1839 bp, synthetic construct
  misc_feature 1..1839: note = Description of Artificial Sequence: Synthetic coding sequence
  source 1..1839: mol_type = other DNA
atgaaggccacctggatccggctgctgaagagggccaagggcggccgcctgaagaacagcgacatctgtggcagcgctgacagctacaccagccggcccagcgacagtgatgtgtccctggaggaggaccgggaggccgtgcggcgggaggccgagcggcaggcccaggcccagctggagaaggccaagaccaagcctgtggcctttgctgtgaggaccaacgtgtcctacagcgctgcccatgaagatgatgtgcctgtgcccggcatggccatcagctttgaggccaaggacttcctgcacgtgaaggagaagttcaacaatgactggtggattggccgcctggtgaaggagggctgtgagatcggcttcatccccagccctgtgaagctggagaacatgaggctgcagcacgagcagagggccaagcagggcaagttctacagcagcaagagcggcggcaacagcagcagcagcctgggggacatcgtgcccagcagcaggaagagcaccccacccagcagcgccattgatattgatgccaccggcctggatgctgaggagaatgacatcccagccaaccacaggagccccaagcccagcgccaacagcgtgaccagcccccacagcaaggagaagaggatgcccttcttcaagaagacagagcacaccccaccctatgatgtggtgcccagcatgaggcctgtggtgctggtgggccccagcctgaagggctatgaggtgacagacatgatgcagaaggccctgtttgacttcctgaagcacagatttgagggccgcatcagcatcaccagggtgacagctgacatcagcctggccaagaggtctgtgctgaacaaccccagcaagcacgccatcatcgagaggagcaacaccaggagcagcctggccgaggtgcagagcgagattgaaagaatttttgagctggcccggaccctgcagctggtggtgctggatgctgacaccatcaaccacccagcccagctgagcaagaccagcctggcccccatcatcgtgtatgtgaagatcagcagccccaaggtgctgcagaggctcatcaagagccggggcaagagccaggccaagcacctgaatgtgcagatggtggccgctgacaagctggcccagtgccccccagagctgtttgatgtgatcctggatgagaaccagctggaggatgcctgtgagcacctggccgactacctggaggcctactggaaggccacccacccccccagcagcagcctgcccaaccccctgctgagcaggaccctggccaccagcagcctgcccctgagccccaccctggccagcaacagccagggcagccagggcgaccagaggacagacagaagtgcccccatccgcagcgccagccaggccgaggaggagcccagcgtggagcctgtgaagaagagccagcacaggagcagcagcagcgccccccaccacaaccacaggagcggcaccagccggggcctgagccggcaggagacctttgattctgagacccaggagagccgggacagcgcctacgtggagcccaaggaggactacagccatgaccacgtggaccactacgccagccaccgggaccacaaccacagagatgagacccacggcagcagtgaccaccgccaccgggagagccgccacaggagcagagatgtggaccgggagcaggaccacaatgaatgcaacaagcagaggagccgccacaagagcaaggaccgctactgtgagaaggatggagaggtgatcagcaagaagagaaatgaagctggggagtggaacagagatgtgtacatccggcagtag

SEQ ID NO: 145791 - DNA, 1704 bp, synthetic construct
  misc_feature 1..1704: note = Description of Artificial Sequence: Synthetic coding sequence
  source 1..1704: mol_type = other DNA
atgcagtgctgcggcctggtgcacagaagaagagtgcgggtgtcctatggcagcgctgacagctacaccagccggcccagcgacagtgatgtgtccctggaggaggaccgggaggccgtgagaagagaggccgagcggcaggcccaggcccagctggagaaggccaagaccaagcctgtggcctttgctgtgaggaccaacgtgtcctacagcgctgcccatgaagatgatgtgcctgtgcccggcatggccatcagctttgaggccaaggacttcctgcacgtgaaggagaagttcaacaatgactggtggattggccgcctggtgaaggagggctgtgaaattggcttcatccccagccctgtgaagctggagaacatgaggctgcagcacgagcagagggccaagcagggcaagttctacagcagcaagagcggcggcaacagcagcagcagcctgggggacatcgtgcccagcagcaggaagagcaccccacccagcagcgccaagcagaagcagaagagcacagagcacaccccaccctatgatgtggtgcccagcatgaggcctgtggtgctggtgggccccagcctgaagggctatgaggtgacagacatgatgcagaaggccctgtttgacttcctgaagcacagatttgagggccgcatcagcatcaccagggtgacagctgacatcagcctggccaagaggtctgtgctgaacaaccccagcaagcacgccatcatcgagaggagcaacaccaggagcagcctggccgaggtgcagagcgagattgagcgcatctttgagctggcccggaccctgcagctggtggtgctggatgctgacaccatcaaccacccagcccagctgagcaagaccagcctggcccccatcatcgtgtatgtgaagatcagcagccccaaggtgctgcagaggctcatcaagagccggggcaagagccaggccaagcacctgaatgtgcagatggtggccgctgacaagctggcccagtgccccccagagctgtttgatgtgatcctggatgagaaccagctggaggatgcctgtgagcacctggccgactacctggaggcctactggaaggccacccacccccccagcagcagcctgcccaaccccctgctgagcaggaccctggccaccagcagcctgcccctgagccccaccctggccagcaacagccagggcagccagggcgaccagaggacagacagaagtgcccccatccgcagcgccagccaggccgaggaggagcccagcgtggagcctgtgaagaagagccagcacaggagcagcagcagcgccccccaccacaaccacaggagcggcaccagccggggcctgagccggcaggagacctttgacagcgagacccaggagagccgggacagcgcctacgtggagcccaaggaggactacagccatgaccacgtggaccactacgccagccaccgggaccacaaccacagagatgagacccacggcagcagtgaccaccgccaccgggagagccgccacaggagcagagatgtggaccgggagcaggaccacaatgaatgcaacaagcagaggagccgccacaagagcaaggaccgctactgtgagaaggatggagaggtgatcagcaagaagagaaatgaggccggggagtggaacagagatgtgtacatccggcagtag

SEQ ID NO: 145792 - DNA, 1821 bp, synthetic construct
  misc_feature 1..1821: note = Description of Artificial Sequence: Synthetic coding sequence
  source 1..1821: mol_type = other DNA
atgctggaccggcggctgattgccccccagaccaagtacatcatccctgggggcagcgctgacagctacaccagccggcccagcgacagtgatgtgtccctggaggaggaccgggaggccgtgcggcgggaggccgagcggcaggcccaggcccagctggagaaggccaagaccaagcctgtggcctttgctgtgaggaccaacgtgtcctacagcgctgcccatgaagatgatgtgcctgtgcccggcatggccatcagctttgaggccaaggacttcctgcacgtgaaggagaagttcaacaatgactggtggattggccgcctggtgaaggagggctgtgagatcggcttcatccccagccctgtgaagctggagaacatgaggctgcagcacgagcagagggccaagcagggcaagttctacagcagcaagagcggcggcaacagcagcagcagcctgggggacatcgtgcccagcagcaggaagagcaccccacccagcagcgccattgatattgatgccaccggcctggatgctgaggagaatgacatcccagccaaccacaggagccccaagcccagcgccaacagcgtgaccagcccccacagcaaggagaagaggatgcccttcttcaagaagacagagcacaccccaccctatgatgtggtgcccagcatgaggcctgtggtgctggtgggccccagcctgaagggctatgaggtgacagacatgatgcagaaggccctgtttgacttcctgaagcacagatttgagggccgcatcagcatcaccagggtgacagctgacatcagcctggccaagaggtctgtgctgaacaaccccagcaagcacgccatcatcgagaggagcaacaccaggagcagcctggccgaggtgcagagcgagattgaaagaatttttgagctggcccggaccctgcagctggtggtgctggatgctgacaccatcaaccacccagcccagctgagcaagaccagcctggcccccatcatcgtgtatgtgaagatcagcagccccaaggtgctgcagaggctcatcaagagccggggcaagagccaggccaagcacctgaatgtgcagatggtggccgctgacaagctggcccagtgccccccagagctgtttgatgtgatcctggatgagaaccagctggaggatgcctgtgagcacctggccgactacctggaggcctactggaaggccacccacccccccagcagcagcctgcccaaccccctgctgagcaggaccctggccaccagcagcctgcccctgagccccaccctggccagcaacagccagggcagccagggcgaccagaggacagacagaagtgcccccatccgcagcgccagccaggccgaggaggagcccagcgtggagcctgtgaagaagagccagcacaggagcagcagcagcgccccccaccacaaccacaggagcggcaccagccggggcctgagccggcaggagacctttgattctgagacccaggagagccgggacagcgcctacgtggagcccaaggaggactacagccatgaccacgtggaccactacgccagccaccgggaccacaaccacagagatgagacccacggcagcagtgaccaccgccaccgggagagccgccacaggagcagagatgtggaccgggagcaggaccacaatgaatgcaacaagcagaggagccgccacaagagcaaggaccgctactgtgagaaggatggagaggtgatcagcaagaagagaaatgaagctggggagtggaacagagatgtgtacatccggcagtag

SEQ ID NO: 145793 - DNA, 1827 bp, synthetic construct
  misc_feature 1..1827: note = Description of Artificial Sequence: Synthetic coding sequence
  source 1..1827: mol_type = other DNA
atgaaccagggcagcggcctggacctgctgaagatctcctatggcaagggggcccggaggaagaaccgcttcaagggcagtgatggcagcaccagcagtgacaccaccagcaacagctttgtgcggcagggcagcgctgacagctacaccagccggcccagcgacagtgatgtgtccctggaggaggaccgggaggccgtgcggcgggaggccgagcggcaggcccaggcccagctggagaaggccaagaccaagcctgtggcctttgctgtgaggaccaacgtgtcctacagcgctgcccatgaagatgatgtgcctgtgcccggcatggccatcagctttgaggccaaggacttcctgcacgtgaaggagaagttcaacaatgactggtggattggccgcctggtgaaggagggctgtgagatcggcttcatccccagccctgtgaagctggagaacatgaggctgcagcacgagcagagggccaagcagggcaagttctacagcagcaagagcggcggcaacagcagcagcagcctgggggacatcgtgcccagcagcaggaagagcaccccacccagcagcggggccaagtctgcagatgagcaggaccagtggaagacagctggcctcttctggaggttcaccacagagcacaccccaccctatgatgtggtgcccagcatgaggcctgtggtgctggtgggccccagcctgaagggctatgaggtgacagacatgatgcagaaggccctgtttgacttcctgaagcacagatttgagggccgcatcagcatcaccagggtgacagctgacatcagcctggccaagaggtctgtgctgaacaaccccagcaagcacgccatcatcgagaggagcaacaccaggagcagcctggccgaggtgcagagcgagattgaaagaatttttgagctggcccggaccctgcagctggtggtgctggatgctgacaccatcaaccacccagcccagctgagcaagaccagcctggcccccatcatcgtgtatgtgaagatcagcagccccaaggtgctgcagaggctcatcaagagccggggcaagagccaggccaagcacctgaatgtgcagatggtggccgctgacaagctggcccagtgccccccagagctgtttgatgtgatcctggatgagaaccagctggaggatgcctgtgagcacctggccgactacctggaggcctactggaaggccacccacccccccagcagcagcctgcccaaccccctgctgagcaggaccctggccaccagcagcctgcccctgagccccaccctggccagcaacagccagggcagccagggcgaccagaggacagacagaagtgcccccatccgcagcgccagccaggccgaggaggagcccagcgtggagcctgtgaagaagagccagcacaggagcagcagcagcgccccccaccacaaccacaggagcggcaccagccggggcctgagccggcaggagacctttgattctgagacccaggagagccgggacagcgcctacgtggagcccaaggaggactacagccatgaccacgtggaccactacgccagccaccgggaccacaaccacagagatgagacccacggcagcagtgaccaccgccaccgggagagccgccacaggagcagagatgtggaccgggagcaggaccacaatgaatgcaacaagcagaggagccgccacaagagcaaggaccgctactgtgagaaggatggagaggtgatcagcaagaagagaaatgaagctggggagtggaacagagatgtgtacatccggcagtag

SEQ ID NO: 145794 - DNA, 1818 bp, synthetic construct
  misc_feature 1..1818: note = Description of Artificial Sequence: Synthetic coding sequence
  source 1..1818: mol_type = other DNA
atgcagtgctgcggcctggtgcacagaagaagagtgcgggtgtcctatggcagcgctgacagctacaccagccggcccagcgacagtgatgtgtccctggaggaggaccgggaggccgtgagaagagaggccgagcggcaggcccaggcccagctggagaaggccaagaccaagcctgtggcctttgctgtgaggaccaacgtgtcctacagcgctgcccatgaagatgatgtgcctgtgcccggcatggccatcagctttgaggccaaggacttcctgcacgtgaaggagaagttcaacaatgactggtggattggccgcctggtgaaggagggctgtgaaattggcttcatccccagccctgtgaagctggagaacatgaggctgcagcacgagcagagggccaagcagggcaagttctacagcagcaagagcggcggcaacagcagcagcagcctgggggacatcgtgcccagcagcaggaagagcaccccacccagcagcgccatcgacattgatgccaccggcctggatgctgaagaaaatgacatcccagccaaccacaggagccccaagcccagcgccaacagcgtgaccagcccccacagcaaggagaagaggatgcccttcttcaagaagacagagcacaccccaccctatgatgtggtgcccagcatgaggcctgtggtgctggtgggccccagcctgaagggctatgaggtgacagacatgatgcagaaggccctgtttgacttcctgaagcacagatttgagggccgcatcagcatcaccagggtgacagctgacatcagcctggccaagaggtctgtgctgaacaaccccagcaagcacgccatcatcgagaggagcaacaccaggagcagcctggccgaggtgcagagcgagattgagcgcatctttgagctggcccggaccctgcagctggtggtgctggatgctgacaccatcaaccacccagcccagctgagcaagaccagcctggcccccatcatcgtgtatgtgaagatcagcagccccaaggtgctgcagaggctcatcaagagccggggcaagagccaggccaagcacctgaatgtgcagatggtggccgctgacaagctggcccagtgccccccagagctgtttgatgtgatcctggatgagaaccagctggaggatgcctgtgagcacctggccgactacctggaggcctactggaaggccacccacccccccagcagcagcctgcccaaccccctgctgagcaggaccctggccaccagcagcctgcccctgagccccaccctggccagcaacagccagggcagccagggcgaccagaggacagacagaagtgcccccatccgcagcgccagccaggccgaggaggagcccagcgtggagcctgtgaagaagagccagcacaggagcagcagcagcgccccccaccacaaccacaggagcggcaccagccggggcctgagccggcaggagacctttgacagcgagacccaggagagccgggacagcgcctacgtggagcccaaggaggactacagccatgaccacgtggaccactacgccagccaccgggaccacaaccacagagatgagacccacggcagcagtgaccaccgccaccgggagagccgccacaggagcagagatgtggaccgggagcaggaccacaatgaatgcaacaagcagaggagccgccacaagagcaaggaccgctactgtgagaaggatggagaggtgatcagcaagaagagaaatgaggccggggagtggaacagagatgtgtacatccggcagtag

SEQ ID NO: 145795 - DNA, 1455 bp, synthetic construct
  misc_feature 1..1455: note = Description of Artificial Sequence: Synthetic coding sequence
  source 1..1455: mol_type = other DNA
atgtatgatgacagctatgtgcccggctttgaagattctgaggccggcagcgctgacagctacaccagccggcccagcctggacagtgatgtgtccctggaggaggaccgggagagcgcccggcgggaggtggagagccaggcccagcagcagctggagcgggccaagcacaagcctgtggcctttgctgtgaggaccaacgtgtcctactgcggcgtgctggatgaagaatgtcctgtgcagggcagcggcgtgaactttgaggccaaggacttcctgcacatcaaggagaagtacagcaatgactggtggattggccgcctggtgaaggagggcggggacatcgccttcatccccagcccccagaggctggagagcatccggctgaagcaggagcagaaggcccggcgcagcggcaaccccagcagcctgagtgacatcggcaacagaagaagccccccacccagcctggccaagcagaagcagaagcaggccgagcacgtgcccccctatgatgtggtgcccagcatgaggcctgtggtgctggtgggccccagcctgaagggctatgaggtgacagacatgatgcagaaggccctgtttgacttcctgaagcacagatttgatggccgcatcagcatcaccagggtgacagctgacctgagcctggccaagaggtctgtgctgaacaaccctgggaagaggaccatcatcgagaggagcagcgcccggagcagcattgctgaggtgcagagcgagattgaaagaatttttgagctggccaagagcctgcagctggtggtgctggatgctgacaccatcaaccacccagcccagctggccaagaccagcctggcccccatcatcgtgtttgtgaaggtgagcagccccaaggtgctgcagaggctcatccgcagccggggcaagagccagatgaagcacctgactgtgcagatgatggcctatgacaagctggtgcagtgccccccagagagctttgatgtgatcctggatgagaaccagctggaggatgcctgtgagcacctggccgagtacctggaggtgtactggagggccacccaccacccagcccctggccctggcctgctgggcccccccagcgccatccctggcctgcagaaccagcagctgctgggggagcggggggaggagcacagccccctggagcgggacagcctgatgcccagtgatgaggccagcgagagcagccggcaggcctggacaggcagcagccagaggagcagccgccacctggaggaggactatgcagatgcctaccaggacctgtaccagccccaccggcagcacaccagcggcctgcccagcgccaatggacatgacccccaggaccggctgctggcccaggacagcgagcacaaccacagcgacaggaactggcagaggaaccggccctggcccaaggacagctactag

SEQ ID NO: 145796 - DNA, 1566 bp, synthetic construct
  misc_feature 1..1566: note = Description of Artificial Sequence: Synthetic coding sequence
  source 1..1566: mol_type = other DNA
atgagcagcagcagctatgccaagaatggaacagcagatggcccccacagccccaccagccaggtggcccggggcaccaccaccaggaggagccggctgaagagaagtgatggcagcaccaccagcaccagcttcatcctgcggcagggcagcgctgacagctacaccagccggcccagcgacagtgatgtgtccctggaggaggaccgggaggccatccggcaggagcgggagcagcaggccgccatccagctggagcgggccaagagcaagcctgtggcctttgctgtgaagaccaacgtgtcctactgtggggccctggatgaagatgtgcctgtgcccagcacagccatcagctttgatgccaaggacttcctgcacatcaaggagaagtacaacaatgactggtggattggccgcctggtgaaggagggctgtgagatcggcttcatccccagccccctgcggctggagaacatccgcatccagcaggagcagaagaggggccgcttccacggcggcaagagcagcggcaacagcagcagcagcctgggggagatggtgtctggcaccttccgggccacccccaccagcacagtgaagatggtgctgaagatccacacagagcacatccccccctatgatgtggtgcccagcatgaggcctgtggtgctggtgggccccagcctgaagggctatgaggtgacagacatgatgcagaaggccctgtttgacttcctgaagcacagatttgatggccgcatcagcatcaccagggtgacagctgacatcagcctggccaagaggtctgtgctgaacaaccccagcaagagggccatcatcgagaggagcaacaccaggagcagcctggccgaggtgcagagcgagattgagcgcatctttgagctggcccggagcctgcagctggtggtgctggatgctgacaccatcaaccacccagcccagctgatcaagaccagcctggcccccatcatcgtgcacgtgaaggtgagcagccccaaggtgctgcagaggctcatcaagagccggggcaagagccagagcaagcacctgaatgtgcagctggtggccgctgacaagctggcccagtgccccccagagatgtttgatgtgatcctggatgagaaccagctggaggatgcctgtgagcacctgggggagtacctggaggcctactggagggccacccacaccaccagcagcacccccatgacccccctgctgggcaggaacctgggcagcacagccctgagcccctaccccacagccatcagcggcctgcagagccagaggatgaggcacagcaaccacagcacagagaacagccccattgaaagaagaagcctgatgaccagtgatgagaactaccacaatgaaagagccaggaagagcaggaaccggctgagcagcagcagccagcacagccgggaccactaccccctggtggaggaggactacccagacagctaccaggacacctacaagccccacaggaacagaggcagccctgggggctacagccatgacagccgccaccggctgtag

SEQ ID NO: 145797 - DNA, 1464 bp, synthetic construct
  misc_feature 1..1464: note = Description of Artificial Sequence: Synthetic coding sequence
  source 1..1464: mol_type = other DNA
atgtatgacaacctgtacctgcacggcattgaagattctgaggccggcagcgctgacagctacaccagccggcccagcgacagtgatgtgtccctggaggaggaccgggaggccatccggcaggagcgggagcagcaggccgccatccagctggagcgggccaagagcaagcctgtggcctttgctgtgaagaccaacgtgtcctactgtggggccctggatgaagatgtgcctgtgcccagcacagccatcagctttgatgccaaggacttcctgcacatcaaggagaagtacaacaatgactggtggattggccgcctggtgaaggagggctgtgagatcggcttcatccccagccccctgcggctggagaacatccgcatccagcaggagcagaagaggggccgcttccacggcggcaagagcagcggcaacagcagcagcagcctgggggagatggtgtctggcaccttccgggccacccccaccagcacagtgaagatggtgctgaagatccacacagagcacatccccccctatgatgtggtgcccagcatgaggcctgtggtgctggtgggccccagcctgaagggctatgaggtgacagacatgatgcagaaggccctgtttgacttcctgaagcacagatttgatggccgcatcagcatcaccagggtgacagctgacatcagcctggccaagaggtctgtgctgaacaaccccagcaagagggccatcatcgagaggagcaacaccaggagcagcctggccgaggtgcagagcgagattgagcgcatctttgagctggcccggagcctgcagctggtggtgctggatgctgacaccatcaaccacccagcccagctgatcaagaccagcctggcccccatcatcgtgcacgtgaaggtgagcagccccaaggtgctgcagaggctcatcaagagccggggcaagagccagagcaagcacctgaatgtgcagctggtggccgctgacaagctggcccagtgccccccagagatgtttgatgtgatcctggatgagaaccagctggaggatgcctgtgagcacctgggggagtacctggaggcctactggagggccacccacaccaccagcagcacccccatgacccccctgctgggcaggaacctgggcagcacagccctgagcccctaccccacagccatcagcggcctgcagagccagaggatgaggcacagcaaccacagcacagagaacagccccattgaaagaagaagcctgatgaccagtgatgagaactaccacaatgaaagagccaggaagagcaggaaccggctgagcagcagcagccagcacagccgggaccactaccccctggtggaggaggactacccagacagctaccaggacacctacaagccccacaggaacagaggcagccctgggggctacagccatgacagccgccaccggctgtag

SEQ ID NO: 145798 - DNA, 1461 bp, synthetic construct
  misc_feature 1..1461: note = Description of Artificial Sequence: Synthetic coding sequence
  source 1..1461: mol_type = other DNA
atgtatgacaacctgtacctgcacggcattgaagattctgaggccggcagcgctgacagctacaccagccggcccagcgacagtgatgtgtccctggaggaggaccgggaggccatccggcaggagcgggagcagcaggccgccatccagctggagcgggccaagagcaagcctgtggcctttgctgtgaagaccaacgtgtcctactgtggggccctggatgaagatgtgcctgtgcccagcacagccatcagctttgatgccaaggacttcctgcacatcaaggagaagtacaacaatgactggtggattggccgcctggtgaaggagggctgtgagatcggcttcatccccagccccctgcggctggagaacatccgcatccagcaggagcagaagaggggccgcttccacggcggcaagagcagcggcaacagcagcagcagcctgggggagatggtgtctggcaccttccgggccacccccaccagcacagccaagcagaagcagaaggtgacagagcacatccccccctatgatgtggtgcccagcatgaggcctgtggtgctggtgggccccagcctgaagggctatgaggtgacagacatgatgcagaaggccctgtttgacttcctgaagcacagatttgatggccgcatcagcatcaccagggtgacagctgacatcagcctggccaagaggtctgtgctgaacaaccccagcaagagggccatcatcgagaggagcaacaccaggagcagcctggccgaggtgcagagcgagattgaaagaatttttgagctggcccggagcctgcagctggtggtgctggatgctgacaccatcaaccacccagcccagctgatcaagaccagcctggcccccatcatcgtgcacgtgaaggtgagcagccccaaggtgctgcagaggctcatcaagagccggggcaagagccagagcaagcacctgaatgtgcagctggtggccgctgacaagctggcccagtgccccccagagatgtttgatgtgatcctggatgagaaccagctggaggatgcctgtgagcacctgggggagtacctggaggcctactggagggccacccacaccaccagcagcacccccatgacccccctgctgggcaggaacctgggcagcacagccctgagcccctaccccacagccatcagcggcctgcagagccagaggatgaggcacagcaaccacagcacagagaacagccccatcgagcggcgcagcctgatgaccagtgatgagaactaccacaatgaaagagccaggaagagcaggaaccggctgagcagcagcagccagcacagccgggaccactaccccctggtggaggaggactacccagacagctaccaggacacctacaagccccacaggaacagaggcagccctgggggctacagccatgacagccgccaccggctgtag

SEQ ID NO: 145799 - DNA, 1563 bp, synthetic construct
  misc_feature 1..1563: note = Description of Artificial Sequence: Synthetic coding sequence
  source 1..1563: mol_type = other DNA
atgagcagcagcagctatgccaagaatggaacagcagatggcccccacagccccaccagccaggtggcccggggcaccaccaccaggaggagccggctgaagagaagtgatggcagcaccaccagcaccagcttcatcctgcggcagggcagcgctgacagctacaccagccggcccagcgacagtgatgtgtccctggaggaggaccgggaggccatccggcaggagcgggagcagcaggccgccatccagctggagcgggccaagagcaagcctgtggcctttgctgtgaagaccaacgtgtcctactgtggggccctggatgaagatgtgcctgtgcccagcacagccatcagctttgatgccaaggacttcctgcacatcaaggagaagtacaacaatgactggtggattggccgcctggtgaaggagggctgtgagatcggcttcatccccagccccctgcggctggagaacatccgcatccagcaggagcagaagaggggccgcttccacggcggcaagagcagcggcaacagcagcagcagcctgggggagatggtgtctggcaccttccgggccacccccaccagcacagccaagcagaagcagaaggtgacagagcacatccccccctatgatgtggtgcccagcatgaggcctgtggtgctggtgggccccagcctgaagggctatgaggtgacagacatgatgcagaaggccctgtttgacttcctgaagcacagatttgatggccgcatcagcatcaccagggtgacagctgacatcagcctggccaagaggtctgtgctgaacaaccccagcaagagggccatcatcgagaggagcaacaccaggagcagcctggccgaggtgcagagcgagattgaaagaatttttgagctggcccggagcctgcagctggtggtgctggatgctgacaccatcaaccacccagcccagctgatcaagaccagcctggcccccatcatcgtgcacgtgaaggtgagcagccccaaggtgctgcagaggctcatcaagagccggggcaagagccagagcaagcacctgaatgtgcagctggtggccgctgacaagctggcccagtgccccccagagatgtttgatgtgatcctggatgagaaccagctggaggatgcctgtgagcacctgggggagtacctggaggcctactggagggccacccacaccaccagcagcacccccatgacccccctgctgggcaggaacctgggcagcacagccctgagcccctaccccacagccatcagcggcctgcagagccagaggatgaggcacagcaaccacagcacagagaacagccccatcgagcggcgcagcctgatgaccagtgatgagaactaccacaatgaaagagccaggaagagcaggaaccggctgagcagcagcagccagcacagccgggaccactaccccctggtggaggaggactacccagacagctaccaggacacctacaagccccacaggaacagaggcagccctgggggctacagccatgacagccgccaccggctgtag

SEQ ID NO: 145800 - DNA, 1248 bp, synthetic construct
  misc_feature 1..1248: note = Description of Artificial Sequence: Synthetic coding sequence
  source 1..1248: mol_type = other DNA
ttctacttcctgtgccagggcagcgctgacagctacaccagccggcccagcgacagtgatgtgtccctggaggaggaccgggaggccatccggcaggagcgggagcagcaggccgccatccagctggagcgggccaagagcaagcctgtggcctttgctgtgaagaccaacgtgtcctactgtggggccctggatgaagatgtgcctgtgcccagcacagccatcagctttgatgccaaggacttcctgcacatcaaggagaagtacaacaatgactggtggattggccgcctggtgaaggagggctgtgaaattggcttcatccccagccccctgcggctggagaacatccgcatccagcaggagcagaagaggggccgcttccatggaggcaagagcagcggcaacagcagcagcagcctgggggagatggtgtctggcaccttccgggccacccccaccagcacagccaagcagaagcagaaggtgacagagcacatccccccctatgatgtggtgcccagcatgaggcctgtggtgctggtgggccccagcctgaagggctatgaggtgacagacatgatgcagaaggccctgtttgacttcctgaagcacagatttgatggccgcatcagcatcaccagggtgacagctgacatcagcctggccaagaggtctgtgctgaacaaccccagcaagagggccatcatcgagaggagcaacaccaggagcagcctggccgaggtgcagagcgagattgagcgcatctttgagctggcccggagcctgcagctggtggtgctggatgctgacaccatcaaccacccagcccagctgatcaagaccagcctggcccccatcatcgtgcacgtgaaggtgagcagccccaaggtgctgcagaggctcatcaagagccggggcaagagccagagcaagcacctgaatgtgcagctggtggccgctgacaagctggcccagtgcccccccagccagaggatgaggcacagcaaccacagcacagagaacagccccattgaaagaagaagcctgatgaccagtgatgagaactaccacaatgaaagagccaggaagagcaggaaccggctgagcagcagcagccagcacagccgggaccactaccccctggtggaggaggactacccagacagctaccaggacacctacaagccccacaggaacagaggcagccctgggggctacagccatgacagccgccaccggctgtag

SEQ ID NO: 145801 - DNA, 558 bp, synthetic construct
  misc_feature 1..558: note = Description of Artificial Sequence: Synthetic coding sequence
  source 1..558: mol_type = other DNA
atgagcggcagctttgagctgtctgtgcaggacctgaatgacctgctgagtgatggcagcggctgctacagcctgcccagccagccctgcaatgaggtgaccccccgcatctacgtgggcaatgcctctgtggcccaggacatccccaagctgcagaagctgggcatcacccacgtgctgaatgctgctgagggccgctccttcatgcacgtgaacaccaatgccaacttctacaaggacagcggcatcacctacctgggcatcaaggccaatgacacccaggagttcaacctgagcgcctactttgaaagagctgctgacttcatcgaccaggccctggcccagaagaatggccgggtgctggtgcactgccgggagggctacagccgcagccccaccctggtgattgcctacctgatgatgaggcagaagatggatgtgaagagcgccctgagcatcgtgcggcagaaccgggagatcggccccaatgatggcttcctggcccagctgtgccagctgaatgaccggctggccaaggagggcaagctgaagccctag

SEQ ID NO: 145802 - DNA, 972 bp, synthetic construct
  misc_feature 1..972: note = Description of Artificial Sequence: Synthetic coding sequence
  source 1..972: mol_type = other DNA
atgggcctgtttgacagaggagtgcagatgctgctgaccaccgtgggcgcctttgctgccttcagcctgatgaccatcgctgtgggcacagactactggctgtacagccggggcgtgtgcaagaccaagtctgtgtctgaaaatgagaccagcaagaagaatgaggaggtgatgacccacagcggcctgtggaggacctgctgcctggagggcaacttcaagggcctgtgcaagcagattgaccacttcccagaagatgctgactatgaagctgacacagctgagtacttcctgcgggctgtgcgggccagcagcatcttccccatcctgagcgtcatcctgctcttcatgggcggcctgtgcatcgccgccagcgagttctacaagaccaggcacaacatcatcctgtctgctggcatcttctttgtgtctgctggcctgagcaacatcatcggcatcatcgtgtacatcagcgccaatgctggggaccccagcaagagtgacagcaagaagaacagctacagctatggctggagcttctactttggagccctgtccttcatcatcgccgagatggtgggcgtgctggccgtgcacatgttcatcgacagacacaagcagctgcgggccacagcccgggccacagactacctgcaggccagcgccatcacccgcatccccagctaccgctaccgctaccagaggaggagccgcagcagcagccgcagcacagagcccagccacagcagagatgccagccctgtgggcatcaagggcttcaacaccctgcccagcacagagatctccatgtacaccctgagccgggaccccctgaaggccgccaccacccccacagccacctacaacagcgaccgggacaacagcttcctgcaggtgcacaactgcatccagaaggagaacaaggacagcctgcacagcaacacagccaacagaaggaccacccctgtgtag

SEQ ID NO: 145803 - DNA, 948 bp, synthetic construct
  misc_feature 1..948: note = Description of Artificial Sequence: Synthetic coding sequence
  source 1..948: mol_type = other DNA
atgaggatgtgtgaccggggcatccagatgctgatcaccaccgtgggcgcctttgctgccttcagcctgatgaccatcgctgtgggcacagactactggctgtacagccggggcgtgtgcaggaccaagagcaccagtgacaatgagaccagcaggaagaatgaggaggtgatgacccacagcggcctgtggaggacctgctgcctggagggcgccttccggggcgtgtgcaagaagattgaccacttcccagaagatgctgactatgagcaggacacagctgagtacctgctgcgggctgtgcgggccagctctgtgttccccatcctgtctgtgaccctgctcttctttggaggcctgtgtgtggccgccagcgagttccacaggagccgccacaacgtcatcctgtctgctggcatcttctttgtgtctgctggcctgagcaacatcatcggcatcatcgtgtacatcagcgccaatgctggggaccccggccagagggacagcaagaagagctacagctatggctggagcttctactttggagccttctccttcatcatcgccgagatcgtgggcgtggtggccgtgcacatctacatcgagaagcaccagcagctgcgggccaagagccacagcgagttcctgaagaagagcacctttgcccggctgcccccctaccgctaccgcttcagaagaagaagcagcagccgcagcacagagcccaggagccgggacctgagccccatcagcaagggcttccacaccatccccagcacagacatctccatgttcaccctgagccgggaccccagcaagatcaccatgggcaccctgctgaacagcgaccgggaccacgccttcctgcagttccacaacagcacccccaaggagttcaaggagagcctgcacaacaacccagccaacagaaggaccacccctgtgtag

SEQ ID NO: 145804 - DNA, 891 bp, synthetic construct
  misc_feature 1..891: note = Description of Artificial Sequence: Synthetic coding sequence
  source 1..891: mol_type = other DNA
atgtctgcctgtggcaggaaggccctgaccctgctgagctctgtgtttgctgtgtgtggcctgggcctgctgggcattgctgtgtccacagactactggctgtacctggaggagggcgtgattgtgccccagaaccagagcacagagatcaagatgagcctgcacagcggcctgtggagggtgtgcttcctggccggggaggagcggggccgctgcttcaccattgaatatgtgatgcccatgaacacccagctgaccagcgagagcacagtgaatgtgctgaagatgatccgcagcgccacccccttccccctggtgtccctcttcttcatgtttattggcttcatcctgaacaacatcggccacatccggccccacaggaccatcctggcctttgtgtctggcatcttcttcatcctgagcggcctgagcctggtggtgggcctggtgctgtacatcagcagcatcaatgatgagatgctgaacagaaccaaggatgctgagacctacttcaactacaagtatggctggagctttgcctttgctgccatctccttcctgctgacagaggtgaagcctgtgaccctgtccatggaccggctgggcctgggcacagcccccctgagcagaggagagtggggctggggcagaagagacatcccccagcccttctggaccccagaccaccccctgtacttccccagcagcagccagaatgtgtccctgagctacctgagcggcagccccccagccaggatgagccctggcccctgcagctgcccccacgtgcacttccccccccacagcagctgtgtgctgtgccggccccagccccgggagatgaggcaggccccagctgccagccccagcagcgctgtgttcagcctgtag

SEQ ID NO: 145805 - DNA, 828 bp, synthetic construct
  misc_feature 1..828: note = Description of Artificial Sequence: Synthetic coding sequence
  source 1..828: mol_type = other DNA
atgtctgcctgtggcaggaaggccctgaccctgctgagctctgtgtttgctgtgtgtggcctgggcctgctgggcattgctgtgtccacagactactggctgtacctggaggagggcgtgattgtgccccagaaccagagcacagagatcaagatgagcctgcacagcggcctgtggagggtgtgcttcctggccggggaggagcggggccgctgcttcaccattgaatatgtgatgcccatgaacacccagctgaccagcgagagcacagtgaatgtgctgaagatgatccgcagcgccacccccttccccctggtgtccctcttcttcatgtttattggcttcatcctgaacaacatcggccacatccggccccacaggaccatcctggcctttgtgtctggcatcttcttcatcctgagcggcctgagcctggtggtgggcctggtgctgtacatcagcagcatcaatgatgagatgctgaacagaaccaaggatgctgagacctacttcaactacaagtatggctggagctttgcctttgctgccatctccttcctgctgacagaatctgctggggtgatgtctgtgtacctgttcatgaagcgctacacagctgaggacatgtaccggccccaccctggcttctaccggccccggctgagcaactgcagcgactacagcggccagttcctgcacccagatgcctgggtgcggggccgcagccccagcgacatcagcagcgaggccagcctgcagatgaacagcaactacccagccctgctgaagtgcccagactatgaccagatgagcagcagcccctgctag

SEQ ID NO: 145806 - DNA, 828 bp, synthetic construct; identical to SEQ ID NO: 145805
  misc_feature 1..828: note = Description of Artificial Sequence: Synthetic coding sequence
  source 1..828: mol_type = other DNA

SEQ ID NO: 145807 - DNA, 783 bp, synthetic construct
  misc_feature 1..783: note = Description of Artificial Sequence: Synthetic coding sequence
  source 1..783: mol_type = other DNA
atgatgtggagcaacttcttcctgcaggaggagaacagaagaagaggagctgctggaagaagaagagcccacggccagggccgcagcggcctgaccccagagcgggagggcaaggtgaagctggccctgctgctggccgctgtgggcgccaccctggccgtgctgtctgtgggcacagagttctgggtggagctgaacacctacaaggccaatggatctgctgtgtgtgaggccgcccacctgggcctgtggaaggcctgcaccaagaggctgtggcaggctgatgtgcctgtggaccgggacacctgtggccctgctgagctgcctggagaggccaactgcacctacttcaagttcttcaccaccggggagaatgcccgcatcttccagaggaccaccaagaaggaggtgaacctggccgctgctgtgattgctgtgctgggcctggccgtgatggccctgggctgcctgtgcatcatcatggtgctgagcaaaggagctgagttcctgctgcgggtgggcgctgtgtgcttcggcctgagcggcctgctgctgctggtgtccctggaggtgttccgccacagcgtgcgggccctgctgcagagggtgtccccagagcccccaccagccccccggctgacctatgagtacagctggagcctgggctgcggcgtgggcgccggcctcatcctgctgctgggcgccggctgcttcctgctgctgaccctgcccagctggccctggggcagcctgtgccccaagaggggccaccgggccacctag

SEQ ID NO: 145808 - DNA, 645 bp, synthetic construct
  misc_feature 1..645: note = Description of Artificial Sequence: Synthetic coding sequence
  source 1..645: mol_type = other DNA
atgatgtggagcaacttcttcctgcaggaggagaacagaagaagaggagctgctggaagaagaagagcccacggccagggccgcagcggcctgaccccagagcgggagggcaaggtgaagctggccctgctgctggccgctgtgggcgccaccctggccgtgctgtctgtgggcacagagttctgggtggagctgaacacctacaaggccaatggatctgctgtgtgtgaggccgcccacctgggcctgtggaaggcctgcaccaagaggctgtggcaggctgatgtgcctgtggaccgggacacctgtggccctgctgagctgcctggagaggccaactgcacctacttcaagttcttcaccaccggggagaatgcccgcatcttccagaggaccaccaagaagggcctgctgctgctggtgtccctggaggtgttccgccacagcgtgcgggccctgctgcagagggtgtccccagagcccccaccagccccccggctgacctatgagtacagctggagcctgggctgcggcgtgggcgccggcctcatcctgctgctgggcgccggctgcttcctgctgctgaccctgcccagctggccctggggcagcctgtgccccaagaggggccaccgggccacctag

SEQ ID NO: 145809 - DNA, 570 bp, synthetic construct
  misc_feature 1..570: note = Description of Artificial Sequence: Synthetic coding sequence
  source 1..570: mol_type = other DNA
atgatgtggagcaacttcttcctgcaggaggagaacagaagaagaggagctgctggaagaagaagagcccacggccagggccgcagcggcctgaccccagagcgggagggcaaggtgaagctggccctgctgctggccgctgtgggcgccaccctggccgtgctgtctgtgggcacagagttctgggtggagctgaacacctacaaggccaatggatctgctgtgtgtgaggccgcccacctgggcctgtggaaggcctgcaccaagaggctgtggcaggctgatgtgcctgtggaccgggacacctgtggccctgctgagctgcccggcggcctgctgctgctggtgtccctggaggtgttccgccacagcgtgcgggccctgctgcagagggtgtccccagagcccccaccagccccccggctgacctatgagtacagctggagcctgggctgcggcgtgggcgccggcctcatcctgctgctgggcgccggctgcttcctgctgctgaccctgcccagctggccctggggcagcctgtgccccaagaggggccaccgggccacctag

SEQ ID NO: 145810 - DNA, 321 bp, synthetic construct
  misc_feature 1..321: note = Description of Artificial Sequence: Synthetic coding sequence
  source 1..321: mol_type = other DNA
atgagcaccaacaacatgtctgacccccggcggcccaacaaggtgctgcgctacaagcccccaccttctgagtgcaacccagccctggatgaccccaccccagactacatgaacctgctgggcatgatcttctccatgtgtggcctgatgctgaagctgaagtggtgtgcctgggtggccgtgtactgcagcttcatcagctttgccaacagccgcagcagcgaggacaccaagcagatgatgagcagcttcatgctgagcatctctgctgtggtgatgagctacctgcagaacccccagcccatgaccccaccctggtag

SEQ ID NO: 145811 - DNA, 828 bp, synthetic construct
  misc_feature 1..828: note = Description of Artificial Sequence: Synthetic coding sequence
  source 1..828: mol_type = other DNA
atgagccactgcagcagccgggccctgaccctgctgagctctgtgtttggagcctgtggcctgctgctggtgggcattgctgtgtccacagactactggctgtacatggaggagggcaccgtgctgccccagaaccagaccacagaggtgaagatggccctgcacgccggcctgtggagggtgtgcttctttgctggccgggagaagggccgctgtgtggccagcgagtacttcctggagcctgagatcaacctggtgacagagaacacagagaacatcctgaagacagtgaggacagccacccccttccccatggtgtccctcttcctggtgttcaccgcctttgtgatcagcaacatcggccacatccggccccagaggaccatcctggcctttgtgtctggcatcttcttcatcctgagcggcctgagcctggtggtgggcctggtgctgtacatcagcagcatcaatgatgaggtgatgaaccggcccagcagcagcgagcagtacttccactaccgctatggctggagctttgcctttgctgccagcagcttcctgctgaaggagggcgctggggtgatgtctgtgtacctgttcaccaagagatatgcagaggaggagatgtaccggccccacccagccttctaccggccccggctgagtgactgcagcgactacagcggccagttcctgcagcctgaggcctggaggcggggccgcagccccagcgacatcagcagtgatgtgtccatccagatgacccagaactaccccccagccatcaagtacccagaccacctgcacatcagcaccagcccctgctag

SEQ ID NO: 145812 - DNA, 1278 bp, synthetic construct
  misc_feature 1..1278: note = Description of Artificial Sequence: Synthetic coding sequence
  source 1..1278: mol_type = other DNA
ctggagagcctgaagcgctggaatgaggagcggggcctgtggtgtgagaagggcgtgcaggtgctgctgaccaccgtgggcgcctttgctgccttcggcctgatgaccatcgccatcagcacagactactggctgtacacccgggccctgatctgcaacaccaccaacctgacagctggaggagatgatggcaccccccacagaggaggcggcggggccagcgagaagaaggaccccggcggcctgacccacagcggcctgtggaggatctgctgcctggagggcctgaagaggggcgtgtgtgtgaagatcaaccacttccctgaggacacagattatgaccatgattctgctgagtacctgctgcgggtggtgcgggccagcagcatcttccccatcctgagcgccatcctgctgctgctgggcggcgtgtgtgtggccgccagccgggtgtacaagagcaagaggaacatcatcctgggcgccggcatcctgtttgtggccgccggcctgagcaacatcattggagtcatcgtgtacatcagcgccaatgctggggagcccggccccaagagagatgaggagaagaagaaccactacagctatggctggagcttctactttggaggcctgtccttcatcctggccgaggtgattggagtgctggccgtgaacatctacatcgagaggagccgggaggcccactgccagagcagaagtgacctgctgaaggccggcggcggggccggcggcagcggcggcagcggccccagcgccatcctgcggctgcccagctaccgcttccgctacagaagaagaagccgcagcagcagccgcagcagcgagcccagccccagcagagatgccagccctgggggccctgggggccctggctttgccagcacagacatctccatgtacaccctgagccgggaccccagcaaaggatctgtggccgccggcctggccggggccggcggcggcggcggcggcgctgtgggcgccttcggcggggccgccggcggggccggcggcggcggcggcggcggcggcggggccggggctgagcgggaccggggcggggccagcggcttcctgaccctgcacaatgccttccccaaggaggccggcggcggcgtgacagtgacagtgactggacctccagcccccccagccccagcccccccagcccccagcgccccagcccctggcaccctggccaaggaggccgccgccagcaacaccaacaccctgaacaggaagaccacccctgtgtag

SEQ ID NO: 145813 - DNA, 6540 bp, synthetic construct
  misc_feature 1..6540: note = Description of Artificial Sequence: Synthetic coding sequence
  source 1..6540: mol_type = other DNA
atggtgaatgaaaacaccaggatgtacatccctgaggagaaccaccagggcagcaactacggcagccccaggcctgcccacgccaacatgaatgccaatgctgctgctggcctggcccctgagcacatccccacccctggggccgccctgtcctggcaggccgccattgatgctgcccggcaggccaagctgatgggcagcgctggaaatgccaccatcagcacagtgagcagcacccagaggaagaggcagcagtatggcaagcccaagaagcagggcagcaccacagccacccggcccccccgggccctgctgtgcctgaccctgaagaaccccatccggcgggcctgcatcagcatcgtggagtggaagccctttgagatcatcatcctgctgaccatctttgccaactgtgtggccctggccatctacatccccttcccagaagatgacagcaatgccaccaacagcaacctggagcgggtggagtacctgttcctgatcatcttcaccgtggaggccttcctgaaggtgattgcctacggcctgctcttccaccccaatgcctacctgagaaatggctggaacctgctggacttcatcatcgtggtggtgggcctcttcagcgccatcctggagcaggccaccaaggcagatggagccaatgccctgggcggcaaaggagctggctttgatgtgaaggccctgcgggccttccgggtgctgcggcccctgcggctggtgtctggagtgcccagcctgcaggtggtgctgaacagcatcatcaaggccatggtgcccctgctgcacatcgccctgctggtgctgtttgtgatcatcatctatgccatcatcggcctggagctgttcatgggcaagatgcacaagacctgctacaaccaggagggcattgctgatgtgcctgcagaagatgaccccagcccctgtgccctggagaccggccacggccggcagtgccagaatggcaccgtgtgcaagccaggctgggatggccccaagcacggcatcaccaactttgacaactttgcctttgccatgctgactgtgttccagtgcatcaccatggagggctggacagatgtgctgtactgggtgaatgatgctgtgggccgggactggccctggatctactttgtgaccctcatcatcatcggcagcttctttgtgctgaacctggtgctgggcgtgctgtctggagagttcagcaaggagcgggagaaggccaaggcccggggggacttccagaagctgcgggagaagcagcagctggaggaggacctgaagggctacctggactggatcacccaggctgaagatattgatcctgaaaatgaagatgagggcatggatgaggagaagcccaggaacatgtccatgcccaccagcgagacagaatctgtgaacacagaaaatgtggccggcggggacatcgagggggagaactgtggggcccggctggcccaccgcatcagcaagagcaagttcagccgctactggaggcgctggaaccgcttctgcaggaggaagtgcagagctgctgtgaagagcaatgtgttctactggctggtgatcttcctggtgttcctgaacaccctgaccatcgccagcgagcactacaaccagcccaactggctgacagaggtgcaggacacagccaacaaggccctgctggccctcttcaccgctgagatgctgctgaagatgtacagcctgggcctgcaggcctactttgtgtccctcttcaacagatttgactgctttgtggtgtgtggcggcatcctggagaccatcctggtggagaccaagatcatgagccccctgggcatctctgtgctgcgctgtgtgcggctgctgcgcatcttcaagatcacccgctactggaacagcctgagcaacctggtggccagcctgctgaacagcgtgcgcagcatcgccagcctgctgctgctgctcttcctgttcatcatcatcttcagcctgctgggcatgcagctgtttggaggcaagttcaactttgatgagatgcagaccaggaggagcacctttgacaacttcccccagagcctgctgaccgtcttccagatcctgaccggggaggactggaacagcgtgatgtatgatggcatcatggcctatggaggccccagcttccctggcatgctggtgtgcatctacttcatcatcctcttcatctgtggcaactacatcctgctgaatgtgttcctggccatcgctgtggacaacctggctgatgctgagagcctgaccagcgcccagaaggaggaggaggaggagaaggagaggaagaagctggccaggacagccagccctgagaagaagcaggagctggtggagaagccagctgtgggggagagcaaggaggagaagattgagctgaagagcatcacagcagatggagagagccccccagccaccaagatcaacatggatgacctgcagcccaatgaaaatgaagacaagagcccctaccccaaccctgagaccactggagaggaggatgaggaggagcctgagatgcctgtgggcccccggccccggcccctgtctgagctgcacctgaaggagaaggctgtgcccatgcctgaggccagcgccttcttcatcttcagcagcaacaaccgcttccggctgcagtgccaccgcatcgtgaatgacaccatcttcaccaacctgatcctcttcttcatcctgctgagcagcatcagcctggccgctgaggaccctgtgcagcacaccagcttcaggaaccacatcctcttctactttgacatcgtgttcaccaccatcttcaccatcgagatcgccctgaagatgacagcctatggagccttcctgcacaagggcagcttctgcaggaactacttcaacatcctggacctgctggtggtgtctgtgtccctcatcagctttggcatccagagcagcgccatcaacgtggtgaagatcctgcgggtgctgcgggtgctgcggcccctgcgggccatcaacagagccaagggcctgaagcacgtggtgcagtgtgtgtttgtggccatccgcaccatcggcaacatcgtcatcgtgaccaccctgctgcagttcatgtttgcctgcatcggcgtgcagctgttcaagggcaagctgtacacctgcagcgacagcagcaagcagacagaagctgagtgcaagggcaactacatcacctacaaggatggagaggtggaccaccccatcatccagcccaggtcctgggagaacagcaagtttgattttgacaacgtgctggccgccatgatggccctcttcaccgtgtccacctttgagggctggccagagctgctgtaccgcagcattgacagccacacagaggacaagggccccatctacaactacagagtggagatcagcatcttcttcatcatctacatcatcatcatcgccttcttcatgatgaacatctttgtgggcttcgtcatcgtgaccttccaggagcagggcgagcaggagtacaagaactgtgagctggacaagaaccagaggcagtgtgtggagtatgccctgaaggcccggcccctgcggcgctacatccccaagaaccagcaccagtacaaggtgtggtacgtggtgaacagcacctactttgagtacctgatgtttgtgctgatcctgctgaacaccatctgcctggccatgcagcactacggccagagctgcctcttcaagatcgccatgaacatcctgaacatgctgttcaccggcctcttcaccgtggagatgatcctgaagctgattgccttcaagcccaagcactacttctgtgatgcctggaacacctttgatgccctgattgtggtgggcagcatcgtggacatcgccatcacagaggtgaacccagctgagcacacccagtgcagccccagcatgggccccagctgcagccacccccccctggccgtgctgacagcccctcctgtggctgatggcttccagaatgctgaggagaacagccgcatcagcatcaccttcttccgcctcttccgggtgatgaggctggtgaagctgctgagcagaggagagggcatccgcaccctgctgtggaccttcatcaagagcttccaggccctgccctacgtggccctgctgattgtgatgctgttcttcatctatgctgtgattggcatgcaggtgtttgggaagatcgccctgaatgacaccacagagatcaacagaaacaacaacttccagaccttcccccaggccgtgctgctgctcttccgctgtgccaccggggaggcctggcaggacatcatgctggcctgcatgcctgggaagaagtgtgcccctgagagcgagcccagcaacagcacagaaggagagaccccctgtggcagcagctttgctgtgttctacttcatctccttctacatgctgtgtgccttcctgatcatcaacctgtttgtggccgtcatcatggacaactttgactacctgacccgggactggagcatcctgggcccccaccacctggatgagttcaagaggatctgggccgagtatgaccctgaggccaagggccgcatcaagcacctggatgtggtgaccctgctgcggcgcatccagccccccctgggctttgggaagctgtgcccccaccgggtggcctgcaagaggctggtgtccatgaacatgcccctgaacagtgatggcaccgtgatgtttaatgccaccctgtttgccctggtgaggacagccctgcgcatcaagacagaggagggccccagccccagcgaggcccaccagggcgctgaggaccccttccggcctgctggcaacctggagcaggccaatgaggagctgcgggccatcatcaagaagatctggaagaggacctccatgaagctgctggaccaggtggtgcccccagctggagatgatgaggtgacagtgggcaagttctacgccaccttcctgatccaggagtacttcaggaagttcaagaagaggaaggagcagggcctggtgggcaagcccagccagagaaatgccctgagcctgcaggccggcctgcggaccctgcatgacatcggccctgagatcagaagagccatcagcggggacctgacagctgaggaggagctggacaaggccatgaaggaggccgtgtctgctgcctctgaagatgacatcttccggcgggccggcggcctgtttggaaatcatgtgtcctactaccagagtgatggccgcagcgccttcccccagaccttcaccacccagaggcccctgcacatcaacaaggccggcagcagccagggcgacacagagagccccagccatgagaagctggtggacagcaccttcacccccagcagctacagcagcacaggcagcaatgccaacatcaacaatgccaacaacacagccctgggccgcctgcccaggcctgctggctaccccagcacagtgtccacagtggagggccacggcccccccctgagccctgccatccgggtgcaggaggtggcctggaagctgagcagcaaccgctgccacagccgggagagccaggccgccatggccggccaggaggagaccagccaggatgagacctatgaggtgaagatgaaccacgacacagaggcctgcagcgagcccagcctgctgagcacagagatgctgagctaccaggatgatgagaaccggcagctgaccctgcctgaggaggacaagagggacatccggcagagccccaagaggggcttcctgcggagcgccagcctgggccggcgggccagcttccacctggagtgcctgaagaggcagaaggaccggggcggggacatcagccagaagacagtgctgcccctgcacctggtgcaccaccaggccctggccgtggccggcctgagccccctgctgcagaggagccacagccctgccagcttcccccggccctttgccaccccaccagccaccccaggcagccggggctggccaccccagcctgtgcccaccctgcggctggagggcgtggagagcagcgagaagctgaacagcagcttccccagcatccactgcggctcctgggccgagaccaccccaggcggcggcggcagcagcgctgcccggcgggtgcggcctgtgtccctgatggtgcccagccaggccggggcccctggccggcagttccacggcagcgccagcagcctggtggaggccgtgctgatcagcgagggcctgggccagtttgcccaggaccccaagttcatcgaggtgaccacccaggagctggctgatgcctgtgacatgaccatcgaggagatggagagcgctgctgacaacatcctgagcggcggggccccccagagccccaacggggccctgctgccctttgtgaactgcagagatgctggccaggacagagctggaggagaagaagatgctggctgtgtgcgggcccggggccggcccagcgaggaggagctgcaggacagccgggtgtatgtgagcagcctgtag

SEQ ID NO: 145814 - DNA, 6561 bp, synthetic construct
  misc_feature 1..6561: note = Description of Artificial Sequence: Synthetic coding sequence
  source 1..6561: mol_type = other DNA
atggtgaatgaaaacaccaggatgtacatccctgaggagaaccaccagggcagcaactacggcagccccaggcctgcccacgccaacatgaatgccaatgctgctgctggcctggcccctgagcacatccccacccctggggccgccctgtcctggcaggccgccattgatgctgcccggcaggccaagctgatgggcagcgctggaaatgccaccatcagcacagtgagcagcacccagaggaagaggcagcagtatggcaagcccaagaagcagggcagcaccacagccacccggcccccccgggccctgctgtgcctgaccctgaagaaccccatccggcgggcctgcatcagcatcgtggagtggaagccctttgagatcatcatcctgctgaccatctttgccaactgtgtggccctggccatctacatccccttcccagaagatgacagcaatgccaccaacagcaacctggagcgggtggagtacctgttcctgatcatcttcaccgtggaggccttcctgaaggtgattgcctacggcctgctcttccaccccaatgcctacctgagaaatggctggaacctgctggacttcatcatcgtggtggtgggcctcttcagcgccatcctggagcaggccaccaaggcagatggagccaatgccctgggcggcaaaggagctggctttgatgtgaaggccctgcgggccttccgggtgctgcggcccctgcggctggtgtctggagtgcccagcctgcaggtggtgctgaacagcatcatcaaggccatggtgcccctgctgcacatcgccctgctggtgctgtttgtgatcatcatctatgccatcatcggcctggagctgttcatgggcaagatgcacaagacctgctacaaccaggagggcattgctgatgtgcctgcagaagatgaccccagcccctgtgccctggagaccggccacggccggcagtgccagaatggcaccgtgtgcaagccaggctgggatggccccaagcacggcatcaccaactttgacaactttgcctttgccatgctgactgtgttccagtgcatcaccatggagggctggacagatgtgctgtactgggtgaatgatgctgtgggccgggactggccctggatctactttgtgaccctcatcatcatcggcagcttctttgtgctgaacctggtgctgggcgtgctgtctggagagttcagcaaggagcgggagaaggccaaggcccggggggacttccagaagctgcgggagaagcagcagctggaggaggacctgaagggctacctggactggatcacccaggctgaagatattgatcctgaaaatgaagatgagggcatggatgaggagaagcccaggaacatgtccatgcccaccagcgagacagaatctgtgaacacagaaaatgtggccggcggggacatcgagggggagaactgtggggcccggctggcccaccgcatcagcaagagcaagttcagccgctactggaggcgctggaaccgcttctgcaggaggaagtgcagagctgctgtgaagagcaatgtgttctactggctggtgatcttcctggtgttcctgaacaccctgaccatcgccagcgagcactacaaccagcccaactggctgacagaggtgcaggacacagccaacaaggccctgctggccctcttcaccgctgagatgctgctgaagatgtacagcctgggcctgcaggcctactttgtgtccctcttcaacagatttgactgctttgtggtgtgtggcggcatcctggagaccatcctggtggagaccaagatcatgagccccctgggcatctctgtgctgcgctgtgtgcggctgctgcgcatcttcaagatcacccgctactggaacagcctgagcaacctggtggccagcctgctgaacagcgtgcgcagcatcgccagcctgctgctgctgctcttcctgttcatcatcatcttcagcctgctgggcatgcagctgtttggaggcaagttcaactttgatgagatgcagaccaggaggagcacctttgacaacttcccccagagcctgctgaccgtcttccagatcctgaccggggaggactggaacagcgtgatgtatgatggcatcatggcctatggaggccccagcttccctggcatgctggtgtgcatctacttcatcatcctcttcatctgtggcaactacatcctgctgaatgtgttcctggccatcgctgtggacaacctggctgatgctgagagcctgaccagcgcccagaaggaggaggaggaggagaaggagaggaagaagctggccaggacagccagccctgagaagaagcaggagctggtggagaagccagctgtgggggagagcaaggaggagaagattgagctgaagagcatcacagcagatggagagagccccccagccaccaagatcaacatggatgacctgcagcccaatgaaaatgaagacaagagcccctaccccaaccctgagaccactggagaggaggatgaggaggagcctgagatgcctgtgggcccccggccccggcccctgtctgagctgcacctgaaggagaaggctgtgcccatgcctgaggccagcgccttcttcatcttcagcagcaacaaccgcttccggctgcagtgccaccgcatcgtgaatgacaccatcttcaccaacctgatcctcttcttcatcctgctgagcagcatcagcctggccgctgaggaccctgtgcagcacaccagcttcaggaaccacatcctcttctactttgacatcgtgttcaccaccatcttcaccatcgagatcgccctgaagatcctgggcaatgctgactatgtgttcaccagcatcttcaccctggagatcatcctgaagatgacagcctatggagccttcctgcacaagggcagcttctgcaggaactacttcaacatcctggacctgctggtggtgtctgtgtccctcatcagctttggcatccagagcagcgccatcaacgtggtgaagatcctgcgggtgctgcgggtgctgcggcccctgcgggccatcaacagagccaagggcctgaagcacgtggtgcagtgtgtgtttgtggccatccgcaccatcggcaacatcgtcatcgtgaccaccctgctgcagttcatgtttgcctgcatcggcgtgcagctgttcaagggcaagctgtacacctgcagcgacagcagcaagcagacagaagctgagtgcaagggcaactacatcacctacaaggatggagaggtggaccaccccatcatccagcccaggtcctgggagaacagcaagtttgattttgacaacgtgctggccgccatgatggccctcttcaccgtgtccacctttgagggctggccagagctgctgtaccgcagcattgacagccacacagaggacaagggccccatctacaactacagagtggagatcagcatcttcttcatcatctacatcatcatcatcgccttcttcatgatgaacatctttgtgggcttcgtcatcgtgaccttccaggagcagggcgagcaggagtacaagaactgtgagctggacaagaaccagaggcagtgtgtggagtatgccctgaaggcccggcccctgcggcgctacatccccaagaaccagcaccagtacaaggtgtggtacgtggtgaacagcacctactttgagtacctgatgtttgtgctgatcctgctgaacaccatctgcctggccatgcagcactacggccagagctgcctcttcaagatcgccatgaacatcctgaacatgctgttcaccggcctcttcaccgtggagatgatcctgaagctgattgccttcaagcccaagggctacttcagtgacccctggaatgtgtttgacttcctgattgtcatcggcagcatcattgatgtgatcctgtctgagaccaaccactacttctgtgatgcctggaacacctttgatgccctgattgtggtgggcagcatcgtggacatcgccatcacagaggtgaacccagctgagcacacccagtgcagccccagcatgaatgctgaggagaacagccgcatcagcatcaccttcttccgcctcttccgggtgatgaggctggtgaagctgctgagcagaggagagggcatccgcaccctgctgtggaccttcatcaagagcttccaggccctgccctacgtggccctgctgattgtgatgctgttcttcatctatgctgtgattggcatgcaggtgtttgggaagatcgccctgaatgacaccacagagatcaacagaaacaacaacttccagaccttcccccaggccgtgctgctgctcttccgctgtgccaccggggaggcctggcaggacatcatgctggcctgcatgcctgggaagaagtgtgcccctgagagcgagcccagcaacagcacagaaggagagaccccctgtggcagcagctttgctgtgttctacttcatctccttctacatgctgtgtgccttcctgatcatcaacctgtttgtggccgtcatcatggacaactttgactacctgacccgggactggagcatcctgggcccccaccacctggatgagttcaagaggatctgggccgagtatgaccctgaggccaagggccgcatcaagcacctggatgtggtgaccctgctgcggcgcatccagccccccctgggctttgggaagctgtgcccccaccgggtggcctgcaagaggctggtgtccatgaacatgcccctgaacagtgatggcaccgtgatgtttaatgccaccctgtttgccctggtgaggacagccctgcgcatcaagacagagggcaacctggagcaggccaatgaggagctgcgggccatcatcaagaagatctggaagaggacctccatgaagctgctggaccaggtggtgcccccagctggagatgatgaggtgacagtgggcaagttctacgccaccttcctgatccaggagtacttcaggaagttcaagaagaggaaggagcagggcctggtgggcaagcccagccagagaaatgccctgagcctgcaggccggcctgcggaccctgcatgacatcggccctgagatccggcgggccatcagcggggacctgacagctgaggaggagctggacaaggccatgaaggaggccgtgtctgctgcctctgaagatgacatcttcagaagagctgggggcctgtttggaaaccacgtgtcctactaccagagtgatggccgcagcgccttcccccagaccttcaccacccagaggcccctgcacatcaacaaggccggcagcagccagggcgacacagagagccccagccatgagaagctggtggacagcaccttcacccccagcagctacagcagcacaggcagcaatgccaacatcaacaatgccaacaacacagccctgggccgcctgcccaggcctgctggctaccccagcacagtgtccacagtggagggccacggcccccccctgagccctgccatccgggtgcaggaggtggcctggaagctgagcagcaaccgctgccacagccgggagagccaggccgccatggccggccaggaggagaccagccaggatgagacctatgaggtgaagatgaaccacgacacagaggcctgcagcgagcccagcctgctgagcacagagatgctgagctaccaggatgatgaaaatcggcagctgaccctgcctgaggaggacaagagggacatccggcagagccccaagaggggcttcctgcggagcgccagcctgggcagaagagccagcttccacctggagtgcctgaagaggcagaaggacagaggaggagacatcagccagaagacagtgctgcccctgcacctggtgcaccaccaggccctggccgtggccggcctgagccccctgctgcagaggagccacagccctgccagcttcccccggccctttgccaccccaccagccaccccaggcagccggggctggccaccccagcctgtgcccaccctgcggctggagggcgtggagagcagcgagaagctgaacagcagcttccccagcatccactgcggctcctgggccgagaccacccctgggggcggcggcagcagcgctgccaggagagtgcggcctgtgtccctgatggtgcccagccaggccggggcccctggccggcagttccacggcagcgccagcagcctggtggaggccgtgctgatcagcgagggcctgggccagtttgcccaggaccccaagttcatcgaggtgaccacccaggagctggctgatgcctgtgacatgaccatcgaggagatggagagcgctgctgacaacatcctgtctggaggagccccccagagccccaatggagccctgctgccctttgtgaactgcagagatgctggccaggaccgggccggcggggaggaggatgctggctgtgtgcgggcccggggccggcccagcgaggaggagctgcaggacagccgggtgtatgtgagcagcctgtag

SEQ ID NO: 145815 - DNA, 6441 bp, synthetic construct
  misc_feature 1..6441: note = Description of Artificial Sequence: Synthetic coding sequence
  source 1..6441: mol_type = other DNA
atggtgaatgaaaacaccaggatgtacatccctgaggagaaccaccagggcagcaactacggcagccccaggcctgcccacgccaacatgaatgccaatgctgctgctggcctggcccctgagcacatccccacccctggggccgccctgtcctggcaggccgccattgatgctgcccggcaggccaagctgatgggcagcgctggaaatgccaccatcagcacagtgagcagcacccagaggaagaggcagcagtatggcaagcccaagaagcagggcagcaccacagccacccggcccccccgggccctgctgtgcctgaccctgaagaaccccatccggcgggcctgcatcagcatcgtggagtggaagccctttgagatcatcatcctgctgaccatctttgccaactgtgtggccctggccatctacatccccttcccagaagatgacagcaatgccaccaacagcaacctggagcgggtggagtacctgttcctgatcatcttcaccgtggaggccttcctgaaggtgattgcctacggcctgctcttccaccccaatgcctacctgagaaatggctggaacctgctggacttcatcatcgtggtggtgggcctcttcagcgccatcctggagcaggccaccaaggcagatggagccaatgccctgggcggcaaaggagctggctttgatgtgaaggccctgcgggccttccgggtgctgcggcccctgcggctggtgtctggagtgcccagcctgcaggtggtgctgaacagcatcatcaaggccatggtgcccctgctgcacatcgccctgctggtgctgtttgtgatcatcatctatgccatcatcggcctggagctgttcatgggcaagatgcacaagacctgctacaaccaggagggcattgctgatgtgcctgcagaagatgaccccagcccctgtgccctggagaccggccacggccggcagtgccagaatggcaccgtgtgcaagccaggctgggatggccccaagcacggcatcaccaactttgacaactttgcctttgccatgctgactgtgttccagtgcatcaccatggagggctggacagatgtgctgtactgggtgaatgatgctgtgggccgggactggccctggatctactttgtgaccctcatcatcatcggcagcttctttgtgctgaacctggtgctgggcgtgctgtctggagagttcagcaaggagcgggagaaggccaaggcccggggggacttccagaagctgcgggagaagcagcagctggaggaggacctgaagggctacctggactggatcacccaggctgaagatattgatcctgaaaatgaagatgagggcatggatgaggagaagcccaggaacatgtccatgcccaccagcgagacagaatctgtgaacacagaaaatgtggccggcggggacatcgagggggagaactgtggggcccggctggcccaccgcatcagcaagagcaagttcagccgctactggaggcgctggaaccgcttctgcaggaggaagtgcagagctgctgtgaagagcaatgtgttctactggctggtgatcttcctggtgttcctgaacaccctgaccatcgccagcgagcactacaaccagcccaactggctgacagaggtgcaggacacagccaacaaggccctgctggccctcttcaccgctgagatgctgctgaagatgtacagcctgggcctgcaggcctactttgtgtccctcttcaacagatttgactgctttgtggtgtgtggcggcatcctggagaccatcctggtggagaccaagatcatgagccccctgggcatctctgtgctgcgctgtgtgcggctgctgcgcatcttcaagatcacccgctactggaacagcctgagcaacctggtggccagcctgctgaacagcgtgcgcagcatcgccagcctgctgctgctgctcttcctgttcatcatcatcttcagcctgctgggcatgcagctgtttggaggcaagttcaactttgatgagatgcagaccaggaggagcacctttgacaacttcccccagagcctgctgaccgtcttccagatcctgaccggggaggactggaacagcgtgatgtatgatggcatcatggcctatggaggccccagcttccctggcatgctggtgtgcatctacttcatcatcctcttcatctgtggcaactacatcctgctgaatgtgttcctggccatcgctgtggacaacctggctgatgctgagagcctgaccagcgcccagaaggaggaggaggaggagaaggagaggaagaagctggccaggacagccagccctgagaagaagcaggagctggtggagaagccagctgtgggggagagcaaggaggagaagattgagctgaagagcatcacagcagatggagagagccccccagccaccaagatcaacatggatgacctgcagcccaatgaaaatgaagacaagagcccctaccccaaccctgagaccactggagaggaggatgaggaggagcctgagatgcctgtgggcccccggccccggcccctgtctgagctgcacctgaaggagaaggctgtgcccatgcctgaggccagcgccttcttcatcttcagcagcaacaaccgcttccggctgcagtgccaccgcatcgtgaatgacaccatcttcaccaacctgatcctcttcttcatcctgctgagcagcatcagcctggccgctgaggaccctgtgcagcacaccagcttcaggaaccacatcctgggcaatgctgactatgtgttcaccagcatcttcaccctggagatcatcctgaagatgacagcctatggagccttcctgcacaagggcagcttctgcaggaactacttcaacatcctggacctgctggtggtgtctgtgtccctcatcagctttggcatccagagcagcgccatcaacgtggtgaagatcctgcgggtgctgcgggtgctgcggcccctgcgggccatcaacagagccaagggcctgaagcacgtggtgcagtgtgtgtttgtggccatccgcaccatcggcaacatcgtcatcgtgaccaccctgctgcagttcatgtttgcctgcatcggcgtgcagctgttcaagggcaagctgtacacctgcagcgacagcagcaagcagacagaagctgagtgcaagggcaactacatcacctacaaggatggagaggtggaccaccccatcatccagcccaggtcctgggagaacagcaagtttgattttgacaacgtgctggccgccatgatggccctcttcaccgtgtccacctttgagggctggccagagctgctgtaccgcagcattgacagccacacagaggacaagggccccatctacaactacagagtggagatcagcatcttcttcatcatctacatcatcatcatcgccttcttcatgatgaacatctttgtgggcttcgtcatcgtgaccttccaggagcagggcgagcaggagtacaagaactgtgagctggacaagaaccagaggcagtgtgtggagtatgccctgaaggcccggcccctgcggcgctacatccccaagaaccagcaccagtacaaggtgtggtacgtggtgaacagcacctactttgagtacctgatgtttgtgctgatcctgctgaacaccatctgcctggccatgcagcactacggccagagctgcctcttcaagatcgccatgaacatcctgaacatgctgttcaccggcctcttcaccgtggagatgatcctgaagctgattgccttcaagcccaagcactacttctgtgatgcctggaacacctttgatgccctgattgtggtgggcagcatcgtggacatcgccatcacagaggtgaacaatgctgaggagaacagccgcatcagcatcaccttcttccgcctcttccgggtgatgaggctggtgaagctgctgagcagaggagagggcatccgcaccctgctgtggaccttcatcaagagcttccaggccctgccctacgtggccctgctgattgtgatgctgttcttcatctatgctgtgattggcatgcaggtgtttgggaagatcgccctgaatgacaccacagagatcaacagaaacaacaacttccagaccttcccccaggccgtgctgctgctcttccgctgtgccactggagaggcctggcaggacatcatgctggcctgcatgcctgggaagaagtgtgcccctgagagcgagcccagcaacagcacagaaggagagaccccctgtggcagcagctttgctgtgttctacttcatctccttctacatgctgtgtgccttcctgatcatcaacctgtttgtggccgtcatcatggacaactttgactacctgacccgggactggagcatcctgggcccccaccacctggatgagttcaagaggatctgggccgagtatgaccctgaggccaagggccgcatcaagcacctggatgtggtgaccctgctgcggcgcatccagccccccctgggctttgggaagctgtgcccccaccgggtggcctgcaagaggctggtgtccatgaacatgcccctgaacagtgatggcaccgtgatgtttaatgccaccctgtttgccctggtgaggacagccctgcgcatcaagacagaggagggccccagccccagcgaggcccaccagggcgctgaggaccccttccggcctgctggcaacctggagcaggccaatgaggagctgcgggccatcatcaagaagatctggaagaggacctccatgaagctgctggaccaggtggtgcccccagctggagatgatgaggtgacagtgggcaagttctacgccaccttcctgatccaggagtacttcaggaagttcaagaagaggaaggagcagggcctggtgggcaagcccagccagagaaatgccctgagcctgcaggccggcctgcggaccctgcatgacatcggccctgagatccggcgggccatcagcggggacctgacagctgaggaggagctggacaaggccatgaaggaggccgtgtctgctgcctctgaagatgacatcttcagaagagctgggggcctgtttggaaaccacgtgtcctactaccagagtgatggccgcagcgccttcccccagaccttcaccacccagaggcccctgcacatcaacaaggccggcagcagccagggcgacacagagagccccagccatgagaagctggtggacagcaccttcacccccagcagctacagcagcacaggcagcaatgccaacatcaacaatgccaacaacacagccctgggccgcctgcccaggcctgctggctaccccagcacagtgtccacagtggagggccacggcccccccctgagccctgccatccgggtgcaggaggtggcctggaagctgagcagcaaccgctgccacagccgggagagccaggccgccatggccggccaggaggagaccagccaggatgagacctatgaggtgaagatgaaccacgacacagaggcctgcagcgagcccagcctgctgagcacagagatgctgagctaccaggatgatgaaaatcggcagctgaccctgcctgaggaggacaagagggacatccggcagagccccaagaggggcttcctgcggagcgccagcctgggcagaagagccagcttccacctggagtgcctgaagaggcagaaggacagaggaggagacatcagccagaagacagtgctgcccctgcacctggtgcaccaccaggccctggccgtggccggcctgagccccctgctgcagaggagccacagccctgccagcttcccccggccctttgccaccccaccagccaccccaggcagccggggctggccaccccagcctgtgcccaccctgcggctggagggcgtggagagcagcgagaagctgaacagcagcttccccagcatccactgcggctcctgggccgagaccacccctgggggcggcggcagcagcgctgccaggagagtgcggcctgtgtccctgatggtgcccagccaggccggggcccctggccggcagttccacggcagcgccagcagcctggtggaggccgtgctgatcagcgagggcctgggccagtttgcccaggaccccaagttcatcgaggtgaccacccaggagctggctgatgcctgtgacatgaccatcgaggagatggagagcgctgctgacaacatcctgtctggaggagccccccagagccccaatggagccctgctgccctttgtgaactgcagagatgctggccaggaccgggccggcggggaggaggatgctggctgtgtgcgggcccggggccggcccagcgaggaggagctgcaggacagccgggtgtatgtgagcagcctgtag

SEQ ID NO: 145816 - DNA, 6441 bp, synthetic construct
  misc_feature 1..6441: note = Description of Artificial Sequence: Synthetic coding sequence
  source 1..6441: mol_type = other DNA
atggtgaatgaaaacaccaggatgtacatccctgaggagaaccaccagggcagcaactacggcagccccaggcctgcccacgccaacatgaatgccaatgctgctgctggcctggcccctgagcacatccccacccctggggccgccctgtcctggcaggccgccattgatgctgcccggcaggccaagctgatgggcagcgctggaaatgccaccatcagcacagtgagcagcacccagaggaagaggcagcagtatggcaagcccaagaagcagggcagcaccacagccacccggcccccccgggccctgctgtgcctgaccctgaagaaccccatccggcgggcctgcatcagcatcgtggagtggaagccctttgagatcatcatcctgctgaccatctttgccaactgtgtggccctggccatctacatccccttcccagaagatgacagcaatgccaccaacagcaacctggagcgggtggagtacctgttcctgatcatcttcaccgtggaggccttcctgaaggtgattgcctacggcctgctcttccaccccaatgcctacctgagaaatggctggaacctgctggacttcatcatcgtggtggtgggcctcttcagcgccatcctggagcaggccaccaaggcagatggagccaatgccctgggcggcaaaggagctggctttgatgtgaaggccctgcgggccttccgggtgctgcggcccctgcggctggtgtctggagtgcccagcctgcaggtggtgctgaacagcatcatcaaggccatggtgcccctgctgcacatcgccctgctggtgctgtttgtgatcatcatctatgccatcatcggcctggagctgttcatgggcaagatgcacaagacctgctacaaccaggagggcattgctgatgtgcctgcagaagatgaccccagcccctgtgccctggagaccggccacggccggcagtgccagaatggcaccgtgtgcaagccaggctgggatggccccaagcacggcatcaccaactttgacaactttgcctttgccatgctgactgtgttccagtgcatcaccatggagggctggacagatgtgctgtactgggtgaatgatgctgtgggccgggactggccctggatctactttgtgaccctcatcatcatcggcagcttctttgtgctgaacctggtgctgggcgtgctgtctggagagttcagcaaggagcgggagaaggccaaggcccggggggacttccagaagctgcgggagaagcagcagctggaggaggacctgaagggctacctggactggatcacccaggctgaagatattgatcctgaaaatgaagatgagggcatggatgaggagaagcccaggaacatgtccatgcccaccagcgagacagaatctgtgaacacagaaaatgtggccggcggggacatcgagggggagaactgtggggcccggctggcccaccgcatcagcaagagcaagttcagccgctactggaggcgctggaaccgcttctgcaggaggaagtgcagagctgctgtgaagagcaatgtgttctactggctggtgatcttcctggtgttcctgaacaccctgaccatcgccagcgagcactacaaccagcccaactggctgacagaggtgcaggacacagccaacaaggccctgctggccctcttcaccgctgagatgctgctgaagatgtacagcctgggcctgcaggcctactttgtgtccctcttcaacagatttgactgctttgtggtgtgtggcggcatcctggagaccatcctggtggagaccaagatcatgagccccctgggcatctctgtgctgcgctgtgtgcggctgctgcgcatcttcaagatcacccgctactggaacagcctgagcaacctggtggccagcctgctgaacagcgtgcgcagcatcgccagcctgctgctgctgctcttcctgttcatcatcatcttcagcctgctgggcatgcagctgtttggaggcaagttcaactttgatgagatgcagaccaggaggagcacctttgacaacttcccccagagcctgctgaccgtcttccagatcctgaccggggaggactggaacagcgtgatgtatgatggcatcatggcctatggaggccccagcttccctggcatgctggtgtgcatctacttcatcatcctcttcatctgtggcaactacatcctgctgaatgtgttcctggccatcgctgtggacaacctggctgatgctgagagcctgaccagcgcccagaaggaggaggaggaggagaaggagaggaagaagctggccaggacagccagccctgagaagaagcaggagctggtggagaagccagctgtgggggagagcaaggaggagaagattgagctgaagagcatcacagcagatggagagagccccccagccaccaagatcaacatggatgacctgcagcccaatgaaaatgaagacaagagcccctaccccaaccctgagaccactggagaggaggatgaggaggagcctgagatgcctgtgggcccccggccccggcccctgtctgagctgcacctgaaggagaaggctgtgcccatgcctgaggccagcgccttcttcatcttcagcagcaacaaccgcttccggctgcagtgccaccgcatcgtgaatgacaccatcttcaccaacctgatcctcttcttcatcctgctgagcagcatcagcctggccgctgaggaccctgtgcagcacaccagcttcaggaaccacatcctcttctactttgacatcgtgttcaccaccatcttcaccatcgagatcgccctgaagatgacagcctatggagccttcctgcacaagggcagcttctgcaggaactacttcaacatcctggacctgctggtggtgtctgtgtccctcatcagctttggcatccagagcagcgccatcaacgtggtgaagatcctgcgggtgctgcgggtgctgcggcccctgcgggccatcaacagagccaagggcctgaagcacgtggtgcagtgtgtgtttgtggccatccgcaccatcggcaacatcgtcatcgtgaccaccctgctgcagttcatgtttgcctgcatcggcgtgcagctgttcaagggcaagctgtacacctgcagcgacagcagcaagcagacagaagctgagtgcaagggcaactacatcacctacaaggatggagaggtggaccaccccatcatccagcccaggtcctgggagaacagcaagtttgattttgacaacgtgctggccgccatgatggccctcttcaccgtgtccacctttgagggctggccagagctgctgtaccgcagcattgacagccacacagaggacaagggccccatctacaactacagagtggagatcagcatcttcttcatcatctacatcatcatcatcgccttcttcatgatgaacatctttgtgggcttcgtcatcgtgaccttccaggagcagggcgagcaggagtacaagaactgtgagctggacaagaaccagaggcagtgtgtggagtatgccctgaaggcccggcccctgcggcgctacatccccaagaaccagcaccagtacaaggtgtggtacgtggtgaacagcacctactttgagtacctgatgtttgtgctgatcctgctgaacaccatctgcctggccatgcagcactacggccagagctgcctcttcaagatcgccatgaacatcctgaacatgctgttcaccggcctcttcaccgtggagatgatcctgaagctgattgccttcaagcccaagcactacttctgtgatgcctggaacacctttgatgccctgattgtggtgggcagcatcgtggacatcgccatcacagaggtgaacaatgctgaggagaacagccgcatcagcatcaccttcttccgcctcttccgggtgatgaggctggtgaagctgctgagcagaggagagggcatccgcaccctgctgtggaccttcatcaagagcttccaggccctgccctacgtggccctgctgattgtgatgctgttcttcatctatgctgtgattggcatgcaggtgtttgggaagatcgccctgaatgacaccacagagatcaacagaaacaacaacttccagaccttcccccaggccgtgctgctgctcttccgctgtgccactggagaggcctggcaggacatcatgctggcctgcatgcctgggaagaagtgtgcccctgagagcgagcccagcaacagcacagaaggagagaccccctgtggcagcagctttgctgtgttctacttcatctccttctacatgctgtgtgccttcctgatcatcaacctgtttgtggccgtcatcatggacaactttgactacctgacccgggactggagcatcctgggcccccaccacctggatgagttcaagaggatctgggccgagtatgaccctgaggccaagggccgcatcaagcacctggatgtggtgaccctgctgcggcgcatccagccccccctgggctttgggaagctgtgcccccaccgggtggcctgcaagaggctggtgtccatgaacatgcccctgaacagtgatggcaccgtgatgtttaatgccaccctgtttgccctggtgaggacagccctgcgcatcaagacagaggagggccccagccccagcgaggcccaccagggcgctgaggaccccttccggcctgctggcaacctggagcaggccaatgaggagctgcgggccatcatcaagaagatctggaagaggacctccatgaagctgctggaccaggtggtgcccccagctggagatgatgaggtgacagtgggcaagttctacgccaccttcctgatccaggagtacttcaggaagttcaagaagaggaaggagcagggcctggtgggcaagcccagccagagaaatgccctgagcctgcaggccggcctgcggaccctgcatgacatcggccctgagatccggcgggccatcagcggggacctgacagctgaggaggagctggacaaggccatgaaggaggccgtgtctgctgcctctgaagatgacatcttcagaagagctgggggcctgtttggaaaccacgtgtcctactaccagagtgatggccgcagcgccttcccccagaccttcaccacccagaggcccctgcacatcaacaaggccggcagcagccagggcgacacagagagccccagccatgagaagctggtggacagcaccttcacccccagcagctacagcagcacaggcagcaatgccaacatcaacaatgccaacaacacagccctgggccgcctgcccaggcctgctggctaccccagcacagtgtccacagtggagggccacggcccccccctgagccctgccatccgggtgcaggaggtggcctggaagctgagcagcaaccgctgccacagccgggagagccaggccgccatggccggccaggaggagaccagccaggatgagacctatgaggtgaagatgaaccacgacacagaggcctgcagcgagcccagcctgctgagcacagagatgctgagctaccaggatgatgaaaatcggcagctgaccctgcctgaggaggacaagagggacatccggcagagccccaagaggggcttcctgcggagcgccagcctgggcagaagagccagcttccacctggagtgcctgaagaggcagaaggacagaggaggagacatcagccagaagacagtgctgcccctgcacctggtgcaccaccaggccctggccgtggccggcctgagccccctgctgcagaggagccacagccctgccagcttcccccggccctttgccaccccaccagccaccccaggcagccggggctggccaccccagcctgtgcccaccctgcggctggagggcgtggagagcagcgagaagctgaacagcagcttccccagcatccactgcggctcctgggccgagaccacccctgggggcggcggcagcagcgctgccaggagagtgcggcctgtgtccctgatggtgcccagccaggccggggcccctggccggcagttccacggcagcgccagcagcctggtggaggccgtgctgatcagcgagggcctgggccagtttgcccaggaccccaagttcatcgaggtgaccacccaggagctggctgatgcctgtgacatgaccatcgaggagatggagagcgctgctgacaacatcctgtctggaggagccccccagagccccaatggagccctgctgccctttgtgaactgcagagatgctggccaggaccgggccggcggggaggaggatgctggctgtgtgcgggcccggggccggcccagcgaggaggagctgcaggacagccgggtgtatgtgagcagcctgtag

SEQ ID NO: 145817 - DNA, 6417 bp, synthetic construct
  misc_feature 1..6417: note = Description of Artificial Sequence: Synthetic coding sequence
  source 1..6417: mol_type = other DNA
atggtgaatgaaaacaccaggatgtacatccctgaggagaaccaccagggcagcaactacggcagccccaggcctgcccacgccaacatgaatgccaatgctgctgctggcctggcccctgagcacatccccacccctggggccgccctgtcctggcaggccgccattgatgctgcccggcaggccaagctgatgggcagcgctggaaatgccaccatcagcacagtgagcagcacccagaggaagaggcagcagtatggcaagcccaagaagcagggcagcaccacagccacccggcccccccgggccctgctgtgcctgaccctgaagaaccccatccggcgggcctgcatcagcatcgtggagtggaagccctttgagatcatcatcctgctgaccatctttgccaactgtgtggccctggccatctacatccccttcccagaagatgacagcaatgccaccaacagcaacctggagcgggtggagtacctgttcctgatcatcttcaccgtggaggccttcctgaaggtgattgcctacggcctgctcttccaccccaatgcctacctgagaaatggctggaacctgctggacttcatcatcgtggtggtgggcctcttcagcgccatcctggagcaggccaccaaggcagatggagccaatgccctgggcggcaaaggagctggctttgatgtgaaggccctgcgggccttccgggtgctgcggcccctgcggctggtgtctggagtgcccagcctgcaggtggtgctgaacagcatcatcaaggccatggtgcccctgctgcacatcgccctgctggtgctgtttgtgatcatcatctatgccatcatcggcctggagctgttcatgggcaagatgcacaagacctgctacaaccaggagggcattgctgatgtgcctgcagaagatgaccccagcccctgtgccctggagaccggccacggccggcagtgccagaatggcaccgtgtgcaagccaggctgggatggccccaagcacggcatcaccaactttgacaactttgcctttgccatgctgactgtgttccagtgcatcaccatggagggctggacagatgtgctgtactgggtgaatgatgctgtgggccgggactggccctggatctactttgtgaccctcatcatcatcggcagcttctttgtgctgaacctggtgctgggcgtgctgtctggagagttcagcaaggagcgggagaaggccaaggcccggggggacttccagaagctgcgggagaagcagcagctggaggaggacctgaagggctacctggactggatcacccaggctgaagatattgatcctgaaaatgaagatgagggcatggatgaggagaagcccaggaacatgtccatgcccaccagcgagacagaatctgtgaacacagaaaatgtggccggcggggacatcgagggggagaactgtggggcccggctggcccaccgcatcagcaagagcaagttcagccgctactggaggcgctggaaccgcttctgcaggaggaagtgcagagctgctgtgaagagcaatgtgttctactggctggtgatcttcctggtgttcctgaacaccctgaccatcgccagcgagcactacaaccagcccaactggctgacagaggtgcaggacacagccaacaaggccctgctggccctcttcaccgctgagatgctgctgaagatgtacagcctgggcctgcaggcctactttgtgtccctcttcaacagatttgactgctttgtggtgtgtggcggcatcctggagaccatcctggtggagaccaagatcatgagccccctgggcatctctgtgctgcgctgtgtgcggctgctgcgcatcttcaagatcacccgctactggaacagcctgagcaacctggtggccagcctgctgaacagcgtgcgcagcatcgccagcctgctgctgctgctcttcctgttcatcatcatcttcagcctgctgggcatgcagctgtttggaggcaagttcaactttgatgagatgcagaccaggaggagcacctttgacaacttcccccagagcctgctgaccgtcttccagatcctgaccggggaggactggaacagcgtgatgtatgatggcatcatggcctatggaggccccagcttccctggcatgctggtgtgcatctacttcatcatcctcttcatctgtggcaactacatcctgctgaatgtgttcctggccatcgctgtggacaacctggctgatgctgagagcctgaccagcgcccagaaggaggaggaggaggagaaggagaggaagaagctggccaggacagccagccctgagaagaagcaggagctggtggagaagccagctgtgggggagagcaaggaggagaagattgagctgaagagcatcacagcagatggagagagccccccagccaccaagatcaacatggatgacctgcagcccaatgaaaatgaagacaagagcccctaccccaaccctgagaccactggagaggaggatgaggaggagcctgagatgcctgtgggcccccggccccggcccctgtctgagctgcacctgaaggagaaggctgtgcccatgcctgaggccagcgccttcttcatcttcagcagcaacaaccgcttccggctgcagtgccaccgcatcgtgaatgacaccatcttcaccaacctgatcctcttcttcatcctgctgagcagcatcagcctggccgctgaggaccctgtgcagcacaccagcttcaggaaccacatcctcttctactttgacatcgtgttcaccaccatcttcaccatcgagatcgccctgaagatgacagcctatggagccttcctgcacaagggcagcttctgcaggaactacttcaacatcctggacctgctggtggtgtctgtgtccctcatcagctttggcatccagagcagcgccatcaacgtggtgaagatcctgcgggtgctgcgggtgctgcggcccctgcgggccatcaacagagccaagggcctgaagcacgtggtgcagtgtgtgtttgtggccatccgcaccatcggcaacatcgtcatcgtgaccaccctgctgcagttcatgtttgcctgcatcggcgtgcagctgttcaagggcaagctgtacacctgcagcgacagcagcaagcagacagaagctgagtgcaagggcaactacatcacctacaaggatggagaggtggaccaccccatcatccagcccaggtcctgggagaacagcaagtttgattttgacaacgtgctggccgccatgatggccctcttcaccgtgtccacctttgagggctggccagagctgctgtaccgcagcattgacagccacacagaggacaagggccccatctacaactacagagtggagatcagcatcttcttcatcatctacatcatcatcatcgccttcttcatgatgaacatctttgtgggcttcgtcatcgtgaccttccaggagcagggcgagcaggagtacaagaactgtgagctggacaagaaccagaggcagtgtgtggagtatgccctgaaggcccggcccctgcggcgctacatccccaagaaccagcaccagtacaaggtgtggtacgtggtgaacagcacctactttgagtacctgatgtttgtgctgatcctgctgaacaccatctgcctggccatgcagcactacggccagagctgcctcttcaagatcgccatgaacatcctgaacatgctgttcaccggcctcttcaccgtggagatgatcctgaagctgattgccttcaagcccaagggctacttcagtgacccctggaatgtgtttgacttcctgattgtcatcggcagcatcattgatgtgatcctgtctgagaccaacccagctgagcacacccagtgcagccccagcatgaatgctgaggagaacagccgcatcagcatcaccttcttccgcctcttccgggtgatgaggctggtgaagctgctgagcagaggagagggcatccgcaccctgctgtggaccttcatcaagagcttccaggccctgccctacgtggccctgctgattgtgatgctgttcttcatctatgctgtgattggcatgcaggtgtttgggaagatcgccctgaatgacaccacagagatcaacagaaacaacaacttccagaccttcccccaggccgtgctgctgctcttccgctgtgccaccggggaggcctggcaggacatcatgctggcctgcatgcctgggaagaagtgtgcccctgagagcgagcccagcaacagcacagaaggagagaccccctgtggcagcagctttgctgtgttctacttcatctccttctacatgctgtgtgccttcctgatcatcaacctgtttgtggccgtcatcatggacaactttgactacctgacccgggactggagcatcctgggcccccaccacctggatgagttcaagaggatctgggccgagtatgaccctgaggccaagggccgcatcaagcacctggatgtggtgaccctgctgcggcgcatccagccccccctgggctttgggaagctgtgcccccaccgggtggcctgcaagaggctggtgtccatgaacatgcccctgaacagtgatggcaccgtgatgtttaatgccaccctgtttgccctggtgaggacagccctgcgcatcaagacagagggcaacctggagcaggccaatgaggagctgcgggccatcatcaagaagatctggaagaggacctccatgaagctgctggaccaggtggtgcccccagctggagatgatgaggtgacagtgggcaagttctacgccaccttcctgatccaggagtacttcaggaagttcaagaagaggaaggagcagggcctggtgggcaagcccagccagagaaatgccctgagcctgcaggccggcctgcggaccctgcatgacatcggccctgagatccggcgggccatcagcggggacctgacagctgaggaggagctggacaaggccatgaaggaggccgtgtctgctgcctctgaagatgacatcttcagaagagctgggggcctgtttggaaaccacgtgtcctactaccagagtgatggccgcagcgccttcccccagaccttcaccacccagaggcccctgcacatcaacaaggccggcagcagccagggcgacacagagagccccagccatgagaagctggtggacagcaccttcacccccagcagctacagcagcacaggcagcaatgccaacatcaacaatgccaacaacacagccctgggccgcctgcccaggcctgctggctaccccagcacagtgtccacagtggagggccacggcccccccctgagccctgccatccgggtgcaggaggtggcctggaagctgagcagcaaccgctgccacagccgggagagccaggccgccatggccggccaggaggagaccagccaggatgagacctatgaggtgaagatgaaccacgacacagaggcctgcagcgagcccagcctgctgagcacagagatgctgagctaccaggatgatgaaaatcggcagctgaccctgcctgaggaggacaagagggacatccggcagagccccaagaggggcttcctgcggagcgccagcctgggcagaagagccagcttccacctggagtgcctgaagaggcagaaggacagaggaggagacatcagccagaagacagtgctgcccctgcacctggtgcaccaccaggccctggccgtggccggcctgagccccctgctgcagaggagccacagccctgccagcttcccccggccctttgccaccccaccagccaccccaggcagccggggctggccaccccagcctgtgcccaccctgcggctggagggcgtggagagcagcgagaagctgaacagcagcttccccagcatccactgcggctcctgggccgagaccacccctgggggcggcggcagcagcgctgccaggagagtgcggcctgtgtccctgatggtgcccagccaggccggggcccctggccggcagttccacggcagcgccagcagcctggtggaggccgtgctgatcagcgagggcctgggccagtttgcccaggaccccaagttcatcgaggtgaccacccaggagctggctgatgcctgtgacatgaccatcgaggagatggagagcgctgctgacaacatcctgtctggaggagccccccagagccccaatggagccctgctgccctttgtgaactgcagagatgctggccaggaccgggccggcggggaggaggatgctggctgtgtgcgggcccggggccggcccagcgaggaggagctgcaggacagccgggtgtatgtgagcagcctgtag

SEQ ID NO: 145818 - DNA, 6417 bp, synthetic construct
  misc_feature 1..6417: note = Description of Artificial Sequence: Synthetic coding sequence
  source 1..6417: mol_type = other DNA
atggtgaatgaaaacaccaggatgtacatccctgaggagaaccaccagggcagcaactacggcagccccaggcctgcccacgccaacatgaatgccaatgctgctgctggcctggcccctgagcacatccccacccctggggccgccctgtcctggcaggccgccattgatgctgcccggcaggccaagctgatgggcagcgctggaaatgccaccatcagcacagtgagcagcacccagaggaagaggcagcagtatggcaagcccaagaagcagggcagcaccacagccacccggcccccccgggccctgctgtgcctgaccctgaagaaccccatccggcgggcctgcatcagcatcgtggagtggaagccctttgagatcatcatcctgctgaccatctttgccaactgtgtggccctggccatctacatccccttcccagaagatgacagcaatgccaccaacagcaacctggagcgggtggagtacctgttcctgatcatcttcaccgtggaggccttcctgaaggtgattgcctacggcctgctcttccaccccaatgcctacctgagaaatggctggaacctgctggacttcatcatcgtggtggtgggcctcttcagcgccatcctggagcaggccaccaaggcagatggagccaatgccctgggcggcaaaggagctggctttgatgtgaaggccctgcgggccttccgggtgctgcggcccctgcggctggtgtctggagtgcccagcctgcaggtggtgctgaacagcatcatcaaggccatggtgcccctgctgcacatcgccctgctggtgctgtttgtgatcatcatctatgccatcatcggcctggagctgttcatgggcaagatgcacaagacctgctacaaccaggagggcattgctgatgtgcctgcagaagatgaccccagcccctgtgccctggagaccggccacggccggcagtgccagaatggcaccgtgtgcaagccaggctgggatggccccaagcacggcatcaccaactttgacaactttgcctttgccatgctgactgtgttccagtgcatcaccatggagggctggacagatgtgctgtactgggtgaatgatgctgtgggccgggactggccctggatctactttgtgaccctcatcatcatcggcagcttctttgtgctgaacctggtgctgggcgtgctgtctggagagttcagcaaggagcgggagaaggccaaggcccggggggacttccagaagctgcgggagaagcagcagctggaggaggacctgaagggctacctggactggatcacccaggctgaagatattgatcctgaaaatgaagatgagggcatggatgaggagaagcccaggaacatgtccatgcccaccagcgagacagaatctgtgaacacagaaaatgtggccggcggggacatcgagggggagaactgtggggcccggctggcccaccgcatcagcaagagcaagttcagccgctactggaggcgctggaaccgcttctgcaggaggaagtgcagagctgctgtgaagagcaatgtgttctactggctggtgatcttcctggtgttcctgaacaccctgaccatcgccagcgagcactacaaccagcccaactggctgacagaggtgcaggacacagccaacaaggccctgctggccctcttcaccgctgagatgctgctgaagatgtacagcctgggcctgcaggcctactttgtgtccctcttcaacagatttgactgctttgtggtgtgtggcggcatcctggagaccatcctggtggagaccaagatcatgagccccctgggcatctctgtgctgcgctgtgtgcggctgctgcgcatcttcaagatcacccgctactggaacagcctgagcaacctggtggccagcctgctgaacagcgtgcgcagcatcgccagcctgctgctgctgctcttcctgttcatcatcatcttcagcctgctgggcatgcagctgtttggaggcaagttcaactttgatgagatgcagaccaggaggagcacctttgacaacttcccccagagcctgctgaccgtcttccagatcctgaccggggaggactggaacagcgtgatgtatgatggcatcatggcctatggaggccccagcttccctggcatgctggtgtgcatctacttcatcatcctcttcatctgtggcaactacatcctgctgaatgtgttcctggccatcgctgtggacaacctggctgatgctgagagcctgaccagcgcccagaaggaggaggaggaggagaaggagaggaagaagctggccaggacagccagccctgagaagaagcaggagctggtggagaagccagctgtgggggagagcaaggaggagaagattgagctgaagagcatcacagcagatggagagagccccccagccaccaagatcaacatggatgacctgcagcccaatgaaaatgaagacaagagcccctaccccaaccctgagaccactggagaggaggatgaggaggagcctgagatgcctgtgggcccccggccccggcccctgtctgagctgcacctgaaggagaaggctgtgcccatgcctgaggccagcgccttcttcatcttcagcagcaacaaccgcttccggctgcagtgccaccgcatcgtgaatgacaccatcttcaccaacctgatcctcttcttcatcctgctgagcagcatcagcctggccgctgaggaccctgtgcagcacaccagcttcaggaaccacatcctgggcaatgctgactatgtgttcaccagcatcttcaccctggagatcatcctgaagatgacagcctatggagccttcctgcacaagggcagcttctgcaggaactacttcaacatcctggacctgctggtggtgtctgtgtccctcatcagctttggcatccagagcagcgccatcaacgtggtgaagatcctgcgggtgctgcgggtgctgcggcccctgcgggccatcaacagagccaagggcctgaagcacgtggtgcagtgtgtgtttgtggccatccgcaccatcggcaacatcgtcatcgtgaccaccctgctgcagttcatgtttgcctgcatcggcgtgcagctgttcaagggcaagctgtacacctgcagcgacagcagcaagcagacagaagctgagtgcaagggcaactacatcacctacaaggatggagaggtggaccaccccatcatccagcccaggtcctgggagaacagcaagtttgattttgacaacgtgctggccgccatgatggccctcttcaccgtgtccacctttgagggctggccagagctgctgtaccgcagcattgacagccacacagaggacaagggccccatctacaactacagagtggagatcagcatcttcttcatcatctacatcatcatcatcgccttcttcatgatgaacatctttgtgggcttcgtcatcgtgaccttccaggagcagggcgagcaggagtacaagaactgtgagctggacaagaaccagaggcagtgtgtggagtatgccctgaaggcccggcccctgcggcgctacatccccaagaaccagcaccagtacaaggtgtggtacgtggtgaacagcacctactttgagtacctgatgtttgtgctgatcctgctgaacaccatctgcctggccatgcagcactacggccagagctgcctcttcaagatcgccatgaacatcctgaacatgctgttcaccggcctcttcaccgtggagatgatcctgaagctgattgccttcaagcccaagcactacttctgtgatgcctggaacacctttgatgccctgattgtggtgggcagcatcgtggacatcgccatcacagaggtgaacccagctgagcacacccagtgcagccccagcatgaatgctgaggagaacagccgcatcagcatcaccttcttccgcctcttccgggtgatgaggctggtgaagctgctgagcagaggagagggcatccgcaccctgctgtggaccttcatcaagagcttccaggccctgccctacgtggccctgctgattgtgatgctgttcttcatctatgctgtgattggcatgcaggtgtttgggaagatcgccctgaatgacaccacagagatcaacagaaacaacaacttccagaccttcccccaggccgtgctgctgctcttccgctgtgccaccggggaggcctggcaggacatcatgctggcctgcatgcctgggaagaagtgtgcccctgagagcgagcccagcaacagcacagaaggagagaccccctgtggcagcagctttgctgtgttctacttcatctccttctacatgctgtgtgccttcctgatcatcaacctgtttgtggccgtcatcatggacaactttgactacctgacccgggactggagcatcctgggcccccaccacctggatgagttcaagaggatctgggccgagtatgaccctgaggccaagggccgcatcaagcacctggatgtggtgaccctgctgcggcgcatccagccccccctgggctttgggaagctgtgcccccaccgggtggcctgcaagaggctggtgtccatgaacatgcccctgaacagtgatggcaccgtgatgtttaatgccaccctgtttgccctggtgaggacagccctgcgcatcaagacagagggcaacctggagcaggccaatgaggagctgcgggccatcatcaagaagatctggaagaggacctccatgaagctgctggaccaggtggtgcccccagctggagatgatgaggtgacagtgggcaagttctacgccaccttcctgatccaggagtacttcaggaagttcaagaagaggaaggagcagggcctggtgggcaagcccagccagagaaatgccctgagcctgcaggccggcctgcggaccctgcatgacatcggccctgagatccggcgggccatcagcggggacctgacagctgaggaggagctggacaaggccatgaaggaggccgtgtctgctgcctctgaagatgacatcttcagaagagctgggggcctgtttggaaaccacgtgtcctactaccagagtgatggccgcagcgccttcccccagaccttcaccacccagaggcccctgcacatcaacaaggccggcagcagccagggcgacacagagagccccagccatgagaagctggtggacagcaccttcacccccagcagctacagcagcacaggcagcaatgccaacatcaacaatgccaacaacacagccctgggccgcctgcccaggcctgctggctaccccagcacagtgtccacagtggagggccacggcccccccctgagccctgccatccgggtgcaggaggtggcctggaagctgagcagcaaccgctgccacagccgggagagccaggccgccatggccggccaggaggagaccagccaggatgagacctatgaggtgaagatgaaccacgacacagaggcctgcagcgagcccagcctgctgagcacagagatgctgagctaccaggatgatgaaaatcggcagctgaccctgcctgaggaggacaagagggacatccggcagagccccaagaggggcttcctgcggagcgccagcctgggcagaagagccagcttccacctggagtgcctgaagaggcagaaggacagaggaggagacatcagccagaagacagtgctgcccctgcacctggtgcaccaccaggccctggccgtggccggcctgagccccctgctgcagaggagccacagccctgccagcttcccccggccctttgccaccccaccagccaccccaggcagccggggctggccaccccagcctgtgcccaccctgcggctggagggcgtggagagcagcgagaagctgaacagcagcttccccagcatccactgcggctcctgggccgagaccacccctgggggcggcggcagcagcgctgccaggagagtgcggcctgtgtccctgatggtgcccagccaggccggggcccctggccggcagttccacggcagcgccagcagcctggtggaggccgtgctgatcagcgagggcctgggccagtttgcccaggaccccaagttcatcgaggtgaccacccaggagctggctgatgcctgtgacatgaccatcgaggagatggagagcgctgctgacaacatcctgtctggaggagccccccagagccccaatggagccctgctgccctttgtgaactgcagagatgctggccaggaccgggccggcggggaggaggatgctggctgtgtgcgggcccggggccggcccagcgaggaggagctgcaggacagccgggtgtatgtgagcagcctgtag

SEQ ID NO: 145819 - DNA, 6417 bp, synthetic construct
  misc_feature 1..6417: note = Description of Artificial Sequence: Synthetic coding sequence
  source 1..6417: mol_type = other DNA
atggtgaatgaaaacaccaggatgtacatccctgaggagaaccaccagggcagcaactacggcagccccaggcctgcccacgccaacatgaatgccaatgctgctgctggcctggcccctgagcacatccccacccctggggccgccctgtcctggcaggccgccattgatgctgcccggcaggccaagctgatgggcagcgctggaaatgccaccatcagcacagtgagcagcacccagaggaagaggcagcagtatggcaagcccaagaagcagggcagcaccacagccacccggcccccccgggccctgctgtgcctgaccctgaagaaccccatccggcgggcctgcatcagcatcgtggagtggaagccctttgagatcatcatcctgctgaccatctttgccaactgtgtggccctggccatctacatccccttcccagaagatgacagcaatgccaccaacagcaacctggagcgggtggagtacctgttcctgatcatcttcaccgtggaggccttcctgaaggtgattgcctacggcctgctcttccaccccaatgcctacctgagaaatggctggaacctgctggacttcatcatcgtggtggtgggcctcttcagcgccatcctggagcaggccaccaaggcagatggagccaatgccctgggcggcaaaggagctggctttgatgtgaaggccctgcgggccttccgggtgctgcggcccctgcggctggtgtctggagtgcccagcctgcaggtggtgctgaacagcatcatcaaggccatggtgcccctgctgcacatcgccctgctggtgctgtttgtgatcatcatctatgccatcatcggcctggagctgttcatgggcaagatgcacaagacctgctacaaccaggagggcattgctgatgtgcctgcagaagatgaccccagcccctgtgccctggagaccggccacggccggcagtgccagaatggcaccgtgtgcaagccaggctgggatggccccaagcacggcatcaccaactttgacaactttgcctttgccatgctgactgtgttccagtgcatcaccatggagggctggacagatgtgctgtactggatgcaggatgccatgggctatgagctgccctgggtgtactttgtgtccctggtgatcttcggcagcttctttgtgctgaacctggtgctgggcgtgctgtctggagagttcagcaaggagcgggagaaggccaaggcccggggggacttccagaagctgcgggagaagcagcagctggaggaggacctgaagggctacctggactggatcacccaggctgaagatattgatcctgaaaatgaagatgagggcatggatgaggagaagcccaggaacatgtccatgcccaccagcgagacagaatctgtgaacacagaaaatgtggccggcggggacatcgagggggagaactgtggggcccggctggcccaccgcatcagcaagagcaagttcagccgctactggaggcgctggaaccgcttctgcaggaggaagtgcagagctgctgtgaagagcaatgtgttctactggctggtgatcttcctggtgttcctgaacaccctgaccatcgccagcgagcactacaaccagcccaactggctgacagaggtgcaggacacagccaacaaggccctgctggccctcttcaccgctgagatgctgctgaagatgtacagcctgggcctgcaggcctactttgtgtccctcttcaacagatttgactgctttgtggtgtgtggcggcatcctggagaccatcctggtggagaccaagatcatgagccccctgggcatctctgtgctgcgctgtgtgcggctgctgcgcatcttcaagatcacccgctactggaacagcctgagcaacctggtggccagcctgctgaacagcgtgcgcagcatcgccagcctgctgctgctgctcttcctgttcatcatcatcttcagcctgctgggcatgcagctgtttggaggcaagttcaactttgatgagatgcagaccaggaggagcacctttgacaacttcccccagagcctgctgaccgtcttccagatcctgaccggggaggactggaacagcgtgatgtatgatggcatcatggcctatggaggccccagcttccctggcatgctggtgtgcatctacttcatcatcctcttcatctgtggcaactacatcctgctgaatgtgttcctggccatcgctgtggacaacctggctgatgctgagagcctgaccagcgcccagaaggaggaggaggaggagaaggagaggaagaagctggccaggacagccagccctgagaagaagcaggagctggtggagaagccagctgtgggggagagcaaggaggagaagattgagctgaagagcatcacagcagatggagagagccccccagccaccaagatcaacatggatgacctgcagcccaatgaaaatgaagacaagagcccctaccccaaccctgagaccactggagaggaggatgaggaggagcctgagatgcctgtgggcccccggccccggcccctgtctgagctgcacctgaaggagaaggctgtgcccatgcctgaggccagcgccttcttcatcttcagcagcaacaaccgcttccggctgcagtgccaccgcatcgtgaatgacaccatcttcaccaacctgatcctcttcttcatcctgctgagcagcatcagcctggccgctgaggaccctgtgcagcacaccagcttcaggaaccacatcctcttctactttgacatcgtgttcaccaccatcttcaccatcgagatcgccctgaagatgacagcctatggagccttcctgcacaagggcagcttctgcaggaactacttcaacatcctggacctgctggtggtgtctgtgtccctcatcagctttggcatccagagcagcgccatcaacgtggtgaagatcctgcgggtgctgcgggtgctgcggcccctgcgggccatcaacagagccaagggcctgaagcacgtggtgcagtgtgtgtttgtggccatccgcaccatcggcaacatcgtcatcgtgaccaccctgctgcagttcatgtttgcctgcatcggcgtgcagctgttcaagggcaagctgtacacctgcagcgacagcagcaagcagacagaagctgagtgcaagggcaactacatcacctacaaggatggagaggtggaccaccccatcatccagcccaggtcctgggagaacagcaagtttgattttgacaacgtgctggccgccatgatggccctcttcaccgtgtccacctttgagggctggccagagctgctgtaccgcagcattgacagccacacagaggacaagggccccatctacaactacagagtggagatcagcatcttcttcatcatctacatcatcatcatcgccttcttcatgatgaacatctttgtgggcttcgtcatcgtgaccttccaggagcagggcgagcaggagtacaagaactgtgagctggacaagaaccagaggcagtgtgtggagtatgccctgaaggcccggcccctgcggcgctacatccccaagaaccagcaccagtacaaggtgtggtacgtggtgaacagcacctactttgagtacctgatgtttgtgctgatcctgctgaacaccatctgcctggccatgcagcactacggccagagctgcctcttcaagatcgccatgaacatcctgaacatgctgttcaccggcctcttcaccgtggagatgatcctgaagctgattgccttcaagcccaagggctacttcagtgacccctggaatgtgtttgacttcctgattgtcatcggcagcatcattgatgtgatcctgtctgagaccaacccagctgagcacacccagtgcagccccagcatgaatgctgaggagaacagccgcatcagcatcaccttcttccgcctcttccgggtgatgaggctggtgaagctgctgagcagaggagagggcatccgcaccctgctgtggaccttcatcaagagcttccaggccctgccctacgtggccctgctgattgtgatgctgttcttcatctatgctgtgattggcatgcaggtgtttgggaagatcgccctgaatgacaccacagagatcaacagaaacaacaacttccagaccttcccccaggccgtgctgctgctcttccgctgtgccaccggggaggcctggcaggacatcatgctggcctgcatgcctgggaagaagtgtgcccctgagagcgagcccagcaacagcacagaaggagagaccccctgtggcagcagctttgctgtgttctacttcatctccttctacatgctgtgtgccttcctgatcatcaacctgtttgtggccgtcatcatggacaactttgactacctgacccgggactggagcatcctgggcccccaccacctggatgagttcaagaggatctgggccgagtatgaccctgaggccaagggccgcatcaagcacctggatgtggtgaccctgctgcggcgcatccagccccccctgggctttgggaagctgtgcccccaccgggtggcctgcaagaggctggtgtccatgaacatgcccctgaacagtgatggcaccgtgatgtttaatgccaccctgtttgccctggtgaggacagccctgcgcatcaagacagagggcaacctggagcaggccaatgaggagctgcgggccatcatcaagaagatctggaagaggacctccatgaagctgctggaccaggtggtgcccccagctggagatgatgaggtgacagtgggcaagttctacgccaccttcctgatccaggagtacttcaggaagttcaagaagaggaaggagcagggcctggtgggcaagcccagccagagaaatgccctgagcctgcaggccggcctgcggaccctgcatgacatcggccctgagatccggcgggccatcagcggggacctgacagctgaggaggagctggacaaggccatgaaggaggccgtgtctgctgcctctgaagatgacatcttcagaagagctgggggcctgtttggaaaccacgtgtcctactaccagagtgatggccgcagcgccttcccccagaccttcaccacccagaggcccctgcacatcaacaaggccggcagcagccagggcgacacagagagccccagccatgagaagctggtggacagcaccttcacccccagcagctacagcagcacaggcagcaatgccaacatcaacaatgccaacaacacagccctgggccgcctgcccaggcctgctggctaccccagcacagtgtccacagtggagggccacggcccccccctgagccctgccatccgggtgcaggaggtggcctggaagctgagcagcaaccgctgccacagccgggagagccaggccgccatggccggccaggaggagaccagccaggatgagacctatgaggtgaagatgaaccacgacacagaggcctgcagcgagcccagcctgctgagcacagagatgctgagctaccaggatgatgaaaatcggcagctgaccctgcctgaggaggacaagagggacatccggcagagccccaagaggggcttcctgcggagcgccagcctgggcagaagagccagcttccacctggagtgcctgaagaggcagaaggacagaggaggagacatcagccagaagacagtgctgcccctgcacctggtgcaccaccaggccctggccgtggccggcctgagccccctgctgcagaggagccacagccctgccagcttcccccggccctttgccaccccaccagccaccccaggcagccggggctggccaccccagcctgtgcccaccctgcggctggagggcgtggagagcagcgagaagctgaacagcagcttccccagcatccactgcggctcctgggccgagaccacccctgggggcggcggcagcagcgctgccaggagagtgcggcctgtgtccctgatggtgcccagccaggccggggcccctggccggcagttccacggcagcgccagcagcctggtggaggccgtgctgatcagcgagggcctgggccagtttgcccaggaccccaagttcatcgaggtgaccacccaggagctggctgatgcctgtgacatgaccatcgaggagatggagagcgctgctgacaacatcctgtctggaggagccccccagagccccaatggagccctgctgccctttgtgaactgcagagatgctggccaggaccgggccggcggggaggaggatgctggctgtgtgcgggcccggggccggcccagcgaggaggagctgcaggacagccgggtgtatgtgagcagcctgtag

SEQ ID NO: 145820 - DNA, 6477 bp, synthetic construct
  misc_feature 1..6477: note = Description of Artificial Sequence: Synthetic coding sequence
  source 1..6477: mol_type = other DNA
atggtgaatgaaaacaccaggatgtacatccctgaggagaaccaccagggcagcaactacggcagccccaggcctgcccacgccaacatgaatgccaatgctgctgctggcctggcccctgagcacatccccacccctggggccgccctgtcctggcaggccgccattgatgctgcccggcaggccaagctgatgggcagcgctggaaatgccaccatcagcacagtgagcagcacccagaggaagaggcagcagtatggcaagcccaagaagcagggcagcaccacagccacccggcccccccgggccctgctgtgcctgaccctgaagaaccccatccggcgggcctgcatcagcatcgtggagtggaagccctttgagatcatcatcctgctgaccatctttgccaactgtgtggccctggccatctacatccccttcccagaagatgacagcaatgccaccaacagcaacctggagcgggtggagtacctgttcctgatcatcttcaccgtggaggccttcctgaaggtgattgcctacggcctgctcttccaccccaatgcctacctgagaaatggctggaacctgctggacttcatcatcgtggtggtgggcctcttcagcgccatcctggagcaggccaccaaggcagatggagccaatgccctgggcggcaaaggagctggctttgatgtgaaggccctgcgggccttccgggtgctgcggcccctgcggctggtgtctggagtgcccagcctgcaggtggtgctgaacagcatcatcaaggccatggtgcccctgctgcacatcgccctgctggtgctgtttgtgatcatcatctatgccatcatcggcctggagctgttcatgggcaagatgcacaagacctgctacaaccaggagggcattgctgatgtgcctgcagaagatgaccccagcccctgtgccctggagaccggccacggccggcagtgccagaatggcaccgtgtgcaagccaggctgggatggccccaagcacggcatcaccaactttgacaactttgcctttgccatgctgactgtgttccagtgcatcaccatggagggctggacagatgtgctgtactgggtgaatgatgctgtgggccgggactggccctggatctactttgtgaccctcatcatcatcggcagcttctttgtgctgaacctggtgctgggcgtgctgtctggagagttcagcaaggagcgggagaaggccaaggcccggggggacttccagaagctgcgggagaagcagcagctggaggaggacctgaagggctacctggactggatcacccaggctgaagatattgatcctgaaaatgaagatgagggcatggatgaggagaagcccaggaacatgtccatgcccaccagcgagacagaatctgtgaacacagaaaatgtggccggcggggacatcgagggggagaactgtggggcccggctggcccaccgcatcagcaagagcaagttcagccgctactggaggcgctggaaccgcttctgcaggaggaagtgcagagctgctgtgaagagcaatgtgttctactggctggtgatcttcctggtgttcctgaacaccctgaccatcgccagcgagcactacaaccagcccaactggctgacagaggtgcaggacacagccaacaaggccctgctggccctcttcaccgctgagatgctgctgaagatgtacagcctgggcctgcaggcctactttgtgtccctcttcaacagatttgactgctttgtggtgtgtggcggcatcctggagaccatcctggtggagaccaagatcatgagccccctgggcatctctgtgctgcgctgtgtgcggctgctgcgcatcttcaagatcacccgctactggaacagcctgagcaacctggtggccagcctgctgaacagcgtgcgcagcatcgccagcctgctgctgctgctcttcctgttcatcatcatcttcagcctgctgggcatgcagctgtttggaggcaagttcaactttgatgagatgcagaccaggaggagcacctttgacaacttcccccagagcctgctgaccgtcttccagatcctgaccggggaggactggaacagcgtgatgtatgatggcatcatggcctatggaggccccagcttccctggcatgctggtgtgcatctacttcatcatcctcttcatctgtggcaactacatcctgctgaatgtgttcctggccatcgctgtggacaacctggctgatgctgagagcctgaccagcgcccagaaggaggaggaggaggagaaggagaggaagaagctggccaggacagccagccctgagaagaagcaggagctggtggagaagccagctgtgggggagagcaaggaggagaagattgagctgaagagcatcacagcagatggagagagccccccagccaccaagatcaacatggatgacctgcagcccaatgaaaatgaagacaagagcccctaccccaaccctgagaccactggagaggaggatgaggaggagcctgagatgcctgtgggcccccggccccggcccctgtctgagctgcacctgaaggagaaggctgtgcccatgcctgaggccagcgccttcttcatcttcagcagcaacaaccgcttccggctgcagtgccaccgcatcgtgaatgacaccatcttcaccaacctgatcctcttcttcatcctgctgagcagcatcagcctggccgctgaggaccctgtgcagcacaccagcttcaggaaccacatcctcttctactttgacatcgtgttcaccaccatcttcaccatcgagatcgccctgaagatcctgggcaatgctgactatgtgttcaccagcatcttcaccctggagatcatcctgaagatgacagcctatggagccttcctgcacaagggcagcttctgcaggaactacttcaacatcctggacctgctggtggtgtctgtgtccctcatcagctttggcatccagagcagcgccatcaacgtggtgaagatcctgcgggtgctgcgggtgctgcggcccctgcgggccatcaacagagccaagggcctgaagcacgtggtgcagtgtgtgtttgtggccatccgcaccatcggcaacatcgtcatcgtgaccaccctgctgcagttcatgtttgcctgcatcggcgtgcagctgttcaagggcaagctgtacacctgcagcgacagcagcaagcagacagaagctgagtgcaagggcaactacatcacctacaaggatggagaggtggaccaccccatcatccagcccaggtcctgggagaacagcaagtttgattttgacaacgtgctggccgccatgatggccctcttcaccgtgtccacctttgagggctggccagagctgctgtaccgcagcattgacagccacacagaggacaagggccccatctacaactacagagtggagatcagcatcttcttcatcatctacatcatcatcatcgccttcttcatgatgaacatctttgtgggcttcgtcatcgtgaccttccaggagcagggcgagcaggagtacaagaactgtgagctggacaagaaccagaggcagtgtgtggagtatgccctgaaggcccggcccctgcggcgctacatccccaagaaccagcaccagtacaaggtgtggtacgtggtgaacagcacctactttgagtacctgatgtttgtgctgatcctgctgaacaccatctgcctggccatgcagcactacggccagagctgcctcttcaagatcgccatgaacatcctgaacatgctgttcaccggcctcttcaccgtggagatgatcctgaagctgattgccttcaagcccaagcactacttctgtgatgcctggaacacctttgatgccctgattgtggtgggcagcatcgtggacatcgccatcacagaggtgaacccagctgagcacacccagtgcagccccagcatgaatgctgaggagaacagccgcatcagcatcaccttcttccgcctcttccgggtgatgaggctggtgaagctgctgagcagaggagagggcatccgcaccctgctgtggaccttcatcaagagcttccaggccctgccctacgtggccctgctgattgtgatgctgttcttcatctatgctgtgattggcatgcaggtgtttgggaagatcgccctgaatgacaccacagagatcaacagaaacaacaacttccagaccttcccccaggccgtgctgctgctcttccgctgtgccaccggggaggcctggcaggacatcatgctggcctgcatgcctgggaagaagtgtgcccctgagagcgagcccagcaacagcacagaaggagagaccccctgtggcagcagctttgctgtgttctacttcatctccttctacatgctgtgtgccttcctgatcatcaacctgtttgtggccgtcatcatggacaactttgactacctgacccgggactggagcatcctgggcccccaccacctggatgagttcaagaggatctgggccgagtatgaccctgaggccaagggccgcatcaagcacctggatgtggtgaccctgctgcggcgcatccagccccccctgggctttgggaagctgtgcccccaccgggtggcctgcaagaggctggtgtccatgaacatgcccctgaacagtgatggcaccgtgatgtttaatgccaccctgtttgccctggtgaggacagccctgcgcatcaagacagagggcaacctggagcaggccaatgaggagctgcgggccatcatcaagaagatctggaagaggacctccatgaagctgctggaccaggtggtgcccccagctggagatgatgaggtgacagtgggcaagttctacgccaccttcctgatccaggagtacttcaggaagttcaagaagaggaaggagcagggcctggtgggcaagcccagccagagaaatgccctgagcctgcaggccggcctgcggaccctgcatgacatcggccctgagatccggcgggccatcagcggggacctgacagctgaggaggagctggacaaggccatgaaggaggccgtgtctgctgcctctgaagatgacatcttcagaagagctgggggcctgtttggaaaccacgtgtcctactaccagagtgatggccgcagcgccttcccccagaccttcaccacccagaggcccctgcacatcaacaaggccggcagcagccagggcgacacagagagccccagccatgagaagctggtggacagcaccttcacccccagcagctacagcagcacaggcagcaatgccaacatcaacaatgccaacaacacagccctgggccgcctgcccaggcctgctggctaccccagcacagtgtccacagtggagggccacggcccccccctgagccctgccatccgggtgcaggaggtggcctggaagctgagcagcaaccgctgccacagccgggagagccaggccgccatggccggccaggaggagaccagccaggatgagacctatgaggtgaagatgaaccacgacacagaggcctgcagcgagcccagcctgctgagcacagagatgctgagctaccaggatgatgaaaatcggcagctgaccctgcctgaggaggacaagagggacatccggcagagccccaagaggggcttcctgcggagcgccagcctgggcagaagagccagcttccacctggagtgcctgaagaggcagaaggacagaggaggagacatcagccagaagacagtgctgcccctgcacctggtgcaccaccaggccctggccgtggccggcctgagccccctgctgcagaggagccacagccctgccagcttcccccggccctttgccaccccaccagccaccccaggcagccggggctggccaccccagcctgtgcccaccctgcggctggagggcgtggagagcagcgagaagctgaacagcagcttccccagcatccactgcggctcctgggccgagaccacccctgggggcggcggcagcagcgctgccaggagagtgcggcctgtgtccctgatggtgcccagccaggccggggcccctggccggcagttccacggcagcgccagcagcctggtggaggccgtgctgatcagcgagggcctgggccagtttgcccaggaccccaagttcatcgaggtgaccacccaggagctggctgatgcctgtgacatgaccatcgaggagatggagagcgctgctgacaacatcctgtctggaggagccccccagagccccaatggagccctgctgccctttgtgaactgcagagatgctggccaggaccgggccggcggggaggaggatgctggctgtgtgcgggcccggggccggcccagcgaggaggagctgcaggacagccgggtgtatgtgagcagcctgtag

SEQ ID NO: 145821 - DNA, 6522 bp, synthetic construct
  misc_feature 1..6522: note = Description of Artificial Sequence: Synthetic coding sequence
  source 1..6522: mol_type = other DNA
atggtgaatgaaaacaccaggatgtacatccctgaggagaaccaccagggcagcaactacggcagccccaggcctgcccacgccaacatgaatgccaatgctgctgctggcctggcccctgagcacatccccacccctggggccgccctgtcctggcaggccgccattgatgctgcccggcaggccaagctgatgggcagcgctggaaatgccaccatcagcacagtgagcagcacccagaggaagaggcagcagtatggcaagcccaagaagcagggcagcaccacagccacccggcccccccgggccctgctgtgcctgaccctgaagaaccccatccggcgggcctgcatcagcatcgtggagtggaagccctttgagatcatcatcctgctgaccatctttgccaactgtgtggccctggccatctacatccccttcccagaagatgacagcaatgccaccaacagcaacctggagcgggtggagtacctgttcctgatcatcttcaccgtggaggccttcctgaaggtgattgcctacggcctgctcttccaccccaatgcctacctgagaaatggctggaacctgctggacttcatcatcgtggtggtgggcctcttcagcgccatcctggagcaggccaccaaggcagatggagccaatgccctgggcggcaaaggagctggctttgatgtgaaggccctgcgggccttccgggtgctgcggcccctgcggctggtgtctggagtgcccagcctgcaggtggtgctgaacagcatcatcaaggccatggtgcccctgctgcacatcgccctgctggtgctgtttgtgatcatcatctatgccatcatcggcctggagctgttcatgggcaagatgcacaagacctgctacaaccaggagggcattgctgatgtgcctgcagaagatgaccccagcccctgtgccctggagaccggccacggccggcagtgccagaatggcaccgtgtgcaagccaggctgggatggccccaagcacggcatcaccaactttgacaactttgcctttgccatgctgactgtgttccagtgcatcaccatggagggctggacagatgtgctgtactggatgcaggatgccatgggctatgagctgccctgggtgtactttgtgtccctggtgatcttcggcagcttctttgtgctgaacctggtgctgggcgtgctgtctggagagttcagcaaggagcgggagaaggccaaggcccggggggacttccagaagctgcgggagaagcagcagctggaggaggacctgaagggctacctggactggatcacccaggctgaagatattgatcctgaaaatgaagatgagggcatggatgaggagaagcccaggaacatgtccatgcccaccagcgagacagaatctgtgaacacagaaaatgtggccggcggggacatcgagggggagaactgtggggcccggctggcccaccgcatcagcaagagcaagttcagccgctactggaggcgctggaaccgcttctgcaggaggaagtgcagagctgctgtgaagagcaatgtgttctactggctggtgatcttcctggtgttcctgaacaccctgaccatcgccagcgagcactacaaccagcccaactggctgacagaggtgcaggacacagccaacaaggccctgctggccctcttcaccgctgagatgctgctgaagatgtacagcctgggcctgcaggcctactttgtgtccctcttcaacagatttgactgctttgtggtgtgtggcggcatcctggagaccatcctggtggagaccaagatcatgagccccctgggcatctctgtgctgcgctgtgtgcggctgctgcgcatcttcaagatcacccgctactggaacagcctgagcaacctggtggccagcctgctgaacagcgtgcgcagcatcgccagcctgctgctgctgctcttcctgttcatcatcatcttcagcctgctgggcatgcagctgtttggaggcaagttcaactttgatgagatgcagaccaggaggagcacctttgacaacttcccccagagcctgctgaccgtcttccagatcctgaccggggaggactggaacagcgtgatgtatgatggcatcatggcctatggaggccccagcttccctggcatgctggtgtgcatctacttcatcatcctcttcatctgtggcaactacatcctgctgaatgtgttcctggccatcgctgtggacaacctggctgatgctgagagcctgaccagcgcccagaaggaggaggaggaggagaaggagaggaagaagctggccaggacagccagccctgagaagaagcaggagctggtggagaagccagctgtgggggagagcaaggaggagaagattgagctgaagagcatcacagcagatggagagagccccccagccaccaagatcaacatggatgacctgcagcccaatgaaaatgaagacaagagcccctaccccaaccctgagaccactggagaggaggatgaggaggagcctgagatgcctgtgggcccccggccccggcccctgtctgagctgcacctgaaggagaaggctgtgcccatgcctgaggccagcgccttcttcatcttcagcagcaacaaccgcttccggctgcagtgccaccgcatcgtgaatgacaccatcttcaccaacctgatcctcttcttcatcctgctgagcagcatcagcctggccgctgaggaccctgtgcagcacaccagcttcaggaaccacatcctcttctactttgacatcgtgttcaccaccatcttcaccatcgagatcgccctgaagatgacagcctatggagccttcctgcacaagggcagcttctgcaggaactacttcaacatcctggacctgctggtggtgtctgtgtccctcatcagctttggcatccagagcagcgccatcaacgtggtgaagatcctgcgggtgctgcgggtgctgcggcccctgcgggccatcaacagagccaagggcctgaagcacgtggtgcagtgtgtgtttgtggccatccgcaccatcggcaacatcgtcatcgtgaccaccctgctgcagttcatgtttgcctgcatcggcgtgcagctgttcaagggcaagctgtacacctgcagcgacagcagcaagcagacagaagctgagtgcaagggcaactacatcacctacaaggatggagaggtggaccaccccatcatccagcccaggtcctgggagaacagcaagtttgattttgacaacgtgctggccgccatgatggccctcttcaccgtgtccacctttgagggctggccagagctgctgtaccgcagcattgacagccacacagaggacaagggccccatctacaactacagagtggagatcagcatcttcttcatcatctacatcatcatcatcgccttcttcatgatgaacatctttgtgggcttcgtcatcgtgaccttccaggagcagggcgagcaggagtacaagaactgtgagctggacaagaaccagaggcagtgtgtggagtatgccctgaaggcccggcccctgcggcgctacatccccaagaaccagcaccagtacaaggtgtggtacgtggtgaacagcacctactttgagtacctgatgtttgtgctgatcctgctgaacaccatctgcctggccatgcagcactacggccagagctgcctcttcaagatcgccatgaacatcctgaacatgctgttcaccggcctcttcaccgtggagatgatcctgaagctgattgccttcaagcccaagggctacttcagtgacccctggaatgtgtttgacttcctgattgtcatcggcagcatcattgatgtgatcctgtctgagaccaacccagctgagcacacccagtgcagccccagcatgaatgctgaggagaacagccgcatcagcatcaccttcttccgcctcttccgggtgatgaggctggtgaagctgctgagcagaggagagggcatccgcaccctgctgtggaccttcatcaagagcttccaggccctgccctacgtggccctgctgattgtgatgctgttcttcatctatgctgtgattggcatgcaggtgtttgggaagatcgccctgaatgacaccacagagatcaacagaaacaacaacttccagaccttcccccaggccgtgctgctgctcttccgctgtgccaccggggaggcctggcaggacatcatgctggcctgcatgcctgggaagaagtgtgcccctgagagcgagcccagcaacagcacagaaggagagaccccctgtggcagcagctttgctgtgttctacttcatctccttctacatgctgtgtgccttcctgatcatcaacctgtttgtggccgtcatcatggacaactttgactacctgacccgggactggagcatcctgggcccccaccacctggatgagttcaagaggatctgggccgagtatgaccctgaggccaagggccgcatcaagcacctggatgtggtgaccctgctgcggcgcatccagccccccctgggctttgggaagctgtgcccccaccgggtggcctgcaagaggctggtgtccatgaacatgcccctgaacagtgatggcaccgtgatgtttaatgccaccctgtttgccctggtgaggacagccctgcgcatcaagacagagggcaacctggagcaggccaatgaggagctgcgggccatcatcaagaagatctggaagaggacctccatgaagctgctggaccaggtggtgcccccagctggagatgatgaggtgacagtgggcaagttctacgccaccttcctgatccaggagtacttcaggaagttcaagaagaggaaggagcagggcctggtgggcaagcccagccagagaaatgccctgagcctgcaggccggcctgcggaccctgcatgacatcggccctgagatccggcgggccatcagcggggacctgacagctgaggaggagctggacaaggccatgaaggaggccgtgtctgctgcctctgaagatgacatcttcagaagagctgggggcctgtttggaaaccacgtgtcctactaccagagtgatggccgcagcgccttcccccagaccttcaccacccagaggcccctgcacatcaacaaggccggcagcagccagggcgacacagagagccccagccatgagaagctggtggacagcaccttcacccccagcagctacagcagcacaggcagcaatgccaacatcaacaatgccaacaacacagccctgggccgcctgcccaggcctgctggctaccccagcacagtgtccacagtggagggccacggcccccccctgagccctgccatccgggtgcaggaggtggcctggaagctgagcagcaaccgggagcggcacgtgcccatgtgtgaggacctggagctgcggcgggacagcggcagcgctggcacccaggcccactgcctgctgctgaggaaggccaaccccagccgctgccacagccgggagagccaggccgccatggccggccaggaggagaccagccaggatgagacctatgaggtgaagatgaaccacgacacagaggcctgcagcgagcccagcctgctgagcacagagatgctgagctaccaggatgatgagaaccggcagctgaccctgcctgaggaggacaagagggacatccggcagagccccaagaggggcttcctgcggagcgccagcctgggccggcgggccagcttccacctggagtgcctgaagaggcagaaggaccggggcggggacatcagccagaagacagtgctgcccctgcacctggtgcaccaccaggccctggccgtggccggcctgagccccctgctgcagaggagccacagccctgccagcttcccccggccctttgccaccccaccagccaccccaggcagccggggctggccaccccagcctgtgcccaccctgcggctggagggcgtggagagcagcgagaagctgaacagcagcttccccagcatccactgcggctcctgggccgagaccaccccaggcggcggcggcagcagcgctgcccggcgggtgcggcctgtgtccctgatggtgcccagccaggccggggcccctggccggcagttccacggcagcgccagcagcctggtggaggccgtgctgatcagcgagggcctgggccagtttgcccaggaccccaagttcatcgaggtgaccacccaggagctggctgatgcctgtgacatgaccatcgaggagatggagagcgctgctgacaacatcctgagcggcggggccccccagagccccaacggggccctgctgccctttgtgaactgcagagatgctggccaggacagagctggaggagaagaagatgctggctgtgtgcgggcccggggccggcccagcgaggaggagctgcaggacagccgggtgtatgtgagcagcctgtag

SEQ ID NO: 145822 - DNA, 6474 bp, synthetic construct
  misc_feature 1..6474: note = Description of Artificial Sequence: Synthetic coding sequence
  source 1..6474: mol_type = other DNA
atggtgaatgaaaacaccaggatgtacatccctgaggagaaccaccagggcagcaactacggcagccccaggcctgcccacgccaacatgaatgccaatgctgctgctggcctggcccctgagcacatccccacccctggggccgccctgtcctggcaggccgccattgatgctgcccggcaggccaagctgatgggcagcgctggaaatgccaccatcagcacagtgagcagcacccagaggaagaggcagcagtatggcaagcccaagaagcagggcagcaccacagccacccggcccccccgggccctgctgtgcctgaccctgaagaaccccatccggcgggcctgcatcagcatcgtggagtggaagccctttgagatcatcatcctgctgaccatctttgccaactgtgtggccctggccatctacatccccttcccagaagatgacagcaatgccaccaacagcaacctggagcgggtggagtacctgttcctgatcatcttcaccgtggaggccttcctgaaggtgattgcctacggcctgctcttccaccccaatgcctacctgagaaatggctggaacctgctggacttcatcatcgtggtggtgggcctcttcagcgccatcctggagcaggccaccaaggcagatggagccaatgccctgggcggcaaaggagctggctttgatgtgaaggccctgcgggccttccgggtgctgcggcccctgcggctggtgtctggagtgcccagcctgcaggtggtgctgaacagcatcatcaaggccatggtgcccctgctgcacatcgccctgctggtgctgtttgtgatcatcatctatgccatcatcggcctggagctgttcatgggcaagatgcacaagacctgctacaaccaggagggcattgctgatgtgcctgcagaagatgaccccagcccctgtgccctggagaccggccacggccggcagtgccagaatggcaccgtgtgcaagccaggctgggatggccccaagcacggcatcaccaactttgacaactttgcctttgccatgctgactgtgttccagtgcatcaccatggagggctggacagatgtgctgtactgggtgaatgatgctgtgggccgggactggccctggatctactttgtgaccctcatcatcatcggcagcttctttgtgctgaacctggtgctgggcgtgctgtctggagagttcagcaaggagcgggagaaggccaaggcccggggggacttccagaagctgcgggagaagcagcagctggaggaggacctgaagggctacctggactggatcacccaggctgaagatattgatcctgaaaatgaagatgagggcatggatgaggagaagcccaggaacatgtccatgcccaccagcgagacagaatctgtgaacacagaaaatgtggccggcggggacatcgagggggagaactgtggggcccggctggcccaccgcatcagcaagagcaagttcagccgctactggaggcgctggaaccgcttctgcaggaggaagtgcagagctgctgtgaagagcaatgtgttctactggctggtgatcttcctggtgttcctgaacaccctgaccatcgccagcgagcactacaaccagcccaactggctgacagaggtgcaggacacagccaacaaggccctgctggccctcttcaccgctgagatgctgctgaagatgtacagcctgggcctgcaggcctactttgtgtccctcttcaacagatttgactgctttgtggtgtgtggcggcatcctggagaccatcctggtggagaccaagatcatgagccccctgggcatctctgtgctgcgctgtgtgcggctgctgcgcatcttcaagatcacccgctactggaacagcctgagcaacctggtggccagcctgctgaacagcgtgcgcagcatcgccagcctgctgctgctgctcttcctgttcatcatcatcttcagcctgctgggcatgcagctgtttggaggcaagttcaactttgatgagatgcagaccaggaggagcacctttgacaacttcccccagagcctgctgaccgtcttccagatcctgaccggggaggactggaacagcgtgatgtatgatggcatcatggcctatggaggccccagcttccctggcatgctggtgtgcatctacttcatcatcctcttcatctgtggcaactacatcctgctgaatgtgttcctggccatcgctgtggacaacctggctgatgctgagagcctgaccagcgcccagaaggaggaggaggaggagaaggagaggaagaagctggccaggacagccagccctgagaagaagcaggagctggtggagaagccagctgtgggggagagcaaggaggagaagattgagctgaagagcatcacagcagatggagagagccccccagccaccaagatcaacatggatgacctgcagcccaatgaaaatgaagacaagagcccctaccccaaccctgagaccactggagaggaggatgaggaggagcctgagatgcctgtgggcccccggccccggcccctgtctgagctgcacctgaaggagaaggctgtgcccatgcctgaggccagcgccttcttcatcttcagcagcaacaaccgcttccggctgcagtgccaccgcatcgtgaatgacaccatcttcaccaacctgatcctcttcttcatcctgctgagcagcatcagcctggccgctgaggaccctgtgcagcacaccagcttcaggaaccacatcctcttctactttgacatcgtgttcaccaccatcttcaccatcgagatcgccctgaagatgacagcctatggagccttcctgcacaagggcagcttctgcaggaactacttcaacatcctggacctgctggtggtgtctgtgtccctcatcagctttggcatccagagcagcgccatcaacgtggtgaagatcctgcgggtgctgcgggtgctgcggcccctgcgggccatcaacagagccaagggcctgaagcacgtggtgcagtgtgtgtttgtggccatccgcaccatcggcaacatcgtcatcgtgaccaccctgctgcagttcatgtttgcctgcatcggcgtgcagctgttcaagggcaagctgtacacctgcagcgacagcagcaagcagacagaagctgagtgcaagggcaactacatcacctacaaggatggagaggtggaccaccccatcatccagcccaggtcctgggagaacagcaagtttgattttgacaacgtgctggccgccatgatggccctcttcaccgtgtccacctttgagggctggccagagctgctgtaccgcagcattgacagccacacagaggacaagggccccatctacaactacagagtggagatcagcatcttcttcatcatctacatcatcatcatcgccttcttcatgatgaacatctttgtgggcttcgtcatcgtgaccttccaggagcagggcgagcaggagtacaagaactgtgagctggacaagaaccagaggcagtgtgtggagtatgccctgaaggcccggcccctgcggcgctacatccccaagaaccagcaccagtacaaggtgtggtacgtggtgaacagcacctactttgagtacctgatgtttgtgctgatcctgctgaacaccatctgcctggccatgcagcactacggccagagctgcctcttcaagatcgccatgaacatcctgaacatgctgttcaccggcctcttcaccgtggagatgatcctgaagctgattgccttcaagcccaagcactacttctgtgatgcctggaacacctttgatgccctgattgtggtgggcagcatcgtggacatcgccatcacagaggtgaacccagctgagcacacccagtgcagccccagcatgaatgctgaggagaacagccgcatcagcatcaccttcttccgcctcttccgggtgatgaggctggtgaagctgctgagcagaggagagggcatccgcaccctgctgtggaccttcatcaagagcttccaggccctgccctacgtggccctgctgattgtgatgctgttcttcatctatgctgtgattggcatgcaggtgtttgggaagatcgccctgaatgacaccacagagatcaacagaaacaacaacttccagaccttcccccaggccgtgctgctgctcttccgctgtgccaccggggaggcctggcaggacatcatgctggcctgcatgcctgggaagaagtgtgcccctgagagcgagcccagcaacagcacagaaggagagaccccctgtggcagcagctttgctgtgttctacttcatctccttctacatgctgtgtgccttcctgatcatcaacctgtttgtggccgtcatcatggacaactttgactacctgacccgggactggagcatcctgggcccccaccacctggatgagttcaagaggatctgggccgagtatgaccctgaggccaagggccgcatcaagcacctggatgtggtgaccctgctgcggcgcatccagccccccctgggctttgggaagctgtgcccccaccgggtggcctgcaagaggctggtgtccatgaacatgcccctgaacagtgatggcaccgtgatgtttaatgccaccctgtttgccctggtgaggacagccctgcgcatcaagacagaggagggccccagccccagcgaggcccaccagggcgctgaggaccccttccggcctgctggcaacctggagcaggccaatgaggagctgcgggccatcatcaagaagatctggaagaggacctccatgaagctgctggaccaggtggtgcccccagctggagatgatgaggtgacagtgggcaagttctacgccaccttcctgatccaggagtacttcaggaagttcaagaagaggaaggagcagggcctggtgggcaagcccagccagagaaatgccctgagcctgcaggccggcctgcggaccctgcatgacatcggccctgagatcagaagagccatcagcggggacctgacagctgaggaggagctggacaaggccatgaaggaggccgtgtctgctgcctctgaagatgacatcttccggcgggccggcggcctgtttggaaatcatgtgtcctactaccagagtgatggccgcagcgccttcccccagaccttcaccacccagaggcccctgcacatcaacaaggccggcagcagccagggcgacacagagagccccagccatgagaagctggtggacagcaccttcacccccagcagctacagcagcacaggcagcaatgccaacatcaacaatgccaacaacacagccctgggccgcctgcccaggcctgctggctaccccagcacagtgtccacagtggagggccacggcccccccctgagccctgccatccgggtgcaggaggtggcctggaagctgagcagcaaccgctgccacagccgggagagccaggccgccatggccggccaggaggagaccagccaggatgagacctatgaggtgaagatgaaccacgacacagaggcctgcagcgagcccagcctgctgagcacagagatgctgagctaccaggatgatgagaaccggcagctgaccctgcctgaggaggacaagagggacatccggcagagccccaagaggggcttcctgcggagcgccagcctgggccggcgggccagcttccacctggagtgcctgaagaggcagaaggaccggggcggggacatcagccagaagacagtgctgcccctgcacctggtgcaccaccaggccctggccgtggccggcctgagccccctgctgcagaggagccacagccctgccagcttcccccggccctttgccaccccaccagccaccccaggcagccggggctggccaccccagcctgtgcccaccctgcggctggagggcgtggagagcagcgagaagctgaacagcagcttccccagcatccactgcggctcctgggccgagaccaccccaggcggcggcggcagcagcgctgcccggcgggtgcggcctgtgtccctgatggtgcccagccaggccggggcccctggccggcagttccacggcagcgccagcagcctggtggaggccgtgctgatcagcgagggcctgggccagtttgcccaggaccccaagttcatcgaggtgaccacccaggagctggctgatgcctgtgacatgaccatcgaggagatggagagcgctgctgacaacatcctgagcggcggggccccccagagccccaacggggccctgctgccctttgtgaactgcagagatgctggccaggacagagctggaggagaagaagatgctggctgtgtgcgggcccggggccggcccagcgaggaggagctgcaggacagccgggtgtatgtgagcagcctgtag

SEQ ID NO: 145823 - DNA, 6468 bp, synthetic construct
  misc_feature 1..6468: note = Description of Artificial Sequence: Synthetic coding sequence
  source 1..6468: mol_type = other DNA
atggtgaatgaaaacaccaggatgtacatccctgaggagaaccaccagggcagcaactacggcagccccaggcctgcccacgccaacatgaatgccaatgctgctgctggcctggcccctgagcacatccccacccctggggccgccctgtcctggcaggccgccattgatgctgcccggcaggccaagctgatgggcagcgctggaaatgccaccatcagcacagtgagcagcacccagaggaagaggcagcagtatggcaagcccaagaagcagggcagcaccacagccacccggcccccccgggccctgctgtgcctgaccctgaagaaccccatccggcgggcctgcatcagcatcgtggagtggaagccctttgagatcatcatcctgctgaccatctttgccaactgtgtggccctggccatctacatccccttcccagaagatgacagcaatgccaccaacagcaacctggagcgggtggagtacctgttcctgatcatcttcaccgtggaggccttcctgaaggtgattgcctacggcctgctcttccaccccaatgcctacctgagaaatggctggaacctgctggacttcatcatcgtggtggtgggcctcttcagcgccatcctggagcaggccaccaaggcagatggagccaatgccctgggcggcaaaggagctggctttgatgtgaaggccctgcgggccttccgggtgctgcggcccctgcggctggtgtctggagtgcccagcctgcaggtggtgctgaacagcatcatcaaggccatggtgcccctgctgcacatcgccctgctggtgctgtttgtgatcatcatctatgccatcatcggcctggagctgttcatgggcaagatgcacaagacctgctacaaccaggagggcattgctgatgtgcctgcagaagatgaccccagcccctgtgccctggagaccggccacggccggcagtgccagaatggcaccgtgtgcaagccaggctgggatggccccaagcacggcatcaccaactttgacaactttgcctttgccatgctgactgtgttccagtgcatcaccatggagggctggacagatgtgctgtactgggtgaatgatgctgtgggccgggactggccctggatctactttgtgaccctcatcatcatcggcagcttctttgtgctgaacctggtgctgggcgtgctgtctggagagttcagcaaggagcgggagaaggccaaggcccggggggacttccagaagctgcgggagaagcagcagctggaggaggacctgaagggctacctggactggatcacccaggctgaagatattgatcctgaaaatgaagatgagggcatggatgaggagaagcccaggaacatgtccatgcccaccagcgagacagaatctgtgaacacagaaaatgtggccggcggggacatcgagggggagaactgtggggcccggctggcccaccgcatcagcaagagcaagttcagccgctactggaggcgctggaaccgcttctgcaggaggaagtgcagagctgctgtgaagagcaatgtgttctactggctggtgatcttcctggtgttcctgaacaccctgaccatcgccagcgagcactacaaccagcccaactggctgacagaggtgcaggacacagccaacaaggccctgctggccctcttcaccgctgagatgctgctgaagatgtacagcctgggcctgcaggcctactttgtgtccctcttcaacagatttgactgctttgtggtgtgtggcggcatcctggagaccatcctggtggagaccaagatcatgagccccctgggcatctctgtgctgcgctgtgtgcggctgctgcgcatcttcaagatcacccgctactggaacagcctgagcaacctggtggccagcctgctgaacagcgtgcgcagcatcgccagcctgctgctgctgctcttcctgttcatcatcatcttcagcctgctgggcatgcagctgtttggaggcaagttcaactttgatgagatgcagaccaggaggagcacctttgacaacttcccccagagcctgctgaccgtcttccagatcctgaccggggaggactggaacagcgtgatgtatgatggcatcatggcctatggaggccccagcttccctggcatgctggtgtgcatctacttcatcatcctcttcatctgtggcaactacatcctgctgaatgtgttcctggccatcgctgtggacaacctggctgatgctgagagcctgaccagcgcccagaaggaggaggaggaggagaaggagaggaagaagctggccaggacagccagccctgagaagaagcaggagctggtggagaagccagctgtgggggagagcaaggaggagaagattgagctgaagagcatcacagcagatggagagagccccccagccaccaagatcaacatggatgacctgcagcccaatgaaaatgaagacaagagcccctaccccaaccctgagaccactggagaggaggatgaggaggagcctgagatgcctgtgggcccccggccccggcccctgtctgagctgcacctgaaggagaaggctgtgcccatgcctgaggccagcgccttcttcatcttcagcagcaacaaccgcttccggctgcagtgccaccgcatcgtgaatgacaccatcttcaccaacctgatcctcttcttcatcctgctgagcagcatcagcctggccgctgaggaccctgtgcagcacaccagcttcaggaaccacatcctgggcaatgctgactatgtgttcaccagcatcttcaccctggagatcatcctgaagatgacagcctatggagccttcctgcacaagggcagcttctgcaggaactacttcaacatcctggacctgctggtggtgtctgtgtccctcatcagctttggcatccagagcagcgccatcaacgtggtgaagatcctgcgggtgctgcgggtgctgcggcccctgcgggccatcaacagagccaagggcctgaagcacgtggtgcagtgtgtgtttgtggccatccgcaccatcggcaacatcgtcatcgtgaccaccctgctgcagttcatgtttgcctgcatcggcgtgcagctgttcaagggcaagctgtacacctgcagcgacagcagcaagcagacagaagctgagtgcaagggcaactacatcacctacaaggatggagaggtggaccaccccatcatccagcccaggtcctgggagaacagcaagtttgattttgacaacgtgctggccgccatgatggccctcttcaccgtgtccacctttgagggctggccagagctgctgtaccgcagcattgacagccacacagaggacaagggccccatctacaactacagagtggagatcagcatcttcttcatcatctacatcatcatcatcgccttcttcatgatgaacatctttgtgggcttcgtcatcgtgaccttccaggagcagggcgagcaggagtacaagaactgtgagctggacaagaaccagaggcagtgtgtggagtatgccctgaaggcccggcccctgcggcgctacatccccaagaaccagcaccagtacaaggtgtggtacgtggtgaacagcacctactttgagtacctgatgtttgtgctgatcctgctgaacaccatctgcctggccatgcagcactacggccagagctgcctcttcaagatcgccatgaacatcctgaacatgctgttcaccggcctcttcaccgtggagatgatcctgaagctgattgccttcaagcccaagggctacttcagtgacccctggaatgtgtttgacttcctgattgtcatcggcagcatcattgatgtgatcctgtctgagaccaaccactacttctgtgatgcctggaacacctttgatgccctgattgtggtgggcagcatcgtggacatcgccatcacagaggtgaacaatgctgaggagaacagccgcatcagcatcaccttcttccgcctcttccgggtgatgaggctggtgaagctgctgagcagaggagagggcatccgcaccctgctgtggaccttcatcaagagcttccaggccctgccctacgtggccctgctgattgtgatgctgttcttcatctatgctgtgattggcatgcaggtgtttgggaagatcgccctgaatgacaccacagagatcaacagaaacaacaacttccagaccttcccccaggccgtgctgctgctcttccgctgtgccactggagaggcctggcaggacatcatgctggcctgcatgcctgggaagaagtgtgcccctgagagcgagcccagcaacagcacagaaggagagaccccctgtggcagcagctttgctgtgttctacttcatctccttctacatgctgtgtgccttcctgatcatcaacctgtttgtggccgtcatcatggacaactttgactacctgacccgggactggagcatcctgggcccccaccacctggatgagttcaagaggatctgggccgagtatgaccctgaggccaagggccgcatcaagcacctggatgtggtgaccctgctgcggcgcatccagccccccctgggctttgggaagctgtgcccccaccgggtggcctgcaagaggctggtgtccatgaacatgcccctgaacagtgatggcaccgtgatgtttaatgccaccctgtttgccctggtgaggacagccctgcgcatcaagacagagggcaacctggagcaggccaatgaggagctgcgggccatcatcaagaagatctggaagaggacctccatgaagctgctggaccaggtggtgcccccagctggagatgatgaggtgacagtgggcaagttctacgccaccttcctgatccaggagtacttcaggaagttcaagaagaggaaggagcagggcctggtgggcaagcccagccagagaaatgccctgagcctgcaggccggcctgcggaccctgcatgacatcggccctgagatcagaagagccatcagcggggacctgacagctgaggaggagctggacaaggccatgaaggaggccgtgtctgctgcctctgaagatgacatcttccggcgggccggcggcctgtttggaaatcatgtgtcctactaccagagtgatggccgcagcgccttcccccagaccttcaccacccagaggcccctgcacatcaacaaggccggcagcagccagggcgacacagagagccccagccatgagaagctggtggacagcaccttcacccccagcagctacagcagcacaggcagcaatgccaacatcaacaatgccaacaacacagccctgggccgcctgcccaggcctgctggctaccccagcacagtgtccacagtggagggccacggcccccccctgagccctgccatccgggtgcaggaggtggcctggaagctgagcagcaaccgctgccacagccgggagagccaggccgccatggccggccaggaggagaccagccaggatgagacctatgaggtgaagatgaaccacgacacagaggcctgcagcgagcccagcctgctgagcacagagatgctgagctaccaggatgatgagaaccggcagctgaccctgcctgaggaggacaagagggacatccggcagagccccaagaggggcttcctgcggagcgccagcctgggccggcgggccagcttccacctggagtgcctgaagaggcagaaggaccggggcggggacatcagccagaagacagtgctgcccctgcacctggtgcaccaccaggccctggccgtggccggcctgagccccctgctgcagaggagccacagccctgccagcttcccccggccctttgccaccccaccagccaccccaggcagccggggctggccaccccagcctgtgcccaccctgcggctggagggcgtggagagcagcgagaagctgaacagcagcttccccagcatccactgcggctcctgggccgagaccaccccaggcggcggcggcagcagcgctgcccggcgggtgcggcctgtgtccctgatggtgcccagccaggccggggcccctggccggcagttccacggcagcgccagcagcctggtggaggccgtgctgatcagcgagggcctgggccagtttgcccaggaccccaagttcatcgaggtgaccacccaggagctggctgatgcctgtgacatgaccatcgaggagatggagagcgctgctgacaacatcctgagcggcggggccccccagagccccaacggggccctgctgccctttgtgaactgcagagatgctggccaggacagagctggaggagaagaagatgctggctgtgtgcgggcccggggccggcccagcgaggaggagctgcaggacagccgggtgtatgtgagcagcctgtag

SEQ ID NO: 145824 - DNA, 6630 bp, synthetic construct
  misc_feature 1..6630: note = Description of Artificial Sequence: Synthetic coding sequence
  source 1..6630: mol_type = other DNA
atggtgaatgaaaacaccaggatgtacatccctgaggagaaccaccagggcagcaactacggcagccccaggcctgcccacgccaacatgaatgccaatgctgctgctggcctggcccctgagcacatccccacccctggggccgccctgtcctggcaggccgccattgatgctgcccggcaggccaagctgatgggcagcgctggaaatgccaccatcagcacagtgagcagcacccagaggaagaggcagcagtatggcaagcccaagaagcagggcagcaccacagccacccggcccccccgggccctgctgtgcctgaccctgaagaaccccatccggcgggcctgcatcagcatcgtggagtggaagccctttgagatcatcatcctgctgaccatctttgccaactgtgtggccctggccatctacatccccttcccagaagatgacagcaatgccaccaacagcaacctggagcgggtggagtacctgttcctgatcatcttcaccgtggaggccttcctgaaggtgattgcctacggcctgctcttccaccccaatgcctacctgagaaatggctggaacctgctggacttcatcatcgtggtggtgggcctcttcagcgccatcctggagcaggccaccaaggcagatggagccaatgccctgggcggcaaaggagctggctttgatgtgaaggccctgcgggccttccgggtgctgcggcccctgcggctggtgtctggagtgcccagcctgcaggtggtgctgaacagcatcatcaaggccatggtgcccctgctgcacatcgccctgctggtgctgtttgtgatcatcatctatgccatcatcggcctggagctgttcatgggcaagatgcacaagacctgctacaaccaggagggcattgctgatgtgcctgcagaagatgaccccagcccctgtgccctggagaccggccacggccggcagtgccagaatggcaccgtgtgcaagccaggctgggatggccccaagcacggcatcaccaactttgacaactttgcctttgccatgctgactgtgttccagtgcatcaccatggagggctggacagatgtgctgtactggatgcaggatgccatgggctatgagctgccctgggtgtactttgtgtccctggtgatcttcggcagcttctttgtgctgaacctggtgctgggcgtgctgtctggagagttcagcaaggagcgggagaaggccaaggcccggggggacttccagaagctgcgggagaagcagcagctggaggaggacctgaagggctacctggactggatcacccaggctgaagatattgatcctgaaaatgaagatgagggcatggatgaggagaagcccaggaacatgtccatgcccaccagcgagacagaatctgtgaacacagaaaatgtggccggcggggacatcgagggggagaactgtggggcccggctggcccaccgcatcagcaagagcaagttcagccgctactggaggcgctggaaccgcttctgcaggaggaagtgcagagctgctgtgaagagcaatgtgttctactggctggtgatcttcctggtgttcctgaacaccctgaccatcgccagcgagcactacaaccagcccaactggctgacagaggtgcaggacacagccaacaaggccctgctggccctcttcaccgctgagatgctgctgaagatgtacagcctgggcctgcaggcctactttgtgtccctcttcaacagatttgactgctttgtggtgtgtggcggcatcctggagaccatcctggtggagaccaagatcatgagccccctgggcatctctgtgctgcgctgtgtgcggctgctgcgcatcttcaagatcacccgctactggaacagcctgagcaacctggtggccagcctgctgaacagcgtgcgcagcatcgccagcctgctgctgctgctcttcctgttcatcatcatcttcagcctgctgggcatgcagctgtttggaggcaagttcaactttgatgagatgcagaccaggaggagcacctttgacaacttcccccagagcctgctgaccgtcttccagatcctgaccggggaggactggaacagcgtgatgtatgatggcatcatggcctatggaggccccagcttccctggcatgctggtgtgcatctacttcatcatcctcttcatctgtggcaactacatcctgctgaatgtgttcctggccatcgctgtggacaacctggctgatgctgagagcctgaccagcgcccagaaggaggaggaggaggagaaggagaggaagaagctggccaggacagccagccctgagaagaagcaggagctggtggagaagccagctgtgggggagagcaaggaggagaagattgagctgaagagcatcacagcagatggagagagccccccagccaccaagatcaacatggatgacctgcagcccaatgaaaatgaagacaagagcccctaccccaaccctgagaccactggagaggaggatgaggaggagcctgagatgcctgtgggcccccggccccggcccctgtctgagctgcacctgaaggagaaggctgtgcccatgcctgaggccagcgccttcttcatcttcagcagcaacaaccgcttccggctgcagtgccaccgcatcgtgaatgacaccatcttcaccaacctgatcctcttcttcatcctgctgagcagcatcagcctggccgctgaggaccctgtgcagcacaccagcttcaggaaccacatcctcttctactttgacatcgtgttcaccaccatcttcaccatcgagatcgccctgaagatgacagcctatggagccttcctgcacaagggcagcttctgcaggaactacttcaacatcctggacctgctggtggtgtctgtgtccctcatcagctttggcatccagagcagcgccatcaacgtggtgaagatcctgcgggtgctgcgggtgctgcggcccctgcgggccatcaacagagccaagggcctgaagcacgtggtgcagtgtgtgtttgtggccatccgcaccatcggcaacatcgtcatcgtgaccaccctgctgcagttcatgtttgcctgcatcggcgtgcagctgttcaagggcaagctgtacacctgcagcgacagcagcaagcagacagaagctgagtgcaagggcaactacatcacctacaaggatggagaggtggaccaccccatcatccagcccaggtcctgggagaacagcaagtttgattttgacaacgtgctggccgccatgatggccctcttcaccgtgtccacctttgagggctggccagagctgctgtaccgcagcattgacagccacacagaggacaagggccccatctacaactacagagtggagatcagcatcttcttcatcatctacatcatcatcatcgccttcttcatgatgaacatctttgtgggcttcgtcatcgtgaccttccaggagcagggcgagcaggagtacaagaactgtgagctggacaagaaccagaggcagtgtgtggagtatgccctgaaggcccggcccctgcggcgctacatccccaagaaccagcaccagtacaaggtgtggtacgtggtgaacagcacctactttgagtacctgatgtttgtgctgatcctgctgaacaccatctgcctggccatgcagcactacggccagagctgcctcttcaagatcgccatgaacatcctgaacatgctgttcaccggcctcttcaccgtggagatgatcctgaagctgattgccttcaagcccaagcactacttctgtgatgcctggaacacctttgatgccctgattgtggtgggcagcatcgtggacatcgccatcacagaggtgaacccagctgagcacacccagtgcagccccagcatgaatgctgaggagaacagccgcatcagcatcaccttcttccgcctcttccgggtgatgaggctggtgaagctgctgagcagaggagagggcatccgcaccctgctgtggaccttcatcaagagcttccaggccctgccctacgtggccctgctgattgtgatgctgttcttcatctatgctgtgattggcatgcaggtgtttgggaagatcgccctgaatgacaccacagagatcaacagaaacaacaacttccagaccttcccccaggccgtgctgctgctcttccgctgtgccaccggggaggcctggcaggacatcatgctggcctgcatgcctgggaagaagtgtgcccctgagagcgagcccagcaacagcacagaaggagagaccccctgtggcagcagctttgctgtgttctacttcatctccttctacatgctgtgtgccttcctgatcatcaacctgtttgtggccgtcatcatggacaactttgactacctgacccgggactggagcatcctgggcccccaccacctggatgagttcaagaggatctgggccgagtatgaccctgaggccaagggccgcatcaagcacctggatgtggtgaccctgctgcggcgcatccagccccccctgggctttgggaagctgtgcccccaccgggtggcctgcaagaggctggtgtccatgaacatgcccctgaacagtgatggcaccgtgatgtttaatgccaccctgtttgccctggtgaggacagccctgcgcatcaagacagagggcaacctggagcaggccaatgaggagctgcgggccatcatcaagaagatctggaagaggacctccatgaagctgctggaccaggtggtgcccccagctggagatgatgaggtgacagtgggcaagttctacgccaccttcctgatccaggagtacttcaggaagttcaagaagaggaaggagcagggcctggtgggcaagcccagccagagaaatgccctgagcctgcaggccggcctgcggaccctgcatgacatcggccctgagatccggcgggccatcagcggggacctgacagctgaggaggagctggacaaggccatgaaggaggccgtgtctgctgcctctgaagatgacatcttcagaagagctgggggcctgtttggaaaccacgtgtcctactaccagagtgatggccgcagcgccttcccccagaccttcaccacccagaggcccctgcacatcaacaaggccggcagcagccagggcgacacagagagccccagccatgagaagctggtggacagcaccttcacccccagcagctacagcagcacaggcagcaatgccaacatcaacaatgccaacaacacagccctgggccgcctgcccaggcctgctggctaccccagcacagtgtccacagtggagggccacggcccccccctgagccctgccatccgggtgcaggaggtggcctggaagctgagcagcaacaggatgcactgctgtgacatgctggatggcggcaccttccccccagccctgggcccccggcgggccccaccctgcctgcaccagcagctgcagggcagcctggccggcctgcgggaggacaccccctgcatcgtgcccggccacgccagcctgtgctgcagcagccgggtgggggagtggctgcctgctggctgcacagccccccagcacgcccgctgccacagccgggagagccaggccgccatggccggccaggaggagaccagccaggatgagacctatgaggtgaagatgaaccacgacacagaggcctgcagcgagcccagcctgctgagcacagagatgctgagctaccaggatgatgagaaccggcagctgaccctgcctgaggaggacaagagggacatccggcagagccccaagaggggcttcctgcggagcgccagcctgggccggcgggccagcttccacctggagtgcctgaagaggcagaaggaccggggcggggacatcagccagaagacagtgctgcccctgcacctggtgcaccaccaggccctggccgtggccggcctgagccccctgctgcagaggagccacagccctgccagcttcccccggccctttgccaccccaccagccaccccaggcagccggggctggccaccccagcctgtgcccaccctgcggctggagggcgtggagagcagcgagaagctgaacagcagcttccccagcatccactgcggctcctgggccgagaccaccccaggcggcggcggcagcagcgctgcccggcgggtgcggcctgtgtccctgatggtgcccagccaggccggggcccctggccggcagttccacggcagcgccagcagcctggtggaggccgtgctgatcagcgagggcctgggccagtttgcccaggaccccaagttcatcgaggtgaccacccaggagctggctgatgcctgtgacatgaccatcgaggagatggagagcgctgctgacaacatcctgagcggcggggccccccagagccccaacggggccctgctgccctttgtgaactgcagagatgctggccaggacagagctggaggagaagaagatgctggctgtgtgcgggcccggggccggcccagcgaggaggagctgcaggacagccgggtgtatgtgagcagcctgtag

SEQ ID NO: 145825 - DNA, 6474 bp, synthetic construct
  misc_feature 1..6474: note = Description of Artificial Sequence: Synthetic coding sequence
  source 1..6474: mol_type = other DNA
atggtgaatgaaaacaccaggatgtacatccctgaggagaaccaccagggcagcaactacggcagccccaggcctgcccacgccaacatgaatgccaatgctgctgctggcctggcccctgagcacatccccacccctggggccgccctgtcctggcaggccgccattgatgctgcccggcaggccaagctgatgggcagcgctggaaatgccaccatcagcacagtgagcagcacccagaggaagaggcagcagtatggcaagcccaagaagcagggcagcaccacagccacccggcccccccgggccctgctgtgcctgaccctgaagaaccccatccggcgggcctgcatcagcatcgtggagtggaagccctttgagatcatcatcctgctgaccatctttgccaactgtgtggccctggccatctacatccccttcccagaagatgacagcaatgccaccaacagcaacctggagcgggtggagtacctgttcctgatcatcttcaccgtggaggccttcctgaaggtgattgcctacggcctgctcttccaccccaatgcctacctgagaaatggctggaacctgctggacttcatcatcgtggtggtgggcctcttcagcgccatcctggagcaggccaccaaggcagatggagccaatgccctgggcggcaaaggagctggctttgatgtgaaggccctgcgggccttccgggtgctgcggcccctgcggctggtgtctggagtgcccagcctgcaggtggtgctgaacagcatcatcaaggccatggtgcccctgctgcacatcgccctgctggtgctgtttgtgatcatcatctatgccatcatcggcctggagctgttcatgggcaagatgcacaagacctgctacaaccaggagggcattgctgatgtgcctgcagaagatgaccccagcccctgtgccctggagaccggccacggccggcagtgccagaatggcaccgtgtgcaagccaggctgggatggccccaagcacggcatcaccaactttgacaactttgcctttgccatgctgactgtgttccagtgcatcaccatggagggctggacagatgtgctgtactgggtgaatgatgctgtgggccgggactggccctggatctactttgtgaccctcatcatcatcggcagcttctttgtgctgaacctggtgctgggcgtgctgtctggagagttcagcaaggagcgggagaaggccaaggcccggggggacttccagaagctgcgggagaagcagcagctggaggaggacctgaagggctacctggactggatcacccaggctgaagatattgatcctgaaaatgaagatgagggcatggatgaggagaagcccaggaacatgtccatgcccaccagcgagacagaatctgtgaacacagaaaatgtggccggcggggacatcgagggggagaactgtggggcccggctggcccaccgcatcagcaagagcaagttcagccgctactggaggcgctggaaccgcttctgcaggaggaagtgcagagctgctgtgaagagcaatgtgttctactggctggtgatcttcctggtgttcctgaacaccctgaccatcgccagcgagcactacaaccagcccaactggctgacagaggtgcaggacacagccaacaaggccctgctggccctcttcaccgctgagatgctgctgaagatgtacagcctgggcctgcaggcctactttgtgtccctcttcaacagatttgactgctttgtggtgtgtggcggcatcctggagaccatcctggtggagaccaagatcatgagccccctgggcatctctgtgctgcgctgtgtgcggctgctgcgcatcttcaagatcacccgctactggaacagcctgagcaacctggtggccagcctgctgaacagcgtgcgcagcatcgccagcctgctgctgctgctcttcctgttcatcatcatcttcagcctgctgggcatgcagctgtttggaggcaagttcaactttgatgagatgcagaccaggaggagcacctttgacaacttcccccagagcctgctgaccgtcttccagatcctgaccggggaggactggaacagcgtgatgtatgatggcatcatggcctatggaggccccagcttccctggcatgctggtgtgcatctacttcatcatcctcttcatctgtggcaactacatcctgctgaatgtgttcctggccatcgctgtggacaacctggctgatgctgagagcctgaccagcgcccagaaggaggaggaggaggagaaggagaggaagaagctggccaggacagccagccctgagaagaagcaggagctggtggagaagccagctgtgggggagagcaaggaggagaagattgagctgaagagcatcacagcagatggagagagccccccagccaccaagatcaacatggatgacctgcagcccaatgaaaatgaagacaagagcccctaccccaaccctgagaccactggagaggaggatgaggaggagcctgagatgcctgtgggcccccggccccggcccctgtctgagctgcacctgaaggagaaggctgtgcccatgcctgaggccagcgccttcttcatcttcagcagcaacaaccgcttccggctgcagtgccaccgcatcgtgaatgacaccatcttcaccaacctgatcctcttcttcatcctgctgagcagcatcagcctggccgctgaggaccctgtgcagcacaccagcttcaggaaccacatcctgggcaatgctgactatgtgttcaccagcatcttcaccctggagatcatcctgaagatgacagcctatggagccttcctgcacaagggcagcttctgcaggaactacttcaacatcctggacctgctggtggtgtctgtgtccctcatcagctttggcatccagagcagcgccatcaacgtggtgaagatcctgcgggtgctgcgggtgctgcggcccctgcgggccatcaacagagccaagggcctgaagcacgtggtgcagtgtgtgtttgtggccatccgcaccatcggcaacatcgtcatcgtgaccaccctgctgcagttcatgtttgcctgcatcggcgtgcagctgttcaagggcaagctgtacacctgcagcgacagcagcaagcagacagaagctgagtgcaagggcaactacatcacctacaaggatggagaggtggaccaccccatcatccagcccaggtcctgggagaacagcaagtttgattttgacaacgtgctggccgccatgatggccctcttcaccgtgtccacctttgagggctggccagagctgctgtaccgcagcattgacagccacacagaggacaagggccccatctacaactacagagtggagatcagcatcttcttcatcatctacatcatcatcatcgccttcttcatgatgaacatctttgtgggcttcgtcatcgtgaccttccaggagcagggcgagcaggagtacaagaactgtgagctggacaagaaccagaggcagtgtgtggagtatgccctgaaggcccggcccctgcggcgctacatccccaagaaccagcaccagtacaaggtgtggtacgtggtgaacagcacctactttgagtacctgatgtttgtgctgatcctgctgaacaccatctgcctggccatgcagcactacggccagagctgcctcttcaagatcgccatgaacatcctgaacatgctgttcaccggcctcttcaccgtggagatgatcctgaagctgattgccttcaagcccaagcactacttctgtgatgcctggaacacctttgatgccctgattgtggtgggcagcatcgtggacatcgccatcacagaggtgaacccagctgagcacacccagtgcagccccagcatgaatgctgaggagaacagccgcatcagcatcaccttcttccgcctcttccgggtgatgaggctggtgaagctgctgagcagaggagagggcatccgcaccctgctgtggaccttcatcaagagcttccaggccctgccctacgtggccctgctgattgtgatgctgttcttcatctatgctgtgattggcatgcaggtgtttgggaagatcgccctgaatgacaccacagagatcaacagaaacaacaacttccagaccttcccccaggccgtgctgctgctcttccgctgtgccaccggggaggcctggcaggacatcatgctggcctgcatgcctgggaagaagtgtgcccctgagagcgagcccagcaacagcacagaaggagagaccccctgtggcagcagctttgctgtgttctacttcatctccttctacatgctgtgtgccttcctgatcatcaacctgtttgtggccgtcatcatggacaactttgactacctgacccgggactggagcatcctgggcccccaccacctggatgagttcaagaggatctgggccgagtatgaccctgaggccaagggccgcatcaagcacctggatgtggtgaccctgctgcggcgcatccagccccccctgggctttgggaagctgtgcccccaccgggtggcctgcaagaggctggtgtccatgaacatgcccctgaacagtgatggcaccgtgatgtttaatgccaccctgtttgccctggtgaggacagccctgcgcatcaagacagaggagggccccagccccagcgaggcccaccagggcgctgaggaccccttccggcctgctggcaacctggagcaggccaatgaggagctgcgggccatcatcaagaagatctggaagaggacctccatgaagctgctggaccaggtggtgcccccagctggagatgatgaggtgacagtgggcaagttctacgccaccttcctgatccaggagtacttcaggaagttcaagaagaggaaggagcagggcctggtgggcaagcccagccagagaaatgccctgagcctgcaggccggcctgcggaccctgcatgacatcggccctgagatcagaagagccatcagcggggacctgacagctgaggaggagctggacaaggccatgaaggaggccgtgtctgctgcctctgaagatgacatcttccggcgggccggcggcctgtttggaaatcatgtgtcctactaccagagtgatggccgcagcgccttcccccagaccttcaccacccagaggcccctgcacatcaacaaggccggcagcagccagggcgacacagagagccccagccatgagaagctggtggacagcaccttcacccccagcagctacagcagcacaggcagcaatgccaacatcaacaatgccaacaacacagccctgggccgcctgcccaggcctgctggctaccccagcacagtgtccacagtggagggccacggcccccccctgagccctgccatccgggtgcaggaggtggcctggaagctgagcagcaaccgctgccacagccgggagagccaggccgccatggccggccaggaggagaccagccaggatgagacctatgaggtgaagatgaaccacgacacagaggcctgcagcgagcccagcctgctgagcacagagatgctgagctaccaggatgatgagaaccggcagctgaccctgcctgaggaggacaagagggacatccggcagagccccaagaggggcttcctgcggagcgccagcctgggccggcgggccagcttccacctggagtgcctgaagaggcagaaggaccggggcggggacatcagccagaagacagtgctgcccctgcacctggtgcaccaccaggccctggccgtggccggcctgagccccctgctgcagaggagccacagccctgccagcttcccccggccctttgccaccccaccagccaccccaggcagccggggctggccaccccagcctgtgcccaccctgcggctggagggcgtggagagcagcgagaagctgaacagcagcttccccagcatccactgcggctcctgggccgagaccaccccaggcggcggcggcagcagcgctgcccggcgggtgcggcctgtgtccctgatggtgcccagccaggccggggcccctggccggcagttccacggcagcgccagcagcctggtggaggccgtgctgatcagcgagggcctgggccagtttgcccaggaccccaagttcatcgaggtgaccacccaggagctggctgatgcctgtgacatgaccatcgaggagatggagagcgctgctgacaacatcctgagcggcggggccccccagagccccaacggggccctgctgccctttgtgaactgcagagatgctggccaggacagagctggaggagaagaagatgctggctgtgtgcgggcccggggccggcccagcgaggaggagctgcaggacagccgggtgtatgtgagcagcctgtag

SEQ ID NO: 145826 - DNA, 6501 bp, synthetic construct
  misc_feature 1..6501: note = Description of Artificial Sequence: Synthetic coding sequence
  source 1..6501: mol_type = other DNA
atggtgaatgaaaacaccaggatgtacatccctgaggagaaccaccagggcagcaactacggcagccccaggcctgcccacgccaacatgaatgccaatgctgctgctggcctggcccctgagcacatccccacccctggggccgccctgtcctggcaggccgccattgatgctgcccggcaggccaagctgatgggcagcgctggaaatgccaccatcagcacagtgagcagcacccagaggaagaggcagcagtatggcaagcccaagaagcagggcagcaccacagccacccggcccccccgggccctgctgtgcctgaccctgaagaaccccatccggcgggcctgcatcagcatcgtggagtggaagccctttgagatcatcatcctgctgaccatctttgccaactgtgtggccctggccatctacatccccttcccagaagatgacagcaatgccaccaacagcaacctggagcgggtggagtacctgttcctgatcatcttcaccgtggaggccttcctgaaggtgattgcctacggcctgctcttccaccccaatgcctacctgagaaatggctggaacctgctggacttcatcatcgtggtggtgggcctcttcagcgccatcctggagcaggccaccaaggcagatggagccaatgccctgggcggcaaaggagctggctttgatgtgaaggccctgcgggccttccgggtgctgcggcccctgcggctggtgtctggagtgcccagcctgcaggtggtgctgaacagcatcatcaaggccatggtgcccctgctgcacatcgccctgctggtgctgtttgtgatcatcatctatgccatcatcggcctggagctgttcatgggcaagatgcacaagacctgctacaaccaggagggcattgctgatgtgcctgcagaagatgaccccagcccctgtgccctggagaccggccacggccggcagtgccagaatggcaccgtgtgcaagccaggctgggatggccccaagcacggcatcaccaactttgacaactttgcctttgccatgctgactgtgttccagtgcatcaccatggagggctggacagatgtgctgtactgggtgaatgatgctgtgggccgggactggccctggatctactttgtgaccctcatcatcatcggcagcttctttgtgctgaacctggtgctgggcgtgctgtctggagagttcagcaaggagcgggagaaggccaaggcccggggggacttccagaagctgcgggagaagcagcagctggaggaggacctgaagggctacctggactggatcacccaggctgaagatattgatcctgaaaatgaagatgagggcatggatgaggagaagcccaggaacatgtccatgcccaccagcgagacagaatctgtgaacacagaaaatgtggccggcggggacatcgagggggagaactgtggggcccggctggcccaccgcatcagcaagagcaagttcagccgctactggaggcgctggaaccgcttctgcaggaggaagtgcagagctgctgtgaagagcaatgtgttctactggctggtgatcttcctggtgttcctgaacaccctgaccatcgccagcgagcactacaaccagcccaactggctgacagaggtgcaggacacagccaacaaggccctgctggccctcttcaccgctgagatgctgctgaagatgtacagcctgggcctgcaggcctactttgtgtccctcttcaacagatttgactgctttgtggtgtgtggcggcatcctggagaccatcctggtggagaccaagatcatgagccccctgggcatctctgtgctgcgctgtgtgcggctgctgcgcatcttcaagatcacccgctactggaacagcctgagcaacctggtggccagcctgctgaacagcgtgcgcagcatcgccagcctgctgctgctgctcttcctgttcatcatcatcttcagcctgctgggcatgcagctgtttggaggcaagttcaactttgatgagatgcagaccaggaggagcacctttgacaacttcccccagagcctgctgaccgtcttccagatcctgaccggggaggactggaacagcgtgatgtatgatggcatcatggcctatggaggccccagcttccctggcatgctggtgtgcatctacttcatcatcctcttcatctgtggcaactacatcctgctgaatgtgttcctggccatcgctgtggacaacctggctgatgctgagagcctgaccagcgcccagaaggaggaggaggaggagaaggagaggaagaagctggccaggacagccagccctgagaagaagcaggagctggtggagaagccagctgtgggggagagcaaggaggagaagattgagctgaagagcatcacagcagatggagagagccccccagccaccaagatcaacatggatgacctgcagcccaatgaaaatgaagacaagagcccctaccccaaccctgagaccactggagaggaggatgaggaggagcctgagatgcctgtgggcccccggccccggcccctgtctgagctgcacctgaaggagaaggctgtgcccatgcctgaggccagcgccttcttcatcttcagcagcaacaaccgcttccggctgcagtgccaccgcatcgtgaatgacaccatcttcaccaacctgatcctcttcttcatcctgctgagcagcatcagcctggccgctgaggaccctgtgcagcacaccagcttcaggaaccacatcctcttctactttgacatcgtgttcaccaccatcttcaccatcgagatcgccctgaagatgacagcctatggagccttcctgcacaagggcagcttctgcaggaactacttcaacatcctggacctgctggtggtgtctgtgtccctcatcagctttggcatccagagcagcgccatcaacgtggtgaagatcctgcgggtgctgcgggtgctgcggcccctgcgggccatcaacagagccaagggcctgaagcacgtggtgcagtgtgtgtttgtggccatccgcaccatcggcaacatcgtcatcgtgaccaccctgctgcagttcatgtttgcctgcatcggcgtgcagctgttcaagggcaagctgtacacctgcagcgacagcagcaagcagacagaagctgagtgcaagggcaactacatcacctacaaggatggagaggtggaccaccccatcatccagcccaggtcctgggagaacagcaagtttgattttgacaacgtgctggccgccatgatggccctcttcaccgtgtccacctttgagggctggccagagctgctgtaccgcagcattgacagccacacagaggacaagggccccatctacaactacagagtggagatcagcatcttcttcatcatctacatcatcatcatcgccttcttcatgatgaacatctttgtgggcttcgtcatcgtgaccttccaggagcagggcgagcaggagtacaagaactgtgagctggacaagaaccagaggcagtgtgtggagtatgccctgaaggcccggcccctgcggcgctacatccccaagaaccagcaccagtacaaggtgtggtacgtggtgaacagcacctactttgagtacctgatgtttgtgctgatcctgctgaacaccatctgcctggccatgcagcactacggccagagctgcctcttcaagatcgccatgaacatcctgaacatgctgttcaccggcctcttcaccgtggagatgatcctgaagctgattgccttcaagcccaagggctacttcagtgacccctggaatgtgtttgacttcctgattgtcatcggcagcatcattgatgtgatcctgtctgagaccaaccactacttctgtgatgcctggaacacctttgatgccctgattgtggtgggcagcatcgtggacatcgccatcacagaggtgaacccagctgagcacacccagtgcagccccagcatgaatgctgaggagaacagccgcatcagcatcaccttcttccgcctcttccgggtgatgaggctggtgaagctgctgagcagaggagagggcatccgcaccctgctgtggaccttcatcaagagcttccaggccctgccctacgtggccctgctgattgtgatgctgttcttcatctatgctgtgattggcatgcaggtgtttgggaagatcgccctgaatgacaccacagagatcaacagaaacaacaacttccagaccttcccccaggccgtgctgctgctcttccgctgtgccaccggggaggcctggcaggacatcatgctggcctgcatgcctgggaagaagtgtgcccctgagagcgagcccagcaacagcacagaaggagagaccccctgtggcagcagctttgctgtgttctacttcatctccttctacatgctgtgtgccttcctgatcatcaacctgtttgtggccgtcatcatggacaactttgactacctgacccgggactggagcatcctgggcccccaccacctggatgagttcaagaggatctgggccgagtatgaccctgaggccaagggccgcatcaagcacctggatgtggtgaccctgctgcggcgcatccagccccccctgggctttgggaagctgtgcccccaccgggtggcctgcaagaggctggtgtccatgaacatgcccctgaacagtgatggcaccgtgatgtttaatgccaccctgtttgccctggtgaggacagccctgcgcatcaagacagagggcaacctggagcaggccaatgaggagctgcgggccatcatcaagaagatctggaagaggacctccatgaagctgctggaccaggtggtgcccccagctggagatgatgaggtgacagtgggcaagttctacgccaccttcctgatccaggagtacttcaggaagttcaagaagaggaaggagcagggcctggtgggcaagcccagccagagaaatgccctgagcctgcaggccggcctgcggaccctgcatgacatcggccctgagatccggcgggccatcagcggggacctgacagctgaggaggagctggacaaggccatgaaggaggccgtgtctgctgcctctgaagatgacatcttcagaagagctgggggcctgtttggaaaccacgtgtcctactaccagagtgatggccgcagcgccttcccccagaccttcaccacccagaggcccctgcacatcaacaaggccggcagcagccagggcgacacagagagccccagccatgagaagctggtggacagcaccttcacccccagcagctacagcagcacaggcagcaatgccaacatcaacaatgccaacaacacagccctgggccgcctgcccaggcctgctggctaccccagcacagtgtccacagtggagggccacggcccccccctgagccctgccatccgggtgcaggaggtggcctggaagctgagcagcaaccgctgccacagccgggagagccaggccgccatggccggccaggaggagaccagccaggatgagacctatgaggtgaagatgaaccacgacacagaggcctgcagcgagcccagcctgctgagcacagagatgctgagctaccaggatgatgaaaatcggcagctgaccctgcctgaggaggacaagagggacatccggcagagccccaagaggggcttcctgcggagcgccagcctgggcagaagagccagcttccacctggagtgcctgaagaggcagaaggacagaggaggagacatcagccagaagacagtgctgcccctgcacctggtgcaccaccaggccctggccgtggccggcctgagccccctgctgcagaggagccacagccctgccagcttcccccggccctttgccaccccaccagccaccccaggcagccggggctggccaccccagcctgtgcccaccctgcggctggagggcgtggagagcagcgagaagctgaacagcagcttccccagcatccactgcggctcctgggccgagaccacccctgggggcggcggcagcagcgctgccaggagagtgcggcctgtgtccctgatggtgcccagccaggccggggcccctggccggcagttccacggcagcgccagcagcctggtggaggccgtgctgatcagcgagggcctgggccagtttgcccaggaccccaagttcatcgaggtgaccacccaggagctggctgatgcctgtgacatgaccatcgaggagatggagagcgctgctgacaacatcctgtctggaggagccccccagagccccaatggagccctgctgccctttgtgaactgcagagatgctggccaggaccgggccggcggggaggaggatgctggctgtgtgcgggcccggggccggcccagcgaggaggagctgcaggacagccgggtgtatgtgagcagcctgtag

SEQ ID NO: 145827 - DNA, 6417 bp, synthetic construct
  misc_feature 1..6417: note = Description of Artificial Sequence: Synthetic coding sequence
  source 1..6417: mol_type = other DNA
atggtgaatgaaaacaccaggatgtacatccctgaggagaaccaccagggcagcaactacggcagccccaggcctgcccacgccaacatgaatgccaatgctgctgctggcctggcccctgagcacatccccacccctggggccgccctgtcctggcaggccgccattgatgctgcccggcaggccaagctgatgggcagcgctggaaatgccaccatcagcacagtgagcagcacccagaggaagaggcagcagtatggcaagcccaagaagcagggcagcaccacagccacccggcccccccgggccctgctgtgcctgaccctgaagaaccccatccggcgggcctgcatcagcatcgtggagtggaagccctttgagatcatcatcctgctgaccatctttgccaactgtgtggccctggccatctacatccccttcccagaagatgacagcaatgccaccaacagcaacctggagcgggtggagtacctgttcctgatcatcttcaccgtggaggccttcctgaaggtgattgcctacggcctgctcttccaccccaatgcctacctgagaaatggctggaacctgctggacttcatcatcgtggtggtgggcctcttcagcgccatcctggagcaggccaccaaggcagatggagccaatgccctgggcggcaaaggagctggctttgatgtgaaggccctgcgggccttccgggtgctgcggcccctgcggctggtgtctggagtgcccagcctgcaggtggtgctgaacagcatcatcaaggccatggtgcccctgctgcacatcgccctgctggtgctgtttgtgatcatcatctatgccatcatcggcctggagctgttcatgggcaagatgcacaagacctgctacaaccaggagggcattgctgatgtgcctgcagaagatgaccccagcccctgtgccctggagaccggccacggccggcagtgccagaatggcaccgtgtgcaagccaggctgggatggccccaagcacggcatcaccaactttgacaactttgcctttgccatgctgactgtgttccagtgcatcaccatggagggctggacagatgtgctgtactggatgcaggatgccatgggctatgagctgccctgggtgtactttgtgtccctggtgatcttcggcagcttctttgtgctgaacctggtgctgggcgtgctgtctggagagttcagcaaggagcgggagaaggccaaggcccggggggacttccagaagctgcgggagaagcagcagctggaggaggacctgaagggctacctggactggatcacccaggctgaagatattgatcctgaaaatgaagatgagggcatggatgaggagaagcccaggaacatgtccatgcccaccagcgagacagaatctgtgaacacagaaaatgtggccggcggggacatcgagggggagaactgtggggcccggctggcccaccgcatcagcaagagcaagttcagccgctactggaggcgctggaaccgcttctgcaggaggaagtgcagagctgctgtgaagagcaatgtgttctactggctggtgatcttcctggtgttcctgaacaccctgaccatcgccagcgagcactacaaccagcccaactggctgacagaggtgcaggacacagccaacaaggccctgctggccctcttcaccgctgagatgctgctgaagatgtacagcctgggcctgcaggcctactttgtgtccctcttcaacagatttgactgctttgtggtgtgtggcggcatcctggagaccatcctggtggagaccaagatcatgagccccctgggcatctctgtgctgcgctgtgtgcggctgctgcgcatcttcaagatcacccgctactggaacagcctgagcaacctggtggccagcctgctgaacagcgtgcgcagcatcgccagcctgctgctgctgctcttcctgttcatcatcatcttcagcctgctgggcatgcagctgtttggaggcaagttcaactttgatgagatgcagaccaggaggagcacctttgacaacttcccccagagcctgctgaccgtcttccagatcctgaccggggaggactggaacagcgtgatgtatgatggcatcatggcctatggaggccccagcttccctggcatgctggtgtgcatctacttcatcatcctcttcatctgtggcaactacatcctgctgaatgtgttcctggccatcgctgtggacaacctggctgatgctgagagcctgaccagcgcccagaaggaggaggaggaggagaaggagaggaagaagctggccaggacagccagccctgagaagaagcaggagctggtggagaagccagctgtgggggagagcaaggaggagaagattgagctgaagagcatcacagcagatggagagagccccccagccaccaagatcaacatggatgacctgcagcccaatgaaaatgaagacaagagcccctaccccaaccctgagaccactggagaggaggatgaggaggagcctgagatgcctgtgggcccccggccccggcccctgtctgagctgcacctgaaggagaaggctgtgcccatgcctgaggccagcgccttcttcatcttcagcagcaacaaccgcttccggctgcagtgccaccgcatcgtgaatgacaccatcttcaccaacctgatcctcttcttcatcctgctgagcagcatcagcctggccgctgaggaccctgtgcagcacaccagcttcaggaaccacatcctgggcaatgctgactatgtgttcaccagcatcttcaccctggagatcatcctgaagatgacagcctatggagccttcctgcacaagggcagcttctgcaggaactacttcaacatcctggacctgctggtggtgtctgtgtccctcatcagctttggcatccagagcagcgccatcaacgtggtgaagatcctgcgggtgctgcgggtgctgcggcccctgcgggccatcaacagagccaagggcctgaagcacgtggtgcagtgtgtgtttgtggccatccgcaccatcggcaacatcgtcatcgtgaccaccctgctgcagttcatgtttgcctgcatcggcgtgcagctgttcaagggcaagctgtacacctgcagcgacagcagcaagcagacagaagctgagtgcaagggcaactacatcacctacaaggatggagaggtggaccaccccatcatccagcccaggtcctgggagaacagcaagtttgattttgacaacgtgctggccgccatgatggccctcttcaccgtgtccacctttgagggctggccagagctgctgtaccgcagcattgacagccacacagaggacaagggccccatctacaactacagagtggagatcagcatcttcttcatcatctacatcatcatcatcgccttcttcatgatgaacatctttgtgggcttcgtcatcgtgaccttccaggagcagggcgagcaggagtacaagaactgtgagctggacaagaaccagaggcagtgtgtggagtatgccctgaaggcccggcccctgcggcgctacatccccaagaaccagcaccagtacaaggtgtggtacgtggtgaacagcacctactttgagtacctgatgtttgtgctgatcctgctgaacaccatctgcctggccatgcagcactacggccagagctgcctcttcaagatcgccatgaacatcctgaacatgctgttcaccggcctcttcaccgtggagatgatcctgaagctgattgccttcaagcccaagcactacttctgtgatgcctggaacacctttgatgccctgattgtggtgggcagcatcgtggacatcgccatcacagaggtgaacccagctgagcacacccagtgcagccccagcatgaatgctgaggagaacagccgcatcagcatcaccttcttccgcctcttccgggtgatgaggctggtgaagctgctgagcagaggagagggcatccgcaccctgctgtggaccttcatcaagagcttccaggccctgccctacgtggccctgctgattgtgatgctgttcttcatctatgctgtgattggcatgcaggtgtttgggaagatcgccctgaatgacaccacagagatcaacagaaacaacaacttccagaccttcccccaggccgtgctgctgctcttccgctgtgccaccggggaggcctggcaggacatcatgctggcctgcatgcctgggaagaagtgtgcccctgagagcgagcccagcaacagcacagaaggagagaccccctgtggcagcagctttgctgtgttctacttcatctccttctacatgctgtgtgccttcctgatcatcaacctgtttgtggccgtcatcatggacaactttgactacctgacccgggactggagcatcctgggcccccaccacctggatgagttcaagaggatctgggccgagtatgaccctgaggccaagggccgcatcaagcacctggatgtggtgaccctgctgcggcgcatccagccccccctgggctttgggaagctgtgcccccaccgggtggcctgcaagaggctggtgtccatgaacatgcccctgaacagtgatggcaccgtgatgtttaatgccaccctgtttgccctggtgaggacagccctgcgcatcaagacagagggcaacctggagcaggccaatgaggagctgcgggccatcatcaagaagatctggaagaggacctccatgaagctgctggaccaggtggtgcccccagctggagatgatgaggtgacagtgggcaagttctacgccaccttcctgatccaggagtacttcaggaagttcaagaagaggaaggagcagggcctggtgggcaagcccagccagagaaatgccctgagcctgcaggccggcctgcggaccctgcatgacatcggccctgagatccggcgggccatcagcggggacctgacagctgaggaggagctggacaaggccatgaaggaggccgtgtctgctgcctctgaagatgacatcttcagaagagctgggggcctgtttggaaaccacgtgtcctactaccagagtgatggccgcagcgccttcccccagaccttcaccacccagaggcccctgcacatcaacaaggccggcagcagccagggcgacacagagagccccagccatgagaagctggtggacagcaccttcacccccagcagctacagcagcacaggcagcaatgccaacatcaacaatgccaacaacacagccctgggccgcctgcccaggcctgctggctaccccagcacagtgtccacagtggagggccacggcccccccctgagccctgccatccgggtgcaggaggtggcctggaagctgagcagcaaccgctgccacagccgggagagccaggccgccatggccggccaggaggagaccagccaggatgagacctatgaggtgaagatgaaccacgacacagaggcctgcagcgagcccagcctgctgagcacagagatgctgagctaccaggatgatgaaaatcggcagctgaccctgcctgaggaggacaagagggacatccggcagagccccaagaggggcttcctgcggagcgccagcctgggcagaagagccagcttccacctggagtgcctgaagaggcagaaggacagaggaggagacatcagccagaagacagtgctgcccctgcacctggtgcaccaccaggccctggccgtggccggcctgagccccctgctgcagaggagccacagccctgccagcttcccccggccctttgccaccccaccagccaccccaggcagccggggctggccaccccagcctgtgcccaccctgcggctggagggcgtggagagcagcgagaagctgaacagcagcttccccagcatccactgcggctcctgggccgagaccacccctgggggcggcggcagcagcgctgccaggagagtgcggcctgtgtccctgatggtgcccagccaggccggggcccctggccggcagttccacggcagcgccagcagcctggtggaggccgtgctgatcagcgagggcctgggccagtttgcccaggaccccaagttcatcgaggtgaccacccaggagctggctgatgcctgtgacatgaccatcgaggagatggagagcgctgctgacaacatcctgtctggaggagccccccagagccccaatggagccctgctgccctttgtgaactgcagagatgctggccaggaccgggccggcggggaggaggatgctggctgtgtgcgggcccggggccggcccagcgaggaggagctgcaggacagccgggtgtatgtgagcagcctgtag

SEQ ID NO: 145828 - DNA, 6417 bp, synthetic construct
  misc_feature 1..6417: note = Description of Artificial Sequence: Synthetic coding sequence
  source 1..6417: mol_type = other DNA
atggtgaatgaaaacaccaggatgtacatccctgaggagaaccaccagggcagcaactacggcagccccaggcctgcccacgccaacatgaatgccaatgctgctgctggcctggcccctgagcacatccccacccctggggccgccctgtcctggcaggccgccattgatgctgcccggcaggccaagctgatgggcagcgctggaaatgccaccatcagcacagtgagcagcacccagaggaagaggcagcagtatggcaagcccaagaagcagggcagcaccacagccacccggcccccccgggccctgctgtgcctgaccctgaagaaccccatccggcgggcctgcatcagcatcgtggagtggaagccctttgagatcatcatcctgctgaccatctttgccaactgtgtggccctggccatctacatccccttcccagaagatgacagcaatgccaccaacagcaacctggagcgggtggagtacctgttcctgatcatcttcaccgtggaggccttcctgaaggtgattgcctacggcctgctcttccaccccaatgcctacctgagaaatggctggaacctgctggacttcatcatcgtggtggtgggcctcttcagcgccatcctggagcaggccaccaaggcagatggagccaatgccctgggcggcaaaggagctggctttgatgtgaaggccctgcgggccttccgggtgctgcggcccctgcggctggtgtctggagtgcccagcctgcaggtggtgctgaacagcatcatcaaggccatggtgcccctgctgcacatcgccctgctggtgctgtttgtgatcatcatctatgccatcatcggcctggagctgttcatgggcaagatgcacaagacctgctacaaccaggagggcattgctgatgtgcctgcagaagatgaccccagcccctgtgccctggagaccggccacggccggcagtgccagaatggcaccgtgtgcaagccaggctgggatggccccaagcacggcatcaccaactttgacaactttgcctttgccatgctgactgtgttccagtgcatcaccatggagggctggacagatgtgctgtactgggtgaatgatgctgtgggccgggactggccctggatctactttgtgaccctcatcatcatcggcagcttctttgtgctgaacctggtgctgggcgtgctgtctggagagttcagcaaggagcgggagaaggccaaggcccggggggacttccagaagctgcgggagaagcagcagctggaggaggacctgaagggctacctggactggatcacccaggctgaagatattgatcctgaaaatgaagatgagggcatggatgaggagaagcccaggaacatgtccatgcccaccagcgagacagaatctgtgaacacagaaaatgtggccggcggggacatcgagggggagaactgtggggcccggctggcccaccgcatcagcaagagcaagttcagccgctactggaggcgctggaaccgcttctgcaggaggaagtgcagagctgctgtgaagagcaatgtgttctactggctggtgatcttcctggtgttcctgaacaccctgaccatcgccagcgagcactacaaccagcccaactggctgacagaggtgcaggacacagccaacaaggccctgctggccctcttcaccgctgagatgctgctgaagatgtacagcctgggcctgcaggcctactttgtgtccctcttcaacagatttgactgctttgtggtgtgtggcggcatcctggagaccatcctggtggagaccaagatcatgagccccctgggcatctctgtgctgcgctgtgtgcggctgctgcgcatcttcaagatcacccgctactggaacagcctgagcaacctggtggccagcctgctgaacagcgtgcgcagcatcgccagcctgctgctgctgctcttcctgttcatcatcatcttcagcctgctgggcatgcagctgtttggaggcaagttcaactttgatgagatgcagaccaggaggagcacctttgacaacttcccccagagcctgctgaccgtcttccagatcctgaccggggaggactggaacagcgtgatgtatgatggcatcatggcctatggaggccccagcttccctggcatgctggtgtgcatctacttcatcatcctcttcatctgtggcaactacatcctgctgaatgtgttcctggccatcgctgtggacaacctggctgatgctgagagcctgaccagcgcccagaaggaggaggaggaggagaaggagaggaagaagctggccaggacagccagccctgagaagaagcaggagctggtggagaagccagctgtgggggagagcaaggaggagaagattgagctgaagagcatcacagcagatggagagagccccccagccaccaagatcaacatggatgacctgcagcccaatgaaaatgaagacaagagcccctaccccaaccctgagaccactggagaggaggatgaggaggagcctgagatgcctgtgggcccccggccccggcccctgtctgagctgcacctgaaggagaaggctgtgcccatgcctgaggccagcgccttcttcatcttcagcagcaacaaccgcttccggctgcagtgccaccgcatcgtgaatgacaccatcttcaccaacctgatcctcttcttcatcctgctgagcagcatcagcctggccgctgaggaccctgtgcagcacaccagcttcaggaaccacatcctgggcaatgctgactatgtgttcaccagcatcttcaccctggagatcatcctgaagatgacagcctatggagccttcctgcacaagggcagcttctgcaggaactacttcaacatcctggacctgctggtggtgtctgtgtccctcatcagctttggcatccagagcagcgccatcaacgtggtgaagatcctgcgggtgctgcgggtgctgcggcccctgcgggccatcaacagagccaagggcctgaagcacgtggtgcagtgtgtgtttgtggccatccgcaccatcggcaacatcgtcatcgtgaccaccctgctgcagttcatgtttgcctgcatcggcgtgcagctgttcaagggcaagctgtacacctgcagcgacagcagcaagcagacagaagctgagtgcaagggcaactacatcacctacaaggatggagaggtggaccaccccatcatccagcccaggtcctgggagaacagcaagtttgattttgacaacgtgctggccgccatgatggccctcttcaccgtgtccacctttgagggctggccagagctgctgtaccgcagcattgacagccacacagaggacaagggccccatctacaactacagagtggagatcagcatcttcttcatcatctacatcatcatcatcgccttcttcatgatgaacatctttgtgggcttcgtcatcgtgaccttccaggagcagggcgagcaggagtacaagaactgtgagctggacaagaaccagaggcagtgtgtggagtatgccctgaaggcccggcccctgcggcgctacatccccaagaaccagcaccagtacaaggtgtggtacgtggtgaacagcacctactttgagtacctgatgtttgtgctgatcctgctgaacaccatctgcctggccatgcagcactacggccagagctgcctcttcaagatcgccatgaacatcctgaacatgctgttcaccggcctcttcaccgtggagatgatcctgaagctgattgccttcaagcccaagggctacttcagtgacccctggaatgtgtttgacttcctgattgtcatcggcagcatcattgatgtgatcctgtctgagaccaacccagctgagcacacccagtgcagccccagcatgaatgctgaggagaacagccgcatcagcatcaccttcttccgcctcttccgggtgatgaggctggtgaagctgctgagcagaggagagggcatccgcaccctgctgtggaccttcatcaagagcttccaggccctgccctacgtggccctgctgattgtgatgctgttcttcatctatgctgtgattggcatgcaggtgtttgggaagatcgccctgaatgacaccacagagatcaacagaaacaacaacttccagaccttcccccaggccgtgctgctgctcttccgctgtgccaccggggaggcctggcaggacatcatgctggcctgcatgcctgggaagaagtgtgcccctgagagcgagcccagcaacagcacagaaggagagaccccctgtggcagcagctttgctgtgttctacttcatctccttctacatgctgtgtgccttcctgatcatcaacctgtttgtggccgtcatcatggacaactttgactacctgacccgggactggagcatcctgggcccccaccacctggatgagttcaagaggatctgggccgagtatgaccctgaggccaagggccgcatcaagcacctggatgtggtgaccctgctgcggcgcatccagccccccctgggctttgggaagctgtgcccccaccgggtggcctgcaagaggctggtgtccatgaacatgcccctgaacagtgatggcaccgtgatgtttaatgccaccctgtttgccctggtgaggacagccctgcgcatcaagacagagggcaacctggagcaggccaatgaggagctgcgggccatcatcaagaagatctggaagaggacctccatgaagctgctggaccaggtggtgcccccagctggagatgatgaggtgacagtgggcaagttctacgccaccttcctgatccaggagtacttcaggaagttcaagaagaggaaggagcagggcctggtgggcaagcccagccagagaaatgccctgagcctgcaggccggcctgcggaccctgcatgacatcggccctgagatccggcgggccatcagcggggacctgacagctgaggaggagctggacaaggccatgaaggaggccgtgtctgctgcctctgaagatgacatcttcagaagagctgggggcctgtttggaaaccacgtgtcctactaccagagtgatggccgcagcgccttcccccagaccttcaccacccagaggcccctgcacatcaacaaggccggcagcagccagggcgacacagagagccccagccatgagaagctggtggacagcaccttcacccccagcagctacagcagcacaggcagcaatgccaacatcaacaatgccaacaacacagccctgggccgcctgcccaggcctgctggctaccccagcacagtgtccacagtggagggccacggcccccccctgagccctgccatccgggtgcaggaggtggcctggaagctgagcagcaaccgctgccacagccgggagagccaggccgccatggccggccaggaggagaccagccaggatgagacctatgaggtgaagatgaaccacgacacagaggcctgcagcgagcccagcctgctgagcacagagatgctgagctaccaggatgatgaaaatcggcagctgaccctgcctgaggaggacaagagggacatccggcagagccccaagaggggcttcctgcggagcgccagcctgggcagaagagccagcttccacctggagtgcctgaagaggcagaaggacagaggaggagacatcagccagaagacagtgctgcccctgcacctggtgcaccaccaggccctggccgtggccggcctgagccccctgctgcagaggagccacagccctgccagcttcccccggccctttgccaccccaccagccaccccaggcagccggggctggccaccccagcctgtgcccaccctgcggctggagggcgtggagagcagcgagaagctgaacagcagcttccccagcatccactgcggctcctgggccgagaccacccctgggggcggcggcagcagcgctgccaggagagtgcggcctgtgtccctgatggtgcccagccaggccggggcccctggccggcagttccacggcagcgccagcagcctggtggaggccgtgctgatcagcgagggcctgggccagtttgcccaggaccccaagttcatcgaggtgaccacccaggagctggctgatgcctgtgacatgaccatcgaggagatggagagcgctgctgacaacatcctgtctggaggagccccccagagccccaatggagccctgctgccctttgtgaactgcagagatgctggccaggaccgggccggcggggaggaggatgctggctgtgtgcgggcccggggccggcccagcgaggaggagctgcaggacagccgggtgtatgtgagcagcctgtag

SEQ ID NO: 145829 - DNA, 6435 bp, synthetic construct
  misc_feature 1..6435: note = Description of Artificial Sequence: Synthetic coding sequence
  source 1..6435: mol_type = other DNA
atggtgaatgaaaacaccaggatgtacatccctgaggagaaccaccagggcagcaactacggcagccccaggcctgcccacgccaacatgaatgccaatgctgctgctggcctggcccctgagcacatccccacccctggggccgccctgtcctggcaggccgccattgatgctgcccggcaggccaagctgatgggcagcgctggaaatgccaccatcagcacagtgagcagcacccagaggaagaggcagcagtatggcaagcccaagaagcagggcagcaccacagccacccggcccccccgggccctgctgtgcctgaccctgaagaaccccatccggcgggcctgcatcagcatcgtggagtggaagccctttgagatcatcatcctgctgaccatctttgccaactgtgtggccctggccatctacatccccttcccagaagatgacagcaatgccaccaacagcaacctggagcgggtggagtacctgttcctgatcatcttcaccgtggaggccttcctgaaggtgattgcctacggcctgctcttccaccccaatgcctacctgagaaatggctggaacctgctggacttcatcatcgtggtggtgggcctcttcagcgccatcctggagcaggccaccaaggcagatggagccaatgccctgggcggcaaaggagctggctttgatgtgaaggccctgcgggccttccgggtgctgcggcccctgcggctggtgtctggagtgcccagcctgcaggtggtgctgaacagcatcatcaaggccatggtgcccctgctgcacatcgccctgctggtgctgtttgtgatcatcatctatgccatcatcggcctggagctgttcatgggcaagatgcacaagacctgctacaaccaggagggcattgctgatgtgcctgcagaagatgaccccagcccctgtgccctggagaccggccacggccggcagtgccagaatggcaccgtgtgcaagccaggctgggatggccccaagcacggcatcaccaactttgacaactttgcctttgccatgctgactgtgttccagtgcatcaccatggagggctggacagatgtgctgtactgggtgaatgatgctgtgggccgggactggccctggatctactttgtgaccctcatcatcatcggcagcttctttgtgctgaacctggtgctgggcgtgctgtctggagagttcagcaaggagcgggagaaggccaaggcccggggggacttccagaagctgcgggagaagcagcagctggaggaggacctgaagggctacctggactggatcacccaggctgaagatattgatcctgaaaatgaagatgagggcatggatgaggagaagcccaggaacatgtccatgcccaccagcgagacagaatctgtgaacacagaaaatgtggccggcggggacatcgagggggagaactgtggggcccggctggcccaccgcatcagcaagagcaagttcagccgctactggaggcgctggaaccgcttctgcaggaggaagtgcagagctgctgtgaagagcaatgtgttctactggctggtgatcttcctggtgttcctgaacaccctgaccatcgccagcgagcactacaaccagcccaactggctgacagaggtgcaggacacagccaacaaggccctgctggccctcttcaccgctgagatgctgctgaagatgtacagcctgggcctgcaggcctactttgtgtccctcttcaacagatttgactgctttgtggtgtgtggcggcatcctggagaccatcctggtggagaccaagatcatgagccccctgggcatctctgtgctgcgctgtgtgcggctgctgcgcatcttcaagatcacccgctactggaacagcctgagcaacctggtggccagcctgctgaacagcgtgcgcagcatcgccagcctgctgctgctgctcttcctgttcatcatcatcttcagcctgctgggcatgcagctgtttggaggcaagttcaactttgatgagatgcagaccaggaggagcacctttgacaacttcccccagagcctgctgaccgtcttccagatcctgaccggggaggactggaacagcgtgatgtatgatggcatcatggcctatggaggccccagcttccctggcatgctggtgtgcatctacttcatcatcctcttcatctgtggcaactacatcctgctgaatgtgttcctggccatcgctgtggacaacctggctgatgctgagagcctgaccagcgcccagaaggaggaggaggaggagaaggagaggaagaagctggccaggacagccagccctgagaagaagcaggagctggtggagaagccagctgtgggggagagcaaggaggagaagattgagctgaagagcatcacagcagatggagagagccccccagccaccaagatcaacatggatgacctgcagcccaatgaaaatgaagacaagagcccctaccccaaccctgagaccactggagaggaggatgaggaggagcctgagatgcctgtgggcccccggccccggcccctgtctgagctgcacctgaaggagaaggctgtgcccatgcctgaggccagcgccttcttcatcttcagcagcaacaaccgcttccggctgcagtgccaccgcatcgtgaatgacaccatcttcaccaacctgatcctcttcttcatcctgctgagcagcatcagcctggccgctgaggaccctgtgcagcacaccagcttcaggaaccacatcctcttctactttgacatcgtgttcaccaccatcttcaccatcgagatcgccctgaagatgacagcctatggagccttcctgcacaagggcagcttctgcaggaactacttcaacatcctggacctgctggtggtgtctgtgtccctcatcagctttggcatccagagcagcgccatcaacgtggtgaagatcctgcgggtgctgcgggtgctgcggcccctgcgggccatcaacagagccaagggcctgaagcacgtggtgcagtgtgtgtttgtggccatccgcaccatcggcaacatcgtcatcgtgaccaccctgctgcagttcatgtttgcctgcatcggcgtgcagctgttcaagggcaagctgtacacctgcagcgacagcagcaagcagacagaagctgagtgcaagggcaactacatcacctacaaggatggagaggtggaccaccccatcatccagcccaggtcctgggagaacagcaagtttgattttgacaacgtgctggccgccatgatggccctcttcaccgtgtccacctttgagggctggccagagctgctgtaccgcagcattgacagccacacagaggacaagggccccatctacaactacagagtggagatcagcatcttcttcatcatctacatcatcatcatcgccttcttcatgatgaacatctttgtgggcttcgtcatcgtgaccttccaggagcagggcgagcaggagtacaagaactgtgagctggacaagaaccagaggcagtgtgtggagtatgccctgaaggcccggcccctgcggcgctacatccccaagaaccagcaccagtacaaggtgtggtacgtggtgaacagcacctactttgagtacctgatgtttgtgctgatcctgctgaacaccatctgcctggccatgcagcactacggccagagctgcctcttcaagatcgccatgaacatcctgaacatgctgttcaccggcctcttcaccgtggagatgatcctgaagctgattgccttcaagcccaagcactacttctgtgatgcctggaacacctttgatgccctgattgtggtgggcagcatcgtggacatcgccatcacagaaaatgctgaggagaacagccgcatcagcatcaccttcttccgcctcttccgggtgatgaggctggtgaagctgctgagcagaggagagggcatccgcaccctgctgtggaccttcatcaagagcttccaggccctgccctacgtggccctgctgattgtgatgctgttcttcatctatgctgtgattggcatgcaggtgtttgggaagatcgccctgaatgacaccacagagatcaacagaaacaacaacttccagaccttcccccaggccgtgctgctgctcttccgctgtgccactggagaggcctggcaggacatcatgctggcctgcatgcctgggaagaagtgtgcccctgagagcgagcccagcaacagcacagaaggagagaccccctgtggcagcagctttgctgtgttctacttcatctccttctacatgctgtgtgccttcctgatcatcaacctgtttgtggccgtcatcatggacaactttgactacctgacccgggactggagcatcctgggcccccaccacctggatgagttcaagaggatctgggccgagtatgaccctgaggccaagggccgcatcaagcacctggatgtggtgaccctgctgcggcgcatccagccccccctgggctttgggaagctgtgcccccaccgggtggcctgcaagaggctggtgtccatgaacatgcccctgaacagtgatggcaccgtgatgtttaatgccaccctgtttgccctggtgaggacagccctgcgcatcaagacagaggagggccccagccccagcgaggcccaccagggcgctgaggaccccttccggcctgctggcaacctggagcaggccaatgaggagctgcgggccatcatcaagaagatctggaagaggacctccatgaagctgctggaccaggtggtgcccccagctggagatgatgaggtgacagtgggcaagttctacgccaccttcctgatccaggagtacttcaggaagttcaagaagaggaaggagcagggcctggtgggcaagcccagccagagaaatgccctgagcctgcaggccggcctgcggaccctgcatgacatcggccctgagatccggcgggccatcagcggggacctgacagctgaggaggagctggacaaggccatgaaggaggccgtgtctgctgcctctgaagatgacatcttcagaagagctgggggcctgtttggaaaccacgtgtcctactaccagagtgatggccgcagcgccttcccccagaccttcaccacccagaggcccctgcacatcaacaaggccggcagcagccagggcgacacagagagccccagccatgagaagctggtggacagcaccttcacccccagcagctacagcagcacaggcagcaatgccaacatcaacaatgccaacaacacagccctgggccgcctgcccaggcctgctggctaccccagcacagtgtccacagtggagggccacggcccccccctgagccctgccatccgggtgcaggaggtggcctggaagctgagcagcaaccgctgccacagccgggagagccaggccgccatggccggccaggaggagaccagccaggatgagacctatgaggtgaagatgaaccacgacacagaggcctgcagcgagcccagcctgctgagcacagagatgctgagctaccaggatgatgaaaatcggcagctgaccctgcctgaggaggacaagagggacatccggcagagccccaagaggggcttcctgcggagcgccagcctgggcagaagagccagcttccacctggagtgcctgaagaggcagaaggacagaggaggagacatcagccagaagacagtgctgcccctgcacctggtgcaccaccaggccctggccgtggccggcctgagccccctgctgcagaggagccacagccctgccagcttcccccggccctttgccaccccaccagccaccccaggcagccggggctggccaccccagcctgtgcccaccctgcggctggagggcgtggagagcagcgagaagctgaacagcagcttccccagcatccactgcggctcctgggccgagaccacccctgggggcggcggcagcagcgctgccaggagagtgcggcctgtgtccctgatggtgcccagccaggccggggcccctggccggcagttccacggcagcgccagcagcctggtggaggccgtgctgatcagcgagggcctgggccagtttgcccaggaccccaagttcatcgaggtgaccacccaggagctggctgatgcctgtgacatgaccatcgaggagatggagagcgctgctgacaacatcctgtctggaggagccccccagagccccaatggagccctgctgccctttgtgaactgcagagatgctggccaggaccgggccggcggggaggaggatgctggctgtgtgcgggcccggggccggcccagcgaggaggagctgcaggacagccgggtgtatgtgagcagcctgtag

SEQ ID NO: 145830 - DNA, 6417 bp, synthetic construct
  misc_feature 1..6417: note = Description of Artificial Sequence: Synthetic coding sequence
  source 1..6417: mol_type = other DNA
atggtgaatgaaaacaccaggatgtacatccctgaggagaaccaccagggcagcaactacggcagccccaggcctgcccacgccaacatgaatgccaatgctgctgctggcctggcccctgagcacatccccacccctggggccgccctgtcctggcaggccgccattgatgctgcccggcaggccaagctgatgggcagcgctggaaatgccaccatcagcacagtgagcagcacccagaggaagaggcagcagtatggcaagcccaagaagcagggcagcaccacagccacccggcccccccgggccctgctgtgcctgaccctgaagaaccccatccggcgggcctgcatcagcatcgtggagtggaagccctttgagatcatcatcctgctgaccatctttgccaactgtgtggccctggccatctacatccccttcccagaagatgacagcaatgccaccaacagcaacctggagcgggtggagtacctgttcctgatcatcttcaccgtggaggccttcctgaaggtgattgcctacggcctgctcttccaccccaatgcctacctgagaaatggctggaacctgctggacttcatcatcgtggtggtgggcctcttcagcgccatcctggagcaggccaccaaggcagatggagccaatgccctgggcggcaaaggagctggctttgatgtgaaggccctgcgggccttccgggtgctgcggcccctgcggctggtgtctggagtgcccagcctgcaggtggtgctgaacagcatcatcaaggccatggtgcccctgctgcacatcgccctgctggtgctgtttgtgatcatcatctatgccatcatcggcctggagctgttcatgggcaagatgcacaagacctgctacaaccaggagggcattgctgatgtgcctgcagaagatgaccccagcccctgtgccctggagaccggccacggccggcagtgccagaatggcaccgtgtgcaagccaggctgggatggccccaagcacggcatcaccaactttgacaactttgcctttgccatgctgactgtgttccagtgcatcaccatggagggctggacagatgtgctgtactgggtgaatgatgctgtgggccgggactggccctggatctactttgtgaccctcatcatcatcggcagcttctttgtgctgaacctggtgctgggcgtgctgtctggagagttcagcaaggagcgggagaaggccaaggcccggggggacttccagaagctgcgggagaagcagcagctggaggaggacctgaagggctacctggactggatcacccaggctgaagatattgatcctgaaaatgaagatgagggcatggatgaggagaagcccaggaacatgtccatgcccaccagcgagacagaatctgtgaacacagaaaatgtggccggcggggacatcgagggggagaactgtggggcccggctggcccaccgcatcagcaagagcaagttcagccgctactggaggcgctggaaccgcttctgcaggaggaagtgcagagctgctgtgaagagcaatgtgttctactggctggtgatcttcctggtgttcctgaacaccctgaccatcgccagcgagcactacaaccagcccaactggctgacagaggtgcaggacacagccaacaaggccctgctggccctcttcaccgctgagatgctgctgaagatgtacagcctgggcctgcaggcctactttgtgtccctcttcaacagatttgactgctttgtggtgtgtggcggcatcctggagaccatcctggtggagaccaagatcatgagccccctgggcatctctgtgctgcgctgtgtgcggctgctgcgcatcttcaagatcacccgctactggaacagcctgagcaacctggtggccagcctgctgaacagcgtgcgcagcatcgccagcctgctgctgctgctcttcctgttcatcatcatcttcagcctgctgggcatgcagctgtttggaggcaagttcaactttgatgagatgcagaccaggaggagcacctttgacaacttcccccagagcctgctgaccgtcttccagatcctgaccggggaggactggaacagcgtgatgtatgatggcatcatggcctatggaggccccagcttccctggcatgctggtgtgcatctacttcatcatcctcttcatctgtggcaactacatcctgctgaatgtgttcctggccatcgctgtggacaacctggctgatgctgagagcctgaccagcgcccagaaggaggaggaggaggagaaggagaggaagaagctggccaggacagccagccctgagaagaagcaggagctggtggagaagccagctgtgggggagagcaaggaggagaagattgagctgaagagcatcacagcagatggagagagccccccagccaccaagatcaacatggatgacctgcagcccaatgaaaatgaagacaagagcccctaccccaaccctgagaccactggagaggaggatgaggaggagcctgagatgcctgtgggcccccggccccggcccctgtctgagctgcacctgaaggagaaggctgtgcccatgcctgaggccagcgccttcttcatcttcagcagcaacaaccgcttccggctgcagtgccaccgcatcgtgaatgacaccatcttcaccaacctgatcctcttcttcatcctgctgagcagcatcagcctggccgctgaggaccctgtgcagcacaccagcttcaggaaccacatcctcttctactttgacatcgtgttcaccaccatcttcaccatcgagatcgccctgaagatgacagcctatggagccttcctgcacaagggcagcttctgcaggaactacttcaacatcctggacctgctggtggtgtctgtgtccctcatcagctttggcatccagagcagcgccatcaacgtggtgaagatcctgcgggtgctgcgggtgctgcggcccctgcgggccatcaacagagccaagggcctgaagcacgtggtgcagtgtgtgtttgtggccatccgcaccatcggcaacatcgtcatcgtgaccaccctgctgcagttcatgtttgcctgcatcggcgtgcagctgttcaagggcaagctgtacacctgcagcgacagcagcaagcagacagaagctgagtgcaagggcaactacatcacctacaaggatggagaggtggaccaccccatcatccagcccaggtcctgggagaacagcaagtttgattttgacaacgtgctggccgccatgatggccctcttcaccgtgtccacctttgagggctggccagagctgctgtaccgcagcattgacagccacacagaggacaagggccccatctacaactacagagtggagatcagcatcttcttcatcatctacatcatcatcatcgccttcttcatgatgaacatctttgtgggcttcgtcatcgtgaccttccaggagcagggcgagcaggagtacaagaactgtgagctggacaagaaccagaggcagtgtgtggagtatgccctgaaggcccggcccctgcggcgctacatccccaagaaccagcaccagtacaaggtgtggtacgtggtgaacagcacctactttgagtacctgatgtttgtgctgatcctgctgaacaccatctgcctggccatgcagcactacggccagagctgcctcttcaagatcgccatgaacatcctgaacatgctgttcaccggcctcttcaccgtggagatgatcctgaagctgattgccttcaagcccaagcactacttctgtgatgcctggaacacctttgatgccctgattgtggtgggcagcatcgtggacatcgccatcacagaggtgaacccagctgagcacacccagtgcagccccagcatgaatgctgaggagaacagccgcatcagcatcaccttcttccgcctcttccgggtgatgaggctggtgaagctgctgagcagaggagagggcatccgcaccctgctgtggaccttcatcaagagcttccaggccctgccctacgtggccctgctgattgtgatgctgttcttcatctatgctgtgattggcatgcaggtgtttgggaagatcgccctgaatgacaccacagagatcaacagaaacaacaacttccagaccttcccccaggccgtgctgctgctcttccgctgtgccaccggggaggcctggcaggacatcatgctggcctgcatgcctgggaagaagtgtgcccctgagagcgagcccagcaacagcacagaaggagagaccccctgtggcagcagctttgctgtgttctacttcatctccttctacatgctgtgtgccttcctgatcatcaacctgtttgtggccgtcatcatggacaactttgactacctgacccgggactggagcatcctgggcccccaccacctggatgagttcaagaggatctgggccgagtatgaccctgaggccaagggccgcatcaagcacctggatgtggtgaccctgctgcggcgcatccagccccccctgggctttgggaagctgtgcccccaccgggtggcctgcaagaggctggtgtccatgaacatgcccctgaacagtgatggcaccgtgatgtttaatgccaccctgtttgccctggtgaggacagccctgcgcatcaagacagagggcaacctggagcaggccaatgaggagctgcgggccatcatcaagaagatctggaagaggacctccatgaagctgctggaccaggtggtgcccccagctggagatgatgaggtgacagtgggcaagttctacgccaccttcctgatccaggagtacttcaggaagttcaagaagaggaaggagcagggcctggtgggcaagcccagccagagaaatgccctgagcctgcaggccggcctgcggaccctgcatgacatcggccctgagatccggcgggccatcagcggggacctgacagctgaggaggagctggacaaggccatgaaggaggccgtgtctgctgcctctgaagatgacatcttcagaagagctgggggcctgtttggaaaccacgtgtcctactaccagagtgatggccgcagcgccttcccccagaccttcaccacccagaggcccctgcacatcaacaaggccggcagcagccagggcgacacagagagccccagccatgagaagctggtggacagcaccttcacccccagcagctacagcagcacaggcagcaatgccaacatcaacaatgccaacaacacagccctgggccgcctgcccaggcctgctggctaccccagcacagtgtccacagtggagggccacggcccccccctgagccctgccatccgggtgcaggaggtggcctggaagctgagcagcaaccgctgccacagccgggagagccaggccgccatggccggccaggaggagaccagccaggatgagacctatgaggtgaagatgaaccacgacacagaggcctgcagcgagcccagcctgctgagcacagagatgctgagctaccaggatgatgaaaatcggcagctgaccctgcctgaggaggacaagagggacatccggcagagccccaagaggggcttcctgcggagcgccagcctgggcagaagagccagcttccacctggagtgcctgaagaggcagaaggacagaggaggagacatcagccagaagacagtgctgcccctgcacctggtgcaccaccaggccctggccgtggccggcctgagccccctgctgcagaggagccacagccctgccagcttcccccggccctttgccaccccaccagccaccccaggcagccggggctggccaccccagcctgtgcccaccctgcggctggagggcgtggagagcagcgagaagctgaacagcagcttccccagcatccactgcggctcctgggccgagaccacccctgggggcggcggcagcagcgctgccaggagagtgcggcctgtgtccctgatggtgcccagccaggccggggcccctggccggcagttccacggcagcgccagcagcctggtggaggccgtgctgatcagcgagggcctgggccagtttgcccaggaccccaagttcatcgaggtgaccacccaggagctggctgatgcctgtgacatgaccatcgaggagatggagagcgctgctgacaacatcctgtctggaggagccccccagagccccaatggagccctgctgccctttgtgaactgcagagatgctggccaggaccgggccggcggggaggaggatgctggctgtgtgcgggcccggggccggcccagcgaggaggagctgcaggacagccgggtgtatgtgagcagcctgtag

SEQ ID NO: 145831 - DNA, 6474 bp, synthetic construct
  misc_feature 1..6474: note = Description of Artificial Sequence: Synthetic coding sequence
  source 1..6474: mol_type = other DNA
atggtgaatgaaaacaccaggatgtacatccctgaggagaaccaccagggcagcaactacggcagccccaggcctgcccacgccaacatgaatgccaatgctgctgctggcctggcccctgagcacatccccacccctggggccgccctgtcctggcaggccgccattgatgctgcccggcaggccaagctgatgggcagcgctggaaatgccaccatcagcacagtgagcagcacccagaggaagaggcagcagtatggcaagcccaagaagcagggcagcaccacagccacccggcccccccgggccctgctgtgcctgaccctgaagaaccccatccggcgggcctgcatcagcatcgtggagtggaagccctttgagatcatcatcctgctgaccatctttgccaactgtgtggccctggccatctacatccccttcccagaagatgacagcaatgccaccaacagcaacctggagcgggtggagtacctgttcctgatcatcttcaccgtggaggccttcctgaaggtgattgcctacggcctgctcttccaccccaatgcctacctgagaaatggctggaacctgctggacttcatcatcgtggtggtgggcctcttcagcgccatcctggagcaggccaccaaggcagatggagccaatgccctgggcggcaaaggagctggctttgatgtgaaggccctgcgggccttccgggtgctgcggcccctgcggctggtgtctggagtgcccagcctgcaggtggtgctgaacagcatcatcaaggccatggtgcccctgctgcacatcgccctgctggtgctgtttgtgatcatcatctatgccatcatcggcctggagctgttcatgggcaagatgcacaagacctgctacaaccaggagggcattgctgatgtgcctgcagaagatgaccccagcccctgtgccctggagaccggccacggccggcagtgccagaatggcaccgtgtgcaagccaggctgggatggccccaagcacggcatcaccaactttgacaactttgcctttgccatgctgactgtgttccagtgcatcaccatggagggctggacagatgtgctgtactgggtgaatgatgctgtgggccgggactggccctggatctactttgtgaccctcatcatcatcggcagcttctttgtgctgaacctggtgctgggcgtgctgtctggagagttcagcaaggagcgggagaaggccaaggcccggggggacttccagaagctgcgggagaagcagcagctggaggaggacctgaagggctacctggactggatcacccaggctgaagatattgatcctgaaaatgaagatgagggcatggatgaggagaagcccaggaacatgtccatgcccaccagcgagacagaatctgtgaacacagaaaatgtggccggcggggacatcgagggggagaactgtggggcccggctggcccaccgcatcagcaagagcaagttcagccgctactggaggcgctggaaccgcttctgcaggaggaagtgcagagctgctgtgaagagcaatgtgttctactggctggtgatcttcctggtgttcctgaacaccctgaccatcgccagcgagcactacaaccagcccaactggctgacagaggtgcaggacacagccaacaaggccctgctggccctcttcaccgctgagatgctgctgaagatgtacagcctgggcctgcaggcctactttgtgtccctcttcaacagatttgactgctttgtggtgtgtggcggcatcctggagaccatcctggtggagaccaagatcatgagccccctgggcatctctgtgctgcgctgtgtgcggctgctgcgcatcttcaagatcacccgctactggaacagcctgagcaacctggtggccagcctgctgaacagcgtgcgcagcatcgccagcctgctgctgctgctcttcctgttcatcatcatcttcagcctgctgggcatgcagctgtttggaggcaagttcaactttgatgagatgcagaccaggaggagcacctttgacaacttcccccagagcctgctgaccgtcttccagatcctgaccggggaggactggaacagcgtgatgtatgatggcatcatggcctatggaggccccagcttccctggcatgctggtgtgcatctacttcatcatcctcttcatctgtggcaactacatcctgctgaatgtgttcctggccatcgctgtggacaacctggctgatgctgagagcctgaccagcgcccagaaggaggaggaggaggagaaggagaggaagaagctggccaggacagccagccctgagaagaagcaggagctggtggagaagccagctgtgggggagagcaaggaggagaagattgagctgaagagcatcacagcagatggagagagccccccagccaccaagatcaacatggatgacctgcagcccaatgaaaatgaagacaagagcccctaccccaaccctgagaccactggagaggaggatgaggaggagcctgagatgcctgtgggcccccggccccggcccctgtctgagctgcacctgaaggagaaggctgtgcccatgcctgaggccagcgccttcttcatcttcagcagcaacaaccgcttccggctgcagtgccaccgcatcgtgaatgacaccatcttcaccaacctgatcctcttcttcatcctgctgagcagcatcagcctggccgctgaggaccctgtgcagcacaccagcttcaggaaccacatcctcttctactttgacatcgtgttcaccaccatcttcaccatcgagatcgccctgaagatgacagcctatggagccttcctgcacaagggcagcttctgcaggaactacttcaacatcctggacctgctggtggtgtctgtgtccctcatcagctttggcatccagagcagcgccatcaacgtggtgaagatcctgcgggtgctgcgggtgctgcggcccctgcgggccatcaacagagccaagggcctgaagcacgtggtgcagtgtgtgtttgtggccatccgcaccatcggcaacatcgtcatcgtgaccaccctgctgcagttcatgtttgcctgcatcggcgtgcagctgttcaagggcaagctgtacacctgcagcgacagcagcaagcagacagaagctgagtgcaagggcaactacatcacctacaaggatggagaggtggaccaccccatcatccagcccaggtcctgggagaacagcaagtttgattttgacaacgtgctggccgccatgatggccctcttcaccgtgtccacctttgagggctggccagagctgctgtaccgcagcattgacagccacacagaggacaagggccccatctacaactacagagtggagatcagcatcttcttcatcatctacatcatcatcatcgccttcttcatgatgaacatctttgtgggcttcgtcatcgtgaccttccaggagcagggcgagcaggagtacaagaactgtgagctggacaagaaccagaggcagtgtgtggagtatgccctgaaggcccggcccctgcggcgctacatccccaagaaccagcaccagtacaaggtgtggtacgtggtgaacagcacctactttgagtacctgatgtttgtgctgatcctgctgaacaccatctgcctggccatgcagcactacggccagagctgcctcttcaagatcgccatgaacatcctgaacatgctgttcaccggcctcttcaccgtggagatgatcctgaagctgattgccttcaagcccaagggctacttcagtgacccctggaatgtgtttgacttcctgattgtcatcggcagcatcattgatgtgatcctgtctgagaccaacccagctgagcacacccagtgcagccccagcatgaatgctgaggagaacagccgcatcagcatcaccttcttccgcctcttccgggtgatgaggctggtgaagctgctgagcagaggagagggcatccgcaccctgctgtggaccttcatcaagagcttccaggccctgccctacgtggccctgctgattgtgatgctgttcttcatctatgctgtgattggcatgcaggtgtttgggaagatcgccctgaatgacaccacagagatcaacagaaacaacaacttccagaccttcccccaggccgtgctgctgctcttccgctgtgccaccggggaggcctggcaggacatcatgctggcctgcatgcctgggaagaagtgtgcccctgagagcgagcccagcaacagcacagaaggagagaccccctgtggcagcagctttgctgtgttctacttcatctccttctacatgctgtgtgccttcctgatcatcaacctgtttgtggccgtcatcatggacaactttgactacctgacccgggactggagcatcctgggcccccaccacctggatgagttcaagaggatctgggccgagtatgaccctgaggccaagggccgcatcaagcacctggatgtggtgaccctgctgcggcgcatccagccccccctgggctttgggaagctgtgcccccaccgggtggcctgcaagaggctggtgtccatgaacatgcccctgaacagtgatggcaccgtgatgtttaatgccaccctgtttgccctggtgaggacagccctgcgcatcaagacagaggagggccccagccccagcgaggcccaccagggcgctgaggaccccttccggcctgctggcaacctggagcaggccaatgaggagctgcgggccatcatcaagaagatctggaagaggacctccatgaagctgctggaccaggtggtgcccccagctggagatgatgaggtgacagtgggcaagttctacgccaccttcctgatccaggagtacttcaggaagttcaagaagaggaaggagcagggcctggtgggcaagcccagccagagaaatgccctgagcctgcaggccggcctgcggaccctgcatgacatcggccctgagatcagaagagccatcagcggggacctgacagctgaggaggagctggacaaggccatgaaggaggccgtgtctgctgcctctgaagatgacatcttccggcgggccggcggcctgtttggaaatcatgtgtcctactaccagagtgatggccgcagcgccttcccccagaccttcaccacccagaggcccctgcacatcaacaaggccggcagcagccagggcgacacagagagccccagccatgagaagctggtggacagcaccttcacccccagcagctacagcagcacaggcagcaatgccaacatcaacaatgccaacaacacagccctgggccgcctgcccaggcctgctggctaccccagcacagtgtccacagtggagggccacggcccccccctgagccctgccatccgggtgcaggaggtggcctggaagctgagcagcaaccgctgccacagccgggagagccaggccgccatggccggccaggaggagaccagccaggatgagacctatgaggtgaagatgaaccacgacacagaggcctgcagcgagcccagcctgctgagcacagagatgctgagctaccaggatgatgagaaccggcagctgaccctgcctgaggaggacaagagggacatccggcagagccccaagaggggcttcctgcggagcgccagcctgggccggcgggccagcttccacctggagtgcctgaagaggcagaaggaccggggcggggacatcagccagaagacagtgctgcccctgcacctggtgcaccaccaggccctggccgtggccggcctgagccccctgctgcagaggagccacagccctgccagcttcccccggccctttgccaccccaccagccaccccaggcagccggggctggccaccccagcctgtgcccaccctgcggctggagggcgtggagagcagcgagaagctgaacagcagcttccccagcatccactgcggctcctgggccgagaccaccccaggcggcggcggcagcagcgctgcccggcgggtgcggcctgtgtccctgatggtgcccagccaggccggggcccctggccggcagttccacggcagcgccagcagcctggtggaggccgtgctgatcagcgagggcctgggccagtttgcccaggaccccaagttcatcgaggtgaccacccaggagctggctgatgcctgtgacatgaccatcgaggagatggagagcgctgctgacaacatcctgagcggcggggccccccagagccccaacggggccctgctgccctttgtgaactgcagagatgctggccaggacagagctggaggagaagaagatgctggctgtgtgcgggcccggggccggcccagcgaggaggagctgcaggacagccgggtgtatgtgagcagcctgtag

SEQ ID NO: 145832 - DNA, 6630 bp, synthetic construct
  misc_feature 1..6630: note = Description of Artificial Sequence: Synthetic coding sequence
  source 1..6630: mol_type = other DNA
atggtgaatgaaaacaccaggatgtacatccctgaggagaaccaccagggcagcaactacggcagccccaggcctgcccacgccaacatgaatgccaatgctgctgctggcctggcccctgagcacatccccacccctggggccgccctgtcctggcaggccgccattgatgctgcccggcaggccaagctgatgggcagcgctggaaatgccaccatcagcacagtgagcagcacccagaggaagaggcagcagtatggcaagcccaagaagcagggcagcaccacagccacccggcccccccgggccctgctgtgcctgaccctgaagaaccccatccggcgggcctgcatcagcatcgtggagtggaagccctttgagatcatcatcctgctgaccatctttgccaactgtgtggccctggccatctacatccccttcccagaagatgacagcaatgccaccaacagcaacctggagcgggtggagtacctgttcctgatcatcttcaccgtggaggccttcctgaaggtgattgcctacggcctgctcttccaccccaatgcctacctgagaaatggctggaacctgctggacttcatcatcgtggtggtgggcctcttcagcgccatcctggagcaggccaccaaggcagatggagccaatgccctgggcggcaaaggagctggctttgatgtgaaggccctgcgggccttccgggtgctgcggcccctgcggctggtgtctggagtgcccagcctgcaggtggtgctgaacagcatcatcaaggccatggtgcccctgctgcacatcgccctgctggtgctgtttgtgatcatcatctatgccatcatcggcctggagctgttcatgggcaagatgcacaagacctgctacaaccaggagggcattgctgatgtgcctgcagaagatgaccccagcccctgtgccctggagaccggccacggccggcagtgccagaatggcaccgtgtgcaagccaggctgggatggccccaagcacggcatcaccaactttgacaactttgcctttgccatgctgactgtgttccagtgcatcaccatggagggctggacagatgtgctgtactggatgcaggatgccatgggctatgagctgccctgggtgtactttgtgtccctggtgatcttcggcagcttctttgtgctgaacctggtgctgggcgtgctgtctggagagttcagcaaggagcgggagaaggccaaggcccggggggacttccagaagctgcgggagaagcagcagctggaggaggacctgaagggctacctggactggatcacccaggctgaagatattgatcctgaaaatgaagatgagggcatggatgaggagaagcccaggaacatgtccatgcccaccagcgagacagaatctgtgaacacagaaaatgtggccggcggggacatcgagggggagaactgtggggcccggctggcccaccgcatcagcaagagcaagttcagccgctactggaggcgctggaaccgcttctgcaggaggaagtgcagagctgctgtgaagagcaatgtgttctactggctggtgatcttcctggtgttcctgaacaccctgaccatcgccagcgagcactacaaccagcccaactggctgacagaggtgcaggacacagccaacaaggccctgctggccctcttcaccgctgagatgctgctgaagatgtacagcctgggcctgcaggcctactttgtgtccctcttcaacagatttgactgctttgtggtgtgtggcggcatcctggagaccatcctggtggagaccaagatcatgagccccctgggcatctctgtgctgcgctgtgtgcggctgctgcgcatcttcaagatcacccgctactggaacagcctgagcaacctggtggccagcctgctgaacagcgtgcgcagcatcgccagcctgctgctgctgctcttcctgttcatcatcatcttcagcctgctgggcatgcagctgtttggaggcaagttcaactttgatgagatgcagaccaggaggagcacctttgacaacttcccccagagcctgctgaccgtcttccagatcctgaccggggaggactggaacagcgtgatgtatgatggcatcatggcctatggaggccccagcttccctggcatgctggtgtgcatctacttcatcatcctcttcatctgtggcaactacatcctgctgaatgtgttcctggccatcgctgtggacaacctggctgatgctgagagcctgaccagcgcccagaaggaggaggaggaggagaaggagaggaagaagctggccaggacagccagccctgagaagaagcaggagctggtggagaagccagctgtgggggagagcaaggaggagaagattgagctgaagagcatcacagcagatggagagagccccccagccaccaagatcaacatggatgacctgcagcccaatgaaaatgaagacaagagcccctaccccaaccctgagaccactggagaggaggatgaggaggagcctgagatgcctgtgggcccccggccccggcccctgtctgagctgcacctgaaggagaaggctgtgcccatgcctgaggccagcgccttcttcatcttcagcagcaacaaccgcttccggctgcagtgccaccgcatcgtgaatgacaccatcttcaccaacctgatcctcttcttcatcctgctgagcagcatcagcctggccgctgaggaccctgtgcagcacaccagcttcaggaaccacatcctcttctactttgacatcgtgttcaccaccatcttcaccatcgagatcgccctgaagatgacagcctatggagccttcctgcacaagggcagcttctgcaggaactacttcaacatcctggacctgctggtggtgtctgtgtccctcatcagctttggcatccagagcagcgccatcaacgtggtgaagatcctgcgggtgctgcgggtgctgcggcccctgcgggccatcaacagagccaagggcctgaagcacgtggtgcagtgtgtgtttgtggccatccgcaccatcggcaacatcgtcatcgtgaccaccctgctgcagttcatgtttgcctgcatcggcgtgcagctgttcaagggcaagctgtacacctgcagcgacagcagcaagcagacagaagctgagtgcaagggcaactacatcacctacaaggatggagaggtggaccaccccatcatccagcccaggtcctgggagaacagcaagtttgattttgacaacgtgctggccgccatgatggccctcttcaccgtgtccacctttgagggctggccagagctgctgtaccgcagcattgacagccacacagaggacaagggccccatctacaactacagagtggagatcagcatcttcttcatcatctacatcatcatcatcgccttcttcatgatgaacatctttgtgggcttcgtcatcgtgaccttccaggagcagggcgagcaggagtacaagaactgtgagctggacaagaaccagaggcagtgtgtggagtatgccctgaaggcccggcccctgcggcgctacatccccaagaaccagcaccagtacaaggtgtggtacgtggtgaacagcacctactttgagtacctgatgtttgtgctgatcctgctgaacaccatctgcctggccatgcagcactacggccagagctgcctcttcaagatcgccatgaacatcctgaacatgctgttcaccggcctcttcaccgtggagatgatcctgaagctgattgccttcaagcccaagggctacttcagtgacccctggaatgtgtttgacttcctgattgtcatcggcagcatcattgatgtgatcctgtctgagaccaacccagctgagcacacccagtgcagccccagcatgaatgctgaggagaacagccgcatcagcatcaccttcttccgcctcttccgggtgatgaggctggtgaagctgctgagcagaggagagggcatccgcaccctgctgtggaccttcatcaagagcttccaggccctgccctacgtggccctgctgattgtgatgctgttcttcatctatgctgtgattggcatgcaggtgtttgggaagatcgccctgaatgacaccacagagatcaacagaaacaacaacttccagaccttcccccaggccgtgctgctgctcttccgctgtgccaccggggaggcctggcaggacatcatgctggcctgcatgcctgggaagaagtgtgcccctgagagcgagcccagcaacagcacagaaggagagaccccctgtggcagcagctttgctgtgttctacttcatctccttctacatgctgtgtgccttcctgatcatcaacctgtttgtggccgtcatcatggacaactttgactacctgacccgggactggagcatcctgggcccccaccacctggatgagttcaagaggatctgggccgagtatgaccctgaggccaagggccgcatcaagcacctggatgtggtgaccctgctgcggcgcatccagccccccctgggctttgggaagctgtgcccccaccgggtggcctgcaagaggctggtgtccatgaacatgcccctgaacagtgatggcaccgtgatgtttaatgccaccctgtttgccctggtgaggacagccctgcgcatcaagacagagggcaacctggagcaggccaatgaggagctgcgggccatcatcaagaagatctggaagaggacctccatgaagctgctggaccaggtggtgcccccagctggagatgatgaggtgacagtgggcaagttctacgccaccttcctgatccaggagtacttcaggaagttcaagaagaggaaggagcagggcctggtgggcaagcccagccagagaaatgccctgagcctgcaggccggcctgcggaccctgcatgacatcggccctgagatccggcgggccatcagcggggacctgacagctgaggaggagctggacaaggccatgaaggaggccgtgtctgctgcctctgaagatgacatcttcagaagagctgggggcctgtttggaaaccacgtgtcctactaccagagtgatggccgcagcgccttcccccagaccttcaccacccagaggcccctgcacatcaacaaggccggcagcagccagggcgacacagagagccccagccatgagaagctggtggacagcaccttcacccccagcagctacagcagcacaggcagcaatgccaacatcaacaatgccaacaacacagccctgggccgcctgcccaggcctgctggctaccccagcacagtgtccacagtggagggccacggcccccccctgagccctgccatccgggtgcaggaggtggcctggaagctgagcagcaacaggatgcactgctgtgacatgctggatggcggcaccttccccccagccctgggcccccggcgggccccaccctgcctgcaccagcagctgcagggcagcctggccggcctgcgggaggacaccccctgcatcgtgcccggccacgccagcctgtgctgcagcagccgggtgggggagtggctgcctgctggctgcacagccccccagcacgcccgctgccacagccgggagagccaggccgccatggccggccaggaggagaccagccaggatgagacctatgaggtgaagatgaaccacgacacagaggcctgcagcgagcccagcctgctgagcacagagatgctgagctaccaggatgatgagaaccggcagctgaccctgcctgaggaggacaagagggacatccggcagagccccaagaggggcttcctgcggagcgccagcctgggccggcgggccagcttccacctggagtgcctgaagaggcagaaggaccggggcggggacatcagccagaagacagtgctgcccctgcacctggtgcaccaccaggccctggccgtggccggcctgagccccctgctgcagaggagccacagccctgccagcttcccccggccctttgccaccccaccagccaccccaggcagccggggctggccaccccagcctgtgcccaccctgcggctggagggcgtggagagcagcgagaagctgaacagcagcttccccagcatccactgcggctcctgggccgagaccaccccaggcggcggcggcagcagcgctgcccggcgggtgcggcctgtgtccctgatggtgcccagccaggccggggcccctggccggcagttccacggcagcgccagcagcctggtggaggccgtgctgatcagcgagggcctgggccagtttgcccaggaccccaagttcatcgaggtgaccacccaggagctggctgatgcctgtgacatgaccatcgaggagatggagagcgctgctgacaacatcctgagcggcggggccccccagagccccaacggggccctgctgccctttgtgaactgcagagatgctggccaggacagagctggaggagaagaagatgctggctgtgtgcgggcccggggccggcccagcgaggaggagctgcaggacagccgggtgtatgtgagcagcctgtag

SEQ ID NO: 145833 - DNA, 3840 bp, synthetic construct
  misc_feature 1..3840: note = Description of Artificial Sequence: Synthetic coding sequence
  source 1..3840: mol_type = other DNA
atggtgaatgaaaacaccaggatgtacatccctgaggagaaccaccagggcagcaactacggcagccccaggcctgcccacgccaacatgaatgccaatgctgctgctggcctggcccctgagcacatccccacccctggggccgccctgtcctggcaggccgccattgatgctgcccggcaggccaagctgatgggcagcgctggaaatgccaccatcagcacagtgagcagcacccagaggaagaggcagcagtatggcaagcccaagaagcagggcagcaccacagccacccggcccccccgggccctgctgtgcctgaccctgaagaaccccatccggcgggcctgcatcagcatcgtggagtggaagccctttgagatcatcatcctgctgaccatctttgccaactgtgtggccctggccatctacatccccttcccagaagatgacagcaatgccaccaacagcaacctggagcgggtggagtacctgttcctgatcatcttcaccgtggaggccttcctgaaggtgattgcctacggcctgctcttccaccccaatgcctacctgagaaatggctggaacctgctggacttcatcatcgtggtggtgggcctcttcagcgccatcctggagcaggccaccaaggcagatggagccaatgccctgggcggcaaaggagctggctttgatgtgaaggccctgcgggccttccgggtgctgcggcccctgcggctggtgtctggagtgcccagcctgcaggtggtgctgaacagcatcatcaaggccatggtgcccctgctgcacatcgccctgctggtgctgtttgtgatcatcatctatgccatcatcggcctggagctgttcatgggcaagatgcacaagacctgctacaaccaggagggcattgctgatgtgcctgcagaagatgaccccagcccctgtgccctggagaccggccacggccggcagtgccagaatggcaccgtgtgcaagccaggctgggatggccccaagcacggcatcaccaactttgacaactttgcctttgccatgctgactgtgttccagtgcatcaccatggagggctggacagatgtgctgtactgggtgaatgatgctgtgggccgggactggccctggatctactttgtgaccctcatcatcatcggcagcttctttgtgctgaacctggtgctgggcgtgctgtctggagagttcagcaaggagcgggagaaggccaaggcccggggggacttccagaagctgcgggagaagcagcagctggaggaggacctgaagggctacctggactggatcacccaggctgaagatattgatcctgaaaatgaagatgagggcatggatgaggagaagcccaggaacatgtccatgcccaccagcgagacagaatctgtgaacacagaaaatgtggccggcggggacatcgagggggagaactgtggggcccggctggcccaccgcatcagcaagagcaagttcagccgctactggaggcgctggaaccgcttctgcaggaggaagtgcagagctgctgtgaagagcaatgtgttctactggctggtgatcttcctggtgttcctgaacaccctgaccatcgccagcgagcactacaaccagcccaactggctgacagaggtgcaggacacagccaacaaggccctgctggccctcttcaccgctgagatgctgctgaagatgtacagcctgggcctgcaggcctactttgtgtccctcttcaacagatttgactgctttgtggtgtgtggcggcatcctggagaccatcctggtggagaccaagatcatgagccccctgggcatctctgtgctgcgctgtgtgcggctgctgcgcatcttcaagatcacccgctactggaacagcctgagcaacctggtggccagcctgctgaacagcgtgcgcagcatcgccagcctgctgctgctgctcttcctgttcatcatcatcttcagcctgctgggcatgcagctgtttggaggcaagttcaactttgatgagatgcagaccaggaggagcacctttgacaacttcccccagagcctgctgaccgtcttccagatcctgaccggggaggactggaacagcgtgatgtatgatggcatcatggcctatggaggccccagcttccctggcatgctggtgtgcatctacttcatcatcctcttcatctgtggcaactacatcctgctgaatgtgttcctggccatcgctgtggacaacctggctgatgctgagagcctgaccagcgcccagaaggaggaggaggaggagaaggagaggaagaagctggccaggacagccagccctgagaagaagcaggagctggtggagaagccagctgtgggggagagcaaggaggagaagattgagctgaagagcatcacagcagatggagagagccccccagccaccaagatcaacatggatgacctgcagcccaatgaaaatgaagacaagagcccctaccccaaccctgagaccactggagaggaggatgaggaggagcctgagatgcctgtgggcccccggccccggcccctgtctgagctgcacctgaaggagaaggctgtgcccatgcctgaggccagcgccttcttcatcttcagcagcaacaaccgcttccggctgcagtgccaccgcatcgtgaatgacaccatcttcaccaacctgatcctcttcttcatcctgctgagcagcatcagcctggccgctgaggaccctgtgcagcacaccagcttcaggaaccacatcctgggcaatgctgactatgtgttcaccagcatcttcaccctggagatcatcctgaagatgacagcctatggagccttcctgcacaagggcagcttctgcaggaactacttcaacatcctggacctgctggtggtgtctgtgtccctcatcagctttggcatccagagcagcgccatcaacgtggtgaagatcctgcgggtgctgcgggtgctgcggcccctgcgggccatcaacagagccaagggcctgaagcacgtggtgcagtgtgtgtttgtggccatccgcaccatcggcaacatcgtcatcgtgaccaccctgctgcagttcatgtttgcctgcatcggcgtgcagctgttcaagggcaagctgtacacctgcagcgacagcagcaagcagacagaagctgagtgcaagggcaactacatcacctacaaggatggagaggtggaccaccccatcatccagcccaggtcctgggagaacagcaagtttgattttgacaacgtgctggccgccatgatggccctcttcaccgtgtccacctttgagggctggccagagctgctgtaccgcagcattgacagccacacagaggacaagggccccatctacaactacagagtggagatcagcatcttcttcatcatctacatcatcatcatcgccttcttcatgatgaacatctttgtgggcttcgtcatcgtgaccttccaggagcagggcgagcaggagtacaagaactgtgagctggacaagaaccagaggcagtgtgtggagtatgccctgaaggcccggcccctgcggcgctacatccccaagaaccagcaccagtacaaggtgtggtacgtggtgaacagcacctactttgagtacctgatgtttgtgctgatcctgctgaacaccatctgcctggccatgcagcactacggccagagctgcctcttcaagatcgccatgaacatcctgaacatgctgttcaccggcctcttcaccgtggagatgatcctgaagctgattgccttcaagcccaaggtgggcctgtag

SEQ ID NO: 145834 - DNA, 6546 bp, synthetic construct
  misc_feature 1..6546: note = Description of Artificial Sequence: Synthetic coding sequence
  source 1..6546: mol_type = other DNA
atgatgatgatgatgatgatgaagaagatgcagcaccagaggcagcagcaggccgaccacgccaatgaggccaactatgcccggggcacccggctgcccctgtctggagagggccccaccagccagcccaacagcagcaagcagacagtgctgtcctggcaggccgccattgatgctgcccggcaggccaaggccgcccagaccatgagcaccagcgcccctcctcctgtgggcagcctgagccagaggaagaggcagcagtatgccaagagcaagaagcagggcaacagcagcaacagcaggcctgcccgggccctcttctgcctgagcctgaacaaccccatccggcgggcctgcatcagcatcgtggagtggaagccctttgacatcttcatcctgctggccatctttgccaactgtgtggccctggccatctacatccccttcccagaagatgacagcaacagcaccaaccacaacctggagaaggtggagtatgccttcctgatcatcttcaccgtggagaccttcctgaagatcatcgcctacggcctgctgctgcaccccaatgcctacgtgagaaatggctggaacctgctggactttgtgattgtcatcgtgggcctcttcagcgtcatcctggagcagctgaccaaggagacagaaggaggcaaccacagcagcggcaagagcggcggctttgatgtgaaggccctgcgggccttccgggtgctgcggcccctgcggctggtgtctggagtgcccagcctgcaggtggtgctgaacagcatcatcaaggccatggtgcccctgctgcacatcgccctgctggtgctcttcgtcatcatcatctatgccatcatcggcctggagctgttcatcggcaagatgcacaagacctgcttctttgctgacagcgacatcgtggccgaggaggaccctgccccctgtgccttctctggaaatggccggcagtgcacagccaatggaacagagtgccgcagcggctgggtgggccccaatggaggcatcaccaactttgacaactttgcctttgccatgctgaccgtcttccagtgcatcaccatggagggctggacagatgtgctgtactgggtgaatgatgccatcggctgggagtggccctgggtgtactttgtgtccctcatcatcctgggcagcttctttgtgctgaacctggtgctgggcgtgctgagcggggagttcagcaaggagcgggagaaggccaaggcccggggggacttccagaagctgcgggagaagcagcagctggaggaggacctgaagggctacctggactggatcacccaggccgaggacatcgaccctgaaaatgaggaggagggcggggaggagggcaagaggaacacctccatgcccaccagcgagacagaatctgtgaacacagaaaatgtgtctggagagggggagaacagaggctgctgcggcagcctgtggtgctggtggaggagaagaggagctgccaaggccggccccagcggctgccgccgctggggccaggccatcagcaagagcaagctgagccgccgctggaggcgctggaaccgcttcaacagaagacgctgcagagctgctgtgaagtctgtgaccttctactggctggtgattgtgctggtgttcctgaacaccctgaccatcagcagcgagcactacaaccagcctgactggctgacccagatccaggacatcgccaacaaggtgctgctggccctcttcacctgtgagatgctggtgaagatgtacagcctgggcctgcaggcctactttgtgtccctcttcaacagatttgactgctttgtggtgtgtggcggcatcacagagaccatcctggtggagctggagatcatgagccccctgggcatcagcgtcttccgctgtgtgcggctgctgcgcatcttcaaggtgaccaggcactggaccagcctgagcaacctggtggccagcctgctgaacagcatgaagagcatcgccagcctgctgctgctgctcttcctgttcatcatcatcttcagcctgctgggcatgcagctgtttggaggcaagttcaactttgatgagacccagaccaagaggagcacctttgacaacttcccccaggccctgctgactgtgttccagatcctgactggagaggactggaatgctgtgatgtatgatggcatcatggcctacggcggccccagcagcagcggcatgattgtgtgcatctacttcatcatcctcttcatctgtggcaactacatcctgctgaatgtgttcctggccatcgctgtggacaacctggctgatgctgagagcctgaacacagcccagaaggaggaggccgaggagaaggagaggaagaagatcgccaggaaggagagcctggagaacaagaagaacaacaagccagaggtgaaccagatcgccaacagcgacaacaaggtgaccattgatgactaccgggaggaggatgaggacaaggacccctacccaccctgtgatgtgcctgtgggggaggaggaggaggaggaggaggaggatgagcctgaggtgcctgctggcccccggccccggcgcatcagcgagctgaacatgaaggagaagatcgcccccatccctgagggcagcgccttcttcatcctgagcaagaccaaccccatccgggtgggctgccacaagctgatcaaccaccacatcttcaccaacctgatcctggtgttcatcatgctgagcagcgctgccctggccgctgaggaccccatccgcagccacagcttcaggaacaccatcctgggctactttgattatgccttcaccgccatcttcaccgtggagatcctgctgaagatgaccacctttggagccttcctgcacaagggggccttctgcaggaactacttcaacctgctggacatgctggtggtgggcgtgtccctggtgtcctttggcatccagagcagcgccatctctgtggtgaagatcctgcgggtgctgcgggtgctgcggcccctgcgggccatcaacagagccaagggcctgaagcacgtggtgcagtgtgtgtttgtggccatccgcaccatcggcaacatcatgattgtgaccaccctgctgcagttcatgtttgcctgcatcggcgtgcagctgttcaagggcaagttctaccgctgcacagatgaggccaagagcaaccctgaggagtgccggggcctcttcatcctgtacaaggatggagatgtggacagccctgtggtgcgggagcgcatctggcagaacagcgacttcaactttgacaacgtgctgagcgccatgatggccctcttcaccgtgtccacctttgagggctggccagccctgctgtacaaggccatcgacagcaatggagagaacatcggccccatctacaaccaccgggtggagatcagcatcttcttcatcatctacatcatcatcgtggccttcttcatgatgaacatctttgtgggcttcgtcatcgtgaccttccaggagcagggcgagaaggagtacaagaactgtgagctggacaagaaccagaggcagtgtgtggagtatgccctgaaggcccggcccctgcggcgctacatccccaagaacccctaccagtacaagttctggtacgtggtgaacagcagcccctttgagtacatgatgtttgtgctgatcatgctgaacaccctgtgcctggccatgcagcactatgagcagagcaagatgtttaatgatgccatggacatcctgaacatggtgttcaccggggtcttcaccgtggagatggtgctgaaggtgattgccttcaagcccaagggctacttcagtgatgcctggaacacctttgacagcctcatcgtcatcggcagcatcattgatgtggccctgtctgaggccgaccccacagaaagtgaaaatgtgcctgtgcccacagccaccccaggcaacagcgaggagagcaaccgcatcagcatcaccttcttccgcctcttccgggtgatgaggctggtgaagctgctgagcagaggagagggcatccgcaccctgctgtggaccttcatcaagagcttccaggccctgccctacgtggccctgctgattgccatgctgttcttcatctatgctgtgattggcatgcagatgtttgggaaggtggccatgagggacaacaaccagatcaacagaaacaacaacttccagaccttcccccaggccgtgctgctgctcttccgctgtgccaccggggaggcctggcaggagatcatgctggcctgcctgcccgggaagctgtgtgaccctgagagtgactacaaccctggagaggagtacacctgtggcagcaactttgccatcgtgtacttcatctccttctacatgctgtgtgccttcctgatcatcaacctgtttgtggccgtcatcatggacaactttgactacctgacccgggactggagcatcctgggcccccaccacctggatgagttcaagaggatctggagcgaatatgaccctgaggccaagggccgcatcaagcacctggatgtggtgaccctgctgcggcgcatccagccccccctgggctttgggaagctgtgcccccaccgggtggcctgcaagaggctggtggccatgaacatgcccctgaacagtgatggcaccgtgatgtttaatgccaccctgtttgccctggtgaggacagccctgaagatcaagacagagggcaacctggagcaggccaatgaggagctgcgggctgtgatcaagaagatctggaagaagacctccatgaagctgctggaccaggtggtgcccccagctggagatgatgaggtgacagtgggcaagttctacgccaccttcctgatccaggactacttcaggaagttcaagaagaggaaggagcagggcctggtgggcaagtacccagccaagaacaccaccatcgccctgcaggccggcctgcggaccctgcatgacatcggccctgagatcagaagagccatcagctgtgacctgcaggatgatgagcctgaggagaccaagcgggaggaggaggatgatgtgttcaagagaaatggagccctgctgggcaaccacgtgaaccacgtgaacagcgacagaagagacagcctgcagcagaccaacaccacccaccggcccctgcacgtgcagaggcccagcatccccccagccagtgacacagagaagcccctcttccccccagctggcaacagcgtgtgccacaaccaccacaaccacaacagcatcggcaagcaggtgcccaccagcaccaatgccaacctgaacaatgccaacatgagcaaggccgcccacggcaagaggcccagcatcggcaacctggagcacgtgtctgaaaatggccaccacagcagccacaagcatgaccgggagccccagaggaggagctctgtgaagaggacccgctactatgagacctacatccgcagtgacagcggagatgagcagctgcccaccatctgccgggaggaccctgagatccacggctacttccgggacccccactgcctgggggagcaggagtacttcagcagcgaggagtgctatgaagatgacagcagccccacctggagccggcagaactacggctactacagccgctacccaggcaggaacatcgacagcgagcggccccggggctaccaccacccccagggcttcctggaggatgatgacagccctgtgtgctatgacagcagaagaagcccccggcggcggctgctgccccccaccccagccagccacagaagaagcagcttcaactttgagtgcctgcggcggcagagcagccaggaggaggtgcccagcagccccatcttcccccacaggacagccctgcccctgcacctgatgcagcagcagatcatggctgtggccggcctggacagcagcaaggcccagaagtacagccccagccacagcaccaggtcctgggccaccccaccagccaccccaccctacagagactggaccccctgctacacccccctcatccaggtggagcagagcgaggccctggaccaggtgaatggcagcctgcccagcctgcacaggagctcctggtacacagatgagccagacatctcctaccgcaccttcaccccagccagcctgactgtgcccagcagcttcaggaacaagaacagcgacaagcagaggtctgctgacagcctggtggaggccgtgctgatcagcgagggcctgggccgctatgcccgggaccccaagtttgtgtctgccaccaagcatgaaattgctgatgcctgtgacctgaccattgatgagatggagagcgctgccagcaccctgctgaatggaaatgtgcggccccgggccaatggagatgtgggccccctgagccaccggcaggactatgagctgcaggactttggacctggctacagtgatgaggagccagaccccggcagagatgaggaggacctggctgatgagatgatctgcatcaccaccctgtag

SEQ ID NO: 145835 - DNA, 6486 bp, synthetic construct
  misc_feature 1..6486: note = Description of Artificial Sequence: Synthetic coding sequence
  source 1..6486: mol_type = other DNA
atgatgatgatgatgatgatgaagaagatgcagcaccagaggcagcagcaggccgaccacgccaatgaggccaactatgcccggggcacccggctgcccctgtctggagagggccccaccagccagcccaacagcagcaagcagacagtgctgtcctggcaggccgccattgatgctgcccggcaggccaaggccgcccagaccatgagcaccagcgcccctcctcctgtgggcagcctgagccagaggaagaggcagcagtatgccaagagcaagaagcagggcaacagcagcaacagcaggcctgcccgggccctcttctgcctgagcctgaacaaccccatccggcgggcctgcatcagcatcgtggagtggaagccctttgacatcttcatcctgctggccatctttgccaactgtgtggccctggccatctacatccccttcccagaagatgacagcaacagcaccaaccacaacctggagaaggtggagtatgccttcctgatcatcttcaccgtggagaccttcctgaagatcatcgcctacggcctgctgctgcaccccaatgcctacgtgagaaatggctggaacctgctggactttgtgattgtcatcgtgggcctcttcagcgtcatcctggagcagctgaccaaggagacagaaggaggcaaccacagcagcggcaagagcggcggctttgatgtgaaggccctgcgggccttccgggtgctgcggcccctgcggctggtgtctggagtgcccagcctgcaggtggtgctgaacagcatcatcaaggccatggtgcccctgctgcacatcgccctgctggtgctcttcgtcatcatcatctatgccatcatcggcctggagctgttcatcggcaagatgcacaagacctgcttctttgctgacagcgacatcgtggccgaggaggaccctgccccctgtgccttctctggaaatggccggcagtgcacagccaatggaacagagtgccgcagcggctgggtgggccccaatggaggcatcaccaactttgacaactttgcctttgccatgctgaccgtcttccagtgcatcaccatggagggctggacagatgtgctgtactggatgaatgatgccatgggctttgagctgccctgggtgtactttgtgtccctggtgatcttcggcagcttctttgtgctgaacctggtgctgggcgtgctgagcggggagttcagcaaggagcgggagaaggccaaggcccggggggacttccagaagctgcgggagaagcagcagctggaggaggacctgaagggctacctggactggatcacccaggccgaggacatcgaccctgaaaatgaggaggagggcggggaggagggcaagaggaacacctccatgcccaccagcgagacagaatctgtgaacacagaaaatgtgtctggagagggggagaacagaggctgctgcggcagcctgtgccaggccatcagcaagagcaagctgagccgccgctggaggcgctggaaccgcttcaacagaagacgctgcagagctgctgtgaagtctgtgaccttctactggctggtgattgtgctggtgttcctgaacaccctgaccatcagcagcgagcactacaaccagcctgactggctgacccagatccaggacatcgccaacaaggtgctgctggccctcttcacctgtgagatgctggtgaagatgtacagcctgggcctgcaggcctactttgtgtccctcttcaacagatttgactgctttgtggtgtgtggcggcatcacagagaccatcctggtggagctggagatcatgagccccctgggcatcagcgtcttccgctgtgtgcggctgctgcgcatcttcaaggtgaccaggcactggaccagcctgagcaacctggtggccagcctgctgaacagcatgaagagcatcgccagcctgctgctgctgctcttcctgttcatcatcatcttcagcctgctgggcatgcagctgtttggaggcaagttcaactttgatgagacccagaccaagaggagcacctttgacaacttcccccaggccctgctgactgtgttccagatcctgactggagaggactggaatgctgtgatgtatgatggcatcatggcctacggcggccccagcagcagcggcatgattgtgtgcatctacttcatcatcctcttcatctgtggcaactacatcctgctgaatgtgttcctggccatcgctgtggacaacctggctgatgctgagagcctgaacacagcccagaaggaggaggccgaggagaaggagaggaagaagatcgccaggaaggagagcctggagaacaagaagaacaacaagccagaggtgaaccagatcgccaacagcgacaacaaggtgaccattgatgactaccgggaggaggatgaggacaaggacccctacccaccctgtgatgtgcctgtgggggaggaggaggaggaggaggaggaggatgagcctgaggtgcctgctggcccccggccccggcgcatcagcgagctgaacatgaaggagaagatcgcccccatccctgagggcagcgccttcttcatcctgagcaagaccaaccccatccgggtgggctgccacaagctgatcaaccaccacatcttcaccaacctgatcctggtgttcatcatgctgagcagcgctgccctggccgctgaggaccccatccgcagccacagcttcaggaacaccatcctgggctactttgattatgccttcaccgccatcttcaccgtggagatcctgctgaagatgaccacctttggagccttcctgcacaagggggccttctgcaggaactacttcaacctgctggacatgctggtggtgggcgtgtccctggtgtcctttggcatccagagcagcgccatctctgtggtgaagatcctgcgggtgctgcgggtgctgcggcccctgcgggccatcaacagagccaagggcctgaagcacgtggtgcagtgtgtgtttgtggccatccgcaccatcggcaacatcatgattgtgaccaccctgctgcagttcatgtttgcctgcatcggcgtgcagctgttcaagggcaagttctaccgctgcacagatgaggccaagagcaaccctgaggagtgccggggcctcttcatcctgtacaaggatggagatgtggacagccctgtggtgcgggagcgcatctggcagaacagcgacttcaactttgacaacgtgctgagcgccatgatggccctcttcaccgtgtccacctttgagggctggccagccctgctgtacaaggccatcgacagcaatggagagaacatcggccccatctacaaccaccgggtggagatcagcatcttcttcatcatctacatcatcatcgtggccttcttcatgatgaacatctttgtgggcttcgtcatcgtgaccttccaggagcagggcgagaaggagtacaagaactgtgagctggacaagaaccagaggcagtgtgtggagtatgccctgaaggcccggcccctgcggcgctacatccccaagaacccctaccagtacaagttctggtacgtggtgaacagcagcccctttgagtacatgatgtttgtgctgatcatgctgaacaccctgtgcctggccatgcagcactatgagcagagcaagatgtttaatgatgccatggacatcctgaacatggtgttcaccggggtcttcaccgtggagatggtgctgaaggtgattgccttcaagcccaagggctacttcagtgatgcctggaacacctttgacagcctcatcgtcatcggcagcatcattgatgtggccctgtctgaggccgaccccacagaaagtgaaaatgtgcctgtgcccacagccaccccaggcaacagcgaggagagcaaccgcatcagcatcaccttcttccgcctcttccgggtgatgaggctggtgaagctgctgagcagaggagagggcatccgcaccctgctgtggaccttcatcaagagcttccaggccctgccctacgtggccctgctgattgccatgctgttcttcatctatgctgtgattggcatgcagatgtttgggaaggtggccatgagggacaacaaccagatcaacagaaacaacaacttccagaccttcccccaggccgtgctgctgctcttccgctgtgccaccggggaggcctggcaggagatcatgctggcctgcctgcccgggaagctgtgtgaccctgagagtgactacaaccctggagaggagtacacctgtggcagcaactttgccatcgtgtacttcatctccttctacatgctgtgtgccttcctgatcatcaacctgtttgtggccgtcatcatggacaactttgactacctgacccgggactggagcatcctgggcccccaccacctggatgagttcaagaggatctggagcgaatatgaccctgaggccaagggccgcatcaagcacctggatgtggtgaccctgctgcggcgcatccagccccccctgggctttgggaagctgtgcccccaccgggtggcctgcaagaggctggtggccatgaacatgcccctgaacagtgatggcaccgtgatgtttaatgccaccctgtttgccctggtgaggacagccctgaagatcaagacagagggcaacctggagcaggccaatgaggagctgcgggctgtgatcaagaagatctggaagaagacctccatgaagctgctggaccaggtggtgcccccagctggagatgatgaggtgacagtgggcaagttctacgccaccttcctgatccaggactacttcaggaagttcaagaagaggaaggagcagggcctggtgggcaagtacccagccaagaacaccaccatcgccctgcaggccggcctgcggaccctgcatgacatcggccctgagatcagaagagccatcagctgtgacctgcaggatgatgagcctgaggagaccaagcgggaggaggaggatgatgtgttcaagagaaatggagccctgctgggcaaccacgtgaaccacgtgaacagcgacagaagagacagcctgcagcagaccaacaccacccaccggcccctgcacgtgcagaggcccagcatccccccagccagtgacacagagaagcccctcttccccccagctggcaacagcgtgtgccacaaccaccacaaccacaacagcatcggcaagcaggtgcccaccagcaccaatgccaacctgaacaatgccaacatgagcaaggccgcccacggcaagaggcccagcatcggcaacctggagcacgtgtctgaaaatggccaccacagcagccacaagcatgaccgggagccccagaggaggagctctgtgaagaggacccgctactatgagacctacatccgcagtgacagcggagatgagcagctgcccaccatctgccgggaggaccctgagatccacggctacttccgggacccccactgcctgggggagcaggagtacttcagcagcgaggagtgctatgaagatgacagcagccccacctggagccggcagaactacggctactacagccgctacccaggcaggaacatcgacagcgagcggccccggggctaccaccacccccagggcttcctggaggatgatgacagccctgtgtgctatgacagcagaagaagcccccggcggcggctgctgccccccaccccagccagccacagaagaagcagcttcaactttgagtgcctgcggcggcagagcagccaggaggaggtgcccagcagccccatcttcccccacaggacagccctgcccctgcacctgatgcagcagcagatcatggctgtggccggcctggacagcagcaaggcccagaagtacagccccagccacagcaccaggtcctgggccaccccaccagccaccccaccctacagagactggaccccctgctacacccccctcatccaggtggagcagagcgaggccctggaccaggtgaatggcagcctgcccagcctgcacaggagctcctggtacacagatgagccagacatctcctaccgcaccttcaccccagccagcctgactgtgcccagcagcttcaggaacaagaacagcgacaagcagaggtctgctgacagcctggtggaggccgtgctgatcagcgagggcctgggccgctatgcccgggaccccaagtttgtgtctgccaccaagcatgaaattgctgatgcctgtgacctgaccattgatgagatggagagcgctgccagcaccctgctgaatggaaatgtgcggccccgggccaatggagatgtgggccccctgagccaccggcaggactatgagctgcaggactttggacctggctacagtgatgaggagccagaccccggcagagatgaggaggacctggctgatgagatgatctgcatcaccaccctgtag

SEQ ID NO: 145836 - DNA, 6414 bp, synthetic construct
  misc_feature 1..6414: note = Description of Artificial Sequence: Synthetic coding sequence
  source 1..6414: mol_type = other DNA
atgatgatgatgatgatgatgaagaagatgcagcaccagaggcagcagcaggccgaccacgccaatgaggccaactatgcccggggcacccggctgcccctgtctggagagggccccaccagccagcccaacagcagcaagcagacagtgctgtcctggcaggccgccattgatgctgcccggcaggccaaggccgcccagaccatgagcaccagcgcccctcctcctgtgggcagcctgagccagaggaagaggcagcagtatgccaagagcaagaagcagggcaacagcagcaacagcaggcctgcccgggccctcttctgcctgagcctgaacaaccccatccggcgggcctgcatcagcatcgtggagtggaagccctttgacatcttcatcctgctggccatctttgccaactgtgtggccctggccatctacatccccttcccagaagatgacagcaacagcaccaaccacaacctggagaaggtggagtatgccttcctgatcatcttcaccgtggagaccttcctgaagatcatcgcctacggcctgctgctgcaccccaatgcctacgtgagaaatggctggaacctgctggactttgtgattgtcatcgtgggcctcttcagcgtcatcctggagcagctgaccaaggagacagaaggaggcaaccacagcagcggcaagagcggcggctttgatgtgaaggccctgcgggccttccgggtgctgcggcccctgcggctggtgtctggagtgcccagcctgcaggtggtgctgaacagcatcatcaaggccatggtgcccctgctgcacatcgccctgctggtgctcttcgtcatcatcatctatgccatcatcggcctggagctgttcatcggcaagatgcacaagacctgcttctttgctgacagcgacatcgtggccgaggaggaccctgccccctgtgccttctctggaaatggccggcagtgcacagccaatggaacagagtgccgcagcggctgggtgggccccaatggaggcatcaccaactttgacaactttgcctttgccatgctgaccgtcttccagtgcatcaccatggagggctggacagatgtgctgtactggatgaatgatgccatgggctttgagctgccctgggtgtactttgtgtccctggtgatcttcggcagcttctttgtgctgaacctggtgctgggcgtgctgagcggggagttcagcaaggagcgggagaaggccaaggcccggggggacttccagaagctgcgggagaagcagcagctggaggaggacctgaagggctacctggactggatcacccaggccgaggacatcgaccctgaaaatgaggaggagggcggggaggagggcaagaggaacacctccatgcccaccagcgagacagaatctgtgaacacagaaaatgtgtctggagagggggagaacagaggctgctgcggcagcctgtgccaggccatcagcaagagcaagctgagccgccgctggaggcgctggaaccgcttcaacagaagacgctgcagagctgctgtgaagtctgtgaccttctactggctggtgattgtgctggtgttcctgaacaccctgaccatcagcagcgagcactacaaccagcctgactggctgacccagatccaggacatcgccaacaaggtgctgctggccctcttcacctgtgagatgctggtgaagatgtacagcctgggcctgcaggcctactttgtgtccctcttcaacagatttgactgctttgtggtgtgtggcggcatcacagagaccatcctggtggagctggagatcatgagccccctgggcatcagcgtcttccgctgtgtgcggctgctgcgcatcttcaaggtgaccaggcactggaccagcctgagcaacctggtggccagcctgctgaacagcatgaagagcatcgccagcctgctgctgctgctcttcctgttcatcatcatcttcagcctgctgggcatgcagctgtttggaggcaagttcaactttgatgagacccagaccaagaggagcacctttgacaacttcccccaggccctgctgactgtgttccagatcctgactggagaggactggaatgctgtgatgtatgatggcatcatggcctacggcggccccagcagcagcggcatgattgtgtgcatctacttcatcatcctcttcatctgtggcaactacatcctgctgaatgtgttcctggccatcgctgtggacaacctggctgatgctgagagcctgaacacagcccagaaggaggaggccgaggagaaggagaggaagaagatcgccaggaaggagagcctggagaacaagaagaacaacaagccagaggtgaaccagatcgccaacagcgacaacaaggtgaccattgatgactaccgggaggaggatgaggacaaggacccctacccaccctgtgatgtgcctgtgggggaggaggaggaggaggaggaggaggatgagcctgaggtgcctgctggcccccggccccggcgcatcagcgagctgaacatgaaggagaagatcgcccccatccctgagggcagcgccttcttcatcctgagcaagaccaaccccatccgggtgggctgccacaagctgatcaaccaccacatcttcaccaacctgatcctggtgttcatcatgctgagcagcgctgccctggccgctgaggaccccatccgcagccacagcttcaggaacaccatcctgggctactttgattatgccttcaccgccatcttcaccgtggagatcctgctgaagatgaccacctttggagccttcctgcacaagggggccttctgcaggaactacttcaacctgctggacatgctggtggtgggcgtgtccctggtgtcctttggcatccagagcagcgccatctctgtggtgaagatcctgcgggtgctgcgggtgctgcggcccctgcgggccatcaacagagccaagggcctgaagcacgtggtgcagtgtgtgtttgtggccatccgcaccatcggcaacatcatgattgtgaccaccctgctgcagttcatgtttgcctgcatcggcgtgcagctgttcaagggcaagttctaccgctgcacagatgaggccaagagcaaccctgaggagtgccggggcctcttcatcctgtacaaggatggagatgtggacagccctgtggtgcgggagcgcatctggcagaacagcgacttcaactttgacaacgtgctgagcgccatgatggccctcttcaccgtgtccacctttgagggctggccagccctgctgtacaaggccatcgacagcaatggagagaacatcggccccatctacaaccaccgggtggagatcagcatcttcttcatcatctacatcatcatcgtggccttcttcatgatgaacatctttgtgggcttcgtcatcgtgaccttccaggagcagggcgagaaggagtacaagaactgtgagctggacaagaaccagaggcagtgtgtggagtatgccctgaaggcccggcccctgcggcgctacatccccaagaacccctaccagtacaagttctggtacgtggtgaacagcagcccctttgagtacatgatgtttgtgctgatcatgctgaacaccctgtgcctggccatgcagcactatgagcagagcaagatgtttaatgatgccatggacatcctgaacatggtgttcaccggggtcttcaccgtggagatggtgctgaaggtgattgccttcaagcccaagggctacttcagtgatgcctggaacacctttgacagcctcatcgtcatcggcagcatcattgatgtggccctgtctgaggccgacaacagcgaggagagcaaccgcatcagcatcaccttcttccgcctcttccgggtgatgaggctggtgaagctgctgagcagaggagagggcatccgcaccctgctgtggaccttcatcaagagcttccaggccctgccctacgtggccctgctgattgccatgctgttcttcatctatgctgtgattggcatgcagatgtttgggaaggtggccatgagggacaacaaccagatcaacagaaacaacaacttccagaccttcccccaggccgtgctgctgctcttccgctgtgccactggagaggcctggcaggagatcatgctggcctgcctgcccgggaagctgtgtgaccctgagagtgactacaaccctggagaggagtacacctgtggcagcaactttgccatcgtgtacttcatctccttctacatgctgtgtgccttcctgatcatcaacctgtttgtggccgtcatcatggacaactttgactacctgacccgggactggagcatcctgggcccccaccacctggatgagttcaagaggatctggagcgaatatgaccctgaggccaagggccgcatcaagcacctggatgtggtgaccctgctgcggcgcatccagccccccctgggctttgggaagctgtgcccccaccgggtggcctgcaagaggctggtggccatgaacatgcccctgaacagtgatggcaccgtgatgtttaatgccaccctgtttgccctggtgaggacagccctgaagatcaagacagagggcaacctggagcaggccaatgaggagctgcgggccgtcatcaagaagatctggaagaagacctccatgaagctgctggaccaggtggtgcccccagctggagatgatgaggtgacagtgggcaagttctacgccaccttcctgatccaggactacttcaggaagttcaagaagaggaaggagcagggcctggtgggcaagtacccagccaagaacaccaccatcgccctgcaggccggcctgcggaccctgcatgacatcggccctgagatccggcgggccatcagctgtgacctgcaggatgatgagcctgaggagaccaagcgggaggaggaggatgatgtgttcaagagaaatggagccctgctgggcaaccacgtgaaccacgtgaacagcgaccggcgggacagcctgcagcagaccaacaccacccaccggcccctgcacgtgcagaggcccagcatccccccagccagtgacacagagaagcccctcttccccccagctggcaacagcgtgtgccacaaccaccacaaccacaacagcatcggcaagcaggtgcccaccagcaccaatgccaacctgaacaatgccaacatgagcaaggccgcccacggcaagaggcccagcatcggcaacctggagcacgtgtctgaaaatggccaccacagcagccacaagcatgaccgggagccccagaggaggagctctgtgaagagaagtgacagcggagatgagcagctgcccaccatctgccgggaggaccctgagatccacggctacttccgggacccccactgcctgggggagcaggagtacttcagcagcgaggagtgctatgaagatgacagcagccccacctggagccggcagaactacggctactacagccgctacccaggcaggaacatcgacagcgagcggccccggggctaccaccacccccagggcttcctggaggatgatgacagccctgtgtgctatgacagcagaagaagcccccggcggcggctgctgccccccaccccagccagccacagaagaagcagcttcaactttgagtgcctgcggcggcagagcagccaggaggaggtgcccagcagccccatcttcccccacaggacagccctgcccctgcacctgatgcagcagcagatcatggctgtggccggcctggacagcagcaaggcccagaagtacagccccagccacagcaccaggtcctgggccaccccaccagccaccccaccctacagagactggaccccctgctacacccccctcatccaggtggagcagagcgaggccctggaccaggtgaatggcagcctgcccagcctgcacaggagctcctggtacacagatgagccagacatctcctaccgcaccttcaccccagccagcctgactgtgcccagcagcttcaggaacaagaacagcgacaagcagaggtctgctgacagcctggtggaggccgtgctgatcagcgagggcctgggccgctatgcccgggaccccaagtttgtgtctgccaccaagcatgaaattgctgatgcctgtgacctgaccattgatgagatggagagcgctgccagcaccctgctgaatggaaatgtgcggccccgggccaatggagatgtgggccccctgagccaccggcaggactatgagctgcaggactttggacctggctacagtgatgaggagccagaccccggcagagatgaggaggacctggctgatgagatgatctgcatcaccaccctgtag

SEQ ID NO: 145837 - DNA, 5565 bp, synthetic construct
  misc_feature 1..5565: note = Description of Artificial Sequence: Synthetic coding sequence
  source 1..5565: mol_type = other DNA
gccaacggcacagaatgtcgcagcggctgggtgggccccaacggcggcatcaccaactttgacaactttgcctttgccatgctgactgtgttccagtgcatcaccatggagggctggacagatgtgctgtactggatgaatgatgccatgggctttgagctgccctgggtgtactttgtgtccctggtgatcttcggcagcttctttgtgctgaacctggtgctgggcgtgctgtctggagagttcagcaaggagcgggagaaggccaaggcccggggggacttccagaagctgcgggagaagcagcagctggaggaggacctgaagggctacctggactggatcacccaggctgaagatattgatcctgaaaatgaggaggagggcggggaggagggcaagaggaacacctccatgcccaccagcgagacagagagcgtgaacacagaaaatgtgtctggagaaggagaaaatagaggctgctgcggcagcctgtggtgctggtggaggagaagaggagctgccaaggccggccccagcggctgccgccgctggggccaggccatcagcaagagcaagctgagccgccgctggaggcgctggaaccgcttcaacagaagacgctgcagagctgctgtgaagtctgtgaccttctactggctggtgattgtgctggtgttcctgaacaccctgaccatcagcagcgagcactacaaccagcctgactggctgacccagatccaggacatcgccaacaaggtgctgctggccctcttcacctgtgagatgctggtgaagatgtacagcctgggcctgcaggcctactttgtgtccctcttcaacagatttgactgctttgtggtgtgtggcggcatcacagagaccatcctggtggagctggagatcatgagccccctgggcatctctgtgttccgctgtgtgcggctgctgcgcatcttcaaggtgaccaggcactggaccagcctgagcaacctggtggccagcctgctgaacagcatgaagagcatcgccagcctgctgctgctgctcttcctgttcatcatcatcttcagcctgctgggcatgcagctgtttggaggcaagttcaactttgatgagacccagaccaagaggagcacctttgacaacttcccccaggccctgctgaccgtcttccagatcctgaccggggaggactggaatgctgtgatgtatgatggcatcatggcctatggaggccccagcagcagcggcatgattgtgtgcatctacttcatcatcctcttcatctgtggcaactacatcctgctgaatgtgttcctggccatcgctgtggacaacctggctgatgctgagagcctgaacacagcccagaaggaggaggccgaggagaaggagaggaagaagatcgccaggaaggagagcctggagaacaagaagaacaacaagccagaggtgaaccagatcgccaacagcgacaacaaggtgaccattgatgactaccgggaggaggatgaggacaaggacccctacccaccctgtgatgtgcctgtgggggaggaggaggaggaggaggaggaggatgagcctgaggtgcctgctggcccccggccccggcgcatcagcgagctgaacatgaaggagaagatcgcccccatccctgagggcagcgccttcttcatcctgagcaagaccaaccccatccgggtgggctgccacaagctgatcaaccaccacatcttcaccaacctgatcctggtgttcatcatgctgagcagcgctgccctggccgctgaggaccccatccgcagccacagcttcaggaacaccatcctgggctactttgattatgccttcaccgccatcttcaccgtggagatcctgctgaagatgaccaccttcggggccttcctgcacaagggggccttctgcaggaactacttcaacctgctggacatgctggtggtgggcgtgtccctggtgtcctttggcatccagagcagcgccatctctgtggtgaagatcctgcgggtgctgcgggtgctgcggcccctgcgggccatcaacagagccaagggcctgaagcacgtggtgcagtgtgtgtttgtggccatccgcaccatcggcaacatcatgattgtgaccaccctgctgcagttcatgtttgcctgcattggagtgcagctgttcaagggcaagttctaccgctgcacagatgaggccaagagcaacccagaagaatgtcggggcctcttcatcctgtacaaggatggagatgtggacagccctgtggtgcgggagcgcatctggcagaacagcgacttcaactttgacaacgtgctgagcgccatgatggccctcttcaccgtgtccacctttgagggctggccagccctgctgtacaaggccatcgacagcaatggagaaaatattggccccatctacaaccaccgggtggagatcagcatcttcttcatcatctacatcatcatcgtggccttcttcatgatgaacatctttgtgggctttgtgattgtgaccttccaggagcagggcgagaaggagtacaagaactgtgagctggacaagaaccagaggcagtgtgtggagtatgccctgaaggcccggcccctgcggcgctacatccccaagaacccctaccagtacaagttctggtacgtggtgaacagcagcccctttgagtacatgatgtttgtgctgatcatgctgaacaccctgtgcctggccatgcagcactatgagcagagcaagatgtttaatgatgccatggacatcctgaacatggtgttcaccggggtcttcaccgtggagatggtgctgaaggtgattgccttcaagcccaagcactacttcacagatgcctggaacacctttgatgccctgattgtggtgggctctgtggtggacatcgccatcacagaggtgaaccccacagaaagtgaaaatgtgcctgtgcccacagccaccccaggcaacagcgaggagagcaaccgcatcagcatcaccttcttccgcctcttccgggtgatgaggctggtgaagctgctgagcagaggagagggcatccgcaccctgctgtggaccttcatcaagagcttccaggccctgccctacgtggccctgctgattgccatgctgttcttcatctatgctgtgattggcatgcagatgtttgggaaggtggccatgagggacaacaaccagatcaacagaaacaacaacttccagaccttcccccaggccgtgctgctgctcttccgctgtgccactggagaggcctggcaggagatcatgctggcctgcctgcccgggaagctgtgtgaccctgagagtgactacaaccctggagaggagtacacctgtggcagcaactttgccatcgtgtacttcatctccttctacatgctgtgtgccttcctgatcatcaacctgtttgtggccgtcatcatggacaactttgactacctgacccgggactggagcatcctgggcccccaccacctggatgagttcaagaggatctggagcgaatatgaccctgaggccaagggccgcatcaagcacctggatgtggtgaccctgctgcggcgcatccagccccccctgggctttgggaagctgtgcccccaccgggtggcctgcaagaggctggtggccatgaacatgcccctgaacagtgatggcaccgtgatgtttaatgccaccctgtttgccctggtgaggacagccctgaagatcaagacagagggcaacctggagcaggccaatgaggagctgcgggccgtcatcaagaagatctggaagaagacctccatgaagctgctggaccaggtggtgcccccagctggagatgatgaggtgacagtgggcaagttctacgccaccttcctgatccaggactacttcaggaagttcaagaagaggaaggagcagggcctggtgggcaagtacccagccaagaacaccaccatcgccctgcaggccggcctgcggaccctgcatgacatcggccctgagatccggcgggccatcagctgtgacctgcaggatgatgagcctgaggagaccaagcgggaggaggaggatgatgtgttcaagagaaatggagccctgctgggcaaccacgtgaaccacgtgaacagcgaccggcgggacagcctgcagcagaccaacaccacccaccggcccctgcacgtgcagaggcccagcatccccccagccagtgacacagagaagcccctcttccccccagctggcaacagcgtgtgccacaaccaccacaaccacaacagcatcggcaagcaggtgcccaccagcaccaatgccaacctgaacaatgccaacatgagcaaggccgcccacggcaagaggcccagcatcggcaacctggagcacgtgtctgaaaatggccaccacagcagccacaagcatgaccgggagccccagaggaggagctctgtgaagaggacccgctactatgagacctacatccgcagtgacagcggagatgagcagctgcccaccatctgcagagaagatcctgagatccacggctacttccgggacccccactgcctgggggagcaggagtacttcagcagtgaagaatgttatgaagatgacagcagccccacctggagccggcagaactacggctactacagccgctacccaggaagaaatattgattctgagcggccccggggctaccaccacccccagggcttcctggaggatgatgacagccctgtgtgctatgacagccgccgcagcccccggcggcggctgctgccccccaccccagccagccaccggcgcagcagcttcaactttgaatgtctgcggcggcagagcagccaggaggaggtgcccagcagccccatcttcccccacaggacagccctgcccctgcacctgatgcagcagcagatcatggctgtggccggcctggacagcagcaaggcccagaagtacagccccagccacagcaccaggtcctgggccaccccaccagccaccccaccctacagagactggaccccctgctacacccccctcatccaggtggagcagagcgaggccctggaccaggtgaatggcagcctgcccagcctgcacaggagctcctggtacacagatgagccagacatctcctaccgcaccttcaccccagccagcctgactgtgcccagcagcttcaggaacaagaacagcgacaagcagaggtctgctgacagcctggtggaggccgtgctgatcagcgagggcctgggccgctatgcccgggaccccaagtttgtgtctgccaccaagcatgaaattgctgatgcctgtgacctgaccattgatgagatggagagcgctgccagcaccctgctgaatggaaatgtgcggccccgggccaatggagatgtgggccccctgagccaccggcaggactatgagctgcaggactttggacctggctacagtgatgaggagccagaccccggcagagatgaggaggacctggctgatgagatgatctgcatcaccaccctgtag

SEQ ID NO: 145838 - DNA, 1620 bp, synthetic construct
  misc_feature 1..1620: note = Description of Artificial Sequence: Synthetic coding sequence
  source 1..1620: mol_type = other DNA
atgggagagacctggctgtgcccagctgccctgggcctgctgtacaaggccatcgacagcaatggagaaaatattggccccatctacaaccaccgggtggagatcagcatcttcttcatcatctacatcatcatcgtggccttcttcatgatgaacatctttgtgggctttgtgattgtgaccttccaggagcagggcgagaaggagtacaagaactgtgagctggacaagaaccagaggcagtgtgtggagtatgccctgaaggcccggcccctgcggcgctacatccccaagaacccctaccagtacaagttctggtacgtggtgaacagcagcccctttgagtacatgatgtttgtgctgatcatgctgaacaccctgtgcctggccatgcagcactatgagcagagcaagatgtttaatgatgccatggacatcctgaacatggtgttcaccggggtcttcaccgtggagatggtgctgaaggtgattgccttcaagcccaagggctacttcagtgatgcctggaacacctttgacagcctgattgtgattggcagcatcattgatgtggccctgtctgaggccgacaacagcgaggagagcaaccgcatcagcatcaccttcttccgcctcttccgggtgatgaggctggtgaagctgctgagcagaggagagggcatccgcaccctgctgtggaccttcatcaagagcttccaggccctgccctacgtggccctgctgattgccatgctgttcttcatctatgctgtgattggcatgcagatgtttgggaaggtggccatgagggacaacaaccagatcaacagaaacaacaacttccagaccttcccccaggccgtgctgctgctcttccgctgtgccaccggggaggcctggcaggagatcatgctggcctgcctgcccgggaagctgtgtgaccctgagagtgactacaaccctggagaggagtacacctgtggcagcaactttgccatcgtgtacttcatctccttctacatgctgtgtgccttcctgatcatcaacctgtttgtggccgtcatcatggacaactttgactacctgacccgggactggagcatcctgggcccccaccacctggatgagttcaagaggatctggagcgaatatgaccctgaggccaagggccgcatcaagcacctggatgtggtgaccctgctgcggcgcatccagccccccctgggctttgggaagctgtgcccccaccgggtggcctgcaagaggctggtggccatgaacatgcccctgaacagtgatggcaccgtgatgtttaatgccaccctgtttgccctggtgaggacagccctgaagatcaagacagagggcaacctggagcaggccaatgaggagctgcgggctgtgatcaagaagatctggaagaagacctccatgaagctgctggaccaggtggtgcccccagctggagatgatgaggtgacagtgggcaagttctacgccaccttcctgatccaggactacttcaggaagttcaagaagaggaaggagcagggcctggtgggcaagtacccagccaagaacaccaccatcgccctgcagatgctggagaggatgctgtag

SEQ ID NO: 145839 - DNA, 1056 bp, synthetic construct
  misc_feature 1..1056: note = Description of Artificial Sequence: Synthetic coding sequence
  source 1..1056: mol_type = other DNA
atgaatggcctggcccagagccggctggagacctgcatctcctacctgcactgctacagcgctggcctgcggaccctgcatgacatcggccctgagatccggcgggccatcagctgtgacctgcaggatgatgagcctgaggagaccaagcgggaggaggaggatgatgtgttcaagagaaatggagccctgctgggcaaccacgtgaaccacgtgaacagcgaccggcgggacagcctgcagcagaccaacaccacccaccggcccctgcacgtgcagaggcccagcatccccccagccagtgacacagagaagcccctcttccccccagctggcaacagcgtgtgccacaaccaccacaaccacaacagcatcggcaagcaggtgcccaccagcaccaatgccaacctgaacaatgccaacatgagcaaggccgcccacggcaagaggcccagcatcggcaacctggagcacgtgtctgaaaatggccaccacagcagccacaagcatgaccgggagccccagaggaggagctctgtgaagaggacccgctactatgagacctacatccgcagtgacagcggagatgagcagctgcccaccatctgcagagaagatcctgagatccacggctacttccgggacccccactgcctgggggagcaggagtacttcagcagtgaagaatgttatgaagatgacagcagccccacctggagccggcagaactacggctactacagccgctacccaggaagaaatattgattctgagcggccccggggctaccaccacccccagggcttcctggaggatgatgacagccctgtgtgctatgacagccgccgcagcccccggcggcggctgctgccccccaccccagccagccaccggcgcagcagcttcaactttgaatgtctgcggcggcagagcagccaggaggaggtgcccagcagccccatcttcccccacaggacagccctgcccctgcacctgatgcagcagcagagccccctgagcagtgaccacggcagctgccggccccgcttcaagtag

SEQ ID NO: 145840 - DNA, 5901 bp, synthetic construct
  misc_feature 1..5901: note = Description of Artificial Sequence: Synthetic coding sequence
  source 1..5901: mol_type = other DNA
atgtctgagagcgagggcggcaaggacaccaccccagagcccagccctgccaacggggccggccctggccctgagtggggcctgtgccccggccccccagctgtggagggggagagcagcggggccagcggcctgggcacccccaagagaagaaaccagcacagcaagcacaagacagtggccgtggccagcgcccagaggagcccccgggccctcttctgcctgaccctggccaaccccctgcggcgcagctgcatcagcatcgtggagtggaagccctttgacatcctgatcctgctgaccatctttgccaactgtgtggccctgggcgtgtacatccccttcccagaagatgacagcaacacagccaaccacaacctggagcaggtggagtatgtgttcctggtgatcttcaccgtggagaccgtgctgaagatcgtggcctacggcctggtgctgcaccccagcgcctacatcagaaatggctggaacctgctggacttcatcatcgtggtggtgggcctcttctctgtgctgctggagcagggccctggccggcctggagatgccccccacactggaggcaagccaggcggctttgatgtgaaggccctgcgggccttccgggtgctgcggcccctgcggctggtgtctggagtgcccagcctgcacatcgtgctgaacagcatcatgaaggccctggtgcccctgctgcacatcgccctgctggtgctcttcgtcatcatcatctatgccatcatcggcctggagctgttcctgggccgcatgcacaagacctgctacttcctgggcagtgacatggaggccgaggaggaccccagcccctgtgccagcagcggcagcggccgggcctgcaccctgaaccagacagagtgccggggccgctggccaggccccaatggaggcatcaccaactttgacaacttcttctttgccatgctgaccgtcttccagtgtgtgaccatggagggctggacagatgtgctgtactggatgcaggatgccatgggctatgagctgccctgggtgtactttgtgtccctggtgatcttcggcagcttctttgtgctgaacctggtgctgggcgtgctgagcggggagttcagcaaggagcgggagaaggccaaggcccggggggacttccagaagcagcgggagaagcagcagatggaggaggacctgcggggctacctggactggatcacccaggccgaggagctggacatggaggaccccagcgcagatgacaacctgggcccccagctggccgagctgaccaacagaagaagaggccgcctgcgctggttcagccacagcaccaggagcacccacagcaccagcagccacgccagcctgcctgccagtgacaccggctccatgacagagacccagggagatgaagatgaggaggagggcgccctggccagctgcacccgctgcctgaacaagatcatgaagaccagggtgtgccggcggctgcggcgggccaacagagtgctgcgggcccgctgccggcgggctgtgaagagcaatgcctgctactgggccgtgctgctgctggtgttcctgaacaccctgaccatcgccagcgagcaccacggccagcctgtgtggctgacccagatccaggagtatgccaacaaggtgctgctgtgcctcttcaccgtggagatgctgctgaagctgtatggcctgggccccagcgcctacgtgagcagcttcttcaacagatttgactgctttgtggtgtgtggcggcatcctggagaccaccctggtggaggtgggcgccatgcagcccctgggcatctctgtgctgcgctgtgtgcggctgctgcgcatcttcaaggtgaccaggcactgggccagcctgagcaacctggtggccagcctgctgaacagcatgaagagcatcgccagcctgctgctgctgctcttcctgttcatcatcatcttcagcctgctgggcatgcagctgtttggaggcaagttcaactttgaccagacccacaccaagaggagcacctttgacaccttcccccaggccctgctgaccgtcttccagatcctgaccggggaggactggaatgtggtgatgtatgatggcatcatggcctatggaggccccttcttccctggcatgctggtgtgcatctacttcatcatcctcttcatctgtggcaactacatcctgctgaatgtgttcctggccatcgctgtggacaacctggccagcggagatgctggaacagccaaggacaagggcggggagaagagcaatgagaaggacctgccccaggagaatgaaggcctggtgcctggggtggagaaggaggaggaggagggcgcccggcgggagggcgctgacatggaggaggaggaggaggaggaggaggaggaggaggaggaggaggaggaggagggcgctgggggcgtggagctgctgcaggaggtggtgcccaaggagaaggtggtgcccatccctgagggcagcgccttcttctgcctgagccagaccaaccccctgaggaagggctgccacaccctcatccaccaccacgtgttcaccaacctgatcctggtgttcatcatcctgagctctgtgtccctggccgctgaggaccccatccgggcccacagcttcaggaaccacatcctgggctactttgattatgccttcaccagcatcttcaccgtggagatcctgctgaagatgacagtgtttggagccttcctgcaccggggcagcttctgccgctcctggttcaacatgctggacctgctggtggtgtctgtgtccctcatcagctttggcatccacagcagcgccatctctgtggtgaagatcctgcgggtgctgcgggtgctgcggcccctgcgggccatcaacagagccaagggcctgaagcacgtggtgcagtgtgtgtttgtggccatccgcaccatcggcaacatcatgattgtgaccaccctgctgcagttcatgtttgcctgcatcggcgtgcagctgttcaagggcaagttctacacctgcacagatgaggccaagcacaccccccaggagtgcaagggcagcttcctggtgtacccagatggagatgtgtcccggcccctggtgcgggagcggctgtgggtgaacagcgacttcaactttgacaacgtgctgagcgccatgatggccctcttcaccgtgtccacctttgagggctggccagccctgctgtacaaggccattgatgcctatgcagaggaccacggccccatctacaactacagagtggagatctctgtgttcttcatcgtgtacatcatcatcatcgccttcttcatgatgaacatctttgtgggcttcgtcatcatcaccttccgggcccagggcgagcaggagtaccagaactgtgagctggacaagaaccagaggcagtgtgtggagtatgccctgaaggcccagcccctgcggcgctacatccccaagaacccccaccagtacagagtgtgggccaccgtgaacagcgctgcctttgagtacctgatgttcctgctgatcctgctgaacacagtggccctggccatgcagcactatgagcagacagcccccttcaactatgccatggacatcctgaacatggtgttcaccggcctcttcaccatcgagatggtgctgaagatcatcgccttcaagcccaagcactacttcacagatgcctggaacacctttgatgccctgattgtggtgggcagcatcgtggacattgctgtgacagaggtgaacaatggaggccacctgggggagagcagcgaggacagcagccgcatcagcatcaccttcttccgcctcttccgggtgatgaggctggtgaagctgctgagcaagggggagggcatccgcaccctgctgtggaccttcatcaagagcttccaggccctgccctacgtggccctgctgattgccatgatcttcttcatctatgctgtgattggcatgcagatgtttgggaaggtggccctgcaggacggcacccagatcaacagaaacaacaacttccagaccttcccccaggccgtgctgctgctcttccgctgtgccaccggggaggcctggcaggagatcatgctggccagcctgcccggcaacagatgtgaccctgagagtgactttggacctggagaggagttcacctgtggcagcaactttgccatcgcctacttcatctccttcttcatgctgtgtgccttcctgatcatcaacctgtttgtggccgtcatcatggacaactttgactacctgacccgggactggagcatcctgggcccccaccacctggatgagttcaagaggatctggagcgaatatgaccccggggccaagggccgcatcaagcacctggatgtggtggccctgctgcggcgcatccagccccccctgggctttgggaagctgtgcccccaccgggtggcctgcaagaggctggtggccatgaacatgcccctgaacagtgatggcaccgtgaccttcaatgccaccctgtttgccctggtgaggaccagcctgaagatcaagacagagggcaacctggagcaggccaaccaggagctgagaattgtcatcaagaagatctggaagaggatgaagcagaagctgctggatgaggtgatccccccaccagatgaggaggaggtgacagtgggcaagttctacgccaccttcctgatccaggactacttcaggaagttcagaagaaggaaggagaagggcctgctgggcaatgatgctgcccccagcaccagcagcgccctgcaggccggcctgcggagcctgcaggacctgggccctgagatgaggcaggccctgacctgtgacacagaggaggaggaggaggagggccaggagggcgtggaggaggaggatgagaaggacctggagaccaacaaggccaccatggtgtcccagcccagcgcccggcggggcagcggcatctctgtgtccctgcctgtgggggaccggctgcctgacagcctgagctttggccccagtgatgatgaccggggcacccccaccagcagccagcccagcgtgccccaggccggcagcaacacccaccggcggggcagcggggccctgatcttcaccatccctgaggagggcaacagccagcccaagggcaccaagggccagaacaagcaggatgaagatgaggaggtgcctgaccggctgagctacctggatgagcaggccggcaccccaccctgcagcgtgctgctgcccccccaccgggcccagcgctacatggatggccacctggtgccccggcggcggctgctgccccccaccccagctggcaggaagcccagcttcaccatccagtgcctgcagaggcagggcagctgtgaggacctgcccatccctggcacctaccaccggggcaggaacagcggccccaacagagcccagggctcctgggccaccccaccccagaggggccgcctgctgtatgcccccctgctgctggtggaggagggcgctgctggggagggctacctgggccgcagcagcggccccctgcggaccttcacctgcctgcacgtgcccggcacccacagcgaccccagccacggcaagaggggcagcgctgacagcctggtggaggccgtgctgatcagcgagggcctgggcctgtttgcccgggaccccaggtttgtggccctggccaagcaggagattgctgatgcctgccgcctgaccctggatgagatggacaatgctgccagtgacctgctggcccagggcaccagcagcctgtacagtgatgaggagagcatcctgagcagatttgatgaggaggacctgggagatgagatggcctgtgtgcacgccctgtag

SEQ ID NO: 145841 - DNA, 5739 bp, synthetic construct
  misc_feature 1..5739: note = Description of Artificial Sequence: Synthetic coding sequence
  source 1..5739: mol_type = other DNA
atgtctgagagcgagggcggcaagggggagcgcatcctgcccagcctgcagaccctgggcgccagcatcgtggagtggaagccctttgacatcctgatcctgctgaccatctttgccaactgtgtggccctgggcgtgtacatccccttcccagaagatgacagcaacacagccaaccacaacctggagcaggtggagtatgtgttcctggtgatcttcaccgtggagaccgtgctgaagatcgtggcctacggcctggtgctgcaccccagcgcctacatcagaaatggctggaacctgctggacttcatcatcgtggtggtgggcctcttctctgtgctgctggagcagggccctggccggcctggagatgccccccacactggaggcaagccaggcggctttgatgtgaaggccctgcgggccttccgggtgctgcggcccctgcggctggtgtctggagtgcccagcctgcacatcgtgctgaacagcatcatgaaggccctggtgcccctgctgcacatcgccctgctggtgctgtttgtgatcatcatctatgccatcatcggcctggagctgttcctgggccgcatgcacaagacctgctacttcctgggcagtgacatggaggccgaggaggaccccagcccctgtgccagcagcggcagcggccgggcctgcaccctgaaccagacagaatgtcggggccgctggccaggccccaacggcggcatcaccaactttgacaacttcttctttgccatgctgactgtgttccagtgtgtgaccatggagggctggacagatgtgctgtactggatgcaggatgccatgggctatgagctgccctgggtgtactttgtgtccctggtgatcttcggcagcttctttgtgctgaacctggtgctgggcgtgctgtctggagagttcagcaaggagcgggagaaggccaaggcccggggggacttccagaagcagcgggagaagcagcagatggaggaggacctgcggggctacctggactggatcacccaggccgaggagctggacatggaggaccccagcgcagatgacaacctgggctccatggccgaggagggccgggccggccaccggccccagctggccgagctgaccaacagaagaagaggccgcctgcgctggttcagccacagcaccaggagcacccacagcaccagcagccacgccagcctgcctgccagtgacaccggctccatgacagagacccagggagatgaagatgaggaggagggcgccctggccagctgcacccgctgcctgaacaagatcatgaagaccagggtgtgccggcggctgcggcgggccaacagagtgctgcgggcccgctgccggcgggctgtgaagagcaatgcctgctactgggccgtgctgctgctggtgttcctgaacaccctgaccatcgccagcgagcaccacggccagcctgtgtggctgacccagatccaggagtatgccaacaaggtgctgctgtgcctcttcaccgtggagatgctgctgaagctgtatggcctgggccccagcgcctacgtgagcagcttcttcaacagatttgactgctttgtggtgtgtggcggcatcctggagaccaccctggtggaggtgggcgccatgcagcccctgggcatctctgtgctgcgctgtgtgcggctgctgcgcatcttcaaggtgaccaggcactgggccagcctgagcaacctggtggccagcctgctgaacagcatgaagagcatcgccagcctgctgctgctgctcttcctgttcatcatcatcttcagcctgctgggcatgcagctgtttggaggcaagttcaactttgaccagacccacaccaagaggagcacctttgacaccttcccccaggccctgctgaccgtcttccagatcctgaccggggaggactggaatgtggtgatgtatgatggcatcatggcctatggaggccccttcttccctggcatgctggtgtgcatctacttcatcatcctcttcatctgtggcaactacatcctgctgaatgtgttcctggccatcgctgtggacaacctggccagcggagatgctggaacagccaaggacaagggcggggagaagagcaatgagaaggacctgccccaggagaatgaaggcctggtgcctggggtggagaaggaggaggaggagggcgcccggcgggagggcgctgacatggaggaggaggaggaggaggaggaggaggaggaggaggaggaggaggaggagggcgctgggggcgtggagctgctgcaggaggtggtgcccaaggagaaggtggtgcccatccctgagggcagcgccttcttctgcctgagccagaccaaccccctgaggaagggctgccacaccctcatccaccaccacgtgttcaccaacctgatcctggtgttcatcatcctgagctctgtgtccctggccgctgaggaccccatccgggcccacagcttcaggaaccacatcctgggctactttgattatgccttcaccagcatcttcaccgtggagatcctgctgaagatgacagtgtttggagccttcctgcaccggggcagcttctgccgctcctggttcaacatgctggacctgctggtggtgtctgtgtccctcatcagctttggcatccacagcagcgccatctctgtggtgaagatcctgcgggtgctgcgggtgctgcggcccctgcgggccatcaacagagccaagggcctgaagcacgtggtgcagtgtgtgtttgtggccatccgcaccatcggcaacatcatgattgtgaccaccctgctgcagttcatgtttgcctgcatcggcgtgcagctgttcaagggcaagttctacacctgcacagatgaggccaagcacaccccccaggagtgcaagggcagcttcctggtgtacccagatggagatgtgtcccggcccctggtgcgggagcggctgtgggtgaacagcgacttcaactttgacaacgtgctgagcgccatgatggccctcttcaccgtgtccacctttgagggctggccagccctgctgtacaaggccattgatgcctatgcagaggaccacggccccatctacaactacagagtggagatctctgtgttcttcatcgtgtacatcatcatcatcgccttcttcatgatgaacatctttgtgggcttcgtcatcatcaccttccgggcccagggcgagcaggagtaccagaactgtgagctggacaagaaccagaggcagtgtgtggagtatgccctgaaggcccagcccctgcggcgctacatccccaagaacccccaccagtacagagtgtgggccaccgtgaacagcgctgcctttgagtacctgatgttcctgctgatcctgctgaacacagtggccctggccatgcagcactatgagcagacagcccccttcaactatgccatggacatcctgaacatggtgttcaccggcctcttcaccatcgagatggtgctgaagatcatcgccttcaagcccaagcactacttcacagatgcctggaacacctttgatgccctgattgtggtgggcagcatcgtggacattgctgtgacagaggtgaacaatggaggccacctgggggagagcagcgaggacagcagccgcatcagcatcaccttcttccgcctcttccgggtgatgaggctggtgaagctgctgagcaagggggagggcatccgcaccctgctgtggaccttcatcaagagcttccaggccctgccctacgtggccctgctgattgccatgatcttcttcatctatgctgtgattggcatgcagatgtttgggaaggtggccctgcaggacggcacccagatcaacagaaacaacaacttccagaccttcccccaggccgtgctgctgctcttccgctgtgccaccggggaggcctggcaggagatcatgctggccagcctgcccggcaacagatgtgaccctgagagtgactttggacctggagaggagttcacctgtggcagcaactttgccatcgcctacttcatctccttcttcatgctgtgtgccttcctgatcatcaacctgtttgtggccgtcatcatggacaactttgactacctgacccgggactggagcatcctgggcccccaccacctggatgagttcaagaggatctggagcgaatatgaccccggggccaagggccgcatcaagcacctggatgtggtggccctgctgcggcgcatccagccccccctgggctttgggaagctgtgcccccaccgggtggcctgcaagaggctggtggccatgaacatgcccctgaacagtgatggcaccgtgaccttcaatgccaccctgtttgccctggtgaggaccagcctgaagatcaagacagagggcaacctggagcaggccaaccaggagctgagaattgtcatcaagaagatctggaagaggatgaagcagaagctgctggatgaggtgatccccccaccagatgaggaggaggtgacagtgggcaagttctacgccaccttcctgatccaggactacttcaggaagttcagaagaaggaaggagaagggcctgctgggcaatgatgctgcccccagcaccagcagcgccctgcaggccggcctgcggagcctgcaggacctgggccctgagatgaggcaggccctgacctgtgacacagaggaggaggaggaggagggccaggagggcgtggaggaggaggatgagaaggacctggagaccaacaaggccaccatggtgtcccagcccagcgcccggcggggcagcggcatctctgtgtccctgcctgtgggggaccggctgcctgacagcctgagctttggccccagtgatgatgaccggggcacccccaccagcagccagcccagcgtgccccaggccggcagcaacacccaccggcggggcagcggggccctgatcttcaccatccctgaggagggcaacagccagcccaagggcaccaagggccagaacaagcaggatgaagatgaggaggtgcctgaccggctgagctacctggatgagcaggccggcaccccaccctgcagcgtgctgctgcccccccaccgggcccagcgctacatggatggccacctggtgccccggcggcggctgctgccccccaccccagctggcaggaagcccagcttcaccatccagtgcctgcagaggcagggcagctgtgaggacctgcccatccctggcacctaccaccggggcaggaacagcggccccaacagagcccagggctcctgggccaccccaccccagaggggccgcctgctgtatgcccccctgctgctggtggaggagggcgctgctggggagggctacctgggccgcagcagcggccccctgcggaccttcacctgcctgcacgtgcccggcacccacagcgaccccagccacggcaagaggggcagcgctgacagcctggtggaggccgtgctgatcagcgagggcctgggcctgtttgcccgggaccccaggtttgtggccctggccaagcaggagattgctgatgcctgccgcctgaccctggatgagatggacaatgctgccagtgacctgctggcccagggcaccagcagcctgtacagtgatgaggagagcatcctgagcagatttgatgaggaggacctgggagatgagatggcctgtgtgcacgccctgtag

SEQ ID NO: 145842 - DNA, 5934 bp, synthetic construct
  misc_feature 1..5934: note = Description of Artificial Sequence: Synthetic coding sequence
  source 1..5934: mol_type = other DNA
atgtctgagagcgagggcggcaaggacaccaccccagagcccagccctgccaacggggccggccctggccctgagtggggcctgtgccccggccccccagctgtggagggggagagcagcggggccagcggcctgggcacccccaagagaagaaaccagcacagcaagcacaagacagtggccgtggccagcgcccagaggagcccccgggccctcttctgcctgaccctggccaaccccctgcggcgcagctgcatcagcatcgtggagtggaagccctttgacatcctgatcctgctgaccatctttgccaactgtgtggccctgggcgtgtacatccccttcccagaagatgacagcaacacagccaaccacaacctggagcaggtggagtatgtgttcctggtgatcttcaccgtggagaccgtgctgaagatcgtggcctacggcctggtgctgcaccccagcgcctacatcagaaatggctggaacctgctggacttcatcatcgtggtggtgggcctcttctctgtgctgctggagcagggccctggccggcctggagatgccccccacactggaggcaagccaggcggctttgatgtgaaggccctgcgggccttccgggtgctgcggcccctgcggctggtgtctggagtgcccagcctgcacatcgtgctgaacagcatcatgaaggccctggtgcccctgctgcacatcgccctgctggtgctcttcgtcatcatcatctatgccatcatcggcctggagctgttcctgggccgcatgcacaagacctgctacttcctgggcagtgacatggaggccgaggaggaccccagcccctgtgccagcagcggcagcggccgggcctgcaccctgaaccagacagagtgccggggccgctggccaggccccaatggaggcatcaccaactttgacaacttcttctttgccatgctgaccgtcttccagtgtgtgaccatggagggctggacagatgtgctgtactggatgcaggatgccatgggctatgagctgccctgggtgtactttgtgtccctggtgatcttcggcagcttctttgtgctgaacctggtgctgggcgtgctgagcggggagttcagcaaggagcgggagaaggccaaggcccggggggacttccagaagcagcgggagaagcagcagatggaggaggacctgcggggctacctggactggatcacccaggccgaggagctggacatggaggaccccagcgcagatgacaacctgggctccatggccgaggagggccgggccggccaccggccccagctggccgagctgaccaacagaagaagaggccgcctgcgctggttcagccacagcaccaggagcacccacagcaccagcagccacgccagcctgcctgccagtgacaccggctccatgacagagacccagggagatgaagatgaggaggagggcgccctggccagctgcacccgctgcctgaacaagatcatgaagaccagggtgtgccggcggctgcggcgggccaacagagtgctgcgggcccgctgcagaagagctgtgaagagcaatgcctgctactgggccgtgctgctgctggtgttcctgaacaccctgaccatcgccagcgagcaccacggccagcctgtgtggctgacccagatccaggagtatgccaacaaggtgctgctgtgcctcttcaccgtggagatgctgctgaagctgtatggcctgggccccagcgcctacgtgtcctccttcttcaacagatttgactgctttgtggtgtgtggcggcatcctggagaccaccctggtggaggtgggcgccatgcagcccctgggcatctctgtgctgcgctgtgtgcggctgctgcgcatcttcaaggtgaccaggcactgggccagcctgagcaacctggtggccagcctgctgaacagcatgaagagcatcgccagcctgctgctgctgctcttcctgttcatcatcatcttcagcctgctgggcatgcagctgtttggaggcaagttcaactttgaccagacccacaccaagaggagcacctttgacaccttcccccaggccctgctgactgtgttccagatcctgactggagaggactggaatgtggtgatgtatgatggcatcatggcctacggcggccccttcttccctggcatgctggtgtgcatctacttcatcatcctcttcatctgtggcaactacatcctgctgaatgtgttcctggccatcgctgtggacaacctggccagcggagatgctggaacagccaaggacaagggcggggagaagagcaatgagaaggacctgccccaggagaatgaaggcctggtgcctggggtggagaaggaggaggaggagggcgcccggcgggagggcgctgacatggaggaggaggaggaggaggaggaggaggaggaggaggaggaggaggaggagggcgctgggggcgtggagctgctgcaggaggtggtgcccaaggagaaggtggtgcccatccctgagggcagcgccttcttctgcctgagccagaccaaccccctgaggaagggctgccacaccctcatccaccaccacgtgttcaccaacctgatcctggtgttcatcatcctgagctctgtgtccctggccgctgaggaccccatccgggcccacagcttcaggaaccacatcctgggctactttgattatgccttcaccagcatcttcaccgtggagatcctgctgaagatgacagtgtttggagccttcctgcaccggggcagcttctgccgctcctggttcaacatgctggacctgctggtggtgtctgtgtccctcatcagctttggcatccacagcagcgccatctctgtggtgaagatcctgcgggtgctgcgggtgctgcggcccctgcgggccatcaacagagccaagggcctgaagcacgtggtgcagtgtgtgtttgtggccatccgcaccatcggcaacatcatgattgtgaccaccctgctgcagttcatgtttgcctgcattggagtgcagctgttcaagggcaagttctacacctgcacagatgaggccaagcacaccccccaggagtgcaagggcagcttcctggtgtacccagatggagatgtgtcccggcccctggtgcgggagcggctgtgggtgaacagcgacttcaactttgacaacgtgctgagcgccatgatggccctcttcaccgtgtccacctttgagggctggccagccctgctgtacaaggccattgatgcctatgcagaagatcatggccccatctacaactacagagtggagatcagcgtcttcttcatcgtgtacatcatcatcatcgccttcttcatgatgaacatctttgtgggctttgtgatcatcaccttccgggcccagggcgagcaggagtaccagaactgtgagctggacaagaaccagaggcagtgtgtggagtatgccctgaaggcccagcccctgcggcgctacatccccaagaacccccaccagtacagagtgtgggccaccgtgaacagcgctgcctttgagtacctgatgttcctgctgatcctgctgaacacagtggccctggccatgcagcactatgagcagacagcccccttcaactatgccatggacatcctgaacatggtgttcaccggcctcttcaccatcgagatggtgctgaagatcatcgccttcaagcccaagcactacttcacagatgcctggaacacctttgatgccctgattgtggtgggcagcatcgtggacattgctgtgacagaggtgaacaacggcggccacctgggggagagcagcgaggacagcagccgcatcagcatcaccttcttccgcctcttccgggtgatgaggctggtgaagctgctgagcaaaggagagggcatccgcaccctgctgtggaccttcatcaagagcttccaggccctgccctacgtggccctgctgattgccatgatcttcttcatctatgctgtgattggcatgcagatgtttgggaaggtggccctgcaggacggcacccagatcaacagaaacaacaacttccagaccttcccccaggccgtgctgctgctcttccgctgtgccactggagaggcctggcaggagatcatgctggccagcctgcccggcaacagatgtgaccctgagagtgactttggacctggagaggagttcacctgtggcagcaactttgccatcgcctacttcatctccttcttcatgctgtgtgccttcctgatcatcaacctgtttgtggccgtcatcatggacaactttgactacctgacccgggactggagcatcctgggcccccaccacctggatgagttcaagaggatctggagcgaatatgaccccggggccaagggccgcatcaagcacctggatgtggtggccctgctgcggcgcatccagccccccctgggctttgggaagctgtgcccccaccgggtggcctgcaagaggctggtggccatgaacatgcccctgaacagtgatggcaccgtgaccttcaatgccaccctgtttgccctggtgaggaccagcctgaagatcaagacagagggcaacctggagcaggccaaccaggagctgcgcatcgtcatcaagaagatctggaagaggatgaagcagaagctgctggatgaagtcatccccccaccagatgaggaggaggtgacagtgggcaagttctacgccaccttcctgatccaggactacttcaggaagttcagaagaaggaaggagaagggcctgctgggcaatgatgctgcccccagcaccagcagcgccctgcaggccggcctgcggagcctgcaggacctgggccctgagatgaggcaggccctgacctgtgacacagaggaggaggaggaggagggccaggagggcgtggaggaggaggatgagaaggacctggagaccaacaaggccaccatggtgtcccagcccagcgcccggcggggcagcggcatctctgtgtccctgcctgtgggggaccggctgcctgacagcctgagctttggccccagtgatgatgaccggggcacccccaccagcagccagcccagcgtgccccaggccggcagcaacacccacagaagaggcagcggggccctgatcttcaccatccctgaggagggcaacagccagcccaagggcaccaagggccagaacaagcaggatgaagatgaggaggtgcctgaccggctgagctacctggatgagcaggccggcaccccaccctgcagcgtgctgctgcccccccaccgggcccagcgctacatggatggccacctggtgccccggcggcggctgctgccccccaccccagctggcaggaagcccagcttcaccatccagtgcctgcagaggcagggcagctgtgaggacctgcccatccctggcacctaccaccggggcagaaattctggccccaacagagcccagggctcctgggccaccccaccccagaggggccgcctgctgtatgcccccctgctgctggtggaggagggcgccgccggggagggctacctgggccgcagcagcggccccctgcggaccttcacctgcctgcacgtgcccggcacccacagcgaccccagccacggcaagaggggcagcgctgacagcctggtggaggccgtgctgatcagcgagggcctgggcctgtttgcccgggaccccaggtttgtggccctggccaagcaggagattgctgatgcctgccgcctgaccctggatgagatggacaatgctgccagtgacctgctggcccagggcaccagcagcctgtacagtgatgaggagagcatcctgagcagatttgatgaggaggacctgggagatgagatggcctgtgtgcacgccctgtag

SEQ ID NO: 145843 - DNA, 5622 bp, synthetic construct
  misc_feature 1..5622: note = Description of Artificial Sequence: Synthetic coding sequence
  source 1..5622: mol_type = other DNA
atggagcccagcagcccccaggatgagggcctgaggaagaagcagcccaagaagcctgtgcctgagatcctgcccaggcctccccgggccctcttctgcctgaccctggagaaccccctgaggaaggcctgcatcagcatcgtggagtggaagccctttgagaccatcatcctgctgaccatctttgccaactgtgtggccctggccgtgtacctgcccatgccagaagatgacaacaacagcctgaacctgggcctggagaagctggagtacttcttcctgattgtgttcagcattgaagctgccatgaagatcatcgcctacggcttcctgttccaccaggatgcctacctgcggagcggctggaatgtgctggacttcaccatcgtgttcctgggcgtcttcaccgtcatcctggagcaggtgaatgtcatccagagccacacagcccccatgagcagcaaaggagctggcctggatgtgaaggccctgcgggccttccgggtgctgcggcccctgcggctggtgtctggagtgcccagcctgcaggtggtgctgaacagcatcttcaaggccatgctgcccctcttccacatcgccctgctggtgctcttcatggtgatcatctatgccatcatcggcctggagctgttcaagggcaagatgcacaagacctgctacttcatcggcacagacatcgtggccaccgtggagaatgaggagcccagcccctgtgccaggacaggcagcggccgccgctgcaccatcaatggaagtgagtgccggggcggctggccaggccccaaccacggcatcacccactttgacaactttggcttctccatgctgactgtgtaccagtgcatcaccatggagggctggacagatgtgctgtactgggtgaatgatgccatcggaaatgagtggccctggatctactttgtgaccctcatcctgctgggcagcttcttcatcctgaacctggtgctgggcgtgctgagcggggagttcaccaaggagcgggagaaggccaagagccggggcaccttccagaagctgcgggagaagcagcagctggatgaggacctgcggggctacatgtcctggatcacccagggcgaggtgatggatgtggaggacttccgggagggcaagctgagcctggatgaaggaggcagtgacacagagagcctgtatgaaattgctggcctgaacaagatcatccagttcatccgccactggaggcagtggaaccgcatcttccgctggaagtgccacgacatcgtgaagagcaaggtgttctactggctggtgatcctgattgtggccctgaacaccctgagcatcgccagcgagcaccacaaccagcccctgtggctgacccggctgcaggacatcgccaacagagtgctgctgagcctcttcaccacagagatgctgatgaagatgtatggcctgggcctgcggcagtacttcatgagcatcttcaacagatttgactgctttgtggtgtgcagcggcatcctggagatcctgctggtggagagcggggccatgacccccctgggcatctctgtgctgcgctgcatccggctgctgcgcatcttcaagatcaccaagtactggaccagcctgagcaacctggtggccagcctgctgaacagcatccgcagcatcgccagcctgctgctgctgctcttcctgttcatcgtcatctttgccctgctgggcatgcagctgtttggaggccgctatgactttgaggacacagaggtgagaagaagcaactttgacaacttcccccaggccctgatcagcgtcttccaggtgctgaccggggaggactggacctccatgatgtacaacggcatcatggcctatggaggccccagctacccaggcatgctggtgtgcatctacttcatcatcctgtttgtgtgtggcaactacatcctgctgaatgtgttcctggccatcgctgtggacaacctggccgaggccgagagcctgaccagcgcccagaaggccaaggccgaggagaagaagaggaggaagatgagcaagggcctgcctgacaagtctgaggaggagaagagcaccatggccaagaagctggagcagaagcccaagggggagggcatccccaccacagccaagctgaagattgatgaatttgagagcaatgtgaatgaggtgaaggacccctaccccagcgctgacttccctggagatgatgaagaagatgagcctgagatccccctgagcccccggccccggcccctggccgagctgcagctgaaggagaaggctgtgcccatccctgaggccagcagcttcttcatcttcagccccaccaacaagatccgggtgctgtgccacagaattgtgaatgccacctggttcaccaacttcatcctgctcttcatcctgctgagcagcgctgccctggccgctgaggaccccatccgggctgacagcatgaggaaccagatcctgaagcactttgatattggcttcacctctgtgttcaccgtggagatcgtgctgaagatgaccacctacggggccttcctgcacaagggcagcttctgcaggaactacttcaacatgctggacctgctggtggtggccgtgtccctcatctccatgggcctggagagcagcgccatctctgtggtgaagatcctgcgggtgctgcgggtgctgcggcccctgcgggccatcaacagagccaagggcctgaagcacgtggtgcagtgcatgtttgtggccatcagcaccatcggcaacatcgtgctggtgaccaccctgctgcagttcatgtttgcctgcattggagtgcagctgttcaagggcaagttcttccgctgcacagacctgagcaagatgacagaggaggagtgccggggctactactacgtgtacaaggatggagaccccatgcagatcgagctgcggcaccgggagtgggtgcacagcgacttccactttgacaacgtgctgagcgccatgatgagcctcttcaccgtgtccacctttgagggctggccccagctgctgtacaaggccatcgacagcaatgcagaagatgtgggccccatctacaacaacagagtggagatggccatcttcttcatcatctacatcatcctgattgccttcttcatgatgaacatctttgtgggctttgtgattgtgaccttccaggagcagggcgagacagagtacaagaactgtgagctggacaagaaccagaggcagtgtgtgcagtatgccctgaaggcccggcccctgcgctgctacatccccaagaacccctaccagtaccaggtgtggtacatcgtgaccagcagctactttgagtacctgatgtttgccctgatcatgctgaacaccatctgcctgggcatgcagcactacaaccagagcgagcagatgaaccacatcagtgacatcctgaatgtggccttcaccatcatcttcaccctggagatgatcctgaagctgatggccttcaaggcccggggctactttggagacccctggaatgtgtttgacttcctgattgtgattggcagcatcattgatgtgatcctgtctgaaattgacaccttcctggccagcagcggcggcctgtactgcctgggcggcggctgtggaaatgtggaccctgatgaaagtgcccgcatcagcagcgccttcttccgcctcttccgggtgatgaggctcatcaagctgctgagcagagctgagggcgtgaggaccctgctgtggaccttcatcaagagcttccaggccctgccctacgtggccctgctgattgtgatgctgttcttcatctatgctgtgattggcatgcagatgtttgggaagatcgccctggtggatggcacccagatcaacagaaacaacaacttccagaccttcccccaggccgtgctgctgctcttccgctgtgccactggagaggcctggcaggagatcctgctggcctgcagctatggcaagctgtgtgaccctgagagtgactatgcccctggagaggagtacacctgtggcaccaactttgcctactactacttcatctccttctacatgctgtgtgccttcctggtgatcaacctgtttgtggccgtcatcatggacaactttgactacctgacccgggactggagcatcctgggcccccaccacctggatgagttcaaggccatctgggccgagtatgaccctgaggccaagggccgcatcaagcacctggatgtggtgaccctgctgcggcgcatccagccccccctgggctttgggaagttctgcccccaccgggtggcctgcaagaggctggtgggcatgaacatgcccctgaacagtgatggcaccgtgaccttcaatgccaccctgtttgccctggtgaggacagccctgaagatcaagacagagggcaactttgagcaggccaatgaggagctgcgggccatcatcaagaagatctggaagaggacctccatgaagctgctggaccaggtgattcctcccatcggagatgatgaggtgacagtgggcaagttctacgccaccttcctgatccaggagcacttcaggaagttcatgaagaggcaggaggagtactacggctaccggcccaagaaggacatcgtgcagatccaggccggcctgcggaccatcgaggaggaggccgcccctgagatctgcaggacagtgtctggggacctggccgctgaggaggagctggagcgggccatggtggaggccgccatggaggagggcatcttcagaagaactggaggcctgtttggccaggtggacaacttcctggagaggaccaacagcctgccccctgtgatggccaaccagaggcccctgcagtttgctgagattgagatggaggagatggagagccctgtgttcctggaggacttcccccaggaccccaggaccaaccccctggcccgggccaacaccaacaatgccaatgccaacgtggcctacggcaacagcaaccacagcaacagccacgtgttcagctctgtgcactatgaaagagagttccctgaggagacagagaccccagccacccggggccgggccctgggccagccctgccgggtgctgggcccccacagcaagccctgtgtggagatgctgaagggcctgctgacccagagggccatgccccggggccaggcccccccagccccctgccagtgcccccgggtggagagctccatgcctgaggacaggaagagcagcaccccaggcagcctgcacgaggagaccccccacagccgcagcacccgggagaacaccagccgctgcagcgccccagccacagccctgctgatccagaaggccctggtgcggggcggcctgggcaccctggccgcagatgccaacttcatcatggccaccggccaggccctggctgatgcctgccagatggagcctgaggaggtggagatcatggccacagagctgctgaagggccgggaggcccctgagggcatggccagcagcctgggctgcctgaacctgggcagcagcctgggcagcctggaccagcaccagggcagccaggagaccctcatccccccccggctgtag

SEQ ID NO: 145844 - DNA, 5565 bp, synthetic construct
  misc_feature 1..5565: note = Description of Artificial Sequence: Synthetic coding sequence
  source 1..5565: mol_type = other DNA
atggagcccagcagcccccaggatgagggcctgaggaagaagcagcccaagaagcctgtgcctgagatcctgcccaggcctccccgggccctcttctgcctgaccctggagaaccccctgaggaaggcctgcatcagcatcgtggagtggaagccctttgagaccatcatcctgctgaccatctttgccaactgtgtggccctggccgtgtacctgcccatgccagaagatgacaacaacagcctgaacctgggcctggagaagctggagtacttcttcctgattgtgttcagcattgaagctgccatgaagatcatcgcctacggcttcctgttccaccaggatgcctacctgcggagcggctggaatgtgctggacttcaccatcgtgttcctgggcgtcttcaccgtcatcctggagcaggtgaatgtcatccagagccacacagcccccatgagcagcaaaggagctggcctggatgtgaaggccctgcgggccttccgggtgctgcggcccctgcggctggtgtctggagtgcccagcctgcaggtggtgctgaacagcatcttcaaggccatgctgcccctcttccacatcgccctgctggtgctcttcatggtgatcatctatgccatcatcggcctggagctgttcaagggcaagatgcacaagacctgctacttcatcggcacagacatcgtggccaccgtggagaatgaggagcccagcccctgtgccaggacaggcagcggccgccgctgcaccatcaatggaagtgagtgccggggcggctggccaggccccaaccacggcatcacccactttgacaactttggcttctccatgctgactgtgtaccagtgcatcaccatggagggctggacagatgtgctgtactgggtgaatgatgccatcggaaatgagtggccctggatctactttgtgaccctcatcctgctgggcagcttcttcatcctgaacctggtgctgggcgtgctgagcggggagttcaccaaggagcgggagaaggccaagagccggggcaccttccagaagctgcgggagaagcagcagctggatgaggacctgcggggctacatgtcctggatcacccagggcgaggtgatggatgtggaggacttccgggagggcaagctgagcctggatgaaggaggcagtgacacagagagcctgtatgaaattgctggcctgaacaagatcatccagttcatccgccactggaggcagtggaaccgcatcttccgctggaagtgccacgacatcgtgaagagcaaggtgttctactggctggtgatcctgattgtggccctgaacaccctgagcatcgccagcgagcaccacaaccagcccctgtggctgacccggctgcaggacatcgccaacagagtgctgctgagcctcttcaccacagagatgctgatgaagatgtatggcctgggcctgcggcagtacttcatgagcatcttcaacagatttgactgctttgtggtgtgcagcggcatcctggagatcctgctggtggagagcggggccatgacccccctgggcatctctgtgctgcgctgcatccggctgctgcgcatcttcaagatcaccaagtactggaccagcctgagcaacctggtggccagcctgctgaacagcatccgcagcatcgccagcctgctgctgctgctcttcctgttcatcgtcatctttgccctgctgggcatgcagctgtttggaggccgctatgactttgaggacacagaggtgagaagaagcaactttgacaacttcccccaggccctgatcagcgtcttccaggtgctgaccggggaggactggacctccatgatgtacaacggcatcatggcctatggaggccccagctacccaggcatgctggtgtgcatctacttcatcatcctgtttgtgtgtggcaactacatcctgctgaatgtgttcctggccatcgctgtggacaacctggccgaggccgagagcctgaccagcgcccagaaggccaaggccgaggagaagaagaggaggaagatgagcaagggcctgcctgacaagtctgaggaggagaagagcaccatggccaagaagctggagcagaagcccaagggggagggcatccccaccacagccaagctgaagattgatgaatttgagagcaatgtgaatgaggtgaaggacccctaccccagcgctgacttccctggagatgatgaagaagatgagcctgagatccccctgagcccccggccccggcccctggccgagctgcagctgaaggagaaggctgtgcccatccctgaggccagcagcttcttcatcttcagccccaccaacaagatccgggtgctgtgccacagaattgtgaatgccacctggttcaccaacttcatcctgctcttcatcctgctgagcagcgctgccctggccgctgaggaccccatccgggctgacagcatgaggaaccagatcctgaagcactttgatattggcttcacctctgtgttcaccgtggagatcgtgctgaagatgaccacctacggggccttcctgcacaagggcagcttctgcaggaactacttcaacatgctggacctgctggtggtggccgtgtccctcatctccatgggcctggagagcagcgccatctctgtggtgaagatcctgcgggtgctgcgggtgctgcggcccctgcgggccatcaacagagccaagggcctgaagcacgtggtgcagtgcatgtttgtggccatcagcaccatcggcaacatcgtgctggtgaccaccctgctgcagttcatgtttgcctgcattggagtgcagctgttcaagggcaagttcttccgctgcacagacctgagcaagatgacagaggaggagtgccggggctactactacgtgtacaaggatggagaccccatgcagatcgagctgcggcaccgggagtgggtgcacagcgacttccactttgacaacgtgctgagcgccatgatgagcctcttcaccgtgtccacctttgagggctggccccagctgctgtacaaggccatcgacagcaatgcagaagatgtgggccccatctacaacaacagagtggagatggccatcttcttcatcatctacatcatcctgattgccttcttcatgatgaacatctttgtgggctttgtgattgtgaccttccaggagcagggcgagacagagtacaagaactgtgagctggacaagaaccagaggcagtgtgtgcagtatgccctgaaggcccggcccctgcgctgctacatccccaagaacccctaccagtaccaggtgtggtacatcgtgaccagcagctactttgagtacctgatgtttgccctgatcatgctgaacaccatctgcctgggcatgcagcactacaaccagagcgagcagatgaaccacatcagtgacatcctgaatgtggccttcaccatcatcttcaccctggagatgatcctgaagctgatggccttcaaggcccggggctactttggagacccctggaatgtgtttgacttcctgattgtgattggcagcatcattgatgtgatcctgtctgaaattgatgatcctgatgagagcgcccgcatcagcagcgccttcttccgcctcttccgggtgatgaggctcatcaagctgctgagcagagctgagggcgtgaggaccctgctgtggaccttcatcaagagcttccaggccctgccctacgtggccctgctgattgtgatgctgttcttcatctatgctgtgattggcatgcagatgtttgggaagatcgccctggtggatggcacccagatcaacagaaacaacaacttccagaccttcccccaggccgtgctgctgctcttccgctgtgccaccggggaggcctggcaggagatcctgctggcctgcagctatggcaagctgtgtgaccctgagagtgactatgcccctggagaggagtacacctgtggcaccaactttgcctactactacttcatctccttctacatgctgtgtgccttcctggtgatcaacctgtttgtggccgtcatcatggacaactttgactacctgacccgggactggagcatcctgggcccccaccacctggatgagttcaaggccatctgggccgagtatgaccctgaggccaagggccgcatcaagcacctggatgtggtgaccctgctgcggcgcatccagccccccctgggctttgggaagttctgcccccaccgggtggcctgcaagaggctggtgggcatgaacatgcccctgaacagtgatggcaccgtgaccttcaatgccaccctgtttgccctggtgaggacagccctgaagatcaagacagagggcaactttgagcaggccaatgaggagctgcgggccatcatcaagaagatctggaagaggacctccatgaagctgctggaccaggtgatcccccccatcggagatgatgaggtgacagtgggcaagttctacgccaccttcctgatccaggagcacttcaggaagttcatgaagaggcaggaggagtactacggctaccggcccaagaaggacatcgtgcagatccaggccggcctgcggaccatcgaggaggaggccgcccctgagatctgcaggacagtgtctggggacctggccgctgaggaggagctggagcgggccatggtggaggccgccatggaggagggcatcttccggaggactggaggcctgtttggccaggtggacaacttcctggagaggaccaacagcctgccccctgtgatggccaaccagaggcccctgcagtttgctgagattgagatggaggagatggagagccctgtgttcctggaggacttcccccaggaccccaggaccaaccccctggcccgggccaacaccaacaatgccaatgccaacgtggcctacggcaacagcaaccacagcaacagccacgtgttcagctctgtgcactatgagcgggagttccctgaggagacagagaccccagccacccggggccgggccctgggccagccctgccgggtgctgggcccccacagcaagccctgtgtggagatgctgaagggcctgctgacccagagggccatgccccggggccaggcccccccagccccctgccagtgcccccgggtggagagctccatgcctgaggacaggaagagcagcaccccaggcagcctgcacgaggagaccccccacagccgcagcacccgggagaacaccagccgctgcagcgccccagccacagccctgctgatccagaaggccctggtgcggggcggcctgggcaccctggccgcagatgccaacttcatcatggccaccggccaggccctggctgatgcctgccagatggagcctgaggaggtggagatcatggccacagagctgctgaagggccgggaggcccctgagggcatggccagcagcctgggctgcctgaacctgggcagcagcctgggcagcctggaccagcaccagggcagccaggagaccctcatccccccccggctgtag

SEQ ID NO: 145845 - DNA, 4602 bp, synthetic construct
  misc_feature 1..4602: note = Description of Artificial Sequence: Synthetic coding sequence
  source 1..4602: mol_type = other DNA
atgaagacccacctggaccggcccctggtggtggagctgggcagagatggagcccggggccctgtgggcggcaaggcccggcctgaggccgctgaggcccctgagggcgtggaccccccaagaagacaccaccgccaccgggacaaggacaagaccccagctgctggggaccaggacagagctgaggcccccaaggccgagagcggggagcccggggcccgggaggagcggccccggccccacaggagccacagcaaggaggccgccggccccccagaggcccggtctgagcggggccggggccctggccctgagggcggccgccgccaccaccggcggggcagccctgaggaggccgctgagcgggagcccaggaggcaccgggcccaccgccaccaggaccccagcaaagaatgtgccggggccaagggggagcggcgggcccggcaccggggcggcccccgggccggcccccgggaggccgagagcggggaggagcccgcccggcggcaccgggcccggcacaaggcccagcctgcccatgaagctgtggagaaggagaccacagagaaggaggccacagagaaggaggccgagatcgtggaggccgacaaggagaaggagctgaggaaccaccagccccgggagccccactgtgacctggagaccagcggcaccgtgacagtgggccccatgcacaccctgcccagcacctgcctgcagaaggtggaggagcagccagaagatgctgacaaccagagaaatgtgaccaggatgggcagccagcccccagaccccaacaccatcgtgcacatccctgtgatgctgaccggccccctgggggaggccaccgtggtgcccagcggaaatgtggacctggagagccaggccgagggcaagaaggaggtggaggctgatgatgtgatgaggagcggcccccggcccatcgtgccctacagctccatgttctgcctgagccccaccaacctgctgcggcgcttctgccactacatcgtgaccatgagatactttgaggtggtgatcctggtggtgattgccctgagcagcatcgccctggccgctgaggaccctgtgaggacagacagccccagaaataatgccctgaagtacctggactacatcttcaccggggtcttcacctttgagatggtgatcaagatgattgacctgggcctgctgctgcaccctggggcctacttccgggacctgtggaacatcctggacttcatcgtggtgtctggggccctggtggcctttgccttcagcagctttgtgggcggcagcaagggcaaggacatcaacaccatcaagagcctgcgggtgctgcgggtgctgcggcccctgaagaccatcaagaggctgcccaagctgaaggctgtgtttgactgtgtggtgaacagcctgaagaatgtgctgaacatcctgattgtgtacatgctgttcatgttcatctttgctgtgattgctgtgcagctgttcaagggcaagttcttctactgcacagatgagagcaaggagctggagcgggactgccggggccagtacctggactatgagaaggaggaggtggaggcccagccccggcagtggaagaagtatgacttccactatgacaacgtgctgtgggccctgctgaccctcttcaccgtgtccactggagagggctggcccatggtgctgaagcacagcgtggatgccacctatgaggagcagggccccagccctggctacaggatggagctgagcatcttctacgtggtgtactttgtggtgttccccttcttctttgtgaacatctttgtggccctgatcatcatcaccttccaggagcagggcgacaaggtgatgtctgaatgttccctggagaagaatgaaagagcctgcatcgactttgccatcagcgccaagcccctgacccgctacatgccccagaaccggcagagcttccagtacaagacctggacctttgtggtgtccccaccatttgagtacttcatcatggccatgattgccctgaacacagtggtgctgatgatgaagttctatgatgccccctatgaatatgagctgatgctgaagtgcctgaacatcgtgttcacctccatgttctccatggagtgtgtgctgaagatcatcgcctttggagtgctgaactacttcagagatgcctggaatgtgtttgattttgtgacagtgctgggcagcatcacagacatcctggtgacagaaattgccaacaacttcatcaacctgtccttcctgcggctcttccgggccgcccggctcatcaagctgctgcggcagggctacaccatccgcatcctgctgtggacctttgtgcagagcttcaaggccctgccctacgtgtgcctgctgattgccatgctgttcttcatctatgccatcatcggcatgcaggtgtttggaaacatcgccctggatgatgacaccagcatcaacagacacaacaacttccgcaccttcctgcaggccctgatgctgctcttccgcagcgccactggagaggcctggcatgagatcatgctgagctgcctgagcaaccaggcctgtgatgagcaggccaatgccacagaatgtggcagtgactttgcctacttctactttgtgtccttcatcttcctgtgcagcttcctgatgctgaacctgtttgtggccgtcatcatggacaactttgagtacctgacccgggacagcagcatcctgggcccccaccacctggatgagttcatccgggtgtgggccgagtatgaccctgctgcctgtggccgcatctcctacaatgacatgtttgagatgctgaagcacatgagcccccccctgggcctgggcaagaagtgcccagcccgggtggcctacaagaggctggtgaggatgaacatgcccatcagcaatgaagacatgacagtgcacttcaccagcaccctgatggccctgatcagaacagccctggagatcaagctggccccagctggcaccaagcagcaccagtgtgatgctgagctgaggaaggagatctctgtggtgtgggccaacctgccccagaagaccctggacctgctggtgcccccccacaagccagatgagatgacagtgggcaaggtgtatgctgccctgatgatctttgacttctacaagcagaacaagaccacccgggaccagatgcagcaggcccctgggggcctgagccagatgggccctgtgtccctcttccaccccctgaaggccaccctggagcagacccagcctgctgtgctgcggggggcccgggtcttcctgcggcagaagagcagcaccagcctgagcaatggaggagccatccagaaccaggagagcggcatcaaggagagcgtgtcctggggcacccagaggacccaggatgcccctcatgaggcccggccccccctggagcggggccacagcacagagatccctgtgggccgcagcggggccctggccgtggatgtgcagatgcagagcatcacccggcggggcccagatggagagccccagcccggcctggagagccagggccgggccgcctccatgccccggctggccgctgagacccagcctgtgacagatgccagccccatgaagaggagcatcagcaccctggcccagaggccccggggcacccacctgtgcagcaccaccccagaccggcccccacccagccaggccagcagccaccaccaccaccaccgctgccacagaagaagagacaggaagcagaggagcctggagaagggccccagcctgtctgctgacatggatggagcccccagcagcgctgtgggccctggcctgcccccaggagagggccccaccggctgcagaagagagcgggagcggcggcaggagcggggccgcagccaggagcggcggcagcccagcagcagcagcagcgagaagcagcgcttctacagctgtgacagatttggaggccgggagccccccaagcccaagcccagcctgagcagccaccccaccagccccacagctggccaggagcccggcccccacccccagggcagcggctctgtgaatggcagccccctgctgagcaccagcggggccagcaccccaggccggggcggccggcggcagctgccccagacccccctgaccccccggcccagcatcacctacaagacagccaacagcagccccatccactttgctggggcccagaccagcctgcctgccttcagccctggccgcctgagccggggcctgtctgagcacaatgccctgctgcagagggaccccctgagccagcccctggcccctggcagccgcatcggcagtgacccctacctgggccagaggctggacagcgaggcctctgtgcacgccctgcctgaggacaccctgacctttgaggaggccgtggccaccaacagcggccgcagcagcaggaccagctatgtgagcagcctgaccagccagagccaccccctgcggcgggtgcccaacggctaccactgcaccctgggcctgagcagcggcggccgggcccggcacagctaccaccacccagaccaggaccactggtgctag

SEQ ID NO: 145846 - DNA, 306 bp, synthetic construct
  misc_feature 1..306: note = Description of Artificial Sequence: Synthetic coding sequence
  source 1..306: mol_type = other DNA
gacaacctggccaatgcccaggagctgaccaaggatgaggaggagatggaggaggccgccaaccagaagctggccctgcagaaggccaaggaggtggccgaggtgagccccatgtctgctgccaacatcagcattgctgcctttgtgaagcaggcccggggcaccgtgagccgcagcagctctgtgtcctctgtgaacagcccccggcagcagaacagcgccaaggcccggtctgtgtgggagcagagggccagccagctgcggctgcagaacctgcgggccagctgtgaggccctgtacagctag

SEQ ID NO: 145847 - DNA, 6714 bp, synthetic construct
  misc_feature 1..6714: note = Description of Artificial Sequence: Synthetic coding sequence
  source 1..6714: mol_type = other DNA
atggtgcgctttggagatgagctgggcggccgctatggaggccctgggggcggggagcgggcccggggcggcggggccggcggggccggcggccctggccctgggggcctgcagcccggccagagggtgctgtacaagcagagcatcgcccagagggcccggaccatggccctgtacaaccccatccctgtgaagcagaactgcttcaccgtgaacagaagcctgtttgtgttttctgaggacaacgtggtgaggaaatatgccaagaggatcacagagtggcccccatttgagtacatgatcctggccaccatcatcgccaactgcatcgtgctggccctggagcagcacctgcctgatggagacaagacccccatgtctgagcggctggatgacacagagccctacttcatcggcatcttctgctttgaagctggcatcaagatcatcgccctgggctttgtgttccacaagggcagctacctgagaaatggctggaatgtgatggactttgtggtggtgctgaccggcatcctggccacagctggaacagactttgacctgcggaccctgcgggctgtgcgggtgctgcggcccctgaagctggtgtctggcatccccagcctgcaggtggtgctgaagagcatcatgaaggccatggtgcccctgctgcagatcggcctgctgctcttctttgccatcctgatgtttgccatcatcggcctggagttctacatgggcaagttccacaaggcctgcttccccaacagcacagatgctgagcctgtgggggacttcccctgtgggaaggaggccccagcccggctgtgtgagggggacacagagtgccgggagtactggccaggccccaactttggcatcaccaactttgacaacatcctgtttgccatcctgaccgtcttccagtgcatcaccatggagggctggacagacatcctgtacaacaccaatgatgctgctggcaacacctggaactggctgtacttcatccccctcatcatcatcggcagcttcttcatgctgaacctggtgctgggcgtgctgagcggggagtttgccaaggagcgggagcgggtggagaacagaagagccttcctgaagctgcggcggcagcagcagatcgagcgggagctgaatggctacctggagtggatcttcaaggccgaggaggtgatgctggccgaggaggacagaaatgctgaggagaagagccccctggatgtgctgaagagagctgccaccaagaagagcagaaatgacctgattcatgctgaggagggagaagatagatttgctgacctgtgtgctgtgggcagcccctttgcccgggccagcctgaagagcggcaagacagagagcagcagctacttccggaggaaggagaagatgttccgcttcttcatccggaggatggtgaaggcccagagcttctactgggtggtgctgtgtgtggtggccctgaacaccctgtgtgtggccatggtgcactacaaccagccccggcggctgaccaccaccctgtactttgctgagtttgtgttcctgggcctcttcctgacagagatgagcctgaagatgtatggcctgggccccaggagctacttccgcagcagcttcaactgctttgattttggagtcatcgtgggctctgtgtttgaggtggtgtgggccgccatcaagccaggcagcagctttggcatctctgtgctgcgggccctgcggctgctgcgcatcttcaaggtgaccaagtactggagcagcctgaggaacctggtggtgtccctgctgaacagcatgaagagcatcatcagcctgctcttcctgctcttcctgttcatcgtggtgtttgccctgctgggcatgcagctgtttggaggccagttcaacttccaggatgagacccccaccaccaactttgacaccttccctgctgccatcctgactgtgttccagatcctgactggagaggactggaatgctgtgatgtaccatggaattgagagccagggcggcgtgtccaagggcatgttcagcagcttctacttcatcgtgctgaccctgtttggaaactacaccctgctgaatgtgttcctggccatcgctgtggacaacctggccaatgcccaggagctgaccaaggatgaggaggagatggaggaggccgccaaccagaagctggccctgcagaaggccaaggaggtggccgaggtgagccccatgtctgctgccaacatcagcattgctgcccggcagcagaacagcgccaaggcccggtctgtgtgggagcagagggccagccagctgcggctgcagaacctgcgggccagctgtgaggccctgtacagcgagatggaccctgaggagcggctgcgctttgccaccaccaggcacctgcggccagacatgaagacccacctggaccggcccctggtggtggagctgggcagagatggagcccggggccctgtgggcggcaaggcccggcctgaggccgctgaggcccctgagggcgtggaccccccaagaagacaccaccgccaccgggacaaggacaagaccccagctgctggggaccaggacagagctgaggcccccaaggccgagagcggggagcccggggcccgggaggagcggccccggccccacaggagccacagcaaggaggccgccggccccccagaggcccggtctgagcggggccggggccctggccctgagggcggccgccgccaccaccggcggggcagccctgaggaggccgctgagcgggagcccaggaggcaccgggcccaccgccaccaggaccccagcaaagaatgtgccggggccaagggggagcggcgggcccggcaccggggcggcccccgggccggcccccgggaggccgagagcggggaggagcccgcccggcggcaccgggcccggcacaaggcccagcctgcccatgaagctgtggagaaggagaccacagagaaggaggccacagagaaggaggccgagatcgtggaggccgacaaggagaaggagctgaggaaccaccagccccgggagccccactgtgacctggagaccagcggcaccgtgacagtgggccccatgcacaccctgcccagcacctgcctgcagaaggtggaggagcagccagaagatgctgacaaccagagaaatgtgaccaggatgggcagccagcccccagaccccaacaccatcgtgcacatccctgtgatgctgaccggccccctgggggaggccaccgtggtgcccagcggaaatgtggacctggagagccaggccgagggcaagaaggaggtggaggctgatgatgtgatgaggagcggcccccggcccatcgtgccctacagctccatgttctgcctgagccccaccaacctgctgcggcgcttctgccactacatcgtgaccatgagatactttgaggtggtgatcctggtggtgattgccctgagcagcatcgccctggccgctgaggaccctgtgaggacagacagccccagaaataatgccctgaagtacctggactacatcttcaccggggtcttcacctttgagatggtgatcaagatgattgacctgggcctgctgctgcaccctggggcctacttccgggacctgtggaacatcctggacttcatcgtggtgtctggggccctggtggcctttgccttcagcggcagcaagggcaaggacatcaacaccatcaagagcctgcgggtgctgcgggtgctgcggcccctgaagaccatcaagaggctgcccaagctgaaggctgtgtttgactgtgtggtgaacagcctgaagaatgtgctgaacatcctgattgtgtacatgctgttcatgttcatctttgctgtgattgctgtgcagctgttcaagggcaagttcttctactgcacagatgagagcaaggagctggagcgggactgccggggccagtacctggactatgagaaggaggaggtggaggcccagccccggcagtggaagaagtatgacttccactatgacaacgtgctgtgggccctgctgaccctcttcaccgtgtccactggagagggctggcccatggtgctgaagcacagcgtggatgccacctatgaggagcagggccccagccctggctacaggatggagctgagcatcttctacgtggtgtactttgtggtgttccccttcttctttgtgaacatctttgtggccctgatcatcatcaccttccaggagcagggcgacaaggtgatgtctgaatgttccctggagaagaatgaaagagcctgcatcgactttgccatcagcgccaagcccctgacccgctacatgccccagaaccggcagagcttccagtacaagacctggacctttgtggtgtccccaccatttgagtacttcatcatggccatgattgccctgaacacagtggtgctgatgatgaagttctatgatgccccctatgaatatgagctgatgctgaagtgcctgaacatcgtgttcacctccatgttctccatggagtgtgtgctgaagatcatcgcctttggagtgctgaactacttcagagatgcctggaatgtgtttgattttgtgacagtgctgggcagcatcacagacatcctggtgacagaaattgctgagaccaacaacttcatcaacctgtccttcctgcggctcttccgggccgcccggctcatcaagctgctgcggcagggctacaccatccgcatcctgctgtggacctttgtgcagagcttcaaggccctgccctacgtgtgcctgctgattgccatgctgttcttcatctatgccatcatcggcatgcaggtgtttggaaacatcgccctggatgatgacaccagcatcaacagacacaacaacttccgcaccttcctgcaggccctgatgctgctcttccgcagcgccactggagaggcctggcatgagatcatgctgagctgcctgagcaaccaggcctgtgatgagcaggccaatgccacagaatgtggcagtgactttgcctacttctactttgtgtccttcatcttcctgtgcagcttcctgatgctgaacctgtttgtggccgtcatcatggacaactttgagtacctgacccgggacagcagcatcctgggcccccaccacctggatgagttcatccgggtgtgggccgagtatgaccctgctgcctgtggccgcatctcctacaatgacatgtttgagatgctgaagcacatgagcccccccctgggcctgggcaagaagtgcccagcccgggtggcctacaagaggctggtgaggatgaacatgcccatcagcaatgaagacatgacagtgcacttcaccagcaccctgatggccctgatcagaacagccctggagatcaagctggccccagctggcaccaagcagcaccagtgtgatgctgagctgaggaaggagatctctgtggtgtgggccaacctgccccagaagaccctggacctgctggtgcccccccacaagccagatgagatgacagtgggcaaggtgtatgctgccctgatgatctttgacttctacaagcagaacaagaccacccgggaccagatgcagcaggcccctgggggcctgagccagatgggccctgtgtccctcttccaccccctgaaggccaccctggagcagacccagcctgctgtgctgcggggggcccgggtcttcctgcggcagaagagcagcaccagcctgagcaatggaggagccatccagaaccaggagagcggcatcaaggagagcgtgtcctggggcacccagaggacccaggatgcccctcatgaggcccggccccccctggagcggggccacagcacagagatccctgtgggccgcagcggggccctggccgtggatgtgcagatgcagagcatcacccggcggggcccagatggagagccccagcccggcctggagagccagggccgggccgcctccatgccccggctggccgctgagacccagcctgtgacagatgccagccccatgaagaggagcatcagcaccctggcccagaggccccggggcacccacctgtgcagcaccaccccagaccggcccccacccagccaggccagcagccaccaccaccaccaccgctgccacagaagaagagacaggaagcagaggagcctggagaagggccccagcctgtctgctgacatggatggagcccccagcagcgctgtgggccctggcctgcccccaggagagggccccaccggctgcagaagagagcgggagcggcggcaggagcggggccgcagccaggagcggcggcagcccagcagcagcagcagcgagaagcagcgcttctacagctgtgacagatttggaggccgggagccccccaagcccaagcccagcctgagcagccaccccaccagccccacagctggccaggagcccggcccccacccccaggccggcagcgctgtgggcttccccaacaccaccccctgctgccgggagacccccagcgccagcccctggcccctggccctggagctggccctgaccctgacctggggctctgtgtggacagtgcggcccctgagcaccccctgcctgcggaccctgagcctgagccggcggctgtggccacccaccagggctgcccctcctggcctgcccacctgccccccatag

SEQ ID NO: 145848 - DNA, 7023 bp, synthetic construct
  misc_feature 1..7023: note = Description of Artificial Sequence: Synthetic coding sequence
  source 1..7023: mol_type = other DNA
atggtgcgctttggagatgagctgggcggccgctatggaggccctgggggcggggagcgggcccggggcggcggggccggcggggccggcggccctggccctgggggcctgcagcccggccagagggtgctgtacaagcagagcatcgcccagagggcccggaccatggccctgtacaaccccatccctgtgaagcagaactgcttcaccgtgaacagaagcctgtttgtgttttctgaggacaacgtggtgaggaaatatgccaagaggatcacagagtggcccccatttgagtacatgatcctggccaccatcatcgccaactgcatcgtgctggccctggagcagcacctgcctgatggagacaagacccccatgtctgagcggctggatgacacagagccctacttcatcggcatcttctgctttgaagctggcatcaagatcatcgccctgggctttgtgttccacaagggcagctacctgagaaatggctggaatgtgatggactttgtggtggtgctgaccggcatcctggccacagctggaacagactttgacctgcggaccctgcgggctgtgcgggtgctgcggcccctgaagctggtgtctggcatccccagcctgcaggtggtgctgaagagcatcatgaaggccatggtgcccctgctgcagatcggcctgctgctcttctttgccatcctgatgtttgccatcatcggcctggagttctacatgggcaagttccacaaggcctgcttccccaacagcacagatgctgagcctgtgggggacttcccctgtgggaaggaggccccagcccggctgtgtgagggggacacagagtgccgggagtactggccaggccccaactttggcatcaccaactttgacaacatcctgtttgccatcctgaccgtcttccagtgcatcaccatggagggctggacagacatcctgtacaacaccaatgatgctgctggcaacacctggaactggctgtacttcatccccctcatcatcatcggcagcttcttcatgctgaacctggtgctgggcgtgctgagcggggagtttgccaaggagcgggagcgggtggagaacagaagagccttcctgaagctgcggcggcagcagcagatcgagcgggagctgaatggctacctggagtggatcttcaaggccgaggaggtgatgctggccgaggaggacagaaatgctgaggagaagagccccctggatgctgtgctgaagagagctgccaccaagaagagcagaaatgacctgattcatgctgaggagggggaggacagatttgctgacctgtgtgctgtgggcagcccctttgcccgggccagcctgaagagcggcaagacagagagcagcagctacttccggaggaaggagaagatgttccgcttcttcatccggaggatggtgaaggcccagagcttctactgggtggtgctgtgtgtggtggccctgaacaccctgtgtgtggccatggtgcactacaaccagccccggcggctgaccaccaccctgtactttgctgagtttgtgttcctgggcctcttcctgacagagatgagcctgaagatgtatggcctgggccccaggagctacttccgcagcagcttcaactgctttgattttggagtgattgtgggctctgtgtttgaggtggtgtgggccgccatcaagccaggcagcagctttggcatctctgtgctgcgggccctgcggctgctgcgcatcttcaaggtgaccaagtactggagcagcctgaggaacctggtggtgtccctgctgaacagcatgaagagcatcatcagcctgctcttcctgctcttcctgttcatcgtggtgtttgccctgctgggcatgcagctgtttggaggccagttcaacttccaggatgagacccccaccaccaactttgacaccttccctgctgccatcctgaccgtcttccagatcctgaccggggaggactggaatgctgtgatgtaccacggcatcgagagccagggcggcgtgtccaagggcatgttcagcagcttctacttcatcgtgctgaccctgtttggaaactacaccctgctgaatgtgttcctggccatcgctgtggacaacctggccaatgcccaggagctgaccaaggatgaggaggagatggaggaggccgccaaccagaagctggccctgcagaaggccaaggaggtggccgaggtgagccccatgtctgctgccaacatcagcattgctgcccggcagcagaacagcgccaaggcccggtctgtgtgggagcagagggccagccagctgcggctgcagaacctgcgggccagctgtgaggccctgtacagcgagatggaccctgaggagcggctgcgctttgccaccaccaggcacctgcggccagacatgaagacccacctggaccggcccctggtggtggagctgggcagagatggagcccggggccctgtgggcggcaaggcccggcctgaggccgctgaggcccctgagggcgtggaccccccccggcggcaccaccgccaccgggacaaggacaagaccccagctgctggggaccaggacagagctgaggcccccaaggccgagagcggggagcccggggcccgggaggagcggccccggccccacaggagccacagcaaggaggccgccggccccccagaggcccggtctgagcggggccggggccctggccctgagggcggcagaagacaccacagaagaggcagccctgaggaggccgctgagcgggagccccggcggcaccgggcccaccgccaccaggaccccagcaaagaatgtgccggggccaagggggagcggcgggcccggcacagaggaggccccagggctggcccccgggaggccgagagcggggaggagcccgcccggcggcaccgggcccggcacaaggcccagcctgcccacgaggccgtggagaaggagaccacagagaaggaggccacagagaaggaggccgagatcgtggaggccgacaaggagaaggagctgaggaaccaccagccccgggagccccactgtgacctggagaccagcggcaccgtgacagtgggccccatgcacaccctgcccagcacctgcctgcagaaggtggaggagcagccagaagatgctgacaaccagagaaatgtgaccaggatgggcagccagcccccagaccccaacaccatcgtgcacatccctgtgatgctgaccggccccctgggggaggccaccgtggtgcccagcggaaatgtggacctggagagccaggccgagggcaagaaggaggtggaggctgatgatgtgatgaggagcggcccccggcccatcgtgccctacagctccatgttctgcctgagccccaccaacctgctgcggcgcttctgccactacatcgtgaccatgagatactttgaggtggtgatcctggtggtgattgccctgagcagcatcgccctggccgcagaagatcctgtgaggacagacagccccaggaacaatgccctgaagtacctggactacatcttcaccggggtcttcacctttgagatggtgatcaagatgattgacctgggcctgctgctgcaccctggggcctacttccgggacctgtggaacatcctggacttcatcgtggtgtctggggccctggtggcctttgccttcagcggcagcaagggcaaggacatcaacaccatcaagagcctgcgggtgctgcgggtgctgcggcccctgaagaccatcaagaggctgcccaagctgaaggctgtgtttgactgtgtggtgaacagcctgaagaatgtgctgaacatcctgattgtgtacatgctgttcatgttcatctttgctgtgattgctgtgcagctgttcaagggcaagttcttctactgcacagatgagagcaaggagctggagcgggactgccggggccagtacctggactatgagaaggaggaggtggaggcccagccccggcagtggaagaagtatgacttccactatgacaacgtgctgtgggccctgctgaccctcttcaccgtgtccactggagagggctggcccatggtgctgaagcacagcgtggatgccacctatgaggagcagggccccagccctggctacaggatggagctgagcatcttctacgtggtgtactttgtggtgttccccttcttctttgtgaacatctttgtggccctgatcatcatcaccttccaggagcagggcgacaaggtgatgtctgagtgcagcctggagaagaatgaaagagcctgcatcgactttgccatcagcgccaagcccctgacccgctacatgccccagaaccggcagagcttccagtacaagacctggacctttgtggtgagccccccatttgagtacttcatcatggccatgattgccctgaacacagtggtgctgatgatgaagttctatgatgccccctatgaatatgagctgatgctgaagtgcctgaacatcgtgttcacctccatgttctccatggagtgtgtgctgaagatcatcgccttcggcgtgctgaactacttcagagatgcctggaatgtgtttgattttgtgacagtgctgggcagcatcacagacatcctggtgacagaaattgctgagaccaacaacttcatcaacctgtccttcctgcggctcttccgggccgcccggctcatcaagctgctgcggcagggctacaccatccgcatcctgctgtggacctttgtgcagagcttcaaggccctgccctacgtgtgcctgctgattgccatgctgttcttcatctatgccatcatcggcatgcaggtgtttggaaatattgccctggatgatgacaccagcatcaacagacacaacaacttccgcaccttcctgcaggccctgatgctgctcttccgcagcgccaccggggaggcctggcatgagatcatgctgagctgcctgagcaaccaggcctgtgatgagcaggccaatgccacagaatgtggcagtgactttgcctacttctactttgtgtccttcatcttcctgtgcagcttcctgatgctgaacctgtttgtggccgtcatcatggacaactttgagtacctgacccgggacagcagcatcctgggcccccaccacctggatgagttcatccgggtgtgggccgagtatgaccctgctgcctgtggccgcatctcctacaatgacatgtttgagatgctgaagcacatgagcccccccctgggcctgggcaagaagtgcccagcccgggtggcctacaagaggctggtgaggatgaacatgcccatcagcaatgaagacatgacagtgcacttcaccagcaccctgatggccctgatcagaacagccctggagatcaagctggccccagctggcaccaagcagcaccagtgtgatgctgagctgaggaaggagatctctgtggtgtgggccaacctgccccagaagaccctggacctgctggtgcccccccacaagccagatgagatgacagtgggcaaggtgtatgctgccctgatgatctttgacttctacaagcagaacaagaccacccgggaccagatgcagcaggcccctgggggcctgagccagatgggccctgtgtccctcttccaccccctgaaggccaccctggagcagacccagcctgctgtgctgcggggggcccgggtcttcctgcggcagaagagcagcaccagcctgagcaatggaggagccatccagaaccaggagagcggcatcaaggagagcgtgtcctggggcacccagaggacccaggatgcccctcatgaggcccggccccccctggagcggggccacagcacagagatccctgtgggccgcagcggggccctggccgtggatgtgcagatgcagagcatcacccggcggggcccagatggagagccccagcccggcctggagagccagggccgggccgcctccatgccccggctggccgctgagacccagcctgtgacagatgccagccccatgaagaggagcatcagcaccctggcccagaggccccggggcacccacctgtgcagcaccaccccagaccggcccccacccagccaggccagcagccaccaccaccaccaccgctgccacagaagaagagacaggaagcagaggagcctggagaagggccccagcctgtctgctgacatggatggagcccccagcagcgctgtgggccctggcctgcccccaggagagggccccaccggctgccggcgggagcgggagcggcggcaggagcggggccgcagccaggagcggcggcagcccagcagcagcagcagcgagaagcagcgcttctacagctgtgacagatttggaggccgggagccccccaagcccaagcccagcctgagcagccaccccaccagccccacagctggccaggagcccggcccccacccccagggcagcggctctgtgaatggcagccccctgctgagcaccagcggggccagcaccccaggccggggcggccggcggcagctgccccagacccccctgaccccccggcccagcatcacctacaagacagccaacagcagccccatccactttgctggggcccagaccagcctgcctgccttcagccctggccgcctgagccggggcctgtctgagcacaatgccctgctgcagagggaccccctgagccagcccctggcccctggcagcagaattggaagtgacccctacctgggccagaggctggacagcgaggcctctgtgcacgccctgcctgaggacaccctgacctttgaggaggccgtggccaccaacagcggccgcagcagcaggaccagctatgtgagcagcctgaccagccagagccaccccctgcggcgggtgcccaacggctaccactgcaccctgggcctgagcagcggcggccgggcccggcacagctaccaccacccagaccaggaccactggtgctag

SEQ ID NO: 145849 - DNA, 7017 bp, synthetic construct
  misc_feature 1..7017: note = Description of Artificial Sequence: Synthetic coding sequence
  source 1..7017: mol_type = other DNA
atggtgcgctttggagatgagctgggcggccgctatggaggccctgggggcggggagcgggcccggggcggcggggccggcggggccggcggccctggccctgggggcctgcagcccggccagagggtgctgtacaagcagagcatcgcccagagggcccggaccatggccctgtacaaccccatccctgtgaagcagaactgcttcaccgtgaacagaagcctgtttgtgttttctgaggacaacgtggtgaggaaatatgccaagaggatcacagagtggcccccatttgagtacatgatcctggccaccatcatcgccaactgcatcgtgctggccctggagcagcacctgcctgatggagacaagacccccatgtctgagcggctggatgacacagagccctacttcatcggcatcttctgctttgaagctggcatcaagatcatcgccctgggctttgtgttccacaagggcagctacctgagaaatggctggaatgtgatggactttgtggtggtgctgaccggcatcctggccacagctggaacagactttgacctgcggaccctgcgggctgtgcgggtgctgcggcccctgaagctggtgtctggcatccccagcctgcaggtggtgctgaagagcatcatgaaggccatggtgcccctgctgcagatcggcctgctgctcttctttgccatcctgatgtttgccatcatcggcctggagttctacatgggcaagttccacaaggcctgcttccccaacagcacagatgctgagcctgtgggggacttcccctgtgggaaggaggccccagcccggctgtgtgagggggacacagagtgccgggagtactggccaggccccaactttggcatcaccaactttgacaacatcctgtttgccatcctgaccgtcttccagtgcatcaccatggagggctggacagacatcctgtacaacaccaatgatgctgctggcaacacctggaactggctgtacttcatccccctcatcatcatcggcagcttcttcatgctgaacctggtgctgggcgtgctgagcggggagtttgccaaggagcgggagcgggtggagaacagaagagccttcctgaagctgcggcggcagcagcagatcgagcgggagctgaatggctacctggagtggatcttcaaggccgaggaggtgatgctggccgaggaggacagaaatgctgaggagaagagccccctggatgctgtgctgaagagagctgccaccaagaagagcagaaatgacctgattcatgctgaggagggggaggacagatttgctgacctgtgtgctgtgggcagcccctttgcccgggccagcctgaagagcggcaagacagagagcagcagctacttccggaggaaggagaagatgttccgcttcttcatccggaggatggtgaaggcccagagcttctactgggtggtgctgtgtgtggtggccctgaacaccctgtgtgtggccatggtgcactacaaccagccccggcggctgaccaccaccctgtactttgctgagtttgtgttcctgggcctcttcctgacagagatgagcctgaagatgtatggcctgggccccaggagctacttccgcagcagcttcaactgctttgattttggagtgattgtgggctctgtgtttgaggtggtgtgggccgccatcaagccaggcagcagctttggcatctctgtgctgcgggccctgcggctgctgcgcatcttcaaggtgaccaagtactggagcagcctgaggaacctggtggtgtccctgctgaacagcatgaagagcatcatcagcctgctcttcctgctcttcctgttcatcgtggtgtttgccctgctgggcatgcagctgtttggaggccagttcaacttccaggatgagacccccaccaccaactttgacaccttccctgctgccatcctgaccgtcttccagatcctgaccggggaggactggaatgctgtgatgtaccacggcatcgagagccagggcggcgtgtccaagggcatgttcagcagcttctacttcatcgtgctgaccctgtttggaaactacaccctgctgaatgtgttcctggccatcgctgtggacaacctggccaatgcccaggagctgaccaaggatgaggaggagatggaggaggccgccaaccagaagctggccctgcagaaggccaaggaggtggccgaggtgagccccatgtctgctgccaacatcagcattgctgcccggcagcagaacagcgccaaggcccggtctgtgtgggagcagagggccagccagctgcggctgcagaacctgcgggccagctgtgaggccctgtacagcgagatggaccctgaggagcggctgcgctttgccaccaccaggcacctgcggccagacatgaagacccacctggaccggcccctggtggtggagctgggcagagatggagcccggggccctgtgggcggcaaggcccggcctgaggccgctgaggcccctgagggcgtggaccccccccggcggcaccaccgccaccgggacaaggacaagaccccagctgctggggaccaggacagagctgaggcccccaaggccgagagcggggagcccggggcccgggaggagcggccccggccccacaggagccacagcaaggaggccgccggccccccagaggcccggtctgagcggggccggggccctggccctgagggcggcagaagacaccacagaagaggcagccctgaggaggccgctgagcgggagccccggcggcaccgggcccaccgccaccaggaccccagcaaagaatgtgccggggccaagggggagcggcgggcccggcacagaggaggccccagggctggcccccgggaggccgagagcggggaggagcccgcccggcggcaccgggcccggcacaaggcccagcctgcccacgaggccgtggagaaggagaccacagagaaggaggccacagagaaggaggccgagatcgtggaggccgacaaggagaaggagctgaggaaccaccagccccgggagccccactgtgacctggagaccagcggcaccgtgacagtgggccccatgcacaccctgcccagcacctgcctgcagaaggtggaggagcagccagaagatgctgacaaccagagaaatgtgaccaggatgggcagccagcccccagaccccaacaccatcgtgcacatccctgtgatgctgaccggccccctgggggaggccaccgtggtgcccagcggaaatgtggacctggagagccaggccgagggcaagaaggaggtggaggctgatgatgtgatgaggagcggcccccggcccatcgtgccctacagctccatgttctgcctgagccccaccaacctgctgcggcgcttctgccactacatcgtgaccatgagatactttgaggtggtgatcctggtggtgattgccctgagcagcatcgccctggccgcagaagatcctgtgaggacagacagccccaggaacaatgccctgaagtacctggactacatcttcaccggggtcttcacctttgagatggtgatcaagatgattgacctgggcctgctgctgcaccctggggcctacttccgggacctgtggaacatcctggacttcatcgtggtgtctggggccctggtggcctttgccttcagcggcagcaagggcaaggacatcaacaccatcaagagcctgcgggtgctgcgggtgctgcggcccctgaagaccatcaagaggctgcccaagctgaaggctgtgtttgactgtgtggtgaacagcctgaagaatgtgctgaacatcctgattgtgtacatgctgttcatgttcatctttgctgtgattgctgtgcagctgttcaagggcaagttcttctactgcacagatgagagcaaggagctggagcgggactgccggggccagtacctggactatgagaaggaggaggtggaggcccagccccggcagtggaagaagtatgacttccactatgacaacgtgctgtgggccctgctgaccctcttcaccgtgtccactggagagggctggcccatggtgctgaagcacagcgtggatgccacctatgaggagcagggccccagccctggctacaggatggagctgagcatcttctacgtggtgtactttgtggtgttccccttcttctttgtgaacatctttgtggccctgatcatcatcaccttccaggagcagggcgacaaggtgatgtctgagtgcagcctggagaagaatgaaagagcctgcatcgactttgccatcagcgccaagcccctgacccgctacatgccccagaaccggcagagcttccagtacaagacctggacctttgtggtgagccccccatttgagtacttcatcatggccatgattgccctgaacacagtggtgctgatgatgaagttctatgatgccccctatgaatatgagctgatgctgaagtgcctgaacatcgtgttcacctccatgttctccatggagtgtgtgctgaagatcatcgccttcggcgtgctgaactacttcagagatgcctggaatgtgtttgattttgtgacagtgctgggcagcatcacagacatcctggtgacagagatcgccaacaacttcatcaacctgtccttcctgcggctcttccgggccgcccggctcatcaagctgctgcggcagggctacaccatccgcatcctgctgtggacctttgtgcagagcttcaaggccctgccctacgtgtgcctgctgattgccatgctgttcttcatctatgccatcatcggcatgcaggtgtttggaaatattgccctggatgatgacaccagcatcaacagacacaacaacttccgcaccttcctgcaggccctgatgctgctcttccgcagcgccaccggggaggcctggcatgagatcatgctgagctgcctgagcaaccaggcctgtgatgagcaggccaatgccacagaatgtggcagtgactttgcctacttctactttgtgtccttcatcttcctgtgcagcttcctgatgctgaacctgtttgtggccgtcatcatggacaactttgagtacctgacccgggacagcagcatcctgggcccccaccacctggatgagttcatccgggtgtgggccgagtatgaccctgctgcctgtggccgcatctcctacaatgacatgtttgagatgctgaagcacatgagcccccccctgggcctgggcaagaagtgcccagcccgggtggcctacaagaggctggtgaggatgaacatgcccatcagcaatgaagacatgacagtgcacttcaccagcaccctgatggccctgatcagaacagccctggagatcaagctggccccagctggcaccaagcagcaccagtgtgatgctgagctgaggaaggagatctctgtggtgtgggccaacctgccccagaagaccctggacctgctggtgcccccccacaagccagatgagatgacagtgggcaaggtgtatgctgccctgatgatctttgacttctacaagcagaacaagaccacccgggaccagatgcagcaggcccctgggggcctgagccagatgggccctgtgtccctcttccaccccctgaaggccaccctggagcagacccagcctgctgtgctgcggggggcccgggtcttcctgcggcagaagagcagcaccagcctgagcaatggaggagccatccagaaccaggagagcggcatcaaggagagcgtgtcctggggcacccagaggacccaggatgcccctcatgaggcccggccccccctggagcggggccacagcacagagatccctgtgggccgcagcggggccctggccgtggatgtgcagatgcagagcatcacccggcggggcccagatggagagccccagcccggcctggagagccagggccgggccgcctccatgccccggctggccgctgagacccagcctgtgacagatgccagccccatgaagaggagcatcagcaccctggcccagaggccccggggcacccacctgtgcagcaccaccccagaccggcccccacccagccaggccagcagccaccaccaccaccaccgctgccacagaagaagagacaggaagcagaggagcctggagaagggccccagcctgtctgctgacatggatggagcccccagcagcgctgtgggccctggcctgcccccaggagagggccccaccggctgccggcgggagcgggagcggcggcaggagcggggccgcagccaggagcggcggcagcccagcagcagcagcagcgagaagcagcgcttctacagctgtgacagatttggaggccgggagccccccaagcccaagcccagcctgagcagccaccccaccagccccacagctggccaggagcccggcccccacccccagggcagcggctctgtgaatggcagccccctgctgagcaccagcggggccagcaccccaggccggggcggccggcggcagctgccccagacccccctgaccccccggcccagcatcacctacaagacagccaacagcagccccatccactttgctggggcccagaccagcctgcctgccttcagccctggccgcctgagccggggcctgtctgagcacaatgccctgctgcagagggaccccctgagccagcccctggcccctggcagcagaattggaagtgacccctacctgggccagaggctggacagcgaggcctctgtgcacgccctgcctgaggacaccctgacctttgaggaggccgtggccaccaacagcggccgcagcagcaggaccagctatgtgagcagcctgaccagccagagccaccccctgcggcgggtgcccaacggctaccactgcaccctgggcctgagcagcggcggccgggcccggcacagctaccaccacccagaccaggaccactggtgctag

SEQ ID NO: 145850 - DNA, 7014 bp, synthetic construct
  misc_feature 1..7014: note = Description of Artificial Sequence: Synthetic coding sequence
  source 1..7014: mol_type = other DNA
atggtgcgctttggagatgagctgggcggccgctatggaggccctgggggcggggagcgggcccggggcggcggggccggcggggccggcggccctggccctgggggcctgcagcccggccagagggtgctgtacaagcagagcatcgcccagagggcccggaccatggccctgtacaaccccatccctgtgaagcagaactgcttcaccgtgaacagaagcctgtttgtgttttctgaggacaacgtggtgaggaaatatgccaagaggatcacagagtggcccccatttgagtacatgatcctggccaccatcatcgccaactgcatcgtgctggccctggagcagcacctgcctgatggagacaagacccccatgtctgagcggctggatgacacagagccctacttcatcggcatcttctgctttgaagctggcatcaagatcatcgccctgggctttgtgttccacaagggcagctacctgagaaatggctggaatgtgatggactttgtggtggtgctgaccggcatcctggccacagctggaacagactttgacctgcggaccctgcgggctgtgcgggtgctgcggcccctgaagctggtgtctggcatccccagcctgcaggtggtgctgaagagcatcatgaaggccatggtgcccctgctgcagatcggcctgctgctcttctttgccatcctgatgtttgccatcatcggcctggagttctacatgggcaagttccacaaggcctgcttccccaacagcacagatgctgagcctgtgggggacttcccctgtgggaaggaggccccagcccggctgtgtgagggggacacagagtgccgggagtactggccaggccccaactttggcatcaccaactttgacaacatcctgtttgccatcctgaccgtcttccagtgcatcaccatggagggctggacagacatcctgtacaacaccaatgatgctgctggcaacacctggaactggctgtacttcatccccctcatcatcatcggcagcttcttcatgctgaacctggtgctgggcgtgctgagcggggagtttgccaaggagcgggagcgggtggagaacagaagagccttcctgaagctgcggcggcagcagcagatcgagcgggagctgaatggctacctggagtggatcttcaaggccgaggaggtgatgctggccgaggaggacagaaatgctgaggagaagagccccctggatgtgctgaagagagctgccaccaagaagagcagaaatgacctgattcatgctgaggagggagaagatagatttgctgacctgtgtgctgtgggcagcccctttgcccgggccagcctgaagagcggcaagacagagagcagcagctacttccggaggaaggagaagatgttccgcttcttcatccggaggatggtgaaggcccagagcttctactgggtggtgctgtgtgtggtggccctgaacaccctgtgtgtggccatggtgcactacaaccagccccggcggctgaccaccaccctgtactttgctgagtttgtgttcctgggcctcttcctgacagagatgagcctgaagatgtatggcctgggccccaggagctacttccgcagcagcttcaactgctttgattttggagtcatcgtgggctctgtgtttgaggtggtgtgggccgccatcaagccaggcagcagctttggcatctctgtgctgcgggccctgcggctgctgcgcatcttcaaggtgaccaagtactggagcagcctgaggaacctggtggtgtccctgctgaacagcatgaagagcatcatcagcctgctcttcctgctcttcctgttcatcgtggtgtttgccctgctgggcatgcagctgtttggaggccagttcaacttccaggatgagacccccaccaccaactttgacaccttccctgctgccatcctgactgtgttccagatcctgactggagaggactggaatgctgtgatgtaccatggaattgagagccagggcggcgtgtccaagggcatgttcagcagcttctacttcatcgtgctgaccctgtttggaaactacaccctgctgaatgtgttcctggccatcgctgtggacaacctggccaatgcccaggagctgaccaaggatgaggaggagatggaggaggccgccaaccagaagctggccctgcagaaggccaaggaggtggccgaggtgagccccatgtctgctgccaacatcagcattgctgcccggcagcagaacagcgccaaggcccggtctgtgtgggagcagagggccagccagctgcggctgcagaacctgcgggccagctgtgaggccctgtacagcgagatggaccctgaggagcggctgcgctttgccaccaccaggcacctgcggccagacatgaagacccacctggaccggcccctggtggtggagctgggcagagatggagcccggggccctgtgggcggcaaggcccggcctgaggccgctgaggcccctgagggcgtggaccccccaagaagacaccaccgccaccgggacaaggacaagaccccagctgctggggaccaggacagagctgaggcccccaaggccgagagcggggagcccggggcccgggaggagcggccccggccccacaggagccacagcaaggaggccgccggccccccagaggcccggtctgagcggggccggggccctggccctgagggcggccgccgccaccaccggcggggcagccctgaggaggccgctgagcgggagcccaggaggcaccgggcccaccgccaccaggaccccagcaaagaatgtgccggggccaagggggagcggcgggcccggcaccggggcggcccccgggccggcccccgggaggccgagagcggggaggagcccgcccggcggcaccgggcccggcacaaggcccagcctgcccatgaagctgtggagaaggagaccacagagaaggaggccacagagaaggaggccgagatcgtggaggccgacaaggagaaggagctgaggaaccaccagccccgggagccccactgtgacctggagaccagcggcaccgtgacagtgggccccatgcacaccctgcccagcacctgcctgcagaaggtggaggagcagccagaagatgctgacaaccagagaaatgtgaccaggatgggcagccagcccccagaccccaacaccatcgtgcacatccctgtgatgctgaccggccccctgggggaggccaccgtggtgcccagcggaaatgtggacctggagagccaggccgagggcaagaaggaggtggaggctgatgatgtgatgaggagcggcccccggcccatcgtgccctacagctccatgttctgcctgagccccaccaacctgctgcggcgcttctgccactacatcgtgaccatgagatactttgaggtggtgatcctggtggtgattgccctgagcagcatcgccctggccgctgaggaccctgtgaggacagacagccccagaaataatgccctgaagtacctggactacatcttcaccggggtcttcacctttgagatggtgatcaagatgattgacctgggcctgctgctgcaccctggggcctacttccgggacctgtggaacatcctggacttcatcgtggtgtctggggccctggtggcctttgccttcagcggcagcaagggcaaggacatcaacaccatcaagagcctgcgggtgctgcgggtgctgcggcccctgaagaccatcaagaggctgcccaagctgaaggctgtgtttgactgtgtggtgaacagcctgaagaatgtgctgaacatcctgattgtgtacatgctgttcatgttcatctttgctgtgattgctgtgcagctgttcaagggcaagttcttctactgcacagatgagagcaaggagctggagcgggactgccggggccagtacctggactatgagaaggaggaggtggaggcccagccccggcagtggaagaagtatgacttccactatgacaacgtgctgtgggccctgctgaccctcttcaccgtgtccactggagagggctggcccatggtgctgaagcacagcgtggatgccacctatgaggagcagggccccagccctggctacaggatggagctgagcatcttctacgtggtgtactttgtggtgttccccttcttctttgtgaacatctttgtggccctgatcatcatcaccttccaggagcagggcgacaaggtgatgtctgaatgttccctggagaagaatgaaagagcctgcatcgactttgccatcagcgccaagcccctgacccgctacatgccccagaaccggcagagcttccagtacaagacctggacctttgtggtgtccccaccatttgagtacttcatcatggccatgattgccctgaacacagtggtgctgatgatgaagttctatgatgccccctatgaatatgagctgatgctgaagtgcctgaacatcgtgttcacctccatgttctccatggagtgtgtgctgaagatcatcgcctttggagtgctgaactacttcagagatgcctggaatgtgtttgattttgtgacagtgctgggcagcatcacagacatcctggtgacagaaattgccaacaacttcatcaacctgtccttcctgcggctcttccgggccgcccggctcatcaagctgctgcggcagggctacaccatccgcatcctgctgtggacctttgtgcagagcttcaaggccctgccctacgtgtgcctgctgattgccatgctgttcttcatctatgccatcatcggcatgcaggtgtttggaaacatcgccctggatgatgacaccagcatcaacagacacaacaacttccgcaccttcctgcaggccctgatgctgctcttccgcagcgccactggagaggcctggcatgagatcatgctgagctgcctgagcaaccaggcctgtgatgagcaggccaatgccacagaatgtggcagtgactttgcctacttctactttgtgtccttcatcttcctgtgcagcttcctgatgctgaacctgtttgtggccgtcatcatggacaactttgagtacctgacccgggacagcagcatcctgggcccccaccacctggatgagttcatccgggtgtgggccgagtatgaccctgctgcctgtggccgcatctcctacaatgacatgtttgagatgctgaagcacatgagcccccccctgggcctgggcaagaagtgcccagcccgggtggcctacaagaggctggtgaggatgaacatgcccatcagcaatgaagacatgacagtgcacttcaccagcaccctgatggccctgatcagaacagccctggagatcaagctggccccagctggcaccaagcagcaccagtgtgatgctgagctgaggaaggagatctctgtggtgtgggccaacctgccccagaagaccctggacctgctggtgcccccccacaagccagatgagatgacagtgggcaaggtgtatgctgccctgatgatctttgacttctacaagcagaacaagaccacccgggaccagatgcagcaggcccctgggggcctgagccagatgggccctgtgtccctcttccaccccctgaaggccaccctggagcagacccagcctgctgtgctgcggggggcccgggtcttcctgcggcagaagagcagcaccagcctgagcaatggaggagccatccagaaccaggagagcggcatcaaggagagcgtgtcctggggcacccagaggacccaggatgcccctcatgaggcccggccccccctggagcggggccacagcacagagatccctgtgggccgcagcggggccctggccgtggatgtgcagatgcagagcatcacccggcggggcccagatggagagccccagcccggcctggagagccagggccgggccgcctccatgccccggctggccgctgagacccagcctgtgacagatgccagccccatgaagaggagcatcagcaccctggcccagaggccccggggcacccacctgtgcagcaccaccccagaccggcccccacccagccaggccagcagccaccaccaccaccaccgctgccacagaagaagagacaggaagcagaggagcctggagaagggccccagcctgtctgctgacatggatggagcccccagcagcgctgtgggccctggcctgcccccaggagagggccccaccggctgcagaagagagcgggagcggcggcaggagcggggccgcagccaggagcggcggcagcccagcagcagcagcagcgagaagcagcgcttctacagctgtgacagatttggaggccgggagccccccaagcccaagcccagcctgagcagccaccccaccagccccacagctggccaggagcccggcccccacccccagggcagcggctctgtgaatggcagccccctgctgagcaccagcggggccagcaccccaggccggggcggccggcggcagctgccccagacccccctgaccccccggcccagcatcacctacaagacagccaacagcagccccatccactttgctggggcccagaccagcctgcctgccttcagccctggccgcctgagccggggcctgtctgagcacaatgccctgctgcagagggaccccctgagccagcccctggcccctggcagccgcatcggcagtgacccctacctgggccagaggctggacagcgaggcctctgtgcacgccctgcctgaggacaccctgacctttgaggaggccgtggccaccaacagcggccgcagcagcaggaccagctatgtgagcagcctgaccagccagagccaccccctgcggcgggtgcccaacggctaccactgcaccctgggcctgagcagcggcggccgggcccggcacagctaccaccacccagaccaggaccactggtgctag

SEQ ID NO: 145851 - DNA, 495 bp, synthetic construct
  misc_feature 1..495: note = Description of Artificial Sequence: Synthetic coding sequence
  source 1..495: mol_type = other DNA
aacttccgcaccttcctgcaggccctgatgctgctcttccgcagcgccactggagaggcctggcatgagatcatgctgagctgcctgagcaaccaggcctgtgatgagcaggccaatgccacagaatgtggcagtgactttgcctacttctactttgtgtccttcatcttcctgtgcagcttcctgatgctgaacctgtttgtggccgtcatcatggacaactttgagtacctgacccgggacagcagcatcctgggcccccaccacctggatgagttcatccgggtgtgggccgagtatgaccctgctgcctgctgccgcatccactacaaggacatgtacagcctgctgcgctgcatcgcccctcctgtgggcctgggcaagaactgcccccggcggctggcctacaagaggctggtgaggatgaacatgcccatcagcaatgaagacatgacagtgcacttcaccagcaccctgatggccctgatcagatag

SEQ ID NO: 145852 - DNA, 327 bp, synthetic construct
  misc_feature 1..327: note = Description of Artificial Sequence: Synthetic coding sequence
  source 1..327: mol_type = other DNA
ctgaggaaccaccagccccgggagccccactgtgacctggagaccagcggcaccgtgacagtgggccccatgcacaccctgcccagcacctgcctgcagaaggtggaggagcagccagaagatgctgacaaccagagaaatgtgaccaggatgggcagccagcccccagaccccaacaccatcgtgcacatccctgtgatgctgaccggccccctgggggaggccaccgtggtgcccaccctggagaagaatgtgtgcctcttcctgctgacctccatggtgtctgatgagaagagcaccgtcatccgcatcgtgttcttcctgtag

SEQ ID NO: 145853 - DNA, 7020 bp, synthetic construct
  misc_feature 1..7020: note = Description of Artificial Sequence: Synthetic coding sequence
  source 1..7020: mol_type = other DNA
atggtgcgctttggagatgagctgggcggccgctatggaggccctgggggcggggagcgggcccggggcggcggggccggcggggccggcggccctggccctgggggcctgcagcccggccagagggtgctgtacaagcagagcatcgcccagagggcccggaccatggccctgtacaaccccatccctgtgaagcagaactgcttcaccgtgaacagaagcctgtttgtgttttctgaggacaacgtggtgaggaaatatgccaagaggatcacagagtggcccccatttgagtacatgatcctggccaccatcatcgccaactgcatcgtgctggccctggagcagcacctgcctgatggagacaagacccccatgtctgagcggctggatgacacagagccctacttcatcggcatcttctgctttgaagctggcatcaagatcatcgccctgggctttgtgttccacaagggcagctacctgagaaatggctggaatgtgatggactttgtggtggtgctgaccggcatcctggccacagctggaacagactttgacctgcggaccctgcgggctgtgcgggtgctgcggcccctgaagctggtgtctggcatccccagcctgcaggtggtgctgaagagcatcatgaaggccatggtgcccctgctgcagatcggcctgctgctcttctttgccatcctgatgtttgccatcatcggcctggagttctacatgggcaagttccacaaggcctgcttccccaacagcacagatgctgagcctgtgggggacttcccctgtgggaaggaggccccagcccggctgtgtgagggggacacagagtgccgggagtactggccaggccccaactttggcatcaccaactttgacaacatcctgtttgccatcctgaccgtcttccagtgcatcaccatggagggctggacagacatcctgtacaacaccaatgatgctgctggcaacacctggaactggctgtacttcatccccctcatcatcatcggcagcttcttcatgctgaacctggtgctgggcgtgctgagcggggagtttgccaaggagcgggagcgggtggagaacagaagagccttcctgaagctgcggcggcagcagcagatcgagcgggagctgaatggctacctggagtggatcttcaaggccgaggaggtgatgctggccgaggaggacagaaatgctgaggagaagagccccctggatgtgctgaagagagctgccaccaagaagagcagaaatgacctgattcatgctgaggagggagaagatagatttgctgacctgtgtgctgtgggcagcccctttgcccgggccagcctgaagagcggcaagacagagagcagcagctacttccggaggaaggagaagatgttccgcttcttcatccggaggatggtgaaggcccagagcttctactgggtggtgctgtgtgtggtggccctgaacaccctgtgtgtggccatggtgcactacaaccagccccggcggctgaccaccaccctgtactttgctgagtttgtgttcctgggcctcttcctgacagagatgagcctgaagatgtatggcctgggccccaggagctacttccgcagcagcttcaactgctttgattttggagtcatcgtgggctctgtgtttgaggtggtgtgggccgccatcaagccaggcagcagctttggcatctctgtgctgcgggccctgcggctgctgcgcatcttcaaggtgaccaagtactggagcagcctgaggaacctggtggtgtccctgctgaacagcatgaagagcatcatcagcctgctcttcctgctcttcctgttcatcgtggtgtttgccctgctgggcatgcagctgtttggaggccagttcaacttccaggatgagacccccaccaccaactttgacaccttccctgctgccatcctgactgtgttccagatcctgactggagaggactggaatgctgtgatgtaccatggaattgagagccagggcggcgtgtccaagggcatgttcagcagcttctacttcatcgtgctgaccctgtttggaaactacaccctgctgaatgtgttcctggccatcgctgtggacaacctggccaatgcccaggagctgaccaaggatgaggaggagatggaggaggccgccaaccagaagctggccctgcagaaggccaaggaggtggccgaggtgagccccatgtctgctgccaacatcagcattgctgcccggcagcagaacagcgccaaggcccggtctgtgtgggagcagagggccagccagctgcggctgcagaacctgcgggccagctgtgaggccctgtacagcgagatggaccctgaggagcggctgcgctttgccaccaccaggcacctgcggccagacatgaagacccacctggaccggcccctggtggtggagctgggcagagatggagcccggggccctgtgggcggcaaggcccggcctgaggccgctgaggcccctgagggcgtggaccccccaagaagacaccaccgccaccgggacaaggacaagaccccagctgctggggaccaggacagagctgaggcccccaaggccgagagcggggagcccggggcccgggaggagcggccccggccccacaggagccacagcaaggaggccgccggccccccagaggcccggtctgagcggggccggggccctggccctgagggcggccgccgccaccaccggcggggcagccctgaggaggccgctgagcgggagcccaggaggcaccgggcccaccgccaccaggaccccagcaaagaatgtgccggggccaagggggagcggcgggcccggcaccggggcggcccccgggccggcccccgggaggccgagagcggggaggagcccgcccggcggcaccgggcccggcacaaggcccagcctgcccatgaagctgtggagaaggagaccacagagaaggaggccacagagaaggaggccgagatcgtggaggccgacaaggagaaggagctgaggaaccaccagccccgggagccccactgtgacctggagaccagcggcaccgtgacagtgggccccatgcacaccctgcccagcacctgcctgcagaaggtggaggagcagccagaagatgctgacaaccagagaaatgtgaccaggatgggcagccagcccccagaccccaacaccatcgtgcacatccctgtgatgctgaccggccccctgggggaggccaccgtggtgcccagcggaaatgtggacctggagagccaggccgagggcaagaaggaggtggaggctgatgatgtgatgaggagcggcccccggcccatcgtgccctacagctccatgttctgcctgagccccaccaacctgctgcggcgcttctgccactacatcgtgaccatgagatactttgaggtggtgatcctggtggtgattgccctgagcagcatcgccctggccgctgaggaccctgtgaggacagacagccccagaaataatgccctgaagtacctggactacatcttcaccggggtcttcacctttgagatggtgatcaagatgattgacctgggcctgctgctgcaccctggggcctacttccgggacctgtggaacatcctggacttcatcgtggtgtctggggccctggtggcctttgccttcagcggcagcaagggcaaggacatcaacaccatcaagagcctgcgggtgctgcgggtgctgcggcccctgaagaccatcaagaggctgcccaagctgaaggctgtgtttgactgtgtggtgaacagcctgaagaatgtgctgaacatcctgattgtgtacatgctgttcatgttcatctttgctgtgattgctgtgcagctgttcaagggcaagttcttctactgcacagatgagagcaaggagctggagcgggactgccggggccagtacctggactatgagaaggaggaggtggaggcccagccccggcagtggaagaagtatgacttccactatgacaacgtgctgtgggccctgctgaccctcttcaccgtgtccactggagagggctggcccatggtgctgaagcacagcgtggatgccacctatgaggagcagggccccagccctggctacaggatggagctgagcatcttctacgtggtgtactttgtggtgttccccttcttctttgtgaacatctttgtggccctgatcatcatcaccttccaggagcagggcgacaaggtgatgtctgaatgttccctggagaagaatgaaagagcctgcatcgactttgccatcagcgccaagcccctgacccgctacatgccccagaaccggcagagcttccagtacaagacctggacctttgtggtgtccccaccatttgagtacttcatcatggccatgattgccctgaacacagtggtgctgatgatgaagttctatgatgccccctatgaatatgagctgatgctgaagtgcctgaacatcgtgttcacctccatgttctccatggagtgtgtgctgaagatcatcgcctttggagtgctgaactacttcagagatgcctggaatgtgtttgattttgtgacagtgctgggcagcatcacagacatcctggtgacagaaattgctgagaccaacaacttcatcaacctgtccttcctgcggctcttccgggccgcccggctcatcaagctgctgcggcagggctacaccatccgcatcctgctgtggacctttgtgcagagcttcaaggccctgccctacgtgtgcctgctgattgccatgctgttcttcatctatgccatcatcggcatgcaggtgtttggaaacatcgccctggatgatgacaccagcatcaacagacacaacaacttccgcaccttcctgcaggccctgatgctgctcttccgcagcgccactggagaggcctggcatgagatcatgctgagctgcctgagcaaccaggcctgtgatgagcaggccaatgccacagaatgtggcagtgactttgcctacttctactttgtgtccttcatcttcctgtgcagcttcctgatgctgaacctgtttgtggccgtcatcatggacaactttgagtacctgacccgggacagcagcatcctgggcccccaccacctggatgagttcatccgggtgtgggccgagtatgaccctgctgcctgtggccgcatctcctacaatgacatgtttgagatgctgaagcacatgagcccccccctgggcctgggcaagaagtgcccagcccgggtggcctacaagaggctggtgaggatgaacatgcccatcagcaatgaagacatgacagtgcacttcaccagcaccctgatggccctgatcagaacagccctggagatcaagctggccccagctggcaccaagcagcaccagtgtgatgctgagctgaggaaggagatctctgtggtgtgggccaacctgccccagaagaccctggacctgctggtgcccccccacaagccagatgagatgacagtgggcaaggtgtatgctgccctgatgatctttgacttctacaagcagaacaagaccacccgggaccagatgcagcaggcccctgggggcctgagccagatgggccctgtgtccctcttccaccccctgaaggccaccctggagcagacccagcctgctgtgctgcggggggcccgggtcttcctgcggcagaagagcagcaccagcctgagcaatggaggagccatccagaaccaggagagcggcatcaaggagagcgtgtcctggggcacccagaggacccaggatgcccctcatgaggcccggccccccctggagcggggccacagcacagagatccctgtgggccgcagcggggccctggccgtggatgtgcagatgcagagcatcacccggcggggcccagatggagagccccagcccggcctggagagccagggccgggccgcctccatgccccggctggccgctgagacccagcctgtgacagatgccagccccatgaagaggagcatcagcaccctggcccagaggccccggggcacccacctgtgcagcaccaccccagaccggcccccacccagccaggccagcagccaccaccaccaccaccgctgccacagaagaagagacaggaagcagaggagcctggagaagggccccagcctgtctgctgacatggatggagcccccagcagcgctgtgggccctggcctgcccccaggagagggccccaccggctgcagaagagagcgggagcggcggcaggagcggggccgcagccaggagcggcggcagcccagcagcagcagcagcgagaagcagcgcttctacagctgtgacagatttggaggccgggagccccccaagcccaagcccagcctgagcagccaccccaccagccccacagctggccaggagcccggcccccacccccagggcagcggctctgtgaatggcagccccctgctgagcaccagcggggccagcaccccaggccggggcggccggcggcagctgccccagacccccctgaccccccggcccagcatcacctacaagacagccaacagcagccccatccactttgctggggcccagaccagcctgcctgccttcagccctggccgcctgagccggggcctgtctgagcacaatgccctgctgcagagggaccccctgagccagcccctggcccctggcagccgcatcggcagtgacccctacctgggccagaggctggacagcgaggcctctgtgcacgccctgcctgaggacaccctgacctttgaggaggccgtggccaccaacagcggccgcagcagcaggaccagctatgtgagcagcctgaccagccagagccaccccctgcggcgggtgcccaacggctaccactgcaccctgggcctgagcagcggcggccgggcccggcacagctaccaccacccagaccaggaccactggtgctag

SEQ ID NO: 145854 - DNA, 498 bp, synthetic construct
  misc_feature 1..498: note = Description of Artificial Sequence: Synthetic coding sequence
  source 1..498: mol_type = other DNA
tgaaacttccgcaccttcctgcaggccctgatgctgctcttccgcagcgccaccggggaggcctggcatgagatcatgctgagctgcctgagcaaccaggcctgtgatgagcaggccaatgccacagaatgtggcagtgactttgcctacttctactttgtgtccttcatcttcctgtgcagcttcctgatgctgaacctgtttgtggccgtcatcatggacaactttgagtacctgacccgggacagcagcatcctgggcccccaccacctggatgagttcatccgggtgtgggccgagtatgaccctgctgcctgctgccgcatccactacaaggacatgtacagcctgctgcgctgcatcgcccctcctgtgggcctgggcaagaactgcccccggcggctggcctacaagaggctggtgaggatgaacatgcccatcagcaatgaagacatgacagtgcacttcaccagcaccctgatggccctgatcagatag

SEQ ID NO: 145855 - DNA, 564 bp, synthetic construct
  misc_feature 1..564: note = Description of Artificial Sequence: Synthetic coding sequence
  source 1..564: mol_type = other DNA
ctgaggaaccaccagccccgggagccccactgtgacctggagaccagcggcaccgtgacagtgggccccatgcacaccctgcccagcacctgcctgcagaaggtggaggagcagccagaagatgctgacaaccagagaaatgtgaccaggatgggcagccagcccccagaccccaacaccatcgtgcacatccctgtgatgctgaccggccccctgggggaggccaccgtggtgcccagccccaccatcggccgcctgcaggccgaggagcagggcgagcccgcccgggtgtccaagctgaacctggagagtgatgtgcggggccaggaggccagcagcactggagagcgctaccgcctgggcggcggcaatgtggacctggagagccaggccgagggcaagaaggaggtggaggctgatgatgtgatgaggagcggcccccggcccatcgtgccctacagctccatgttctgcctgagccccaccaacctgctgcggcgcttctgccactacatcgtgaccatgagatactttgaggtggtgatcctggtggtgattgcctag

SEQ ID NO: 145856 - DNA, 6786 bp, synthetic construct
  misc_feature 1..6786: note = Description of Artificial Sequence: Synthetic coding sequence
  source 1..6786: mol_type = other DNA
atggccaggtttggagatgagatgcctgcccgctatggaggcggcggcagcggggctgctgctggggtggtggtgggcagcggcggcggcagaggagctgggggcagccggcagggcggccagcccggggcccagaggatgtacaagcagagcatggcccagagggcccggaccatggccctgtacaaccccatccctgtgcggcagaactgcctgactgtgaacagaagcctcttcctgttctctgaagataatgtggtgaggaaatatgccaagaagatcacagagtggcccccatttgagtacatgatcctggccaccatcatcgccaactgcatcgtgctggccctggagcagcacctgcctgatgatgacaagacccccatgtctgagcggctggatgacacagagccctacttcatcggcatcttctgctttgaggccggcatcaagatcatcgccctgggctttgccttccacaagggcagctacctgagaaatggctggaatgtgatggactttgtggtggtgctgaccggcatcctggccaccgtgggcacagaatttgacctgcggaccctgcgggctgtgcgggtgctgcggcccctgaagctggtgtctggcatccccagcctgcaggtggtgctgaagagcatcatgaaggccatgatccccctgctgcagatcggcctgctgctcttctttgccatcctgatctttgccatcatcggcctggagttctacatgggcaagttccacaccacctgctttgaggagggcacagatgacatccagggcgagagccctgccccctgtggcacagaggagcccgcccggacctgccccaacggcaccaagtgccagccctactgggagggccccaacaacggcatcacccagtttgacaacatcctgtttgctgtgctgaccgtcttccagtgcatcaccatggagggctggacagacctgctgtacaacagcaatgatgccagcggcaacacctggaactggctgtacttcatccccctcatcatcatcggcagcttcttcatgctgaacctggtgctgggcgtgctgagcggggagtttgccaaggagcgggagcgggtggagaacagaagagccttcctgaagctgcggcggcagcagcagatcgagcgggagctgaatggctacatggagtggatcagcaaggccgaggaggtgatcctggccgaggatgaaacagatggagagcagaggcacccctttgatggagccctgcggaggaccaccatcaagaagagcaagacagacctgctgaaccctgaggaggccgaggaccagctggccgacatcgcctctgtgggcagcccctttgcccgggccagcatcaagagcgccaagctggagaacagcaccttcttccacaagaaggagaggaggatgaggttctacatccggaggatggtgaagacccaggccttctactggacagtgctgagcctggtggccctgaacaccctgtgtgtggccatcgtgcactacaaccagcctgagtggctgagtgacttcctgtactatgcagagttcatcttcctgggcctcttcatgtctgagatgttcatcaagatgtatggcctgggcacccggccctacttccacagcagcttcaactgctttgactgtggggtcatcatcggcagcatctttgaggtgatctgggccgtcatcaagccaggcaccagctttggcatctctgtgctgcgggccctgcggctgctgcgcatcttcaaggtgaccaagtactgggccagcctgaggaacctggtggtgtccctgctgaacagcatgaagagcatcatcagcctgctcttcctgctcttcctgttcatcgtggtgtttgccctgctgggcatgcagctgtttggaggccagttcaactttgatgagggcaccccacccaccaactttgacaccttccctgctgccatcatgaccgtcttccagatcctgaccggggaggactggaatgaggtgatgtatgatggcatcaagagccagggcggcgtgcagggcggcatggtgttcagcatctacttcatcgtgctgaccctgtttggaaactacaccctgctgaatgtgttcctggccatcgctgtggacaacctggccaatgcccaggagctgaccaaggatgagcaggaggaggaggaggccgccaaccagaagctggccctgcagaaggccaaggaggtggccgaggtgagccccctgtctgctgccaacatgagcattgctgtgaaggagcagcagaagaaccagaagccagccaagtctgtgtgggagcagaggaccagcgagatgaggaagcagaacctgctggccagccgggaggccctgtacaatgagatggaccctgatgagcgctggaaggccgcctacaccaggcacctgcggccagacatgaagacccacctggaccggcccctggtggtggacccccaggagaacagaaacaacaacaccaacaagagcagagctgctgagcccaccgtggaccagaggctgggccagcagagagctgaggacttcctgaggaagcaggcccgctaccatgaccgggcccgggaccccagcggcagcgctggcctggatgcccggcggccctgggccggcagccaggaggccgagctgagccgggagggcccctacggccgggagagtgaccaccacgcccgggagggcagcctggagcagcccggcttctgggagggggaggccgagcggggcaaggccggggacccccacagaagacatgtgcaccggcagggcggcagccgggagagccgcagcggcagccccaggactggagcagatggagagcacagaagacaccgggcccacagaagacctggagaggagggccctgaggacaaggccgagcggcgggcccggcaccgggagggcagcaggcctgcccggggcggggagggggagggggagggcccagatggaggagagaggagaagaagacaccgccacggggccccagccacctatgaaggagatgcccggcgggaggacaaggagaggaggcacagaagaaggaaggagaaccagggcagcggcgtgcctgtgtctggccccaacctgagcaccacccggcccatccagcaggacctgggccggcaggacccccccctggccgaggacatcgacaacatgaagaacaacaagctggccacagctgagagcgctgcccctcatggcagcctgggccatgctggcctgccccagagccctgccaagatgggcaacagcacagaccccggccccatgctggccatcccagccatggccaccaacccccagaatgctgccagcaggaggacccccaacaaccctggcaaccccagcaaccctggcccccccaagaccccagagaacagcctcatcgtgaccaaccccagcggcacccagaccaacagcgccaagacagccaggaagccagaccacaccaccgtggacatccccccagcctgccccccacccctgaaccacacagtggtgcaggtgaacaagaatgccaacccagaccccctgcccaagaaggaggaggagaagaaggaggaggaggaggatgacagaggagaagatggccccaagcccatgccaccctacagctccatgttcatcctgagcaccaccaaccccctgcggcggctgtgccactacatcctgaacctgcgctactttgagatgtgcatcctgatggtgattgccatgagcagcatcgccctggccgctgaggaccctgtgcagcccaatgcccccagaaataatgtgctgcgctactttgattatgtgttcaccggggtcttcacctttgagatggtgatcaagatgattgacctgggcctggtgctgcaccagggcgcctacttccgggacctgtggaacatcctggacttcatcgtggtgtctggggccctggtggcctttgccttcaccggcaacagcaagggcaaggacatcaacaccatcaagagcctgcgggtgctgcgggtgctgcggcccctgaagaccatcaagaggctgcccaagctgaaggctgtgtttgactgtgtggtgaacagcctgaagaatgtgttcaacatcctgattgtgtacatgctgttcatgttcatctttgctgtggtggccgtgcagctgttcaagggcaagttcttccactgcacagatgagagcaaggagtttgagaaggactgccggggcaagtacctgctgtatgagaagaatgaggtgaaggcccgggaccgggagtggaagaagtatgagttccactatgacaacgtgctgtgggccctgctgaccctcttcaccgtgtccactggagagggctggccccaggtgctgaagcacagcgtggatgccacctttgagaaccagggccccagccctggctacaggatggagatgagcatcttctacgtggtgtactttgtggtgttccccttcttctttgtgaacatctttgtggccctgatcatcatcaccttccaggagcagggcgacaagatgatggaggagtacagcctggagaagaatgaaagagcctgcatcgactttgccatcagcgccaagcccctgaccaggcacatgccccagaacaagcagagcttccagtacaggatgtggcagtttgtggtgagccccccatttgagtacaccatcatggccatgattgccctgaacaccatcgtgctgatgatgaagttctacggggcctctgtggcctatgaaaatgccctgcgggtcttcaacatcgtgttcaccagcctcttcagcctggagtgtgtgctgaaggtgatggccttcggcatcctgaactacttcagagatgcctggaacatctttgattttgtgacagtgctgggcagcatcacagacatcctggtgacagaatttggaaacaacttcatcaacctgtccttcctgcggctcttccgggccgcccggctcatcaagctgctgcggcagggctacaccatccgcatcctgctgtggacctttgtgcagagcttcaaggccctgccctacgtgtgcctgctgattgccatgctgttcttcatctatgccatcatcggcatgcaggtgtttggaaatattggaattgatgtggaggatgaggacagtgatgaagatgagttccagatcacagagcacaacaacttccgcaccttcttccaggccctgatgctgctcttccgcagcgccaccggggaggcctggcacaacatcatgctgagctgcctgagcggcaagccctgtgacaagaacagcggcatcctgaccagagaatgtggaaatgaatttgcctacttctactttgtgtccttcatcttcctgtgcagcttcctgatgctgaacctgtttgtggccgtcatcatggacaactttgagtacctgacccgggacagcagcatcctgggcccccaccacctggatgaatatgtgcgggtgtgggccgagtatgaccctgctgcctgtggccgcatccactacaaggacatgtacagcctgctgcgggtcatcagcccccccctgggcctgggcaagaagtgcccccaccgggtggcctgcaagaggctgctgaggatggacctgcctgtggctgatgacaacacagtgcacttcaacagcaccctgatggccctgatcagaacagccctggacatcaagatcgccaagggcggcgctgacaagcagcagatggatgctgagctgaggaaggagatgatggccatctggcccaacctgagccagaagaccctggacctgctggtgaccccccacaagagcacagacctgactgtgggcaagatctatgctgccatgatgatcatggagtactaccggcagagcaaggccaagaagctgcaggccatgagggaggagcaggacaggacccccctgatgttccagaggatggagccccccagccccacccaggagggcggccctggccagaatgccctgcccagcacccagctggaccccggcggggccctgatggcccatgaaagtggcctgaaggagagccccagctgggtgacccagagggcccaggagatgttccagaagacaggcacctggagccctgagcagggccccccaacagacatgcccaacagccagcccaacagccagagcgtggagatgagggagatgggcagagatggctacagcgacagcgagcactacctgcccatggagggccagggccgggccgcctccatgccccggctgcctgctgagaaccagaggcggcggggccggccccggggcaacaacctgagcaccatcagtgacaccagccccatgaagaggtctgcctctgtgctgggccccaaggcccggcggctggatgactacagcctggagcgggtgcccccagaggagaaccagaggcaccaccagaggcggcgggacaggagccaccgggccagcgagaggagcctgggccgctacacagatgtggacaccggcctgggcacagacctgtccatgaccacccagagcggggacctgcccagcaaggagcgggaccaggagcggggccggcccaaggacaggaagcaccggcagcaccaccaccaccaccaccaccaccaccaccccccacctccagacaaggacagatatgcccaggagaggccagaccacggccgggcccgggcccgggaccagcgctggagccgcagccccagcgagggccgggagcacatggcccaccggcagtag

SEQ ID NO: 145857 - DNA, 7488 bp, synthetic construct
  misc_feature 1..7488: note = Description of Artificial Sequence: Synthetic coding sequence
  source 1..7488: mol_type = other DNA
atggccaggtttggagatgagatgcctgcccgctatggaggcggcggcagcggggctgctgctggggtggtggtgggcagcggcggcggcagaggagctgggggcagccggcagggcggccagcccggggcccagaggatgtacaagcagagcatggcccagagggcccggaccatggccctgtacaaccccatccctgtgcggcagaactgcctgactgtgaacagaagcctcttcctgttctctgaagataatgtggtgaggaaatatgccaagaagatcacagagtggcccccatttgagtacatgatcctggccaccatcatcgccaactgcatcgtgctggccctggagcagcacctgcctgatgatgacaagacccccatgtctgagcggctggatgacacagagccctacttcatcggcatcttctgctttgaggccggcatcaagatcatcgccctgggctttgccttccacaagggcagctacctgagaaatggctggaatgtgatggactttgtggtggtgctgaccggcatcctggccaccgtgggcacagaatttgacctgcggaccctgcgggctgtgcgggtgctgcggcccctgaagctggtgtctggcatccccagcctgcaggtggtgctgaagagcatcatgaaggccatgatccccctgctgcagatcggcctgctgctcttctttgccatcctgatctttgccatcatcggcctggagttctacatgggcaagttccacaccacctgctttgaggagggcacagatgacatccagggcgagagccctgccccctgtggcacagaggagcccgcccggacctgccccaacggcaccaagtgccagccctactgggagggccccaacaacggcatcacccagtttgacaacatcctgtttgctgtgctgaccgtcttccagtgcatcaccatggagggctggacagacctgctgtacaacagcaatgatgccagcggcaacacctggaactggctgtacttcatccccctcatcatcatcggcagcttcttcatgctgaacctggtgctgggcgtgctgagcggggagtttgccaaggagcgggagcgggtggagaacagaagagccttcctgaagctgcggcggcagcagcagatcgagcgggagctgaatggctacatggagtggatcagcaaggccgaggaggtgatcctggccgaggatgaaacagatggagagcagaggcacccctttgatggagccctgcggaggaccaccatcaagaagagcaagacagacctgctgaaccctgaggaggccgaggaccagctggccgacatcgcctctgtgggcagcccctttgcccgggccagcatcaagagcgccaagctggagaacagcaccttcttccacaagaaggagaggaggatgaggttctacatccggaggatggtgaagacccaggccttctactggacagtgctgagcctggtggccctgaacaccctgtgtgtggccatcgtgcactacaaccagcctgagtggctgagtgacttcctgtactatgcagagttcatcttcctgggcctcttcatgtctgagatgttcatcaagatgtatggcctgggcacccggccctacttccacagcagcttcaactgctttgactgtggggtcatcatcggcagcatctttgaggtgatctgggccgtcatcaagccaggcaccagctttggcatctctgtgctgcgggccctgcggctgctgcgcatcttcaaggtgaccaagtactgggccagcctgaggaacctggtggtgtccctgctgaacagcatgaagagcatcatcagcctgctcttcctgctcttcctgttcatcgtggtgtttgccctgctgggcatgcagctgtttggaggccagttcaactttgatgagggcaccccacccaccaactttgacaccttccctgctgccatcatgaccgtcttccagatcctgaccggggaggactggaatgaggtgatgtatgatggcatcaagagccagggcggcgtgcagggcggcatggtgttcagcatctacttcatcgtgctgaccctgtttggaaactacaccctgctgaatgtgttcctggccatcgctgtggacaacctggccaatgcccaggagctgaccaaggatgagcaggaggaggaggaggccgccaaccagaagctggccctgcagaaggccaaggaggtggccgaggtgagccccctgtctgctgccaacatgagcattgctgtgaaggagcagcagaagaaccagaagccagccaagtctgtgtgggagcagaggaccagcgagatgaggaagcagaacctgctggccagccgggaggccctgtacaatgagatggaccctgatgagcgctggaaggccgcctacaccaggcacctgcggccagacatgaagacccacctggaccggcccctggtggtggacccccaggagaacagaaacaacaacaccaacaagagcagagctgctgagcccaccgtggaccagaggctgggccagcagagagctgaggacttcctgaggaagcaggcccgctaccatgaccgggcccgggaccccagcggcagcgctggcctggatgcccggcggccctgggccggcagccaggaggccgagctgagccgggagggcccctacggccgggagagtgaccaccacgcccgggagggcagcctggagcagcccggcttctgggagggggaggccgagcggggcaaggccggggacccccacagaagacatgtgcaccggcagggcggcagccgggagagccgcagcggcagccccaggactggagcagatggagagcacagaagacaccgggcccacagaagacctggagaggagggccctgaggacaaggccgagcggcgggcccggcaccgggagggcagcaggcctgcccggggcggggagggggagggggagggcccagatggaggagagaggagaagaagacaccgccacggggccccagccacctatgaaggagatgcccggcgggaggacaaggagaggaggcacagaagaaggaaggagaaccagggcagcggcgtgcctgtgtctggccccaacctgagcaccacccggcccatccagcaggacctgggccggcaggacccccccctggccgaggacatcgacaacatgaagaacaacaagctggccacagctgagagcgctgcccctcatggcagcctgggccatgctggcctgccccagagccctgccaagatgggcaacagcacagaccccggccccatgctggccatcccagccatggccaccaacccccagaatgctgccagcaggaggacccccaacaaccctggcaaccccagcaaccctggcccccccaagaccccagagaacagcctcatcgtgaccaaccccagcggcacccagaccaacagcgccaagacagccaggaagccagaccacaccaccgtggacatccccccagcctgccccccacccctgaaccacacagtggtgcaggtgaacaagaatgccaacccagaccccctgcccaagaaggaggaggagaagaaggaggaggaggaggatgacagaggagaagatggccccaagcccatgccaccctacagctccatgttcatcctgagcaccaccaaccccctgcggcggctgtgccactacatcctgaacctgcgctactttgagatgtgcatcctgatggtgattgccatgagcagcatcgccctggccgctgaggaccctgtgcagcccaatgcccccagaaataatgtgctgcgctactttgattatgtgttcaccggggtcttcacctttgagatggtgatcaagatgattgacctgggcctggtgctgcaccagggcgcctacttccgggacctgtggaacatcctggacttcatcgtggtgtctggggccctggtggcctttgccttcaccggcaacagcaagggcaaggacatcaacaccatcaagagcctgcgggtgctgcgggtgctgcggcccctgaagaccatcaagaggctgcccaagctgaaggctgtgtttgactgtgtggtgaacagcctgaagaatgtgttcaacatcctgattgtgtacatgctgttcatgttcatctttgctgtggtggccgtgcagctgttcaagggcaagttcttccactgcacagatgagagcaaggagtttgagaaggactgccggggcaagtacctgctgtatgagaagaatgaggtgaaggcccgggaccgggagtggaagaagtatgagttccactatgacaacgtgctgtgggccctgctgaccctcttcaccgtgtccactggagagggctggccccaggtgctgaagcacagcgtggatgccacctttgagaaccagggccccagccctggctacaggatggagatgagcatcttctacgtggtgtactttgtggtgttccccttcttctttgtgaacatctttgtggccctgatcatcatcaccttccaggagcagggcgacaagatgatggaggagtacagcctggagaagaatgaaagagcctgcatcgactttgccatcagcgccaagcccctgaccaggcacatgccccagaacaagcagagcttccagtacaggatgtggcagtttgtggtgagccccccatttgagtacaccatcatggccatgattgccctgaacaccatcgtgctgatgatgaagttctacggggcctctgtggcctatgaaaatgccctgcgggtcttcaacatcgtgttcaccagcctcttcagcctggagtgtgtgctgaaggtgatggccttcggcatcctgaactacttcagagatgcctggaacatctttgattttgtgacagtgctgggcagcatcacagacatcctggtgacagaatttggaaacaacttcatcaacctgtccttcctgcggctcttccgggccgcccggctcatcaagctgctgcggcagggctacaccatccgcatcctgctgtggacctttgtgcagagcttcaaggccctgccctacgtgtgcctgctgattgccatgctgttcttcatctatgccatcatcggcatgcaggtgtttggaaatattggaattgatgtggaggatgaggacagtgatgaagatgagttccagatcacagagcacaacaacttccgcaccttcttccaggccctgatgctgctcttccgcagcgccaccggggaggcctggcacaacatcatgctgagctgcctgagcggcaagccctgtgacaagaacagcggcatcctgaccagagaatgtggaaatgaatttgcctacttctactttgtgtccttcatcttcctgtgcagcttcctgatgctgaacctgtttgtggccgtcatcatggacaactttgagtacctgacccgggacagcagcatcctgggcccccaccacctggatgaatatgtgcgggtgtgggccgagtatgaccctgctgcctggggccgcatgccctacctggacatgtaccagatgctgcggcacatgagcccccccctgggcctgggcaagaagtgcccagcccgggtggcctacaagaggctgctgaggatggacctgcctgtggctgatgacaacacagtgcacttcaacagcaccctgatggccctgatcagaacagccctggacatcaagatcgccaagggcggcgctgacaagcagcagatggatgctgagctgaggaaggagatgatggccatctggcccaacctgagccagaagaccctggacctgctggtgaccccccacaagagcacagacctgactgtgggcaagatctatgctgccatgatgatcatggagtactaccggcagagcaaggccaagaagctgcaggccatgagggaggagcaggacaggacccccctgatgttccagaggatggagccccccagccccacccaggagggcggccctggccagaatgccctgcccagcacccagctggaccccggcggggccctgatggcccatgaaagtggcctgaaggagagccccagctgggtgacccagagggcccaggagatgttccagaagacaggcacctggagccctgagcagggccccccaacagacatgcccaacagccagcccaacagccagagcgtggagatgagggagatgggcagagatggctacagcgacagcgagcactacctgcccatggagggccagggccgggccgcctccatgccccggctgcctgctgagaaccagaccatcagtgacaccagccccatgaagaggtctgcctctgtgctgggccccaaggcccggcggctggatgactacagcctggagcgggtgcccccagaggagaaccagaggcaccaccagaggcggcgggacaggagccaccgggccagcgagaggagcctgggccgctacacagatgtggacaccggcctgggcacagacctgtccatgaccacccagagcggggacctgcccagcaaggagcgggaccaggagcggggccggcccaaggacaggaagcaccggcagcaccaccaccaccaccaccaccaccaccaccccccacctccagacaaggacagatatgcccaggagaggccagaccacggccgggcccgggcccgggaccagcgctggagccgcagccccagcgagggccgggagcacatggcccaccggcagggcagcagctctgtgtctggcagccctgcccccagcaccagcggcaccagcaccccaagaagaggccggcggcagctgccccagacccccagcaccccccggccccacgtgtcctacagccctgtgatcaggaaggccggcggcagcggccccccccagcagcagcagcagcagcagcagcagcagcagcagcaggccgtggcccggcccggccgggccgccaccagcggcccccggcgctacccaggccccacagctgagcccctggccggggaccggcccccaactggaggccacagcagcggccgcagccccaggatggagcggcgggtgcccggccctgcccggtctgagagcccccgggcctgccgccacggcggggcccgctggccagccagcggcccccacgtgtctgagggccccccaggccccaggcaccacggctactaccggggcagtgactatgatgaagcagatggccctggcagcggcggcggggaggaggccatggccggggcctatgatgcccctcctcctgtgagacatgccagcagcggggccaccggccgcagccccaggaccccccgggccagcggccctgcctgtgccagccccagcagacatggaagaaggctgcccaacggctactacccagcccacggcctggcccggccccggggccctggcagcaggaagggcctgcacgagccctacagcgagagtgatgatgactggtgctag

SEQ ID NO: 145858 - DNA, 7521 bp, synthetic construct
  misc_feature 1..7521: note = Description of Artificial Sequence: Synthetic coding sequence
  source 1..7521: mol_type = other DNA
atggccaggtttggagatgagatgcctgcccgctatggaggcggcggcagcggggctgctgctggggtggtggtgggcagcggcggcggcagaggagctgggggcagccggcagggcggccagcccggggcccagaggatgtacaagcagagcatggcccagagggcccggaccatggccctgtacaaccccatccctgtgcggcagaactgcctgactgtgaacagaagcctcttcctgttctctgaagataatgtggtgaggaaatatgccaagaagatcacagagtggcccccatttgagtacatgatcctggccaccatcatcgccaactgcatcgtgctggccctggagcagcacctgcctgatgatgacaagacccccatgtctgagcggctggatgacacagagccctacttcatcggcatcttctgctttgaggccggcatcaagatcatcgccctgggctttgccttccacaagggcagctacctgagaaatggctggaatgtgatggactttgtggtggtgctgaccggcatcctggccaccgtgggcacagaatttgacctgcggaccctgcgggctgtgcgggtgctgcggcccctgaagctggtgtctggcatccccagcctgcaggtggtgctgaagagcatcatgaaggccatgatccccctgctgcagatcggcctgctgctcttctttgccatcctgatctttgccatcatcggcctggagttctacatgggcaagttccacaccacctgctttgaggagggcacagatgacatccagggcgagagccctgccccctgtggcacagaggagcccgcccggacctgccccaacggcaccaagtgccagccctactgggagggccccaacaacggcatcacccagtttgacaacatcctgtttgctgtgctgaccgtcttccagtgcatcaccatggagggctggacagacctgctgtacaacagcaatgatgccagcggcaacacctggaactggctgtacttcatccccctcatcatcatcggcagcttcttcatgctgaacctggtgctgggcgtgctgagcggggagtttgccaaggagcgggagcgggtggagaacagaagagccttcctgaagctgcggcggcagcagcagatcgagcgggagctgaatggctacatggagtggatcagcaaggccgaggaggtgatcctggccgaggatgaaacagatggagagcagaggcacccctttgatgccctgcggaggaccaccatcaagaagagcaagacagacctgctgaaccctgaggaggccgaggaccagctggccgacatcgcctctgtgggcagcccctttgcccgggccagcatcaagagcgccaagctggagaacagcaccttcttccacaagaaggagaggaggatgaggttctacatccggaggatggtgaagacccaggccttctactggacagtgctgagcctggtggccctgaacaccctgtgtgtggccatcgtgcactacaaccagcctgagtggctgagtgacttcctgtactatgcagagttcatcttcctgggcctcttcatgtctgagatgttcatcaagatgtatggcctgggcacccggccctacttccacagcagcttcaactgctttgactgtggggtcatcatcggcagcatctttgaagtcatctgggccgtcatcaagccaggcaccagctttggcatctctgtgctgcgggccctgcggctgctgcgcatcttcaaggtgaccaagtactgggccagcctgaggaacctggtggtgtccctgctgaacagcatgaagagcatcatcagcctgctcttcctgctcttcctgttcatcgtggtgtttgccctgctgggcatgcagctgtttggaggccagttcaactttgatgagggcaccccacccaccaactttgacaccttccctgctgccatcatgacagtgttccagatcctgactggagaggactggaatgaggtgatgtatgatggcatcaagagccagggcggcgtgcagggcggcatggtgttcagcatctacttcatcgtgctgaccctgtttggaaactacaccctgctgaatgtgttcctggccatcgctgtggacaacctggccaatgcccaggagctgaccaaggatgagcaggaggaggaggaggccgccaaccagaagctggccctgcagaaggccaaggaggtggccgaggtgagccccctgtctgctgccaacatgagcattgctgtgaaggagcagcagaagaaccagaagccagccaagtctgtgtgggagcagaggaccagcgagatgaggaagcagaacctgctggccagccgggaggccctgtacaatgagatggaccctgatgagcgctggaaggccgcctacaccaggcacctgcggccagacatgaagacccacctggaccggcccctggtggtggacccccaggagaacagaaacaacaacaccaacaagagcagagctgctgagcccaccgtggaccagaggctgggccagcagagagctgaggacttcctgaggaagcaggcccgctaccatgaccgggcccgggaccccagcggcagcgctggcctggatgcccggcggccctgggccggcagccaggaggccgagctgagccgggagggcccctacggccgggagagtgaccaccacgcccgggagggcagcctggagcagcccggcttctgggagggggaggccgagcggggcaaggccggggacccccaccggcggcacgtgcaccggcagggcggcagccgggagagccgcagcggcagccccaggactggagcagatggagagcaccggcggcaccgggcccaccggcggcctggagaggagggccctgaggacaaggccgagcggcgggcccggcaccgggagggcagcaggcctgcccggggcggggagggggagggggagggcccagatggaggagagaggagaagaagacacagacatggagccccagccacctatgaaggagatgcccggcgggaggacaaggagcggcggcacagaagaagaaaagaaaaccagggcagcggcgtgcctgtgtctggccccaacctgagcaccacccggcccatccagcaggacctgggccggcaggacccccccctggctgaagatattgacaacatgaagaacaacaagctggccacagctgagagcgctgccccccacggcagcctgggccacgccggcctgccccagagccctgccaagatgggcaacagcacagatcctggccccatgctggccatcccagccatggccaccaacccccagaatgctgccagcaggaggacccccaacaaccctggcaaccccagcaaccctggcccccccaagaccccagagaacagcctgattgtgaccaaccccagcggcacccagaccaacagcgccaagacagccaggaagccagaccacaccaccgtggacatccccccagcctgccccccacccctgaaccacacagtggtgcaggtgaacaagaatgccaacccagaccccctgcccaagaaggaggaggagaagaaggaggaggaggaggatgacagaggagaagatggccccaagcccatgccaccctacagctccatgttcatcctgagcaccaccaaccccctgcggcggctgtgccactacatcctgaacctgcgctactttgagatgtgcatcctgatggtgattgccatgagcagcatcgccctggccgcagaagatcctgtgcagcccaatgcccccaggaacaacgtgctgcgctactttgattatgtgttcaccggggtcttcacctttgagatggtgatcaagatgattgacctgggcctggtgctgcaccagggcgcctacttccgggacctgtggaacatcctggacttcatcgtggtgtctggggccctggtggcctttgccttcaccggcaacagcaagggcaaggacatcaacaccatcaagagcctgcgggtgctgcgggtgctgcggcccctgaagaccatcaagaggctgcccaagctgaaggctgtgtttgactgtgtggtgaacagcctgaagaatgtgttcaacatcctgattgtgtacatgctgttcatgttcatctttgctgtggtggccgtgcagctgttcaagggcaagttcttccactgcacagatgagagcaaggagtttgagaaggactgccggggcaagtacctgctgtatgagaagaatgaggtgaaggcccgggaccgggagtggaagaagtatgagttccactatgacaacgtgctgtgggccctgctgaccctcttcaccgtgtccactggagagggctggccccaggtgctgaagcacagcgtggatgccacctttgagaaccagggccccagccctggctacaggatggagatgagcatcttctacgtggtgtactttgtggtgttccccttcttctttgtgaacatctttgtggccctgatcatcatcaccttccaggagcagggcgacaagatgatggaggagtacagcctggagaagaatgaaagagcctgcatcgactttgccatcagcgccaagcccctgaccaggcacatgccccagaacaagcagagcttccagtacaggatgtggcagtttgtggtgtccccaccatttgagtacaccatcatggccatgattgccctgaacaccatcgtgctgatgatgaagttctatggagcctctgtggcctatgaaaatgccctgcgggtcttcaacatcgtgttcaccagcctcttcagcctggagtgtgtgctgaaggtgatggccttcggcatcctgaactacttcagagatgcctggaacatctttgattttgtgacagtgctgggcagcatcacagacatcctggtgacagaatttggaaacaacttcatcaacctgtccttcctgcggctcttccgggccgcccggctcatcaagctgctgcggcagggctacaccatccgcatcctgctgtggacctttgtgcagagcttcaaggccctgccctacgtgtgcctgctgattgccatgctgttcttcatctatgccatcatcggcatgcaggtgtttggaaacatcggcattgatgtggaggatgaagattctgatgaagatgagttccagatcacagagcacaacaacttccgcaccttcttccaggccctgatgctgctcttccgcagcgccactggagaggcctggcacaacatcatgctgagctgcctgagcggcaagccctgtgacaagaacagcggcatcctgacccgggagtgtggaaatgaatttgcctacttctactttgtgtccttcatcttcctgtgcagcttcctgatgctgaacctgtttgtggccgtcatcatggacaactttgagtacctgacccgggacagcagcatcctgggcccccaccacctggatgaatatgtgcgggtgtgggccgagtatgaccctgctgcctggggccgcatgccctacctggacatgtaccagatgctgcggcacatgagcccccccctgggcctgggcaagaagtgcccagcccgggtggcctacaagaggctgctgaggatggacctgcctgtggctgatgacaacacagtgcacttcaacagcaccctgatggccctgatcagaacagccctggacatcaagatcgccaagggcggcgctgacaagcagcagatggatgctgagctgaggaaggagatgatggccatctggcccaacctgagccagaagaccctggacctgctggtgaccccccacaagagcacagacctgactgtgggcaagatctatgctgccatgatgatcatggagtactaccggcagagcaaggccaagaagctgcaggccatgagggaggagcaggacaggacccccctgatgttccagaggatggagccccccagccccacccaggagggcggccctggccagaatgccctgcccagcacccagctggaccctggaggagccctgatggcccacgagagcggcctgaaggagagccccagctgggtgacccagagggcccaggagatgttccagaagacaggcacctggagccctgagcagggccccccaacagacatgcccaacagccagcccaacagccagagcgtggagatgagggagatgggcagagatggctacagcgacagcgagcactacctgcccatggagggccagggccgggccgcctccatgccccggctgcctgctgagaaccagaggagaagaggccggccccggggcaacaacctgagcaccatcagtgacaccagccccatgaagaggtctgcctctgtgctgggccccaaggcccggcggctggatgactacagcctggagcgggtgcccccagaggagaaccagaggcaccaccagaggagaagagacaggagccaccgggccagcgagaggagcctgggccgctacacagatgtggacaccggcctgggcacagacctgtccatgaccacccagagcggggacctgcccagcaaggagcgggaccaggagcggggccggcccaaggacaggaagcaccggcagcaccaccaccaccaccaccaccaccaccaccccccacctccagacaaggacagatatgcccaggagaggccagaccacggccgggcccgggcccgggaccagcgctggagccgcagccccagcgagggccgggagcacatggcccaccggcagggcagcagctctgtgtctggcagccctgcccccagcaccagcggcaccagcaccccccggcggggccggcggcagctgccccagacccccagcaccccccggccccacgtgtcctacagccctgtgatcaggaaggccggcggcagcggccccccccagcagcagcagcagcagcagcagcagcagcagcagcaggccgtggcccggcccggccgggccgccaccagcggcccccggcgctacccaggccccacagctgagcccctggccggggaccggccccccaccggcggccacagcagcggccgcagccccaggatggagaggagagtgcccggccctgcccggtctgagagcccccgggcctgcagacatggaggagcccgctggccagccagcggcccccacgtgtctgagggccccccaggccccaggcaccacggctactaccggggcagtgactatgatgaagcagatggccctggcagcggcggcggggaggaggccatggccggggcctatgatgcccctcctcctgtgagacatgccagcagcggggccaccggccgcagccccaggaccccccgggccagcggccctgcctgtgccagccccagccgccacggccggcggctgcccaacggctactacccagcccacggcctggcccggccccggggccctggcagcaggaagggcctgcacgagccctacagcgagagtgatgatgactggtgctag

SEQ ID NO: 145859 - DNA, 7539 bp, synthetic construct
  misc_feature 1..7539: note = Description of Artificial Sequence: Synthetic coding sequence
  source 1..7539: mol_type = other DNA
atggccaggtttggagatgagatgcctgcccgctatggaggcggcggcagcggggctgctgctggggtggtggtgggcagcggcggcggcagaggagctgggggcagccggcagggcggccagcccggggcccagaggatgtacaagcagagcatggcccagagggcccggaccatggccctgtacaaccccatccctgtgcggcagaactgcctgactgtgaacagaagcctcttcctgttctctgaagataatgtggtgaggaaatatgccaagaagatcacagagtggcccccatttgagtacatgatcctggccaccatcatcgccaactgcatcgtgctggccctggagcagcacctgcctgatgatgacaagacccccatgtctgagcggctggatgacacagagccctacttcatcggcatcttctgctttgaggccggcatcaagatcatcgccctgggctttgccttccacaagggcagctacctgagaaatggctggaatgtgatggactttgtggtggtgctgaccggcatcctggccaccgtgggcacagaatttgacctgcggaccctgcgggctgtgcgggtgctgcggcccctgaagctggtgtctggcatccccagcctgcaggtggtgctgaagagcatcatgaaggccatgatccccctgctgcagatcggcctgctgctcttctttgccatcctgatctttgccatcatcggcctggagttctacatgggcaagttccacaccacctgctttgaggagggcacagatgacatccagggcgagagccctgccccctgtggcacagaggagcccgcccggacctgccccaacggcaccaagtgccagccctactgggagggccccaacaacggcatcacccagtttgacaacatcctgtttgctgtgctgaccgtcttccagtgcatcaccatggagggctggacagacctgctgtacaacagcaatgatgccagcggcaacacctggaactggctgtacttcatccccctcatcatcatcggcagcttcttcatgctgaacctggtgctgggcgtgctgagcggggagtttgccaaggagcgggagcgggtggagaacagaagagccttcctgaagctgcggcggcagcagcagatcgagcgggagctgaatggctacatggagtggatcagcaaggccgaggaggtgatcctggccgaggatgaaacagatggagagcagaggcacccctttgatggagccctgcggaggaccaccatcaagaagagcaagacagacctgctgaaccctgaggaggccgaggaccagctggccgacatcgcctctgtgggcagcccctttgcccgggccagcatcaagagcgccaagctggagaacagcaccttcttccacaagaaggagaggaggatgaggttctacatccggaggatggtgaagacccaggccttctactggacagtgctgagcctggtggccctgaacaccctgtgtgtggccatcgtgcactacaaccagcctgagtggctgagtgacttcctgtactatgcagagttcatcttcctgggcctcttcatgtctgagatgttcatcaagatgtatggcctgggcacccggccctacttccacagcagcttcaactgctttgactgtggggtcatcatcggcagcatctttgaggtgatctgggccgtcatcaagccaggcaccagctttggcatctctgtgctgcgggccctgcggctgctgcgcatcttcaaggtgaccaagtactgggccagcctgaggaacctggtggtgtccctgctgaacagcatgaagagcatcatcagcctgctcttcctgctcttcctgttcatcgtggtgtttgccctgctgggcatgcagctgtttggaggccagttcaactttgatgagggcaccccacccaccaactttgacaccttccctgctgccatcatgaccgtcttccagatcctgaccggggaggactggaatgaggtgatgtatgatggcatcaagagccagggcggcgtgcagggcggcatggtgttcagcatctacttcatcgtgctgaccctgtttggaaactacaccctgctgaatgtgttcctggccatcgctgtggacaacctggccaatgcccaggagctgaccaaggtggaggctgatgagcaggaggaggaggaggccgccaaccagaagctggccctgcagaaggccaaggaggtggccgaggtgagccccctgtctgctgccaacatgagcattgctgtgaaggagcagcagaagaaccagaagccagccaagtctgtgtgggagcagaggaccagcgagatgaggaagcagaacctgctggccagccgggaggccctgtacaatgagatggaccctgatgagcgctggaaggccgcctacaccaggcacctgcggccagacatgaagacccacctggaccggcccctggtggtggacccccaggagaacagaaacaacaacaccaacaagagcagagctgctgagcccaccgtggaccagaggctgggccagcagagagctgaggacttcctgaggaagcaggcccgctaccatgaccgggcccgggaccccagcggcagcgctggcctggatgcccggcggccctgggccggcagccaggaggccgagctgagccgggagggcccctacggccgggagagtgaccaccacgcccgggagggcagcctggagcagcccggcttctgggagggggaggccgagcggggcaaggccggggacccccaccggcggcacgtgcaccggcagggcggcagccgggagagccgcagcggcagccccaggactggagcagatggagagcaccggcggcaccgggcccaccggcggcctggagaggagggccctgaggacaaggccgagcggcgggcccggcaccgggagggcagcaggcctgcccggggcggggagggggagggggagggcccagatggaggagagaggagaagaagacacagacatggagccccagccacctatgaaggagatgcccggcgggaggacaaggagcggcggcacagaagaagaaaagaaaaccagggcagcggcgtgcctgtgtctggccccaacctgagcaccacccggcccatccagcaggacctgggccggcaggacccccccctggctgaagatattgacaacatgaagaacaacaagctggccacagctgagagcgctgccccccacggcagcctgggccacgccggcctgccccagagccctgccaagatgggcaacagcacagatcctggccccatgctggccatcccagccatggccaccaacccccagaatgctgccagcaggaggacccccaacaaccctggcaaccccagcaaccctggcccccccaagaccccagagaacagcctgattgtgaccaaccccagcggcacccagaccaacagcgccaagacagccaggaagccagaccacaccaccgtggacatccccccagcctgccccccacccctgaaccacacagtggtgcaggtgaacaagaatgccaacccagaccccctgcccaagaaggaggaggagaagaaggaggaggaggaggatgacagaggagaagatggccccaagcccatgccaccctacagctccatgttcatcctgagcaccaccaaccccctgcggcggctgtgccactacatcctgaacctgcgctactttgagatgtgcatcctgatggtgattgccatgagcagcatcgccctggccgcagaagatcctgtgcagcccaatgcccccaggaacaacgtgctgcgctactttgattatgtgttcaccggggtcttcacctttgagatggtgatcaagatgattgacctgggcctggtgctgcaccagggcgcctacttccgggacctgtggaacatcctggacttcatcgtggtgtctggggccctggtggcctttgccttcaccggcaacagcaagggcaaggacatcaacaccatcaagagcctgcgggtgctgcgggtgctgcggcccctgaagaccatcaagaggctgcccaagctgaaggctgtgtttgactgtgtggtgaacagcctgaagaatgtgttcaacatcctgattgtgtacatgctgttcatgttcatctttgctgtggtggccgtgcagctgttcaagggcaagttcttccactgcacagatgagagcaaggagtttgagaaggactgccggggcaagtacctgctgtatgagaagaatgaggtgaaggcccgggaccgggagtggaagaagtatgagttccactatgacaacgtgctgtgggccctgctgaccctcttcaccgtgtccactggagagggctggccccaggtgctgaagcacagcgtggatgccacctttgagaaccagggccccagccctggctacaggatggagatgagcatcttctacgtggtgtactttgtggtgttccccttcttctttgtgaacatctttgtggccctgatcatcatcaccttccaggagcagggcgacaagatgatggaggagtacagcctggagaagaatgaaagagcctgcatcgactttgccatcagcgccaagcccctgaccaggcacatgccccagaacaagcagagcttccagtacaggatgtggcagtttgtggtgtccccaccatttgagtacaccatcatggccatgattgccctgaacaccatcgtgctgatgatgaagttctatggagcctctgtggcctatgaaaatgccctgcgggtcttcaacatcgtgttcaccagcctcttcagcctggagtgtgtgctgaaggtgatggccttcggcatcctgaactacttcagagatgcctggaacatctttgattttgtgacagtgctgggcagcatcacagacatcctggtgacagaatttggaaaccccaacaacttcatcaacctgtccttcctgcggctcttccgggccgcccggctcatcaagctgctgcggcagggctacaccatccgcatcctgctgtggacctttgtgcagagcttcaaggccctgccctacgtgtgcctgctgattgccatgctgttcttcatctatgccatcatcggcatgcaggtgtttggaaacatcggcattgatgtggaggatgaagattctgatgaagatgagttccagatcacagagcacaacaacttccgcaccttcttccaggccctgatgctgctcttccgcagcgccactggagaggcctggcacaacatcatgctgagctgcctgagcggcaagccctgtgacaagaacagcggcatcctgacccgggagtgtggaaatgaatttgcctacttctactttgtgtccttcatcttcctgtgcagcttcctgatgctgaacctgtttgtggccgtcatcatggacaactttgagtacctgacccgggacagcagcatcctgggcccccaccacctggatgaatatgtgcgggtgtgggccgagtatgaccctgctgcctggggccgcatgccctacctggacatgtaccagatgctgcggcacatgagcccccccctgggcctgggcaagaagtgcccagcccgggtggcctacaagaggctgctgaggatggacctgcctgtggctgatgacaacacagtgcacttcaacagcaccctgatggccctgatcagaacagccctggacatcaagatcgccaagggcggcgctgacaagcagcagatggatgctgagctgaggaaggagatgatggccatctggcccaacctgagccagaagaccctggacctgctggtgaccccccacaagagcacagacctgactgtgggcaagatctatgctgccatgatgatcatggagtactaccggcagagcaaggccaagaagctgcaggccatgagggaggagcaggacaggacccccctgatgttccagaggatggagccccccagccccacccaggagggcggccctggccagaatgccctgcccagcacccagctggaccctggaggagccctgatggcccacgagagcggcctgaaggagagccccagctgggtgacccagagggcccaggagatgttccagaagacaggcacctggagccctgagcagggccccccaacagacatgcccaacagccagcccaacagccagagcgtggagatgagggagatgggcagagatggctacagcgacagcgagcactacctgcccatggagggccagggccgggccgcctccatgccccggctgcctgctgagaaccagaggagaagaggccggccccggggcaacaacctgagcaccatcagtgacaccagccccatgaagaggtctgcctctgtgctgggccccaaggcccggcggctggatgactacagcctggagcgggtgcccccagaggagaaccagaggcaccaccagaggagaagagacaggagccaccgggccagcgagaggagcctgggccgctacacagatgtggacaccggcctgggcacagacctgtccatgaccacccagagcggggacctgcccagcaaggagcgggaccaggagcggggccggcccaaggacaggaagcaccggcagcaccaccaccaccaccaccaccaccaccaccccccacctccagacaaggacagatatgcccaggagaggccagaccacggccgggcccgggcccgggaccagcgctggagccgcagccccagcgagggccgggagcacatggcccaccggcagggcagcagctctgtgtctggcagccctgcccccagcaccagcggcaccagcaccccccggcggggccggcggcagctgccccagacccccagcaccccccggccccacgtgtcctacagccctgtgatcaggaaggccggcggcagcggccccccccagcagcagcagcagcagcagcagcagcagcagcagcaggccgtggcccggcccggccgggccgccaccagcggcccccggcgctacccaggccccacagctgagcccctggccggggaccggccccccaccggcggccacagcagcggccgcagccccaggatggagaggagagtgcccggccctgcccggtctgagagcccccgggcctgcagacatggaggagcccgctggccagccagcggcccccacgtgtctgagggccccccaggccccaggcaccacggctactaccggggcagtgactatgatgaagcagatggccctggcagcggcggcggggaggaggccatggccggggcctatgatgcccctcctcctgtgagacatgccagcagcggggccaccggccgcagccccaggaccccccgggccagcggccctgcctgtgccagccccagccgccacggccggcggctgcccaacggctactacccagcccacggcctggcccggccccggggccctggcagcaggaagggcctgcacgagccctacagcgagagtgatgatgactggtgctag

SEQ ID NO: 145860 - DNA, 804 bp, synthetic construct
  misc_feature 1..804: note = Description of Artificial Sequence: Synthetic coding sequence
  source 1..804: mol_type = other DNA
atgctgttcatgttcatctttgctgtggtggccgtgcagctgttcaagggcaagttcttccactgcacagatgagagcaaggagtttgagaaggactgccggggcaagtacctgctgtatgagaagaatgaggtgaaggcccgggaccgggagtggaagaagtatgagttccactatgacaacgtgctgtgggccctgctgaccctcttcaccgtgtccactggagagggctggccccaggtgctgaagcacagcgtggatgccacctttgagaaccagggccccagccctggctacaggatggagatgagcatcttctacgtggtgtactttgtggtgttccccttcttctttgtgaacatctttgtggccctgatcatcatcaccttccaggagcagggcgacaagatgatggaggagtacagcctggagaagaatgaaagagcctgcatcgactttgccatcagcgccaagcccctgaccaggcacatgccccagaacaagcagagcttccagtacaggatgtggcagtttgtggtgagccccccatttgagtacaccatcatggccatgattgccctgaacaccatcgtgctgatgatgaagttctacggggcctctgtggcctatgaaaatgccctgcgggtcttcaacatcgtgttcaccagcctcttcagcctggagtgtgtgctgaaggtgatggccttcggcatcctgaactacttcagagatgcctggaacatctttgattttgtgacagtgctgggcagcatcacagacatcctggtgacagaatttggatag

SEQ ID NO: 145861 - DNA, 6795 bp, synthetic construct
  misc_feature 1..6795: note = Description of Artificial Sequence: Synthetic coding sequence
  source 1..6795: mol_type = other DNA
atggccctgtacaaccccatccctgtgcggcagaactgcttcaccgtgaacagaagcctcttcatctttggagaggacaacatcgtgaggaaatatgccaagaagctgattgactggcccccatttgagtacatgatcctggccaccatcatcgccaactgcatcgtgctggccctggagcagcacctgcctgaagatgacaagacccccatgagccggcggctggagaagacagagccctacttcatcggcatcttctgctttgaggccggcatcaagatcgtggccctgggcttcatcttccacaagggcagctacctgagaaatggctggaatgtgatggacttcatcgtggtgctgagcggcatcctggccacagctggcacccacttcaacacccacgtggacctgcggaccctgcgggctgtgcgggtgctgcggcccctgaagctggtgtctggcatccccagcctgcagatcgtgctgaagagcatcatgaaggccatggtgcccctgctgcagatcggcctgctgctcttctttgccatcctgatgtttgccatcatcggcctggagttctacagcggcaagctgcaccgggcctgcttcatgaacaacagcggcatcctggagggctttgatcctccccacccctgtggggtgcagggctgcccagctggctatgagtgcaaggactggattggccccaatgatggcatcacccagtttgacaacatcctgtttgctgtgctgaccgtcttccagtgcatcaccatggagggctggaccaccgtgctgtacaacaccaatgatgccctgggcgccacctggaactggctgtacttcatccccctcatcatcatcggcagcttctttgtgctgaacctggtgctgggcgtgctgagcggggagtttgccaaggagcgggagcgggtggagaacagaagagccttcatgaagctgcggcggcagcagcagatcgagcgggagctgaatggctaccgggcctggattgacaaggccgaggaggtgatgctggccgaggagaacaagaatgccggcaccagcgccctggaggtgctgcggcgggccaccatcaagaggagcaggacagaggccatgacccgggacagcagtgatgagcactgtgtggacatcagctctgtgggcacccccctggcccgggccagcatcaagagcgccaaggtggatggagtgtcctacttccgccacaaggagcggctgctgcgcatcagcatccgccacatggtgaagagccaggtgttctactggatcgtgctgagcctggtggccctgaacacagcctgtgtggccatcgtgcaccacaaccagccccagtggctgacccacctgctgtactatgcagagttcctgttcctgggcctcttcctgctggagatgagcctgaagatgtatggcatgggcccccggctgtacttccacagcagcttcaactgctttgattttggagtgacagtgggcagcatctttgaggtggtgtgggccatcttccggcccggcaccagctttggcatctctgtgctgcgggccctgcggctgctgcgcatcttcaagatcaccaagtactgggccagcctgaggaacctggtggtgtccctgatgagctccatgaagagcatcatcagcctgctcttcctgctcttcctgttcatcgtggtgtttgccctgctgggcatgcagctgtttggaggccgcttcaacttcaatgatggcacccccagcgccaactttgacaccttccctgctgccatcatgaccgtcttccagatcctgaccggggaggactggaatgaggtgatgtacaacggcatccgcagccagggcggcgtgagcagcggcatgtggagcgccatctacttcatcgtgctgaccctgtttggaaactacaccctgctgaatgtgttcctggccatcgctgtggacaacctggccaatgcccaggagctgaccaaggatgagcaggaggaggaggaggccttcaaccagaagcacgccctgcagaaggccaaggaggtgagccccatgtctgcccccaacatgcccagcattgagcgggacagaagaagaagacaccacatgtccatgtgggagcccaggagcagccacctgcgggagaggagaagaagacaccacatgtctgtgtgggagcagaggaccagccagctgaggaagcacatgcagatgagcagccaggaggccctgaaccgggaggaggcccccaccatgaaccccctgaaccccctgaaccccctgagcagcctgaaccccctgaatgcccaccccagcctgtacagaagaccccgggccatcgagggcctggccctgggcctggccctggagaagtttgaggaggagcgcatcagccggggcggcagcctgaagggagatggaggagacaggagcagcgccctggacaaccagaggacccccctgagcctgggccagcgggagcccccctggctggcccggccctgccacggcaactgtgaccccacccagcaggaggccggcggcggggaggccgtggtgacctttgaggaccgggcccggcaccggcagagccagaggaggagccgccacagaagagtgaggacagagggcaaggagagcagcagcgccagccgcagccgcagcgccagccaggagaggagcctggatgaggccatgcccacagaaggagagaaggaccacgagctgcggggcaaccacggggccaaggagcccaccatccaggaggagcgggcccaggacctgcggaggaccaacagcctgatggtgtcccggggcagcggcctggccggcggcctggatgaagctgacacccccctggtgctgccccaccctgagctggaggtgggcaagcacgtggtgctgacagagcaggagcctgagggcagcagcgagcaggccctgctgggcaatgtgcagctggacatgggccgggtcatcagccagagcgagccagacctgagctgcatcacagccaacacagacaaggccaccacagagagcacctctgtgacagtggccatcccagatgtggaccccctggtggacagcacagtggtgcacatcagcaacaagacagatggagaggccagccccctgaaggaggccgagatcagagaagatgaggaggaggtggagaagaagaagcagaagaaggagaagcgggagaccgggaaggccatggtgccccacagctccatgttcatcttcagcaccaccaaccccatccggcgggcctgccactacatcgtgaacctgcgctactttgagatgtgcatcctgctggtgattgctgccagcagcatcgccctggccgctgaggaccctgtgctgaccaacagcgagaggaacaaggtgctgcgctactttgattatgtgttcaccggggtcttcacctttgagatggtgatcaagatgattgaccagggcctcatcctgcaggacggcagctacttccgggacctgtggaacatcctggactttgtggtggtggtgggcgccctggtggcctttgccctggccaacagcatgaagaccaacaagggccgggacatcaagaccatcaagagcctgcgggtgctgcgggtgctgcggcccctgaagaccatcaagaggctgcccaagctgaaggctgtgtttgactgtgtggtgaccagcctgaagaatgtgttcaacatcctgattgtgtacaagctgttcatgttcatctttgctgtgattgctgtgcagctgttcaagggcaagttcttctactgcacagacagcagcaaggacacagagaaggaatgtattggcaactacgtggaccacgagaagaacaagatggaggtgaagggccgggagtggaagagacatgagttccactatgacaacatcatctgggccctgctgaccctcttcaccgtgtccactggagagggctggccccaggtgctgcagcacagcgtggatgtgacagaggaggaccggggccccagccgcagcaacaggatggagatgagcatcttctacgtggtgtactttgtggtgttccccttcttctttgtgaacatctttgtggccctgatcatcatcaccttccaggagcagggcgacaagatgatggaggagtgcagcctggagaagaatgaaagagcctgcatcgactttgccatcagcgccaagcccctgacccgctacatgccccagaacagacacaccttccagtacagagtgtggcactttgtggtgagccccagctttgagtacaccatcatggccatgattgccctgaacacagtggtgctgatgatgaagtactacagcgccccctgcacctatgagctggccctgaagtacctgaacatcgccttcaccatggtgttcagcctggagtgtgtgctgaaggtgattgccttcggcttcctgaactacttccgggacacctggaacatctttgacttcatcaccgtcatcggcagcatcacagagatcatcctgacagacagcaagctggtgaacaccagcggcttcaacatgtccttcctgaagctgttccgggccgcccggctcatcaagctgctgcggcagggctacaccatccgcatcctgctgtggacctttgtgcagagcttcaaggccctgccctacgtgtgcctgctgattgccatgctgttcttcatctatgccatcatcggcatgcaggtgtttggaaacatcaagctggatgaggagagccacatcaacagacacaacaacttccgctccttcttcggcagcctgatgctgctcttccgcagcgccaccggggaggcctggcaggagatcatgctgagctgcctgggggagaagggctgtgagccagacaccacagcccccagcggccagaatgaaaatgaaagatgtggcacagacctggcctacgtgtactttgtgtccttcatcttcttctgcagcttcctgatgctgaacctgtttgtggccgtcatcatggacaactttgagtacctgacccgggacagcagcatcctgggcccccaccacctggatgaatttgtgcgggtgtgggccgagtatgacagagctgcctgtggccgcatccactacacagagatgtatgagatgctgaccctgatgagcccccccctgggcctgggcaagcgctgccccagcaaggtggcctacaagaggctggtgctgatgaacatgcctgtggccgaggacatgacagtgcacttcaccagcaccctgatggccctgatcagaacagccctggacatcaagatcgccaagggcggcgctgaccggcagcagctggacagcgagctgcagaaggagaccctggccatctggccccacctgagccagaagatgctggacctgctggtgcccatgcccaaggccagtgacctgactgtgggcaagatctatgctgccatgatgatcatggactactacaagcagagcaaggtgaagaagcagaggcagcagctggaggagcagaagaatgcccccatgttccagaggatggagcccagcagcctgccccaggagatcatcgccaatgccaaggccctgccctacctgcagcaggaccctgtgtctggcctgagcggccgcagcggctaccccagcatgagccccctgagcccccaggacatcttccagctggcctgcatggaccctgcagatgatggccagttccaggagcggcagagcctggagcctgaggtgtctgagctgaagtctgtgcagcccagcaaccacggcatctacctgcccagcgacacccaggagcacgccggcagcggccgggccagctccatgccccggctgactgtggacccccaggtggtgacagaccccagctccatgagaagaagcttcagcaccatccgggacaagaggagcaacagctcctggctggaggagttctccatggagaggagcagcgagaacacctacaagagcagaagaagaagctaccacagcagcctgcggctgagcgcccaccggctgaacagcgacagcggccacaagagtgacacccacaggtctgggggccgggagcggggccgcagcaaggagaggaagcacctgctgagcccagatgtgagccgctgcaacagcgaggagcggggcacccaggccgactgggagagccctgagcggcggcagagccgcagccccagcgagggccgcagccagacccccaaccggcagggcaccggcagcctgtctgagagcagcatccccagcgtgtctgacaccagcaccccccggcgcagccggcggcagctgccccctgtgccccccaagccccggcccctgctgagctacagcagcctcatcagacatgctggcagcatcagccccccagcagatggcagcgaggagggcagccccctgaccagccaggccctggagagcaacaatgcctgcctgacagagagcagcaacagcccccacccccagcagagccagcacgccagcccccagcgctacatcagcgagccctacctggccctgcacgaggacagccacgccagtgactgtggggaggaggagaccctgacctttgaagctgctgtggccaccagcctgggccgcagcaacaccatcggcagcgccccacccctgcggcacagctggcagatgcccaacggccactacagaagaagaagaagaggaggccctggccctggcatgatgtgtggggctgtgaacaacctgctgagtgacacagaggaggatgacaagtgctag

SEQ ID NO: 145862 - DNA, 6609 bp, synthetic construct
  misc_feature 1..6609: note = Description of Artificial Sequence: Synthetic coding sequence
  source 1..6609: mol_type = other DNA
atggccctgtacaaccccatccctgtgcggcagaactgcttcaccgtgaacagaagcctcttcatctttggagaggacaacatcgtgaggaaatatgccaagaagctgattgactggcccccatttgagtacatgatcctggccaccatcatcgccaactgcatcgtgctggccctggagcagcacctgcctgaagatgacaagacccccatgagccggcggctggagaagacagagccctacttcatcggcatcttctgctttgaggccggcatcaagatcgtggccctgggcttcatcttccacaagggcagctacctgagaaatggctggaatgtgatggacttcatcgtggtgctgagcggcatcctggccacagctggcacccacttcaacacccacgtggacctgcggaccctgcgggctgtgcgggtgctgcggcccctgaagctggtgtctggcatccccagcctgcagatcgtgctgaagagcatcatgaaggccatggtgcccctgctgcagatcggcctgctgctcttctttgccatcctgatgtttgccatcatcggcctggagttctacagcggcaagctgcaccgggcctgcttcatgaacaacagcggcatcctggagggctttgatcctccccacccctgtggggtgcagggctgcccagctggctatgagtgcaaggactggattggccccaatgatggcatcacccagtttgacaacatcctgtttgctgtgctgaccgtcttccagtgcatcaccatggagggctggaccaccgtgctgtacaacaccaatgatgccctgggcgccacctggaactggctgtacttcatccccctcatcatcatcggcagcttctttgtgctgaacctggtgctgggcgtgctgagcggggagtttgccaaggagcgggagcgggtggagaacagaagagccttcatgaagctgcggcggcagcagcagatcgagcgggagctgaatggctaccgggcctggattgacaaggccgaggaggtgatgctggccgaggagaacaagaatgccggcaccagcgccctggaggtgctgcggcgggccaccatcaagaggagcaggacagaggccatgacccgggacagcagtgatgagcactgtgtggacatcagctctgtgggcacccccctggcccgggccagcatcaagagcgccaaggtggatggagtgtcctacttccgccacaaggagcggctgctgcgcatcagcatccgccacatggtgaagagccaggtgttctactggatcgtgctgagcctggtggccctgaacacagcctgtgtggccatcgtgcaccacaaccagccccagtggctgacccacctgctgtactatgcagagttcctgttcctgggcctcttcctgctggagatgagcctgaagatgtatggcatgggcccccggctgtacttccacagcagcttcaactgctttgattttggagtgacagtgggcagcatctttgaggtggtgtgggccatcttccggcccggcaccagctttggcatctctgtgctgcgggccctgcggctgctgcgcatcttcaagatcaccaagtactgggccagcctgaggaacctggtggtgtccctgatgagctccatgaagagcatcatcagcctgctcttcctgctcttcctgttcatcgtggtgtttgccctgctgggcatgcagctgtttggaggccgcttcaacttcaatgatggcacccccagcgccaactttgacaccttccctgctgccatcatgaccgtcttccagatcctgaccggggaggactggaatgaggtgatgtacaacggcatccgcagccagggcggcgtgagcagcggcatgtggagcgccatctacttcatcgtgctgaccctgtttggaaactacaccctgctgaatgtgttcctggccatcgctgtggacaacctggccaatgcccaggagctgaccaaggatgagcaggaggaggaggaggccttcaaccagaagcacgccctgcagaaggccaaggaggtgagccccatgtctgcccccaacatgcccagcattgagcgggagaggagaagaagacaccacatgtctgtgtgggagcagaggaccagccagctgaggaagcacatgcagatgagcagccaggaggccctgaaccgggaggaggcccccaccatgaaccccctgaaccccctgaaccccctgagcagcctgaaccccctgaatgcccaccccagcctgtaccgccggccccgggccatcgagggcctggccctgggcctggccctggagaagtttgaggaggagcgcatcagcagaggaggcagcctgaagggagatggaggagacaggagcagcgccctggacaaccagaggacccccctgagcctgggccagcgggagcccccctggctggcccggccctgccacggcaactgtgaccccacccagcaggaggccggcggcggggaggccgtggtgacctttgaagatcgggcccggcaccggcagagccagaggaggagccgccaccggcgggtgaggacagagggcaaggagagcagcagcgccagccgcagccgcagcgccagccaggagaggagcctggatgaggccatgcccacagaaggagagaaggaccacgagctgcggggcaaccacggggccaaggagcccaccatccaggaggagcgggcccaggacctgcggaggaccaacagcctgatggtgtcccggggcagcggcctggccggcggcctggatgaggccgacacccccctggtgctgccccaccctgagctggaggtgggcaagcacgtggtgctgacagagcaggagcctgagggcagcagcgagcaggccctgctgggcaatgtgcagctggacatgggccgggtcatcagccagagcgagccagacctgagctgcatcacagccaacacagacaaggccaccacagagagcacctctgtgacagtggccatcccagatgtggaccccctggtggacagcacagtggtgcacatcagcaacaagacagatggagaggccagccccctgaaggaggccgagatccgggaggatgaggaggaggtggagaagaagaagcagaagaaggagaagcgggagaccgggaaggccatggtgccccacagctccatgttcatcttcagcaccaccaaccccatcagaagagcctgccactacatcgtgaacctgcgctactttgagatgtgcatcctgctggtgattgctgccagcagcatcgccctggccgcagaagatcctgtgctgaccaacagcgagaggaacaaggtgctgcgctactttgattatgtgttcaccggggtcttcacctttgagatggtgatcaagatgattgaccagggcctcatcctgcaggacggcagctacttccgggacctgtggaacatcctggactttgtggtggtggtgggcgccctggtggcctttgccctggccaacagcatgaagaccaacaagggccgggacatcaagaccatcaagagcctgcgggtgctgcgggtgctgcggcccctgaagaccatcaagaggctgcccaagctgaaggctgtgtttgactgtgtggtgaccagcctgaagaatgtgttcaacatcctgattgtgtacaagctgttcatgttcatctttgctgtgattgctgtgcagctgttcaagggcaagttcttctactgcacagacagcagcaaggacacagagaaggagtgcatcggcaactacgtggaccacgagaagaacaagatggaggtgaagggccgggagtggaagagacatgagttccactatgacaacatcatctgggccctgctgaccctcttcaccgtgtccactggagagggctggccccaggtgctgcagcacagcgtggatgtgacagaagaagatcggggccccagccgcagcaacaggatggagatgagcatcttctacgtggtgtactttgtggtgttccccttcttctttgtgaacatctttgtggccctgatcatcatcaccttccaggagcagggcgacaagatgatggaggagtgcagcctggagaagaatgaaagagcctgcatcgactttgccatcagcgccaagcccctgacccgctacatgccccagaacagacacaccttccagtacagagtgtggcactttgtggtgagccccagctttgagtacaccatcatggccatgattgccctgaacacagtggtgctgatgatgaagtactacagcgccccctgcacctatgagctggccctgaagtacctgaacatcgccttcaccatggtgttcagcctggagtgtgtgctgaaggtgattgccttcggcttcctgaactacttccgggacacctggaacatctttgacttcatcaccgtgattggcagcatcacagagatcatcctgacagacagcaagctggtgaacaccagcggcttcaacatgtccttcctgaagctgttccgggccgcccggctcatcaagctgctgcggcagggctacaccatccgcatcctgctgtggacctttgtgcagagcttcaaggccctgccctacgtgtgcctgctgattgccatgctgttcttcatctatgccatcatcggcatgcaggtgtttggaaacatcaagctggatgaggagagccacatcaacagacacaacaacttccgctccttcttcggcagcctgatgctgctcttccgcagcgccactggagaggcctggcaggagatcatgctgagctgcctgggggagaagggctgtgagccagacaccacagcccccagcggccagaatgaaaatgaaagatgtggcacagacctggcctacgtgtactttgtgtccttcatcttcttctgcagcttcctgatgctgaacctgtttgtggccgtcatcatggacaactttgagtacctgacccgggacagcagcatcctgggcccccaccacctggatgaatttgtgcgggtgtgggccgagtatgaccgggccgcctgtggccgcatcccctacaaggacatgtacaagctggtgcgggtcatcagcccccccctgggcctgggggagaactgcccctacagagtggcctgcaagaggctggtgctgatgaacatgcctgtggccgaggacatgacagtgcacttcaccagcaccctgatggccctgatcagaacagccctggacatcaagatcgccaagggcggcgctgaccggcagcagctggacagcgagctgcagaaggagaccctggccatctggccccacctgagccagaagatgctggacctgctggtgcccatgcccaaggccagtgacctgactgtgggcaagatctatgctgccatgatgatcatggactactacaagcagagcaaggtgaagaagcagaggcagcagctggaggagcagaagaatgcccccatgttccagaggatggagcccagcagcctgccccaggagatcatcgccaatgccaaggccctgccctacctgcagcaggaccctgtgtctggcctgagcggccgcagcggctaccccagcatgagccccctgagcccccaggacatcttccagctggcctgcatggaccctgcagatgatggccagttccaggagcggcagagcctggtggtgacagaccccagctccatgagaagaagcttcagcaccatccgggacaagaggagcaacagctcctggctggaggagttctccatggagaggagcagcgagaacacctacaagagcagaagaagaagctaccacagcagcctgcggctgagcgcccaccggctgaacagcgacagcggccacaagagtgacacccacaggtctgggggccgggagcggggccgcagcaaggagaggaagcacctgctgagcccagatgtgagccgctgcaacagcgaggagcggggcacccaggccgactgggagagccctgagcggcggcagagccgcagccccagcgagggccgcagccagacccccaaccggcagggcaccggcagcctgtctgagagcagcatccccagcgtgtctgacaccagcaccccccggcgcagccggcggcagctgccccctgtgccccccaagccccggcccctgctgagctacagcagcctcatcagacatgctggcagcatcagccccccagcagatggcagcgaggagggcagccccctgaccagccaggccctggagagcaacaatgcctgcctgacagagagcagcaacagcccccacccccagcagagccagcacgccagcccccagcgctacatcagcgagccctacctggccctgcacgaggacagccacgccagtgactgtggggaggaggagaccctgacctttgaagctgctgtggccaccagcctgggccgcagcaacaccatcggcagcgccccacccctgcggcacagctggcagatgcccaacggccactacagaagaagaagaagaggaggccctggccctggcatgatgtgtggggctgtgaacaacctgctgagtgacacagaggaggatgacaagtgctag

SEQ ID NO: 145863 - DNA, 6885 bp, synthetic construct
  misc_feature 1..6885: note = Description of Artificial Sequence: Synthetic coding sequence
  source 1..6885: mol_type = other DNA
atggccaggtttggagaggccgtggtggcccggcccggcagcggagatggagacagcgaccagagcaggaaccggcagggcacccctgtgcctgccagcggccaggccgccgcctacaagcagaccaaggcccagagggcccggaccatggccctgtacaaccccatccctgtgcggcagaactgcttcaccgtgaacagaagcctcttcatctttggagaggacaacatcgtgaggaaatatgccaagaagctgattgactggcccccatttgagtacatgatcctggccaccatcatcgccaactgcatcgtgctggccctggagcagcacctgcctgaagatgacaagacccccatgagccggcggctggagaagacagagccctacttcatcggcatcttctgctttgaagctggcatcaagatcgtggccctgggcttcatcttccacaagggcagctacctgagaaatggctggaatgtgatggacttcatcgtggtgctgagcggcatcctggccacagctggcacccacttcaacacccacgtggacctgcggaccctgcgggctgtgcgggtgctgcggcccctgaagctggtgtctggcatccccagcctgcagatcgtgctgaagagcatcatgaaggccatggtgcccctgctgcagatcggcctgctgctcttctttgccatcctgatgtttgccatcatcggcctggagttctacagcggcaagctgcaccgggcctgcttcatgaacaacagcggcatcctggagggctttgaccccccccacccctgtggggtgcagggctgcccagctggctatgagtgcaaggactggattggccccaatgatggcatcacccagtttgacaacatcctgtttgctgtgctgactgtgttccagtgcatcaccatggagggctggaccaccgtgctgtacaacaccaatgatgccctgggcgccacctggaactggctgtacttcatccccctcatcatcatcggcagcttctttgtgctgaacctggtgctgggcgtgctgtctggagaatttgccaaggagcgggagcgggtggagaacagaagagccttcatgaagctgcggcggcagcagcagatcgagcgggagctgaatggctaccgggcctggattgacaaggccgaggaggtgatgctggccgaggagaacaagaatgccggcaccagcgccctggaggtgctgcggcgggccaccatcaagaggagcaggacagaggccatgacccgggacagcagtgatgagcactgtgtggacatcagctctgtgggcacccccctggcccgggccagcatcaagagcgccaaggtggatggagtgtcctacttccgccacaaggagcggctgctgcgcatcagcatccgccacatggtgaagagccaggtgttctactggatcgtgctgagcctggtggccctgaacacagcctgtgtggccatcgtgcaccacaaccagccccagtggctgacccacctgctgtactatgcagagttcctgttcctgggcctcttcctgctggagatgagcctgaagatgtatggcatgggcccccggctgtacttccacagcagcttcaactgctttgattttggagtgacagtgggcagcatctttgaggtggtgtgggccatcttccggcccggcaccagctttggcatctctgtgctgcgggccctgcggctgctgcgcatcttcaagatcaccaagtactgggccagcctgaggaacctggtggtgtccctgatgagctccatgaagagcatcatcagcctgctcttcctgctcttcctgttcatcgtggtgtttgccctgctgggcatgcagctgtttggaggccgcttcaacttcaatgatggcaccccatctgccaactttgacaccttccctgctgccatcatgacagtgttccagatcctgactggagaggactggaatgaggtgatgtacaacggcatccgcagccagggcggcgtgagcagcggcatgtggagcgccatctacttcatcgtgctgaccctgtttggaaactacaccctgctgaatgtgttcctggccatcgctgtggacaacctggccaatgcccaggagctgaccaaggatgagcaggaggaggaggaggccttcaaccagaagcacgccctgcagaaggccaaggaggtgagccccatgtctgcccccaacatgcccagcattgaaagagagaggagaagaagacaccacatgtctgtgtgggagcagaggaccagccagctgaggaagcacatgcagatgagcagccaggaggccctgaaccgggaggaggcccccaccatgaaccccctgaaccccctgaaccccctgagcagcctgaaccccctgaatgcccaccccagcctgtacagaagaccccgggccatcgagggcctggccctgggcctggccctggagaagtttgaggaggagcgcatcagccggggcggcagcctgaagggagatggaggagacaggagcagcgccctggacaaccagaggacccccctgagcctgggccagcgggagcccccctggctggcccggccctgccacggcaactgtgaccccacccagcaggaggccggcggcggggaggccgtggtgacctttgaggaccgggcccggcaccggcagagccagaggaggagccgccacagaagagtgaggacagagggcaaggagagcagcagcgccagccgcagccgcagcgccagccaggagaggagcctggatgaggccatgcccacagaaggagagaaggaccacgagctgcggggcaaccacggggccaaggagcccaccatccaggaggagcgggcccaggacctgcggaggaccaacagcctgatggtgtcccggggcagcggcctggccggcggcctggatgaagctgacacccccctggtgctgccccaccctgagctggaggtgggcaagcacgtggtgctgacagagcaggagcctgagggcagcagcgagcaggccctgctgggcaatgtgcagctggacatgggccgggtcatcagccagagcgagccagacctgagctgcatcacagccaacacagacaaggccaccacagagagcacctctgtgacagtggccatcccagatgtggaccccctggtggacagcacagtggtgcacatcagcaacaagacagatggagaggccagccccctgaaggaggccgagatcagagaagatgaggaggaggtggagaagaagaagcagaagaaggagaagcgggagaccgggaaggccatggtgccccacagctccatgttcatcttcagcaccaccaaccccatccggcgggcctgccactacatcgtgaacctgcgctactttgagatgtgcatcctgctggtgattgctgccagcagcatcgccctggccgctgaggaccctgtgctgaccaacagcgagaggaacaaggtgctgcgctactttgattatgtgttcaccggggtcttcacctttgagatggtgatcaagatgattgaccagggcctcatcctgcaggacggcagctacttccgggacctgtggaacatcctggactttgtggtggtggtgggcgccctggtggcctttgccctggccaatgccctgggcaccaacaagggccgggacatcaagaccatcaagagcctgcgggtgctgcgggtgctgcggcccctgaagaccatcaagaggctgcccaagctgaaggctgtgtttgactgtgtggtgaccagcctgaagaatgtgttcaacatcctgattgtgtacaagctgttcatgttcatctttgctgtgattgctgtgcagctgttcaagggcaagttcttctactgcacagacagcagcaaggacacagagaaggaatgtattggcaactacgtggaccacgagaagaacaagatggaggtgaagggccgggagtggaagagacatgagttccactatgacaacatcatctgggccctgctgaccctcttcaccgtgtccactggagagggctggccccaggtgctgcagcacagcgtggatgtgacagaggaggaccggggccccagccgcagcaacaggatggagatgagcatcttctacgtggtgtactttgtggtgttccccttcttctttgtgaacatctttgtggccctgatcatcatcaccttccaggagcagggcgacaagatgatggaggagtgcagcctggagaagaatgaaagagcctgcatcgactttgccatcagcgccaagcccctgacccgctacatgccccagaacagacacaccttccagtacagagtgtggcactttgtggtgagccccagctttgagtacaccatcatggccatgattgccctgaacacagtggtgctgatgatgaagtactacagcgccccctgcacctatgagctggccctgaagtacctgaacatcgccttcaccatggtgttcagcctggagtgtgtgctgaaggtgattgccttcggcttcctgaactacttccgggacacctggaacatctttgacttcatcaccgtcatcggcagcatcacagagatcatcctgacagacagcaagctggtgaacaccagcggcttcaacatgtccttcctgaagctgttccgggccgcccggctcatcaagctgctgcggcagggctacaccatccgcatcctgctgtggacctttgtgcagagcttcaaggccctgccctacgtgtgcctgctgattgccatgctgttcttcatctatgccatcatcggcatgcaggtgtttggaaacatcaagctggatgaggagagccacatcaacagacacaacaacttccgctccttcttcggcagcctgatgctgctcttccgcagcgccaccggggaggcctggcaggagatcatgctgagctgcctgggggagaagggctgtgagccagacaccacagcccccagcggccagaatgaaaatgaaagatgtggcacagacctggcctacgtgtactttgtgtccttcatcttcttctgcagcttcctgatgctgaacctgtttgtggccgtcatcatggacaactttgagtacctgacccgggacagcagcatcctgggcccccaccacctggatgaatttgtgcgggtgtgggccgagtatgacagagctgcctgtggccgcatccactacacagagatgtatgagatgctgaccctgatgagcccccccctgggcctgggcaagcgctgccccagcaaggtggcctacaagaggctggtgctgatgaacatgcctgtggccgaggacatgacagtgcacttcaccagcaccctgatggccctgatcagaacagccctggacatcaagatcgccaagggcggcgctgaccggcagcagctggacagcgagctgcagaaggagaccctggccatctggccccacctgagccagaagatgctggacctgctggtgcccatgcccaaggccagtgacctgactgtgggcaagatctatgctgccatgatgatcatggactactacaagcagagcaaggtgaagaagcagaggcagcagctggaggagcagaagaatgcccccatgttccagaggatggagcccagcagcctgccccaggagatcatcgccaatgccaaggccctgccctacctgcagcaggaccctgtgtctggcctgagcggccgcagcggctaccccagcatgagccccctgagcccccaggacatcttccagctggcctgcatggaccctgcagatgatggccagttccaggagcggcagagcctggagcctgaggtgtctgagctgaagtctgtgcagcccagcaaccacggcatctacctgcccagcgacacccaggagcacgccggcagcggccgggccagctccatgccccggctgactgtggacccccaggtggtgacagaccccagctccatgagaagaagcttcagcaccatccgggacaagaggagcaacagctcctggctggaggagttctccatggagaggagcagcgagaacacctacaagagcagaagaagaagctaccacagcagcctgcggctgagcgcccaccggctgaacagcgacagcggccacaagagtgacacccacaggtctgggggccgggagcggggccgcagcaaggagaggaagcacctgctgagcccagatgtgagccgctgcaacagcgaggagcggggcacccaggccgactgggagagccctgagcggcggcagagccgcagccccagcgagggccgcagccagacccccaaccggcagggcaccggcagcctgtctgagagcagcatccccagcgtgtctgacaccagcaccccccggcgcagccggcggcagctgccccctgtgccccccaagccccggcccctgctgagctacagcagcctcatcagacatgctggcagcatcagccccccagcagatggcagcgaggagggcagccccctgaccagccaggccctggagagcaacaatgcctgcctgacagagagcagcaacagcccccacccccagcagagccagcacgccagcccccagcgctacatcagcgagccctacctggccctgcacgaggacagccacgccagtgactgtggggaggaggagaccctgacctttgaagctgctgtggccaccagcctgggccgcagcaacaccatcggcagcgccccacccctgcggcacagctggcagatgcccaacggccactacagaagaagaagaagaggaggccctggccctggcatgatgtgtggggctgtgaacaacctgctgagtgacacagaggaggatgacaagtgctag

SEQ ID NO: 145864 - DNA, 5634 bp, synthetic construct
  misc_feature 1..5634: note = Description of Artificial Sequence: Synthetic coding sequence
  source 1..5634: mol_type = other DNA
atgctggccgaggagaacaagaatgccggcaccagcgccctggaggtgctgcggcgggccaccatcaagaggagcaggacagaggccatgacccgggacagcagtgatgagcactgtgtggacatcagctctgtgggcacccccctggcccgggccagcatcaagagcgccaaggtggatggagtgtcctacttccgccacaaggagcggctgctgcgcatcagcatccgccacatggtgaagagccaggtgttctactggatcgtgctgagcctggtggccctgaacacagcctgtgtggccatcgtgcaccacaaccagccccagtggctgacccacctgctgtactatgcagagttcctgttcctgggcctcttcctgctggagatgagcctgaagatgtatggcatgggcccccggctgtacttccacagcagcttcaactgctttgattttggagtgacagtgggcagcatctttgaggtggtgtgggccatcttccggcccggcaccagctttggcatctctgtgctgcgggccctgcggctgctgcgcatcttcaagatcaccaagtactgggccagcctgaggaacctggtggtgtccctgatgagctccatgaagagcatcatcagcctgctcttcctgctcttcctgttcatcgtggtgtttgccctgctgggcatgcagctgtttggaggccgcttcaacttcaatgatggcacccccagcgccaactttgacaccttccctgctgccatcatgaccgtcttccagatcctgaccggggaggactggaatgaggtgatgtacaacggcatccgcagccagggcggcgtgagcagcggcatgtggagcgccatctacttcatcgtgctgaccctgtttggaaactacaccctgctgaatgtgttcctggccatcgctgtggacaacctggccaatgcccaggagctgaccaaggatgagcaggaggaggaggaggccttcaaccagaagcacgccctgcagaaggccaaggaggtgagccccatgtctgcccccaacatgcccagcattgagcgggacagaagaagaagacaccacatgtccatgtgggagcccaggagcagccacctgcgggagaggagaagaagacaccacatgtctgtgtgggagcagaggaccagccagctgaggaagcacatgcagatgagcagccaggaggccctgaaccgggaggaggcccccaccatgaaccccctgaaccccctgaaccccctgagcagcctgaaccccctgaatgcccaccccagcctgtacagaagaccccgggccatcgagggcctggccctgggcctggccctggagaagtttgaggaggagcgcatcagccggggcggcagcctgaagggagatggaggagacaggagcagcgccctggacaaccagaggacccccctgagcctgggccagcgggagcccccctggctggcccggccctgccacggcaactgtgaccccacccagcaggaggccggcggcggggaggccgtggtgacctttgaggaccgggcccggcaccggcagagccagaggaggagccgccacagaagagtgaggacagagggcaaggagagcagcagcgccagccgcagccgcagcgccagccaggagaggagcctggatgaggccatgcccacagaaggagagaaggaccacgagctgcggggcaaccacggggccaaggagcccaccatccaggaggagcgggcccaggacctgcggaggaccaacagcctgatggtgtcccggggcagcggcctggccggcggcctggatgaagctgacacccccctggtgctgccccaccctgagctggaggtgggcaagcacgtggtgctgacagagcaggagcctgagggcagcagcgagcaggccctgctgggcaatgtgcagctggacatgggccgggtcatcagccagagcgagccagacctgagctgcatcacagccaacacagacaaggccaccacagagagcacctctgtgacagtggccatcccagatgtggaccccctggtggacagcacagtggtgcacatcagcaacaagacagatggagaggccagccccctgaaggaggccgagatcagagaagatgaggaggaggtggagaagaagaagcagaagaaggagaagcgggagaccgggaaggccatggtgccccacagctccatgttcatcttcagcaccaccaaccccatccggcgggcctgccactacatcgtgaacctgcgctactttgagatgtgcatcctgctggtgattgctgccagcagcatcgccctggccgctgaggaccctgtgctgaccaacagcgagaggaacaaggtgctgcgctactttgattatgtgttcaccggggtcttcacctttgagatggtgatcaagatgattgaccagggcctcatcctgcaggacggcagctacttccgggacctgtggaacatcctggactttgtggtggtggtgggcgccctggtggcctttgccctggccatgagcctggagaccaacaagggccgggacatcaagaccatcaagagcctgcgggtgctgcgggtgctgcggcccctgaagaccatcaagaggctgcccaagctgaaggctgtgtttgactgtgtggtgaccagcctgaagaatgtgttcaacatcctgattgtgtacaagctgttcatgttcatctttgctgtgattgctgtgcagctgttcaagggcaagttcttctactgcacagacagcagcaaggacacagagaaggaatgtattggcaactacgtggaccacgagaagaacaagatggaggtgaagggccgggagtggaagagacatgagttccactatgacaacatcatctgggccctgctgaccctcttcaccgtgtccactggagagggctggccccaggtgctgcagcacagcgtggatgtgacagaggaggaccggggccccagccgcagcaacaggatggagatgagcatcttctacgtggtgtactttgtggtgttccccttcttctttgtgaacatctttgtggccctgatcatcatcaccttccaggagcagggcgacaagatgatggaggagtgcagcctggagaagaatgaaagagcctgcatcgactttgccatcagcgccaagcccctgacccgctacatgccccagaacagacacaccttccagtacagagtgtggcactttgtggtgagccccagctttgagtacaccatcatggccatgattgccctgaacacagtggtgctgatgatgaagtactacagcgccccctgcacctatgagctggccctgaagtacctgaacatcgccttcaccatggtgttcagcctggagtgtgtgctgaaggtgattgccttcggcttcctgaactacttccgggacacctggaacatctttgacttcatcaccgtcatcggcagcatcacagagatcatcctgacagacagcaagctggtgaacaccagcggcttcaacatgtccttcctgaagctgttccgggccgcccggctcatcaagctgctgcggcagggctacaccatccgcatcctgctgtggacctttgtgcagagcttcaaggccctgccctacgtgtgcctgctgattgccatgctgttcttcatctatgccatcatcggcatgcaggtgtttggaaacatcaagctggatgaggagagccacatcaacagacacaacaacttccgctccttcttcggcagcctgatgctgctcttccgcagcgccaccggggaggcctggcaggagatcatgctgagctgcctgggggagaagggctgtgagccagacaccacagcccccagcggccagaatgaaaatgaaagatgtggcacagacctggcctacgtgtactttgtgtccttcatcttcttctgcagcttcctgatgctgaacctgtttgtggccgtcatcatggacaactttgagtacctgacccgggacagcagcatcctgggcccccaccacctggatgaatttgtgcgggtgtgggccgagtatgacagagctgcctgtggccgcatccactacacagagatgtatgagatgctgaccctgatgagcccccccctgggcctgggcaagcgctgccccagcaaggtggcctacaagaggctggtgctgatgaacatgcctgtggccgaggacatgacagtgcacttcaccagcaccctgatggccctgatcagaacagccctggacatcaagatcgccaagggcggcgctgaccggcagcagctggacagcgagctgcagaaggagaccctggccatctggccccacctgagccagaagatgctggacctgctggtgcccatgcccaaggccagtgacctgactgtgggcaagatctatgctgccatgatgatcatggactactacaagcagagcaaggtgaagaagcagaggcagcagctggaggagcagaagaatgcccccatgttccagaggatggagcccagcagcctgccccaggagatcatcgccaatgccaaggccctgccctacctgcagcaggaccctgtgtctggcctgagcggccgcagcggctaccccagcatgagccccctgagcccccaggacatcttccagctggcctgcatggaccctgcagatgatggccagttccaggagcggcagagcctggtggtgacagaccccagctccatgaggaggagcttcagcaccatccgggacaagaggagcaacagctcctggctggaggagttctccatggagaggagcagcgagaacacctacaagagcagaagaagaagctaccacagcagcctgcggctgagcgcccaccggctgaacagcgacagcggccacaagagtgacacccacaggtctgggggccgggagcggggccgcagcaaggagaggaagcacctgctgagcccagatgtgagccgctgcaacagcgaggagcggggcacccaggccgactgggagagccctgagcggcggcagagccgcagccccagcgagggccgcagccagacccccaaccggcagggcaccggcagcctgtctgagagcagcatccccagcgtgtctgacaccagcaccccaagaagaagccggcggcagctgccccctgtgccccccaagccccggcccctgctgagctacagcagcctcatcagacatgctggcagcatcagccccccagcagatggcagcgaggagggcagccccctgaccagccaggccctggagagcaacaatgcctgcctgacagagagcagcaacagcccccacccccagcagagccagcacgccagcccccagcgctacatcagcgagccctacctggccctgcacgaggacagccacgccagtgactgtggggaggaggagaccctgacctttgaggccgctgtggccaccagcctgggccgcagcaacaccatcggcagcgccccacccctgcggcacagctggcagatgcccaacggccactacagaagaagaagaagaggaggccctggccctggcatgatgtgtggggctgtgaacaacctgctgagtgacacagaagaagatgacaagtgctag

SEQ ID NO: 145865 - DNA, 6813 bp, synthetic construct
  misc_feature 1..6813: note = Description of Artificial Sequence: Synthetic coding sequence
  source 1..6813: mol_type = other DNA
atggccaggtttggagaggccgtggtggcccggcccggcagcggagatggagacagcgaccagagcaggaaccggcagggcacccctgtgcctgccagcggccaggccgccgcctacaagcagaccaaggcccagagggcccggaccatggccctgtacaaccccatccctgtgcggcagaactgcttcaccgtgaacagaagcctcttcatctttggagaggacaacatcgtgaggaaatatgccaagaagctgattgactggcccccatttgagtacatgatcctggccaccatcatcgccaactgcatcgtgctggccctggagcagcacctgcctgaagatgacaagacccccatgagccggcggctggagaagacagagccctacttcatcggcatcttctgctttgaagctggcatcaagatcgtggccctgggcttcatcttccacaagggcagctacctgagaaatggctggaatgtgatggacttcatcgtggtgctgagcggcatcctggccacagctggcacccacttcaacacccacgtggacctgcggaccctgcgggctgtgcgggtgctgcggcccctgaagctggtgtctggcatccccagcctgcagatcgtgctgaagagcatcatgaaggccatggtgcccctgctgcagatcggcctgctgctcttctttgccatcctgatgtttgccatcatcggcctggagttctacagcggcaagctgcaccgggcctgcttcatgaacaacagcggcatcctggagggctttgaccccccccacccctgtggggtgcagggctgcccagctggctatgagtgcaaggactggattggccccaatgatggcatcacccagtttgacaacatcctgtttgctgtgctgactgtgttccagtgcatcaccatggagggctggaccaccgtgctgtacaacaccaatgatgccctgggcgccacctggaactggctgtacttcatccccctcatcatcatcggcagcttctttgtgctgaacctggtgctgggcgtgctgtctggagaatttgccaaggagcgggagcgggtggagaacagaagagccttcatgaagctgcggcggcagcagcagatcgagcgggagctgaatggctaccgggcctggattgacaaggccgaggaggtgatgctggccgaggagaacaagaatgccggcaccagcgccctggaggtgctgcggcgggccaccatcaagaggagcaggacagaggccatgacccgggacagcagtgatgagcactgtgtggacatcagctctgtgggcacccccctggcccgggccagcatcaagagcgccaaggtggatggagtgtcctacttccgccacaaggagcggctgctgcgcatcagcatccgccacatggtgaagagccaggtgttctactggatcgtgctgagcctggtggccctgaacacagcctgtgtggccatcgtgcaccacaaccagccccagtggctgacccacctgctgtactatgcagagttcctgttcctgggcctcttcctgctggagatgagcctgaagatgtatggcatgggcccccggctgtacttccacagcagcttcaactgctttgattttggagtgacagtgggcagcatctttgaggtggtgtgggccatcttccggcccggcaccagctttggcatctctgtgctgcgggccctgcggctgctgcgcatcttcaagatcaccaagtactgggccagcctgaggaacctggtggtgtccctgatgagctccatgaagagcatcatcagcctgctcttcctgctcttcctgttcatcgtggtgtttgccctgctgggcatgcagctgtttggaggccgcttcaacttcaatgatggcaccccatctgccaactttgacaccttccctgctgccatcatgacagtgttccagatcctgactggagaggactggaatgaggtgatgtacaacggcatccgcagccagggcggcgtgagcagcggcatgtggagcgccatctacttcatcgtgctgaccctgtttggaaactacaccctgctgaatgtgttcctggccatcgctgtggacaacctggccaatgcccaggagctgaccaaggatgagcaggaggaggaggaggccttcaaccagaagcacgccctgcagaaggccaaggaggtgagccccatgtctgcccccaacatgcccagcattgaaagagacagaagaagaagacaccacatgtccatgtgggagcccaggagcagccacctgcgggagaggagaagaagacaccacatgtctgtgtgggagcagaggaccagccagctgaggaagcacatgcagatgagcagccaggaggccctgaaccgggaggaggcccccaccatgaaccccctgaaccccctgaaccccctgagcagcctgaaccccctgaatgcccaccccagcctgtaccgccggccccgggccatcgagggcctggccctgggcctggccctggagaagtttgaggaggagcgcatcagcagaggaggcagcctgaagggagatggaggagacaggagcagcgccctggacaaccagaggacccccctgagcctgggccagcgggagcccccctggctggcccggccctgccacggcaactgtgaccccacccagcaggaggccggcggcggggaggccgtggtgacctttgaagatcgggcccggcaccggcagagccagaggaggagccgccaccggcgggtgaggacagagggcaaggagagcagcagcgccagccgcagccgcagcgccagccaggagaggagcctggatgaggccatgcccacagaaggagagaaggaccacgagctgcggggcaaccacggggccaaggagcccaccatccaggaggagcgggcccaggacctgcggaggaccaacagcctgatggtgtcccggggcagcggcctggccggcggcctggatgaggccgacacccccctggtgctgccccaccctgagctggaggtgggcaagcacgtggtgctgacagagcaggagcctgagggcagcagcgagcaggccctgctgggcaatgtgcagctggacatgggccgggtcatcagccagagcgagccagacctgagctgcatcacagccaacacagacaaggccaccacagagagcacctctgtgacagtggccatcccagatgtggaccccctggtggacagcacagtggtgcacatcagcaacaagacagatggagaggccagccccctgaaggaggccgagatccgggaggatgaggaggaggtggagaagaagaagcagaagaaggagaagcgggagaccgggaaggccatggtgccccacagctccatgttcatcttcagcaccaccaaccccatcagaagagcctgccactacatcgtgaacctgcgctactttgagatgtgcatcctgctggtgattgctgccagcagcatcgccctggccgcagaagatcctgtgctgaccaacagcgagaggaacaaggtgctgcgctactttgattatgtgttcaccggggtcttcacctttgagatggtgatcaagatgattgaccagggcctcatcctgcaggacggcagctacttccgggacctgtggaacatcctggactttgtggtggtggtgggcgccctggtggcctttgccctggccaatgccctgggcaccaacaagggccgggacatcaagaccatcaagagcctgcgggtgctgcgggtgctgcggcccctgaagaccatcaagaggctgcccaagctgaaggctgtgtttgactgtgtggtgaccagcctgaagaatgtgttcaacatcctgattgtgtacaagctgttcatgttcatctttgctgtgattgctgtgcagctgttcaagggcaagttcttctactgcacagacagcagcaaggacacagagaaggagtgcatcggcaactacgtggaccacgagaagaacaagatggaggtgaagggccgggagtggaagagacatgagttccactatgacaacatcatctgggccctgctgaccctcttcaccgtgtccactggagagggctggccccaggtgctgcagcacagcgtggatgtgacagaagaagatcggggccccagccgcagcaacaggatggagatgagcatcttctacgtggtgtactttgtggtgttccccttcttctttgtgaacatctttgtggccctgatcatcatcaccttccaggagcagggcgacaagatgatggaggagtgcagcctggagaagaatgaaagagcctgcatcgactttgccatcagcgccaagcccctgacccgctacatgccccagaacagacacaccttccagtacagagtgtggcactttgtggtgagccccagctttgagtacaccatcatggccatgattgccctgaacacagtggtgctgatgatgaagtactacagcgccccctgcacctatgagctggccctgaagtacctgaacatcgccttcaccatggtgttcagcctggagtgtgtgctgaaggtgattgccttcggcttcctgaactacttccgggacacctggaacatctttgacttcatcaccgtgattggcagcatcacagagatcatcctgacagacagcaagctggtgaacaccagcggcttcaacatgtccttcctgaagctgttccgggccgcccggctcatcaagctgctgcggcagggctacaccatccgcatcctgctgtggacctttgtgcagagcttcaaggccctgccctacgtgtgcctgctgattgccatgctgttcttcatctatgccatcatcggcatgcaggtgtttggaaacatcaagctggatgaggagagccacatcaacagacacaacaacttccgctccttcttcggcagcctgatgctgctcttccgcagcgccactggagaggcctggcaggagatcatgctgagctgcctgggggagaagggctgtgagccagacaccacagcccccagcggccagaatgaaaatgaaagatgtggcacagacctggcctacgtgtactttgtgtccttcatcttcttctgcagcttcctgatgctgaacctgtttgtggccgtcatcatggacaactttgagtacctgacccgggacagcagcatcctgggcccccaccacctggatgaatttgtgcgggtgtgggccgagtatgaccgggccgcctgtggccgcatccactacacagagatgtatgagatgctgaccctgatgagcccccccctgggcctgggcaagcgctgccccagcaaggtggcctacaagaggctggtgctgatgaacatgcctgtggccgaggacatgacagtgcacttcaccagcaccctgatggccctgatcagaacagccctggacatcaagatcgccaagggcggcgctgaccggcagcagctggacagcgagctgcagaaggagaccctggccatctggccccacctgagccagaagatgctggacctgctggtgcccatgcccaaggccagtgacctgactgtgggcaagatctatgctgccatgatgatcatggactactacaagcagagcaaggtgaagaagcagaggcagcagctggaggagcagaagaatgcccccatgttccagaggatggagcccagcagcctgccccaggagatcatcgccaatgccaaggccctgccctacctgcagcaggaccctgtgtctggcctgagcggccgcagcggctaccccagcatgagccccctgagcccccaggacatcttccagctggcctgcatggaccctgcagatgatggccagttccaggagcggcagagcctggtggtgacagaccccagctccatgagaagaagcttcagcaccatccgggacaagaggagcaacagctcctggctggaggagttctccatggagaggagcagcgagaacacctacaagagcagaagaagaagctaccacagcagcctgcggctgagcgcccaccggctgaacagcgacagcggccacaagagtgacacccacaggtctgggggccgggagcggggccgcagcaaggagaggaagcacctgctgagcccagatgtgagccgctgcaacagcgaggagcggggcacccaggccgactgggagagccctgagcggcggcagagccgcagccccagcgagggccgcagccagacccccaaccggcagggcaccggcagcctgtctgagagcagcatccccagcgtgtctgacaccagcaccccccggcgcagccggcggcagctgccccctgtgccccccaagccccggcccctgctgagctacagcagcctcatcagacatgctggcagcatcagccccccagcagatggcagcgaggagggcagccccctgaccagccaggccctggagagcaacaatgcctgcctgacagagagcagcaacagcccccacccccagcagagccagcacgccagcccccagcgctacatcagcgagccctacctggccctgcacgaggacagccacgccagtgactgtggggaggaggagaccctgacctttgaagctgctgtggccaccagcctgggccgcagcaacaccatcggcagcgccccacccctgcggcacagctggcagatgcccaacggccactacagaagaagaagaagaggaggccctggccctggcatgatgtgtggggctgtgaacaacctgctgagtgacacagaggaggatgacaagtgctag

SEQ ID NO: 145866 - DNA, 6942 bp, synthetic construct
  misc_feature 1..6942: note = Description of Artificial Sequence: Synthetic coding sequence
  source 1..6942: mol_type = other DNA
atggccaggtttggagaggccgtggtggcccggcccggcagcggagatggagacagcgaccagagcaggaaccggcagggcacccctgtgcctgccagcggccaggccgccgcctacaagcagaccaaggcccagagggcccggaccatggccctgtacaaccccatccctgtgcggcagaactgcttcaccgtgaacagaagcctcttcatctttggagaggacaacatcgtgaggaaatatgccaagaagctgattgactggcccccatttgagtacatgatcctggccaccatcatcgccaactgcatcgtgctggccctggagcagcacctgcctgaagatgacaagacccccatgagccggcggctggagaagacagagccctacttcatcggcatcttctgctttgaagctggcatcaagatcgtggccctgggcttcatcttccacaagggcagctacctgagaaatggctggaatgtgatggacttcatcgtggtgctgagcggcatcctggccacagctggcacccacttcaacacccacgtggacctgcggaccctgcgggctgtgcgggtgctgcggcccctgaagctggtgtctggcatccccagcctgcagatcgtgctgaagagcatcatgaaggccatggtgcccctgctgcagatcggcctgctgctcttctttgccatcctgatgtttgccatcatcggcctggagttctacagcggcaagctgcaccgggcctgcttcatgaacaacagcggcatcctggagggctttgaccccccccacccctgtggggtgcagggctgcccagctggctatgagtgcaaggactggattggccccaatgatggcatcacccagtttgacaacatcctgtttgctgtgctgactgtgttccagtgcatcaccatggagggctggaccaccgtgctgtacaacaccaatgatgccctgggcgccacctggaactggctgtacttcatccccctcatcatcatcggcagcttctttgtgctgaacctggtgctgggcgtgctgtctggagaatttgccaaggagcgggagcgggtggagaacagaagagccttcatgaagctgcggcggcagcagcagatcgagcgggagctgaatggctaccgggcctggattgacaaggccgaggaggtgatgctggccgaggagaacaagaatgccggcaccagcgccctggaggtgctgcggcgggccaccatcaagaggagcaggacagaggccatgacccgggacagcagtgatgagcactgtgtggacatcagctctgtgggcacccccctggcccgggccagcatcaagagcgccaaggtggatggagtgtcctacttccgccacaaggagcggctgctgcgcatcagcatccgccacatggtgaagagccaggtgttctactggatcgtgctgagcctggtggccctgaacacagcctgtgtggccatcgtgcaccacaaccagccccagtggctgacccacctgctgtactatgcagagttcctgttcctgggcctcttcctgctggagatgagcctgaagatgtatggcatgggcccccggctgtacttccacagcagcttcaactgctttgattttggagtgacagtgggcagcatctttgaggtggtgtgggccatcttccggcccggcaccagctttggcatctctgtgctgcgggccctgcggctgctgcgcatcttcaagatcaccaagtactgggccagcctgaggaacctggtggtgtccctgatgagctccatgaagagcatcatcagcctgctcttcctgctcttcctgttcatcgtggtgtttgccctgctgggcatgcagctgtttggaggccgcttcaacttcaatgatggcaccccatctgccaactttgacaccttccctgctgccatcatgacagtgttccagatcctgactggagaggactggaatgaggtgatgtacaacggcatccgcagccagggcggcgtgagcagcggcatgtggagcgccatctacttcatcgtgctgaccctgtttggaaactacaccctgctgaatgtgttcctggccatcgctgtggacaacctggccaatgcccaggagctgaccaaggatgagcaggaggaggaggaggccttcaaccagaagcacgccctgcagaaggccaaggaggtgagccccatgtctgcccccaacatgcccagcattgaaagagacagaagaagaagacaccacatgtccatgtgggagcccaggagcagccacctgcgggagaggagaagaagacaccacatgtctgtgtgggagcagaggaccagccagctgaggaagcacatgcagatgagcagccaggaggccctgaaccgggaggaggcccccaccatgaaccccctgaaccccctgaaccccctgagcagcctgaaccccctgaatgcccaccccagcctgtaccgccggccccgggccatcgagggcctggccctgggcctggccctggagaagtttgaggaggagcgcatcagcagaggaggcagcctgaagggagatggaggagacaggagcagcgccctggacaaccagaggacccccctgagcctgggccagcgggagcccccctggctggcccggccctgccacggcaactgtgaccccacccagcaggaggccggcggcggggaggccgtggtgacctttgaagatcgggcccggcaccggcagagccagaggaggagccgccaccggcgggtgaggacagagggcaaggagagcagcagcgccagccgcagccgcagcgccagccaggagaggagcctggatgaggccatgcccacagaaggagagaaggaccacgagctgcggggcaaccacggggccaaggagcccaccatccaggaggagcgggcccaggacctgcggaggaccaacagcctgatggtgtcccggggcagcggcctggccggcggcctggatgaggccgacacccccctggtgctgccccaccctgagctggaggtgggcaagcacgtggtgctgacagagcaggagcctgagggcagcagcgagcaggccctgctgggcaatgtgcagctggacatgggccgggtcatcagccagagcgagccagacctgagctgcatcacagccaacacagacaaggccaccacagagagcacctctgtgacagtggccatcccagatgtggaccccctggtggacagcacagtggtgcacatcagcaacaagacagatggagaggccagccccctgaaggaggccgagatccgggaggatgaggaggaggtggagaagaagaagcagaagaaggagaagcgggagaccgggaaggccatggtgccccacagctccatgttcatcttcagcaccaccaaccccatcagaagagcctgccactacatcgtgaacctgcgctactttgagatgtgcatcctgctggtgattgctgccagcagcatcgccctggccgcagaagatcctgtgctgaccaacagcgagaggaacaaggtgctgcgctactttgattatgtgttcaccggggtcttcacctttgagatggtgatcaagatgattgaccagggcctcatcctgcaggacggcagctacttccgggacctgtggaacatcctggactttgtggtggtggtgggcgccctggtggcctttgccctggccaatgccctgggcaccaacaagggccgggacatcaagaccatcaagagcctgcgggtgctgcgggtgctgcggcccctgaagaccatcaagaggctgcccaagctgaaggctgtgtttgactgtgtggtgaccagcctgaagaatgtgttcaacatcctgattgtgtacaagctgttcatgttcatctttgctgtgattgctgtgcagctgttcaagggcaagttcttctactgcacagacagcagcaaggacacagagaaggagtgcatcggcaactacgtggaccacgagaagaacaagatggaggtgaagggccgggagtggaagagacatgagttccactatgacaacatcatctgggccctgctgaccctcttcaccgtgtccactggagagggctggccccaggtgctgcagcacagcgtggatgtgacagaagaagatcggggccccagccgcagcaacaggatggagatgagcatcttctacgtggtgtactttgtggtgttccccttcttctttgtgaacatctttgtggccctgatcatcatcaccttccaggagcagggcgacaagatgatggaggagtgcagcctggagaagaatgaaagagcctgcatcgactttgccatcagcgccaagcccctgacccgctacatgccccagaacagacacaccttccagtacagagtgtggcactttgtggtgagccccagctttgagtacaccatcatggccatgattgccctgaacacagtggtgctgatgatgaagtactacagcgccccctgcacctatgagctggccctgaagtacctgaacatcgccttcaccatggtgttcagcctggagtgtgtgctgaaggtgattgccttcggcttcctgaactacttccgggacacctggaacatctttgacttcatcaccgtgattggcagcatcacagagatcatcctgacagacagcaagctggtgaacaccagcggcttcaacatgtccttcctgaagctgttccgggccgcccggctcatcaagctgctgcggcagggctacaccatccgcatcctgctgtggacctttgtgcagagcttcaaggccctgccctacgtgtgcctgctgattgccatgctgttcttcatctatgccatcatcggcatgcaggtgtttggaaacatcaagctggatgaggagagccacatcaacagacacaacaacttccgctccttcttcggcagcctgatgctgctcttccgcagcgccactggagaggcctggcaggagatcatgctgagctgcctgggggagaagggctgtgagccagacaccacagcccccagcggccagaatgaaaatgaaagatgtggcacagacctggcctacgtgtactttgtgtccttcatcttcttctgcagcttcctgatgctgaacctgtttgtggccgtcatcatggacaactttgagtacctgacccgggacagcagcatcctgggcccccaccacctggatgaatttgtgcgggtgtgggccgagtatgaccgggccgcctgtggccgcatccactacacagagatgtatgagatgctgaccctgatgagcccccccctgggcctgggcaagcgctgccccagcaaggtggcctacaagaggctggtgctgatgaacatgcctgtggccgaggacatgacagtgcacttcaccagcaccctgatggccctgatcagaacagccctggacatcaagatcgccaagggcggcgctgaccggcagcagctggacagcgagctgcagaaggagaccctggccatctggccccacctgagccagaagatgctggacctgctggtgcccatgcccaaggccagtgacctgactgtgggcaagatctatgctgccatgatgatcatggactactacaagcagagcaaggtgaagaagcagaggcagcagctggaggagcagaagaatgcccccatgttccagaggatggagcccagcagcctgccccaggagatcatcgccaatgccaaggccctgccctacctgcagcaggaccctgtgtctggcctgagcggccgcagcggctaccccagcatgagccccctgagcccccaggacatcttccagctggcctgcatggaccctgcagatgatggccagttccaggagcggcagagcctggagcctgaggtgtctgagctgaagtctgtgcagcccagcaaccacggcatctacctgcccagcgacacccaggagcacgccggcagcggccgggccagctccatgccccggctgactgtggacccccaggtggtgacagaccccagctccatgaggaggagcttcagcaccatccgggacaagaggagcaacagctcctggctggaggagttctccatggagaggagcagcgagaacacctacaagagcagaagaagaagctaccacagcagcctgcggctgagcgcccaccggctgaacagcgacagcggccacaagagtgacacccacaggtctgggggccgggagcggggccgcagcaaggagaggaagcacctgctgagcccagatgtgagccgctgcaacagcgaggagcggggcacccaggccgactgggagagccctgagcggcggcagagccgcagccccagcgagggccgcagccagacccccaaccggcagggcaccggcagcctgtctgagagcagcatccccagcgtgtctgacaccagcaccccaagaagaagccggcggcagctgccccctgtgccccccaagccccggcccctgctgagctacagcagcctcatcagacatgctggcagcatcagccccccagcagatggcagcgaggagggcagccccctgaccagccaggccctggagagcaacaatgcctgcctgacagagagcagcaacagcccccacccccagcagagccagcacgccagcccccagcgctacatcagcgagccctacctggccctgcacgaggacagccacgccagtgactgtggggaggaggagaccctgacctttgaggccgctgtggccaccagcctgggccgcagcaacaccatcggcagcgccccacccctgcggcacagctggcagatgcccaacggccactacagaagaagaagaagaggaggccctggccctggcatgatgtgtggggctgtgaacaacctgctgagtgacacagaagaagatgacaagtgctag

SEQ ID NO: 145867 - DNA, 1317 bp, synthetic construct
  misc_feature 1..1317: note = Description of Artificial Sequence: Synthetic coding sequence
  source 1..1317: mol_type = other DNA
atggccaggtttggagaggccgtggtggcccggcccggcagcggagatggagacagcgaccagagcaggaaccggcagggcacccctgtgcctgccagcggccaggccgccgcctacaagcagaccaaggcccagagggcccggaccatggccctgtacaaccccatccctgtgcggcagaactgcttcaccgtgaacagaagcctcttcatctttggagaggacaacatcgtgaggaaatatgccaagaagctgattgactggcccccatttgagtacatgatcctggccaccatcatcgccaactgcatcgtgctggccctggagcagcacctgcctgaagatgacaagacccccatgagccggcggctggagaagacagagccctacttcatcggcatcttctgctttgaagctggcatcaagatcgtggccctgggcttcatcttccacaagggcagctacctgagaaatggctggaatgtgatggacttcatcgtggtgctgagcggcatcctggccacagctggcacccacttcaacacccacgtggacctgcggaccctgcgggctgtgcgggtgctgcggcccctgaagctggtgtctggcatccccagcctgcagatcgtgctgaagagcatcatgaaggccatggtgcccctgctgcagatcggcctgctgctcttctttgccatcctgatgtttgccatcatcggcctggagttctacagcggcaagctgcaccgggcctgcttcatgaacaacagcggcatcctggagggctttgaccccccccacccctgtggggtgcagggctgcccagctggctatgagtgcaaggactggattggccccaatgatggcatcacccagtttgacaacatcctgtttgctgtgctgactgtgttccagtgcatcaccatggagggctggaccaccgtgctgtacaacaccaatgatgccctgggcgccacctggaactggctgtacttcatccccctcatcatcatcggcagcttctttgtgctgaacctggtgctgggcgtgctgtctggagaatttgccaaggagcgggagcgggtggagaacagaagagccttcatgaagctgcggcggcagcagcagatcgagcgggagctgaatggctaccgggcctggattgacaaggccgaggaggtgatgctggccgaggagaacaagaatgccggcaccagcgccctggaggtgctgcggcgggccaccatcaagaggagcaggacagaggccatgacccgggacagcagtgatgagcactgtgtggacatcagctctgtgtag

SEQ ID NO: 145868 - DNA, 6756 bp, synthetic construct
  misc_feature 1..6756: note = Description of Artificial Sequence: Synthetic coding sequence
  source 1..6756: mol_type = other DNA
atggccaggtttggagaggccgtggtggcccggcccggcagcggagatggagacagcgaccagagcaggaaccggcagggcacccctgtgcctgccagcggccaggccgccgcctacaagcagaccaaggcccagagggcccggaccatggccctgtacaaccccatccctgtgcggcagaactgcttcaccgtgaacagaagcctcttcatctttggagaggacaacatcgtgaggaaatatgccaagaagctgattgactggcccccatttgagtacatgatcctggccaccatcatcgccaactgcatcgtgctggccctggagcagcacctgcctgaagatgacaagacccccatgagccggcggctggagaagacagagccctacttcatcggcatcttctgctttgaagctggcatcaagatcgtggccctgggcttcatcttccacaagggcagctacctgagaaatggctggaatgtgatggacttcatcgtggtgctgagcggcatcctggccacagctggcacccacttcaacacccacgtggacctgcggaccctgcgggctgtgcgggtgctgcggcccctgaagctggtgtctggcatccccagcctgcagatcgtgctgaagagcatcatgaaggccatggtgcccctgctgcagatcggcctgctgctcttctttgccatcctgatgtttgccatcatcggcctggagttctacagcggcaagctgcaccgggcctgcttcatgaacaacagcggcatcctggagggctttgaccccccccacccctgtggggtgcagggctgcccagctggctatgagtgcaaggactggattggccccaatgatggcatcacccagtttgacaacatcctgtttgctgtgctgactgtgttccagtgcatcaccatggagggctggaccaccgtgctgtacaacaccaatgatgccctgggcgccacctggaactggctgtacttcatccccctcatcatcatcggcagcttctttgtgctgaacctggtgctgggcgtgctgtctggagaatttgccaaggagcgggagcgggtggagaacagaagagccttcatgaagctgcggcggcagcagcagatcgagcgggagctgaatggctaccgggcctggattgacaaggccgaggaggtgatgctggccgaggagaacaagaatgccggcaccagcgccctggaggtgctgcggcgggccaccatcaagaggagcaggacagaggccatgacccgggacagcagtgatgagcactgtgtggacatcagctctgtgggcacccccctggcccgggccagcatcaagagcgccaaggtggatggagtgtcctacttccgccacaaggagcggctgctgcgcatcagcatccgccacatggtgaagagccaggtgttctactggatcgtgctgagcctggtggccctgaacacagcctgtgtggccatcgtgcaccacaaccagccccagtggctgacccacctgctgtactatgcagagttcctgttcctgggcctcttcctgctggagatgagcctgaagatgtatggcatgggcccccggctgtacttccacagcagcttcaactgctttgattttggagtgacagtgggcagcatctttgaggtggtgtgggccatcttccggcccggcaccagctttggcatctctgtgctgcgggccctgcggctgctgcgcatcttcaagatcaccaagtactgggccagcctgaggaacctggtggtgtccctgatgagctccatgaagagcatcatcagcctgctcttcctgctcttcctgttcatcgtggtgtttgccctgctgggcatgcagctgtttggaggccgcttcaacttcaatgatggcaccccatctgccaactttgacaccttccctgctgccatcatgacagtgttccagatcctgactggagaggactggaatgaggtgatgtacaacggcatccgcagccagggcggcgtgagcagcggcatgtggagcgccatctacttcatcgtgctgaccctgtttggaaactacaccctgctgaatgtgttcctggccatcgctgtggacaacctggccaatgcccaggagctgaccaaggatgagcaggaggaggaggaggccttcaaccagaagcacgccctgcagaaggccaaggaggtgagccccatgtctgcccccaacatgcccagcattgaaagagagaggagaagaagacaccacatgtctgtgtgggagcagaggaccagccagctgaggaagcacatgcagatgagcagccaggaggccctgaaccgggaggaggcccccaccatgaaccccctgaaccccctgaaccccctgagcagcctgaaccccctgaatgcccaccccagcctgtacagaagaccccgggccatcgagggcctggccctgggcctggccctggagaagtttgaggaggagcgcatcagccggggcggcagcctgaagggagatggaggagacaggagcagcgccctggacaaccagaggacccccctgagcctgggccagcgggagcccccctggctggcccggccctgccacggcaactgtgaccccacccagcaggaggccggcggcggggaggccgtggtgacctttgaggaccgggcccggcaccggcagagccagaggaggagccgccacagaagagtgaggacagagggcaaggagagcagcagcgccagccgcagccgcagcgccagccaggagaggagcctggatgaggccatgcccacagaaggagagaaggaccacgagctgcggggcaaccacggggccaaggagcccaccatccaggaggagcgggcccaggacctgcggaggaccaacagcctgatggtgtcccggggcagcggcctggccggcggcctggatgaagctgacacccccctggtgctgccccaccctgagctggaggtgggcaagcacgtggtgctgacagagcaggagcctgagggcagcagcgagcaggccctgctgggcaatgtgcagctggacatgggccgggtcatcagccagagcgagccagacctgagctgcatcacagccaacacagacaaggccaccacagagagcacctctgtgacagtggccatcccagatgtggaccccctggtggacagcacagtggtgcacatcagcaacaagacagatggagaggccagccccctgaaggaggccgagatcagagaagatgaggaggaggtggagaagaagaagcagaagaaggagaagcgggagaccgggaaggccatggtgccccacagctccatgttcatcttcagcaccaccaaccccatccggcgggcctgccactacatcgtgaacctgcgctactttgagatgtgcatcctgctggtgattgctgccagcagcatcgccctggccgctgaggaccctgtgctgaccaacagcgagaggaacaaggtgctgcgctactttgattatgtgttcaccggggtcttcacctttgagatggtgatcaagatgattgaccagggcctcatcctgcaggacggcagctacttccgggacctgtggaacatcctggactttgtggtggtggtgggcgccctggtggcctttgccctggccaatgccctgggcaccaacaagggccgggacatcaagaccatcaagagcctgcgggtgctgcgggtgctgcggcccctgaagaccatcaagaggctgcccaagctgaaggctgtgtttgactgtgtggtgaccagcctgaagaatgtgttcaacatcctgattgtgtacaagctgttcatgttcatctttgctgtgattgctgtgcagctgttcaagggcaagttcttctactgcacagacagcagcaaggacacagagaaggaatgtattggcaactacgtggaccacgagaagaacaagatggaggtgaagggccgggagtggaagagacatgagttccactatgacaacatcatctgggccctgctgaccctcttcaccgtgtccactggagagggctggccccaggtgctgcagcacagcgtggatgtgacagaggaggaccggggccccagccgcagcaacaggatggagatgagcatcttctacgtggtgtactttgtggtgttccccttcttctttgtgaacatctttgtggccctgatcatcatcaccttccaggagcagggcgacaagatgatggaggagtgcagcctggagaagaatgaaagagcctgcatcgactttgccatcagcgccaagcccctgacccgctacatgccccagaacagacacaccttccagtacagagtgtggcactttgtggtgagccccagctttgagtacaccatcatggccatgattgccctgaacacagtggtgctgatgatgaagtactacagcgccccctgcacctatgagctggccctgaagtacctgaacatcgccttcaccatggtgttcagcctggagtgtgtgctgaaggtgattgccttcggcttcctgaactacttccgggacacctggaacatctttgacttcatcaccgtcatcggcagcatcacagagatcatcctgacagacagcaagctggtgaacaccagcggcttcaacatgtccttcctgaagctgttccgggccgcccggctcatcaagctgctgcggcagggctacaccatccgcatcctgctgtggacctttgtgcagagcttcaaggccctgccctacgtgtgcctgctgattgccatgctgttcttcatctatgccatcatcggcatgcaggtgtttggaaacatcaagctggatgaggagagccacatcaacagacacaacaacttccgctccttcttcggcagcctgatgctgctcttccgcagcgccaccggggaggcctggcaggagatcatgctgagctgcctgggggagaagggctgtgagccagacaccacagcccccagcggccagaatgaaaatgaaagatgtggcacagacctggcctacgtgtactttgtgtccttcatcttcttctgcagcttcctgatgctgaacctgtttgtggccgtcatcatggacaactttgagtacctgacccgggacagcagcatcctgggcccccaccacctggatgaatttgtgcgggtgtgggccgagtatgacagagctgcctgtggccgcatccactacacagagatgtatgagatgctgaccctgatgagcccccccctgggcctgggcaagcgctgccccagcaaggtggcctacaagaggctggtgctgatgaacatgcctgtggccgaggacatgacagtgcacttcaccagcaccctgatggccctgatcagaacagccctggacatcaagatcgccaagggcggcgctgaccggcagcagctggacagcgagctgcagaaggagaccctggccatctggccccacctgagccagaagatgctggacctgctggtgcccatgcccaaggccagtgacctgactgtgggcaagatctatgctgccatgatgatcatggactactacaagcagagcaaggtgaagaagcagaggcagcagctggaggagcagaagaatgcccccatgttccagaggatggagcccagcagcctgccccaggagatcatcgccaatgccaaggccctgccctacctgcagcaggaccctgtgtctggcctgagcggccgcagcggctaccccagcatgagccccctgagcccccaggacatcttccagctggcctgcatggaccctgcagatgatggccagttccaggagcggcagagcctggtggtgacagaccccagctccatgaggaggagcttcagcaccatccgggacaagaggagcaacagctcctggctggaggagttctccatggagaggagcagcgagaacacctacaagagcagaagaagaagctaccacagcagcctgcggctgagcgcccaccggctgaacagcgacagcggccacaagagtgacacccacaggtctgggggccgggagcggggccgcagcaaggagaggaagcacctgctgagcccagatgtgagccgctgcaacagcgaggagcggggcacccaggccgactgggagagccctgagcggcggcagagccgcagccccagcgagggccgcagccagacccccaaccggcagggcaccggcagcctgtctgagagcagcatccccagcgtgtctgacaccagcaccccaagaagaagccggcggcagctgccccctgtgccccccaagccccggcccctgctgagctacagcagcctcatcagacatgctggcagcatcagccccccagcagatggcagcgaggagggcagccccctgaccagccaggccctggagagcaacaatgcctgcctgacagagagcagcaacagcccccacccccagcagagccagcacgccagcccccagcgctacatcagcgagccctacctggccctgcacgaggacagccacgccagtgactgtggggaggaggagaccctgacctttgaggccgctgtggccaccagcctgggccgcagcaacaccatcggcagcgccccacccctgcggcacagctggcagatgcccaacggccactacagaagaagaagaagaggaggccctggccctggcatgatgtgtggggctgtgaacaacctgctgagtgacacagaagaagatgacaagtgctag

SEQ ID NO: 145869 - DNA, 7062 bp, synthetic construct
  misc_feature 1..7062: note = Description of Artificial Sequence: Synthetic coding sequence
  source 1..7062: mol_type = other DNA
atgacagagggcgcccgggcagcagatgaggtgcgggtgcccctgggcgcccctcctcctggccctgctgccctggtgggcgccagccctgagagccctggggcccctggccgggaggccgagcggggcagcgagctgggcgtgagccccagcgagagccctgctgctgagagaggagctgagctgggcgcagatgaggagcagagggtgccctacccagccctggccgccaccgtcttcttctgcctgggccagaccacccggcccaggtcctggtgcctgcggctggtgtgcaacccctggtttgagcacgtgtccatgctggtgatcatgctgaactgtgtgaccctgggcatgttccggccctgtgaagatgtggagtgtggcagcgagcgctgcaacatcctggaggcctttgatgccttcatctttgccttctttgctgtggagatggtgatcaagatggtggccctgggcctgtttggccagaagtgctacctgggggacacctggaaccggctggacttcttcatcgtggtggccggcatgatggagtacagcctggatggccacaacgtgtccctgagcgccatcagaacagtgcgggtgctgcggcccctgcgggccatcaacagagtgcccagcatgaggatcctggtgaccctgctgctggacaccctgcccatgctgggcaatgtgctgctgctgtgcttctttgtgttcttcatcttcggcatcgtgggcgtgcagctgtgggccggcctgctgaggaaccgctgcttcctggacagcgcctttgtgaggaacaacaacctgaccttcctgcggccctactaccagacagaggagggggaggagaaccccttcatctgcagcagccggcgggacaatggcatgcagaagtgcagccacatccctggccggcgggagctgaggatgccctgcaccctgggctgggaggcctacacccagccccaggccgagggcgtgggcgccgccagaaatgcctgcatcaactggaaccagtactacaacgtgtgccgcagcggggacagcaacccccacaacggggccatcaactttgacaacatcggctacgcctggatcgccatcttccaggtgatcaccctggagggctgggtggacatcatgtactacgtgatggatgcccacagcttctacaacttcatctacttcatcctgctgatcatcgtgggcagcttcttcatgatcaacctgtgcctggtggtgattgccacccagttcagcgagaccaagcagcgggagagccagctgatgagggagcagagggcccggcacctgagcaatgacagcaccctggccagcttcagcgagcccggcagctgctatgaggagctgctgaagtatgtgggccacatcttcaggaaggtgaagagaagaagcctgcggctgtatgcccgctggcagagccgctggaggaagaaggtggaccccagcgctgtgcagggccagggccctggccaccggcagaggagagctggccgccacacagcctctgtgcaccacctggtgtaccaccaccaccaccaccaccaccaccactaccacttcagccacggcagccccaggaggcctggccctgagcccggggcctgtgacacccggctggtgcgggccggggccccacccagcccccccagccctggccggggccccccagatgctgagagcgtgcacagcatctaccacgccgactgccacatcgagggcccccaggagcgggcccgggtggcccacgccgccgccacagctgctgccagcctgcggctggccaccggcctgggcaccatgaactaccccaccatcctgcccagcggcgtgggcagcggcaagggcagcaccagccctggccccaagggcaagtgggccggcggccccccaggcactggaggccacggccccctgagcctgaacagcccagacccctatgagaagatcccccacgtggtgggggagcacggcctgggccaggcccctggccacctgagcggcctgtctgtgccctgccccctgcccagccccccagctggcaccctgacctgtgagctgaagagctgcccctactgcacccgggccctggaggaccctgagggggagctgagcggcagcgagagcggggacagtgatggccggggcgtgtatgagttcacccaggatgtgcgccacggggaccgctgggaccccaccaggcctccccgggccacagacaccccaggccctggccctggcagcccccagaggcgggcccagcagagagctgcccctggagagcccggctggatgggccgcctgtgggtgaccttcagcggcaagctgcggagaattgtggacagcaagtacttcagccggggcatcatgatggccatcctggtgaacaccctgtccatgggcgtggagtaccacgagcagcctgaggagctgaccaatgccctggagatcagcaacatcgtgttcacctccatgtttgccctggagatgctgctgaagctgctggcctgtggccccctgggctacatccggaacccctacaacatctttgatggcatcatcgtggtgatctctgtgtgggagatcgtgggccaggctgatggcggcctgtctgtgctgcggaccttccggctgctgcgggtgctgaagctggtgcgcttcctgcctgccctgcggcggcagctggtggtgctggtgaagaccatggacaacgtggccaccttctgcaccctgctgatgctgttcatcttcatcttcagcatcctgggcatgcacctgtttggctgcaagttcagcctgaagacagacacaggagacacagtgcctgacaggaagaactttgacagcctgctgtgggccatcgtgaccgtcttccagatcctgacccaggaggactggaatgtggtgctgtacaacggcatggccagcaccagctcctgggccgccctgtactttgtggccctgatgacctttggaaactacgtgctcttcaacctgctggtggccatcctggtggagggcttccaggccgagggagatgccaacagaagtgacacagatgaggacaagacctctgtgcactttgaggaggacttccacaagctgcgggagctgcagaccacagagctgaagatgtgcagcctggccgtgaccccaaatggccacctggagggccggggcagcctgagccccccactcatcatgtgcacagctgccacccccatgcccacccccaagagcagccccttcctggatgctgcccccagcctgcctgacagccggcggggcagcagcagcagcggggacccccccctgggggaccagaagcccccagccagcctgcggagcagcccctgtgccccctggggccccagcggggcctggagcagcagaagaagctcctggagcagcctgggccgggcccccagcctgaagaggcggggccagtgtggggagcgggagagcctgctgagcggggagggcaagggcagcacagatgatgaagcagaagatggccgggccgcccctggcccccgggccacccccctgcggcgggcagagagcctggacccccggcccctgcggcctgctgccctgccccccaccaagtgccgggacagagatggccaggtggtggccctgcccagcgacttcttcctgagaattgacagccacagagaagatgctgctgagctggatgatgacagcgaggacagctgctgcctgcggctgcacaaggtgctggagccctacaagccccagtggtgccgcagccgggaggcctgggccctgtacctgttcagcccccagaaccgcttccgggtgtcctgccagaaggtgatcacccacaagatgtttgaccacgtggtgctggtgttcatcttcctgaactgtgtgaccatcgccctggagaggccagacatcgaccccggcagcacagagagggtcttcctgtctgtgagcaactacatcttcaccgccatctttgtggccgagatgatggtgaaggtggtggccctgggcctgctgagcggggagcacgcctacctgcagagctcctggaacctgctggatggcctgctggtgctggtgtccctggtggacatcgtggtggccatggccagcgctgggggcgccaagatcctgggcgtgctgcgggtgctgcggctgctgcggaccctgcggcccctgcgggtcatcagccgggcccctggcctgaagctggtggtggagaccctcatcagcagcctgcggcccatcggcaacatcgtgctgatctgctgtgccttcttcatcatcttcggcatcctgggcgtgcagctgttcaagggcaagttctactactgtgagggccctgacaccaggaacatcagcaccaaggcccagtgcagagctgcccactaccgctgggtgcggaggaagtacaactttgacaacctgggccaggccctgatgagcctgtttgtgctgagcagcaaggatggctgggtgaacatcatgtatgatggcctggatgctgtgggcgtggaccagcagcctgtgcagaaccacaacccctggatgctgctgtacttcatctccttcctgctgattgtgtccttctttgtgctgaacatgtttgtgggcgtggtggtggagaacttccacaagtgccggcagcaccaggaggccgaggaggcccggcggcgggaggagaagaggctgcggcggctggagaggagaagaagaagcaccttccccagccctgaggcccagaggcggccctactatgctgactacagccccaccaggaggagcatccacagcctgtgcaccagccactacctggacctcttcatcaccttcatcatctgtgtgaatgtcatcaccatgtccatggagcactacaaccagcccaagagcctggatgaggccctgaagtactgcaactacgtgttcaccatcgtgtttgtgtttgaggccgccctgaagctggtggccttcggcttccgccgcttcttcaaggaccgctggaaccagctggacctggccatcgtgctgctgagcctgatgggcatcaccctggaggagattgagatgtctgctgccctgcccatcaaccccaccatcatccgcatcatgagggtgctgcgcatcgcccgggtgctgaagctgctgaagatggccaccggcatgagggccctgctggacacagtggtgcaggccctgccccaggtgggcaacctgggcctgctcttcatgctgctcttcttcatctatgctgccctgggcgtggagctgtttggccgcctggagtgcagcgaggacaacccctgtgagggcctgagcagacatgccaccttcagcaactttggcatggccttcctgaccctcttccgggtgtccactggagacaactggaatggcatcatgaaggacaccctgcgggagtgcagccgggaggacaagcactgcctgagctacctgcctgccctgagccctgtgtactttgtgacctttgtgctggtggcccagtttgtgctggtgaatgtggtggtggccgtgctgatgaagcacctggaggagagcaacaaggaggcccgggaggatgctgagctggatgctgagattgagctggagatggcccagggccctggcagcgcccggcgggtggatgctgacaggcctcccctgccccaggagagccctggggccagagatgcccccaacctggtggccaggaaggtgtctgtgtccaggatgctgagcctgcccaatgacagctacatgttccggcctgtggtgcctgccagcgccccccacccccggcccctgcaggaggtggagatggagacctacggggccggcacccccctgggctctgtggcctctgtgcacagccccccagctgagagctgtgccagcctgcagatccccctggccgtgagcagccctgcccggtctggagagcccctgcacgccctgagcccccggggcacagcccggagccccagcctgagccggctgctgtgccggcaggaggccgtgcacacagacagcctggagggcaagattgacagcccccgggacaccctggaccctgctgagcccggggagaagacccctgtgcggcctgtgacccagggcggcagcctgcagagcccccccaggagccccaggcctgcctctgtgaggaccaggaagcacaccttcggccagagatgtgtgagcagcaggcctgctgcccctggaggagaggaggccgaggccagtgaccctgcagatgaggaggtgagccacatcaccagcagcgcctgcccctggcagcccacagctgagccccacggccctgaggccagccctgtggccggcggggagcgggacctgcggcggctgtacagcgtggatgcccagggcttcctggacaagccaggccgggcagatgagcagtggaggccttctgctgagctgggcagcggggagcctggagaggccaaggcctggggccctgaggccgagcccgccctgggcgcccggaggaagaagaagatgagccccccctgcatctctgtggagcccccagcagaagatgagggcagcgcccggcccagcgctgctgagggcggcagcaccaccctgcggcggaggacccccagctgtgaggccaccccccaccgggacagcctggagcccacagagggcagcggggccggcggggaccctgctgccaagggggagcgctggggccaggccagctgcagagctgagcacctgactgtgcccagctttgcctttgagcccctggacctgggcgtgcccagcggggaccccttcctggatggcagccacagcgtgaccccagagagccgggccagcagcagcggggccatcgtgcccctggagcccccagagagcgagccccccatgcctgtgggggaccccccagagaagagaagaggcctgtacctgactgtgccccagtgccccctggagaagccaggcagccccagcgccaccccagcccctgggggcggcgcagatgatcctgtgtag

SEQ ID NO: 145870 - DNA, 7044 bp, synthetic construct
  misc_feature 1..7044: note = Description of Artificial Sequence: Synthetic coding sequence
  source 1..7044: mol_type = other DNA
atgacagagggcgcccgggcagcagatgaggtgcgggtgcccctgggcgcccctcctcctggccctgctgccctggtgggcgccagccctgagagccctggggcccctggccgggaggccgagcggggcagcgagctgggcgtgagccccagcgagagccctgctgctgagagaggagctgagctgggcgcagatgaggagcagagggtgccctacccagccctggccgccaccgtcttcttctgcctgggccagaccacccggcccaggtcctggtgcctgcggctggtgtgcaacccctggtttgagcacgtgtccatgctggtgatcatgctgaactgtgtgaccctgggcatgttccggccctgtgaagatgtggagtgtggcagcgagcgctgcaacatcctggaggcctttgatgccttcatctttgccttctttgctgtggagatggtgatcaagatggtggccctgggcctgtttggccagaagtgctacctgggggacacctggaaccggctggacttcttcatcgtggtggccggcatgatggagtacagcctggatggccacaacgtgtccctgagcgccatcagaacagtgcgggtgctgcggcccctgcgggccatcaacagagtgcccagcatgaggatcctggtgaccctgctgctggacaccctgcccatgctgggcaatgtgctgctgctgtgcttctttgtgttcttcatcttcggcatcgtgggcgtgcagctgtgggccggcctgctgaggaaccgctgcttcctggacagcgcctttgtgaggaacaacaacctgaccttcctgcggccctactaccagacagaggagggggaggagaaccccttcatctgcagcagccggcgggacaatggcatgcagaagtgcagccacatccctggccggcgggagctgaggatgccctgcaccctgggctgggaggcctacacccagccccaggccgagggcgtgggcgccgccagaaatgcctgcatcaactggaaccagtactacaacgtgtgccgcagcggggacagcaacccccacaacggggccatcaactttgacaacatcggctacgcctggatcgccatcttccaggtgatcaccctggagggctgggtggacatcatgtactacgtgatggatgcccacagcttctacaacttcatctacttcatcctgctgatcatcgtgggcagcttcttcatgatcaacctgtgcctggtggtgattgccacccagttcagcgagaccaagcagcgggagagccagctgatgagggagcagagggcccggcacctgagcaatgacagcaccctggccagcttcagcgagcccggcagctgctatgaggagctgctgaagtatgtgggccacatcttcaggaaggtgaagagaagaagcctgcggctgtatgcccgctggcagagccgctggaggaagaaggtggaccccagcgctgtgcagggccagggccctggccaccggcagaggagagctggccgccacacagcctctgtgcaccacctggtgtaccaccaccaccaccaccaccaccaccactaccacttcagccacggcagccccaggaggcctggccctgagcccggggcctgtgacacccggctggtgcgggccggggccccacccagcccccccagccctggccggggccccccagatgctgagagcgtgcacagcatctaccacgccgactgccacatcgagggcccccaggagcgggcccgggtggcccacgccgccgccacagctgctgccagcctgcggctggccaccggcctgggcaccatgaactaccccaccatcctgcccagcggcgtgggcagcggcaagggcagcaccagccctggccccaagggcaagtgggccggcggccccccaggcactggaggccacggccccctgagcctgaacagcccagacccctatgagaagatcccccacgtggtgggggagcacggcctgggccaggcccctggccacctgagcggcctgtctgtgccctgccccctgcccagccccccagctggcaccctgacctgtgagctgaagagctgcccctactgcacccgggccctggaggaccctgagggggagctgagcggcagcgagagcggggacagtgatggccggggcgtgtatgagttcacccaggatgtgcgccacggggaccgctgggaccccaccaggcctccccgggccacagacaccccaggccctggccctggcagcccccagaggcgggcccagcagagagctgcccctggagagcccggctggatgggccgcctgtgggtgaccttcagcggcaagctgcggagaattgtggacagcaagtacttcagccggggcatcatgatggccatcctggtgaacaccctgtccatgggcgtggagtaccacgagcagcctgaggagctgaccaatgccctggagatcagcaacatcgtgttcacctccatgtttgccctggagatgctgctgaagctgctggcctgtggccccctgggctacatccggaacccctacaacatctttgatggcatcatcgtggtgatctctgtgtgggagatcgtgggccaggctgatggcggcctgtctgtgctgcggaccttccggctgctgcgggtgctgaagctggtgcgcttcctgcctgccctgcggcggcagctggtggtgctggtgaagaccatggacaacgtggccaccttctgcaccctgctgatgctgttcatcttcatcttcagcatcctgggcatgcacctgtttggctgcaagttcagcctgaagacagacacaggagacacagtgcctgacaggaagaactttgacagcctgctgtgggccatcgtgaccgtcttccagatcctgacccaggaggactggaatgtggtgctgtacaacggcatggccagcaccagctcctgggccgccctgtactttgtggccctgatgacctttggaaactacgtgctcttcaacctgctggtggccatcctggtggagggcttccaggccgagggagatgccaacagaagtgacacagatgaggacaagacctctgtgcactttgaggaggacttccacaagctgcgggagctgcagaccacagagctgaagatgtgcagcctggccgtgaccccaaatggccacctggagggccggggcagcctgagccccccactcatcatgtgcacagctgccacccccatgcccacccccaagagcagccccttcctggatgctgcccccagcctgcctgacagccggcggggcagcagcagcagcggggacccccccctgggggaccagaagcccccagccagcctgcggagcagcccctgtgccccctggggccccagcggggcctggagcagcagaagaagctcctggagcagcctgggccgggcccccagcctgaagaggcggggccagtgtggggagcgggagagcctgctgagcggggagggcaagggcagcacagatgatgaagcagaagatggccgggccgcccctggcccccgggccacccccctgcggcgggcagagagcctggacccccggcccctgcggcctgctgccctgccccccaccaagtgccgggacagagatggccaggtggtggccctgcccagcgacttcttcctgagaattgacagccacagagaagatgctgctgagctggatgatgacagcgaggacagctgctgcctgcggctgcacaaggtgctggagccctacaagccccagtggtgccgcagccgggaggcctgggccctgtacctgttcagcccccagaaccgcttccgggtgtcctgccagaaggtgatcacccacaagatgtttgaccacgtggtgctggtgttcatcttcctgaactgtgtgaccatcgccctggagaggccagacatcgaccccggcagcacagagagggtcttcctgtctgtgagcaactacatcttcaccgccatctttgtggccgagatgatggtgaaggtggtggccctgggcctgctgagcggggagcacgcctacctgcagagctcctggaacctgctggatggcctgctggtgctggtgtccctggtggacatcgtggtggccatggccagcgctgggggcgccaagatcctgggcgtgctgcgggtgctgcggctgctgcggaccctgcggcccctgcgggtcatcagccgggcccctggcctgaagctggtggtggagaccctcatcagcagcctgcggcccatcggcaacatcgtgctgatctgctgtgccttcttcatcatcttcggcatcctgggcgtgcagctgttcaagggcaagttctactactgtgagggccctgacaccaggaacatcagcaccaaggcccagtgcagagctgcccactaccgctgggtgcggaggaagtacaactttgacaacctgggccaggccctgatgagcctgtttgtgctgagcagcaaggatggctgggtgaacatcatgtatgatggcctggatgctgtgggcgtggaccagcagcctgtgcagaaccacaacccctggatgctgctgtacttcatctccttcctgctgattgtgtccttctttgtgctgaacatgtttgtgggcgtggtggtggagaacttccacaagtgccggcagcaccaggaggccgaggaggcccggcggcgggaggagaagaggctgcggcggctggagaggagaagaaggaaggcccagaggcggccctactatgctgactacagccccaccaggaggagcatccacagcctgtgcaccagccactacctggacctcttcatcaccttcatcatctgtgtgaatgtcatcaccatgtccatggagcactacaaccagcccaagagcctggatgaggccctgaagtactgcaactacgtgttcaccatcgtgtttgtgtttgaggccgccctgaagctggtggccttcggcttccgccgcttcttcaaggaccgctggaaccagctggacctggccatcgtgctgctgagcctgatgggcatcaccctggaggagattgagatgtctgctgccctgcccatcaaccccaccatcatccgcatcatgagggtgctgcgcatcgcccgggtgctgaagctgctgaagatggccaccggcatgagggccctgctggacacagtggtgcaggccctgccccaggtgggcaacctgggcctgctcttcatgctgctcttcttcatctatgctgccctgggcgtggagctgtttggccgcctggagtgcagcgaggacaacccctgtgagggcctgagcagacatgccaccttcagcaactttggcatggccttcctgaccctcttccgggtgtccactggagacaactggaatggcatcatgaaggacaccctgcgggagtgcagccgggaggacaagcactgcctgagctacctgcctgccctgagccctgtgtactttgtgacctttgtgctggtggcccagtttgtgctggtgaatgtggtggtggccgtgctgatgaagcacctggaggagagcaacaaggaggcccgggaggatgctgagctggatgctgagattgagctggagatggcccagggccctggcagcgcccggcgggtggatgctgacaggcctcccctgccccaggagagccctggggccagagatgcccccaacctggtggccaggaaggtgtctgtgtccaggatgctgagcctgcccaatgacagctacatgttccggcctgtggtgcctgccagcgccccccacccccggcccctgcaggaggtggagatggagacctacggggccggcacccccctgggctctgtggcctctgtgcacagccccccagctgagagctgtgccagcctgcagatccccctggccgtgagcagccctgcccggtctggagagcccctgcacgccctgagcccccggggcacagcccggagccccagcctgagccggctgctgtgccggcaggaggccgtgcacacagacagcctggagggcaagattgacagcccccgggacaccctggaccctgctgagcccggggagaagacccctgtgcggcctgtgacccagggcggcagcctgcagagcccccccaggagccccaggcctgcctctgtgaggaccaggaagcacaccttcggccagagatgtgtgagcagcaggcctgctgcccctggaggagaggaggccgaggccagtgaccctgcagatgaggaggtgagccacatcaccagcagcgcctgcccctggcagcccacagctgagccccacggccctgaggccagccctgtggccggcggggagcgggacctgcggcggctgtacagcgtggatgcccagggcttcctggacaagccaggccgggcagatgagcagtggaggccttctgctgagctgggcagcggggagcctggagaggccaaggcctggggccctgaggccgagcccgccctgggcgcccggaggaagaagaagatgagccccccctgcatctctgtggagcccccagcagaagatgagggcagcgcccggcccagcgctgctgagggcggcagcaccaccctgcggcggaggacccccagctgtgaggccaccccccaccgggacagcctggagcccacagagggcagcggggccggcggggaccctgctgccaagggggagcgctggggccaggccagctgcagagctgagcacctgactgtgcccagctttgcctttgagcccctggacctgggcgtgcccagcggggaccccttcctggatggcagccacagcgtgaccccagagagccgggccagcagcagcggggccatcgtgcccctggagcccccagagagcgagccccccatgcctgtgggggaccccccagagaagagaagaggcctgtacctgactgtgccccagtgccccctggagaagccaggcagccccagcgccaccccagcccctgggggcggcgcagatgatcctgtgtag

SEQ ID NO: 145871 - DNA, 6690 bp, synthetic construct
  misc_feature 1..6690: note = Description of Artificial Sequence: Synthetic coding sequence
  source 1..6690: mol_type = other DNA
atggccgagagcgccagcccccccagcagcagcgctgctgccccagctgctgagcccggggtgaccacagagcagcccggccccaggagcccccccagcagccccccaggcctggaggagcccctggatggagctgacccccacgtgccccacccagacctggcccccatcgccttcttctgcctgcggcagaccaccagccccaggaactggtgcatcaagatggccaccggcccctggtggtggtgcctgtgcatgctggtgatcctgctgaactgtgtgaccctgggcatgtaccagccctgtgatgacatggactgcctgagtgaccgctgcaagatcctgcaggtgtttgatgacttcatcttcatcttctttgccatggagatggtgctgaagatggtggccctgggcatctttgggaagaagtgctacctgggggacacctggaaccggctggacttcttcatcgtgatggccggcatggtggagtacagcctggacctgcagaacatcaacctgagcgccatcagaacagtgcgggtgctgcggcccctgaaggccatcaacagagtgcccagcatgaggatcctggtgaacctgctgctggacaccctgcccatgctgggcaatgtgctgctgctgtgcttctttgtgttcttcatcttcggcatcatcggcgtgcagctgtgggccggcctgctgaggaaccgctgcttcctggaggagaacttcaccatccagggagatgtggccctgcccccctactaccagccagaagaagatgatgagatgcccttcatctgcagcctgagcggggacaatggcatcatgggctgccacgagatcccccccctgaaggagcagggccgggagtgctgcctgagcaaggatgatgtgtatgactttggagctggccggcaggacctgaatgccagcggcctgtgtgtgaactggaaccgctactacaacgtgtgcaggacaggcagcgccaacccccacaagggggccatcaactttgacaacatcggctacgcctggatcgtcatcttccaggtgatcaccctggagggctgggtggagatcatgtactacgtgatggatgcccacagcttctacaacttcatctacttcatcctgctgatcatcgtgggcagcttcttcatgatcaacctgtgcctggtggtgattgccacccagttcagcgagaccaagcagcgggagcaccggctgatgctggagcagaggcagcgctacctgagcagcagcacagtggccagctatgcagagcccggggactgctatgaggagatcttccagtatgtgtgccacatcctgaggaaggccaagagaagagccctgggcctgtaccaggccctgcagagccggcggcaggccctgggccctgaggccccagccccagccaagccaggcccccacgccaaggagcccaggcactaccacggcaagaccaagggccagggagatgagggccgccacctgggcagccgccactgccagaccctgcacggccctgccagccctggaaatgaccacagcggccggggcaagccaggcccccgggagctgtgcccccagcacagccccctggatgccaccccccacaccctggtgcagcccatcccagccaccctggccagtgaccctgccagctgcccctgctgccagcatgaagatggccggcggcccagcggcctgggcagcacagacagcggccaggagggcagcggcagcggcagcagcgctggaggagaagatgaagcagatggagatggagcccggagcagtgaagatggagccagcagcgagctgggcaaggaggaggaggaggaggagcaggctgatggagctgtgtggctgtgtggagatgtgtggagggagacccgggccaagctgcggggcatcgtggacagcaagtacttcaacagaggcatcatgatggccatcctggtgaacacagtgtccatgggcatcgagcaccacgagcaggccaatgagctgaccaacatcctggagatctgcaatgtggtgttcacctccatgtttgccctggagatgatcctgaagctggccgccttcggcctgtttgactacctgaggaacccctacaacatctttgacagcatcatcgtcatcatcagcatctgggagatcgtgggccaggctgatggcggcctgtctgtgctgcggaccttccggctgctgcgggtgctgaagctggtgcgcttcatgcctgccctgcggcggcagctggtggtgctgatgaagaccatggacaacgtggccaccttctgcatgctgctgatgctgttcatcttcatcttcagcatcctgggcatgcacatcttcggctgcaagttcagcctgaggacagacaccggggacacagtgcctgacaggaagaactttgacagcctgctgtgggccatcgtgacagtgttccagatcctgacccaggaggactggaatgtggtgctgtacaacggcatggccagcaccagcccctgggccagcctgtactttgtggccctgatgaccttcggcaactacgtgctcttcaacctgctggtggccatcctggtggagggcttccaggccgagggagatgccaacagaagctacagtgatgaggaccagagcagcagcaacatcgaggagtttgacaagctgcaggagggcctggacagcagcggggaccccaagctgtgccccatccccatgaccccaaatggccacctggaccccagcctgcccctgggcggccacctgggccctgctggagctgctggccctgccccccggctgagcctgcagcctgaccccatgctggtggccctgggcagcaggaagagctctgtgatgagcctgggccgcatgtcctatgaccagaggagcctgagcagcagccgcagcagctactacggcccctggggccgctctgctgcctgggccagcagaagaagctcctggaacagcctgaagcacaagccacccagcgctgagcacgagagcctgctgtctgctgagcggggcggcggggcccgggtgtgtgaggtggccgcagatgagggcccccccagggctgcccccctgcacaccccccacgcccaccacatccaccacggcccccacctggcccaccgccaccgccaccacaggaggaccctgagcctggacaacagagacagcgtggacctggccgagctggtgcctgctgtgggcgcccacccccgggccgcctggagggctgctggccctgcccctggccacgaggactgcaatggaaggatgcccagcatcgccaaggatgtgttcaccaagatgggagacagaggagacagaggagaagatgaggaggagattgactacaccctgtgcttccgggtgaggaagatgattgatgtgtacaagccagactggtgtgaggtgcgggaggactggagcgtgtacctgttcagccctgagaaccgcttccgggtgctgtgccagaccatcatcgcccacaagctgtttgattatgtggtgctggccttcatcttcctgaactgcatcaccatcgccctggagcggccccagatcgaggccggcagcacagagcgcatcttcctgactgtgagcaactacatcttcaccgccatctttgtgggggagatgaccctgaaggtggtgtccctgggcctgtactttggagagcaggcctacctgcggagctcctggaatgtgctggatggcttcctggtgtttgtgtccatcattgatattgtggtgtccctggccagcgctgggggcgccaagatcctgggcgtgctgcgggtgctgcggctgctgcggaccctgcggcccctgcgggtcatcagccgggcccctggcctgaagctggtggtggagaccctcatcagcagcctgaagcccatcggcaacatcgtgctgatctgctgtgccttcttcatcatcttcggcatcctgggcgtgcagctgttcaagggcaagttctaccactgcctgggcgtggacaccaggaacatcaccaacagaagtgactgcatggccgccaactaccgctgggtgcaccacaagtacaactttgacaacctgggccaggccctgatgagcctgtttgtgctggccagcaaggatggctgggtgaacatcatgtacaacggcctggatgctgtggccgtggaccagcagcctgtgaccaaccacaacccctggatgctgctgtacttcatctccttcctgctgattgtgtccttctttgtgctgaacatgtttgtgggcgtggtggtggagaacttccacaagtgccggcagcaccaggaggccgaggaggcccggcggcgggaggagaagaggctgcggcggctggagaagaagaggaggaaggcccagaggctgccctactatgccacctactgccacacccggctgctgatccacagcatgtgcaccagccactacctggacatcttcatcaccttcatcatctgcctgaatgtggtgaccatgagcctggagcactacaaccagcccaccagcctggagacagccctgaagtactgcaactacatgttcaccaccgtgtttgtgctggaggccgtgctgaagctggtggccttcggcctgcggcgcttcttcaaggaccgctggaaccagctggacctggccatcgtgctgctgtctgtgatgggcatcaccctggaggagattgagatcaatgctgccctgcccatcaaccccaccatcatccgcatcatgagggtgctgcgcatcgcccgggtgctgaagctgctgaagatggccaccggcatgagggccctgctggacacagtggtgcaggccctgccccaggtgggcaacctgggcctgctcttcatgctgctcttcttcatctatgctgccctgggcgtggagctgtttgggaagctggtgtgcaatgatgagaacccctgtgagggcatgagcagacatgccacctttgagaactttggcatggccttcctgaccctcttccaggtgtccactggagacaactggaatggcatcatgaaggacaccctgcgggactgcacccatgatgagaggagctgcctgagcagcctgcagtttgtgagccccctgtactttgtgtcctttgtgctgacagcccagtttgtgctgatcaacgtggtggtggccgtgctgatgaagcacctggatgacagcaacaaggaggcccaggaggatgctgagatggatgctgagctggagctggagatggcccacggcctgggccctggcccccggctgcccaccggcagccctggggcccctggccggggccctgggggcgccggcggcggcggggacacagaaggaggcctgtgccgccgctgctacagccctgcccaggagaacctgtggctggacagcgtgtccctcatcatcaaggacagcctggagggggagctgaccatcatcgacaacctgagcggcagcatcttccaccactacagcagccctgctggctgcaagaagtgccaccacgacaagcaggaggtgcagctggccgagacagaggccttcagcctgaacagcgacaggagcagcagcatcctgctgggagatgacctgagcctggaggaccccacagcctgccccccaggcaggaaggacagcaagggggagctggaccccccagagcccatgagggtgggggacctgggggagtgcttcttccccctgagcagcacagctgtgtccccagaccctgagaacttcctgtgtgagatggaggagatccccttcaaccctgtgcgctcctggctgaagcatgacagcagccaggccccacccagccccttctccccagatgccagcagccccctgctgcccatgcctgctgagttcttccaccctgctgtgtctgccagccagaagggccctgagaagggcaccggcaccggcaccctgcccaagatcgccctgcagggctcctgggccagcctgcggagcccccgggtgaactgcaccctgctgcggcaggccactggaagtgacaccagcctggatgccagccccagcagcagcgctggcagcctgcagaccaccctggaggacagcctgaccctgagtgacagcccccggcgggccctgggccccccagccccagcccctggccccagggctggcctgagccctgctgcccggcggcggctgagcctgcggggccggggcctcttcagcctgcggggcctgcgggcccaccagaggagccacagcagcggcggcagcaccagccctggctgcacccaccacgacagcatggaccccagtgatgaggagggccggggcggggccggcggcggcggggccggcagcgagcacagcgagaccctgagcagcctgagcctgaccagcctcttctgccccccacctcctcctccagcccctggcctgaccccagccaggaagttcagcagcaccagcagcctggccgcccctggccggccccatgctgctgccctggcccacggcctggcccggagccccagctgggccgctgacaggagcaaggaccccccaggccgggcccccctgcccatgggcctgggccccctggcccccccaccccagcccctgcctggagagctggagcctggagatgctgccagcaagaggaagaggtag

SEQ ID NO: 145872 - DNA, 6567 bp, synthetic construct
  misc_feature 1..6567: note = Description of Artificial Sequence: Synthetic coding sequence
  source 1..6567: mol_type = other DNA
atggccgagagcgccagcccccccagcagcagcgctgctgccccagctgctgagcccggggtgaccacagagcagcccggccccaggagcccccccagcagccccccaggcctggaggagcccctggatggagctgacccccacgtgccccacccagacctggcccccatcgccttcttctgcctgcggcagaccaccagccccaggaactggtgcatcaagatggccaccggcccctggtggtggtgcctgtgcatgctggtgatcctgctgaactgtgtgaccctgggcatgtaccagccctgtgatgacatggactgcctgagtgaccgctgcaagatcctgcaggtgtttgatgacttcatcttcatcttctttgccatggagatggtgctgaagatggtggccctgggcatctttgggaagaagtgctacctgggggacacctggaaccggctggacttcttcatcgtgatggccggcatggtggagtacagcctggacctgcagaacatcaacctgagcgccatcagaacagtgcgggtgctgcggcccctgaaggccatcaacagagtgcccagcatgaggatcctggtgaacctgctgctggacaccctgcccatgctgggcaatgtgctgctgctgtgcttctttgtgttcttcatcttcggcatcatcggcgtgcagctgtgggccggcctgctgaggaaccgctgcttcctggaggagaacttcaccatccagggagatgtggccctgcccccctactaccagccagaagaagatgatgagatgcccttcatctgcagcctgagcggggacaatggcatcatgggctgccacgagatcccccccctgaaggagcagggccgggagtgctgcctgagcaaggatgatgtgtatgactttggagctggccggcaggacctgaatgccagcggcctgtgtgtgaactggaaccgctactacaacgtgtgcaggacaggcagcgccaacccccacaagggggccatcaactttgacaacatcggctacgcctggatcgtcatcttccaggtgatcaccctggagggctgggtggagatcatgtactacgtgatggatgcccacagcttctacaacttcatctacttcatcctgctgatcatcgtgggcagcttcttcatgatcaacctgtgcctggtggtgattgccacccagttcagcgagaccaagcagcgggagcaccggctgatgctggagcagaggcagcgctacctgagcagcagcacagtggccagctatgcagagcccggggactgctatgaggagatcttccagtatgtgtgccacatcctgaggaaggccaagagaagagccctgggcctgtaccaggccctgcagagccggcggcaggccctgggccctgaggccccagccccagccaagccaggcccccacgccaaggagcccaggcactaccagctgtgcccccagcacagccccctggatgccaccccccacaccctggtgcagcccatcccagccaccctggccagtgaccctgccagctgcccctgctgccagcatgaagatggaagaagacccagcggcctgggcagcacagattctggccaggagggcagcggcagcggcagcagcgctggaggagaagatgaagcagatggagatggagcccggagcagtgaagatggagccagcagcgagctgggcaaggaggaggaggaggaggagcaggctgatggagctgtgtggctgtgtggagatgtgtggagggagacccgggccaagctgcggggcatcgtggacagcaagtacttcaacagaggcatcatgatggccatcctggtgaacacagtgtccatgggcatcgagcaccacgagcaggccacagagctgaccaacatcctggagatctgcaatgtggtgttcacctccatgtttgccctggagatgatcctgaagctggccgccttcggcctgtttgactacctgaggaacccctacaacatctttgacagcatcatcgtcatcatcagcatctgggagatcgtgggccaggctgatggcggcctgtctgtgctgcggaccttccggctgctgcgggtgctgaagctggtgcgcttcatgcctgccctgcggcggcagctggtggtgctgatgaagaccatggacaacgtggccaccttctgcatgctgctgatgctgttcatcttcatcttcagcatcctgggcatgcacatcttcggctgcaagttcagcctgaggacagacacaggagacacagtgcctgacaggaagaactttgacagcctgctgtgggccatcgtgaccgtcttccagatcctgacccaggaggactggaatgtggtgctgtacaacggcatggccagcaccagcccctgggccagcctgtactttgtggccctgatgacctttggaaactacgtgctcttcaacctgctggtggccatcctggtggagggcttccaggccgagggagatgccaacagaagctacagtgatgaggaccagagcagcagcaacatcgaggagtttgacaagctgcaggagggcctggacagcagcggggaccccaagctgtgccccatccccatgacccccaacggccacctggaccccagcctgcccctgggcggccacctgggccctgctggagctgctggccctgccccccggctgagcctgcagcctgaccccatgctggtggccctgggcagcaggaagagctctgtgatgagcctgggccgcatgtcctatgaccagaggagcctgagcagcagccgcagcagctactacggcccctggggccgctctgctgcctgggccagccgccgcagctcctggaacagcctgaagcacaagcccccatctgctgagcacgagagcctgctgtctgctgagcggggcggcggggcccgggtgtgtgaggtggccgcagatgagggccccccccgggccgcccccctgcacacccctcatgcccaccacatccaccacggcccccacctggcccaccgccaccgccaccacaggaggaccctgagcctggacaacagagattctgtggacctggccgagctggtgcctgctgtgggcgcccaccccagggctgcctggagggctgctggccctgcccctggccacgaggactgcaatggccgcatgcccagcatcgccaaggatgtgttcaccaagatgggagacagaggagacagaggagaagatgaggaggagattgactacaccctgtgcttccgggtgaggaagatgattgatgtgtacaagccagactggtgtgaggtgcgggaggactggagcgtgtacctgttctccccagaaaatcgcttccgggtgctgtgccagaccatcatcgcccacaagctgtttgattatgtggtgctggccttcatcttcctgaactgcatcaccatcgccctggagcggccccagattgaagctggcagcacagagcgcatcttcctgactgtgagcaactacatcttcaccgccatctttgtgggggagatgaccctgaaggtggtgtccctgggcctgtactttggagagcaggcctacctgcggagctcctggaatgtgctggatggcttcctggtgtttgtgtccatcatcgacatcgtggtgtccctggccagcgctggaggagccaagatcctgggcgtgctgcgggtgctgcggctgctgcggaccctgcggcccctgcgggtcatcagccgggcccctggcctgaagctggtggtggagaccctcatcagcagcctgaagcccatcggcaacatcgtgctgatctgctgtgccttcttcatcatcttcggcatcctgggcgtgcagctgttcaagggcaagttctaccactgcctgggcgtggacaccaggaacatcaccaacagaagtgactgcatggccgccaactaccgctgggtgcaccacaagtacaactttgacaacctgggccaggccctgatgagcctgtttgtgctggccagcaaggatggctgggtgaacatcatgtacaacggcctggatgctgtggccgtggaccagcagcctgtgaccaaccacaacccctggatgctgctgtacttcatctccttcctgctgattgtgtccttctttgtgctgaacatgtttgtgggcgtggtggtggagaacttccacaagtgccggcagcaccaggaggccgaggaggccaggagaagagaggagaagaggctgcggcggctggagaagaagaggaggaaggcccagaggctgccctactatgccacctactgccacacccggctgctgatccacagcatgtgcaccagccactacctggacatcttcatcaccttcatcatctgcctgaatgtggtgaccatgagcctggagcactacaaccagcccaccagcctggagacagccctgaagtactgcaactacatgttcaccaccgtgtttgtgctggaggccgtgctgaagctggtggccttcggcctgcggcgcttcttcaaggaccgctggaaccagctggacctggccatcgtgctgctgtctgtgatgggcatcaccctggaggagattgagatcaatgctgccctgcccatcaaccccaccatcatccgcatcatgagggtgctgagaattgcccgggtgctgaagctgctgaagatggccaccggcatgagggccctgctggacacagtggtgcaggccctgccccaggtgggcaacctgggcctgctcttcatgctgctcttcttcatctatgctgccctgggcgtggagctgtttgggaagctggtgtgcaatgatgagaacccctgtgagggcatgagcagacatgccacctttgaaaattttggcatggccttcctgaccctcttccaggtgtccactggagacaactggaatggcatcatgaaggacaccctgcgggactgcacccatgatgagaggagctgcctgagcagcctgcagtttgtgagccccctgtactttgtgtcctttgtgctgacagcccagtttgtgctgatcaacgtggtggtggccgtgctgatgaagcacctggatgacagcaacaaggaggcccaggaggatgctgagatggatgctgagctggagctggagatggcccacggcctgggccctggcccccggctgcccaccggcagccctggggcccctggccggggccctggaggagctgggggcggcggggacacagagggcggcctgtgccgccgctgctacagccctgcccaggagaacctgtggctggacagcgtgtccctcatcatcaaggacagcctggagggggagctgaccatcatcgacaacctgagcggcagcatcttccaccactacagcagccctgctggctgcaagaagtgccaccacgacaagcaggaggtgcagctggccgagacagaggccttcagcctgaacagcgacaggagcagcagcatcctgctgggagatgacctgagcctggaggaccccacagcctgccccccaggcaggaaggacagcaaaggagagctggaccccccagagcccatgagggtgggggacctgggggagtgcttcttccccctgagcagcacagctgtgtccccagaccctgagaacttcctgtgtgagatggaggagatccccttcaaccctgtgcgctcctggctgaagcatgacagcagccaggccccacccagccccttctccccagatgccagcagccccctgctgcccatgcctgctgagttcttccaccctgctgtgtctgccagccagaagggccctgagaagggcactggaacaggcaccctgcccaagatcgccctgcagggctcctgggccagcctgcggagcccccgggtgaactgcaccctgctgcggcaggccaccggcagtgacaccagcctggatgccagccccagcagcagcgctggcagcctgcagaccaccctggaggacagcctgaccctgagtgacagcccccggcgggccctgggccccccagccccagcccctggcccccgggccggcctgagccctgctgcccggcggcggctgagcctgcggggccggggcctcttcagcctgcggggcctgcgggcccaccagaggagccacagcagcggcggcagcaccagccctggctgcacccaccacgacagcatggaccccagtgatgaggagggccggggcggggccggcggcggcggggccggcagcgagcacagcgagaccctgagcagcctgagcctgaccagcctcttctgccccccacctcctcctccagcccctggcctgaccccagccaggaagttcagcagcaccagcagcctggccgcccctggccggccccacgccgccgccctggcccacggcctggcccggagccccagctgggccgctgacaggagcaaggaccccccaggccgggcccccctgcccatgggcctgggccccctggcccccccaccccagcccctgcccggggagctggagcctggagatgctgccagcaagaggaagaggtag

SEQ ID NO: 145873 - DNA, 6051 bp, synthetic construct
  misc_feature 1..6051: note = Description of Artificial Sequence: Synthetic coding sequence
  source 1..6051: mol_type = other DNA
atggccgagagcgccagcccccccagcagcagcgctgctgccccagctgctgagcccggggtgaccacagagcagcccggccccaggagcccccccagcagccccccaggcctggaggagcccctggatggagctgacccccacgtgccccacccagacctggcccccatcgccttcttctgcctgcggcagaccaccagccccaggaactggtgcatcaagatggtgtgcaacccctggtttgaatgtgtgtccatgctggtgatcctgctgaactgtgtgaccctgggcatgtaccagccctgtgatgacatggactgcctgagtgaccgctgcaagatcctgcaggtgtttgatgacttcatcttcatcttctttgccatggagatggtgctgaagatggtggccctgggcatctttgggaagaagtgctacctgggggacacctggaaccggctggacttcttcatcgtgatggccggcatggtggagtacagcctggacctgcagaacatcaacctgagcgccatcagaacagtgcgggtgctgcggcccctgaaggccatcaacagagtgcccagcatgaggatcctggtgaacctgctgctggacaccctgcccatgctgggcaatgtgctgctgctgtgcttctttgtgttcttcatcttcggcatcatcggcgtgcagctgtgggccggcctgctgaggaaccgctgcttcctggaggagaacttcaccatccagggagatgtggccctgcccccctactaccagccagaagaagatgatgagatgcccttcatctgcagcctgagcggggacaatggcatcatgggctgccacgagatcccccccctgaaggagcagggccgggagtgctgcctgagcaaggatgatgtgtatgactttggagctggccggcaggacctgaatgccagcggcctgtgtgtgaactggaaccgctactacaacgtgtgcaggacaggcagcgccaacccccacaagggggccatcaactttgacaacatcggctacgcctggatcgtcatcttccaggtgatcaccctggagggctgggtggagatcatgtactacgtgatggatgcccacagcttctacaacttcatctacttcatcctgctgatcatcgtgggcagcttcttcatgatcaacctgtgcctggtggtgattgccacccagttcagcgagaccaagcagcgggagcaccggctgatgctggagcagaggcagcgctacctgagcagcagcacagtggccagctatgcagagcccggggactgctatgaggagatcttccagtatgtgtgccacatcctgaggaaggccaagagaagagccctgggcctgtaccaggccctgcagagccggcggcaggccctgggccctgaggccccagccccagccaagccaggcccccacgccaaggagcccaggcactaccacggcaagaccaagggccagggagatgagggccgccacctgggcagccgccactgccagaccctgcacggccctgccagccctggaaatgaccacagcggccgggagctgtgcccccagcacagccccctggatgccaccccccacaccctggtgcagcccatcccagccaccctggccagtgaccctgccagctgcccctgctgccagcatgaagatggccggcggcccagcggcctgggcagcacagacagcggccaggagggcagcggcagcggcagcagcgctggaggagaagatgaagcagatggagatggagcccggagcagtgaagatggagccagcagcgagctgggcaaggaggaggaggaggaggagcaggctgatggagctgtgtggctgtgtggagatgtgtggagggagacccgggccaagctgcggggcatcgtggacagcaagtacttcaacagaggcatcatgatggccatcctggtgaacacagtgtccatgggcatcgagcaccacgagcagcctgaggagctgaccaacatcctggagatctgcaatgtggtgttcacctccatgtttgccctggagatgatcctgaagctggccgccttcggcctgtttgactacctgaggaacccctacaacatctttgacagcatcatcgtcatcatcagcatctgggagatcgtgggccaggctgatggcggcctgtctgtgctgcggaccttccggctgctgcgggtgctgaagctggtgcgcttcatgcctgccctgcggcggcagctggtggtgctgatgaagaccatggacaacgtggccaccttctgcatgctgctgatgctgttcatcttcatcttcagcatcctgggcatgcacatcttcggctgcaagttcagcctgaggacagacaccggggacacagtgcctgacaggaagaactttgacagcctgctgtgggccatcgtgacagtgttccagatcctgacccaggaggactggaatgtggtgctgtacaacggcatggccagcaccagcccctgggccagcctgtactttgtggccctgatgaccttcggcaactacgtgctcttcaacctgctggtggccatcctggtggagggcttccaggccgagggagatgccaacagaagctacagtgatgaggaccagagcagcagcaacatcgaggagtttgacaagctgcaggagggcctggacagcagcggggaccccaagctgtgccccatccccatgaccccaaatggccacctggaccccagcctgcccctgggcggccacctgggccctgctggagctgctggccctgccccccggctgagcctgcagcctgaccccatgctggtggccctgggcagcaggaagagctctgtgatgagcctgggccgcatgtcctatgaccagaggagcctgagcagcagccgcagcagctactacggcccctggggccgctctgctgcctgggccagcagaagaagctcctggaacagcctgaagcacaagccacccagcgctgagcacgagagcctgctgtctgctgagcggggcggcggggcccgggtgtgtgaggtggccgcagatgagggcccccccagggctgcccccctgcacaccccccacgcccaccacatccaccacggcccccacctggcccaccgccaccgccaccacaggaggaccctgagcctggacaacagagacagcgtggacctggccgagctggtgcctgctgtgggcgcccacccccgggccgcctggagggctgctggccctgcccctggccacgaggactgcaatggaaggatgcccagcatcgccaaggatgtgttcaccaagatgggagacagaggagacagaggagaagatgaggaggagattgactacaccctgtgcttccgggtgaggaagatgattgatgtgtacaagccagactggtgtgaggtgcgggaggactggagcgtgtacctgttcagccctgagaaccgcttccgggtgctgtgccagaccatcatcgcccacaagctgtttgattatgtggtgctggccttcatcttcctgaactgcatcaccatcgccctggagcggccccagatcgaggccggcagcacagagcgcatcttcctgactgtgagcaactacatcttcaccgccatctttgtgggggagatgaccctgaaggtggtgtccctgggcctgtactttggagagcaggcctacctgcggagctcctggaatgtgctggatggcttcctggtgtttgtgtccatcattgatattgtggtgtccctggccagcgctgggggcgccaagatcctgggcgtgctgcgggtgctgcggctgctgcggaccctgcggcccctgcgggtcatcagccgggcccctggcctgaagctggtggtggagaccctcatcagcagcctgaagcccatcggcaacatcgtgctgatctgctgtgccttcttcatcatcttcggcatcctgggcgtgcagctgttcaagggcaagttctaccactgcctgggcgtggacaccaggaacatcaccaacagaagtgactgcatggccgccaactaccgctgggtgcaccacaagtacaactttgacaacctgggccaggccctgatgagcctgtttgtgctggccagcaaggatggctgggtgaacatcatgtacaacggcctggatgctgtggccgtggaccagcagcctgtgaccaaccacaacccctggatgctgctgtacttcatctccttcctgctgattgtgtccttctttgtgctgaacatgtttgtgggcgtggtggtggagaacttccacaagtgccggcagcaccaggaggccgaggaggcccggcggcgggaggagaagaggctgcggcggctggagaagaagaggaggaaggcccagaggctgccctactatgccacctactgccacacccggctgctgatccacagcatgtgcaccagccactacctggacatcttcatcaccttcatcatctgcctgaatgtggtgaccatgagcctggagcactacaaccagcccaccagcctggagacagccctgaagtactgcaactacatgttcaccaccgtgtttgtgctggaggccgtgctgaagctggtggccttcggcctgcggcgcttcttcaaggaccgctggaaccagctggacctggccatcgtgctgctgtctgtgatgggcatcaccctggaggagattgagatcaatgctgccctgcccatcaaccccaccatcatccgcatcatgagggtgctgcgcatcgcccgggtgctgaagctgctgaagatggccaccggcatgagggccctgctggacacagtggtgcaggccctgccccaggtgggcaacctgggcctgctcttcatgctgctcttcttcatctatgctgccctgggcgtggagctgtttgggaagctggtgtgcaatgatgagaacccctgtgagggcatgagcagacatgccacctttgagaactttggcatggccttcctgaccctcttccaggtgtccactggagacaactggaatggcatcatgaaggacaccctgcgggactgcacccatgatgagaggagctgcctgagcagcctgcagtttgtgagccccctgtactttgtgtcctttgtgctgacagcccagtttgtgctgatcaacgtggtggtggccgtgctgatgaagcacctggatgacagcaacaaggaggcccaggaggatgctgagatggatgctgagctggagctggagatggcccacggcctgggccctggcccccggctgcccaccggcagccctggggcccctggccggggccctgggggcgccggcggcggcggggacacagaaggaggcctgtgccgccgctgctacagccctgcccaggagaacctgtggctggacagcgtgtccctcatcatcaaggacagcctggagggggagctgaccatcatcgacaacctgagcggcagcatcttccaccactacagcagccctgctggctgcaagaagtgccaccacgacaagcaggaggtgcagctggccgagacagaggccttcagcctgaacagcgacaggagcagcagcatcctgctgggagatgacctgagcctggaggaccccacagcctgccccccaggcaggaaggacagcaagggggagctggaccccccagagcccatgagggtgggggacctgggggagtgcttcttccccctgagcagcacagctgtgtccccagaccctgagaacttcctgtgtgagatggaggagatccccttcaaccctgtgcgctcctggctgaagcatgacagcagccaggccccacccagccccttctccccagatgccagcagccccctgctgcccatgcctgctgagttcttccaccctgctgtgtctgccagccagaagggccctgagaagggcaccggcaccggcaccctgcccaagatcgccctgcagggctcctgggccagcctgcggagcccccgggtgaactgcaccctgctgcggcaggtgcccaccccaccccggccctag

SEQ ID NO: 145874 - DNA, 6672 bp, synthetic construct
  misc_feature 1..6672: note = Description of Artificial Sequence: Synthetic coding sequence
  source 1..6672: mol_type = other DNA
atggccgagagcgccagcccccccagcagcagcgctgctgccccagctgctgagcccggggtgaccacagagcagcccggccccaggagcccccccagcagccccccaggcctggaggagcccctggatggagctgacccccacgtgccccacccagacctggcccccatcgccttcttctgcctgcggcagaccaccagccccaggaactggtgcatcaagatggtgtgcaacccctggtttgaatgtgtgtccatgctggtgatcctgctgaactgtgtgaccctgggcatgtaccagccctgtgatgacatggactgcctgagtgaccgctgcaagatcctgcaggtgtttgatgacttcatcttcatcttctttgccatggagatggtgctgaagatggtggccctgggcatctttgggaagaagtgctacctgggggacacctggaaccggctggacttcttcatcgtgatggccggcatggtggagtacagcctggacctgcagaacatcaacctgagcgccatcagaacagtgcgggtgctgcggcccctgaaggccatcaacagagtgcccagcatgaggatcctggtgaacctgctgctggacaccctgcccatgctgggcaatgtgctgctgctgtgcttctttgtgttcttcatcttcggcatcatcggcgtgcagctgtgggccggcctgctgaggaaccgctgcttcctggaggagaacttcaccatccagggagatgtggccctgcccccctactaccagccagaagaagatgatgagatgcccttcatctgcagcctgagcggggacaatggcatcatgggctgccacgagatcccccccctgaaggagcagggccgggagtgctgcctgagcaaggatgatgtgtatgactttggagctggccggcaggacctgaatgccagcggcctgtgtgtgaactggaaccgctactacaacgtgtgcaggacaggcagcgccaacccccacaagggggccatcaactttgacaacatcggctacgcctggatcgtcatcttccaggtgatcaccctggagggctgggtggagatcatgtactacgtgatggatgcccacagcttctacaacttcatctacttcatcctgctgatcatcgtgggcagcttcttcatgatcaacctgtgcctggtggtgattgccacccagttcagcgagaccaagcagcgggagcaccggctgatgctggagcagaggcagcgctacctgagcagcagcacagtggccagctatgcagagcccggggactgctatgaggagatcttccagtatgtgtgccacatcctgaggaaggccaagagaagagccctgggcctgtaccaggccctgcagagccggcggcaggccctgggccctgaggccccagccccagccaagccaggcccccacgccaaggagcccaggcactaccacggcaagaccaagggccagggagatgagggccgccacctgggcagccgccactgccagaccctgcacggccctgccagccctggaaatgaccacagcggccgggagctgtgcccccagcacagccccctggatgccaccccccacaccctggtgcagcccatcccagccaccctggccagtgaccctgccagctgcccctgctgccagcatgaagatggccggcggcccagcggcctgggcagcacagacagcggccaggagggcagcggcagcggcagcagcgctggaggagaagatgaagcagatggagatggagcccggagcagtgaagatggagccagcagcgagctgggcaaggaggaggaggaggaggagcaggctgatggagctgtgtggctgtgtggagatgtgtggagggagacccgggccaagctgcggggcatcgtggacagcaagtacttcaacagaggcatcatgatggccatcctggtgaacacagtgtccatgggcatcgagcaccacgagcagcctgaggagctgaccaacatcctggagatctgcaatgtggtgttcacctccatgtttgccctggagatgatcctgaagctggccgccttcggcctgtttgactacctgaggaacccctacaacatctttgacagcatcatcgtcatcatcagcatctgggagatcgtgggccaggctgatggcggcctgtctgtgctgcggaccttccggctgctgcgggtgctgaagctggtgcgcttcatgcctgccctgcggcggcagctggtggtgctgatgaagaccatggacaacgtggccaccttctgcatgctgctgatgctgttcatcttcatcttcagcatcctgggcatgcacatcttcggctgcaagttcagcctgaggacagacaccggggacacagtgcctgacaggaagaactttgacagcctgctgtgggccatcgtgacagtgttccagatcctgacccaggaggactggaatgtggtgctgtacaacggcatggccagcaccagcccctgggccagcctgtactttgtggccctgatgaccttcggcaactacgtgctcttcaacctgctggtggccatcctggtggagggcttccaggccgagggagatgccaacagaagctacagtgatgaggaccagagcagcagcaacatcgaggagtttgacaagctgcaggagggcctggacagcagcggggaccccaagctgtgccccatccccatgaccccaaatggccacctggaccccagcctgcccctgggcggccacctgggccctgctggagctgctggccctgccccccggctgagcctgcagcctgaccccatgctggtggccctgggcagcaggaagagctctgtgatgagcctgggccgcatgtcctatgaccagaggagcctgagcagcagccgcagcagctactacggcccctggggccgctctgctgcctgggccagcagaagaagctcctggaacagcctgaagcacaagccacccagcgctgagcacgagagcctgctgtctgctgagcggggcggcggggcccgggtgtgtgaggtggccgcagatgagggcccccccagggctgcccccctgcacaccccccacgcccaccacatccaccacggcccccacctggcccaccgccaccgccaccacaggaggaccctgagcctggacaacagagacagcgtggacctggccgagctggtgcctgctgtgggcgcccacccccgggccgcctggagggctgctggccctgcccctggccacgaggactgcaatggaaggatgcccagcatcgccaaggatgtgttcaccaagatgggagacagaggagacagaggagaagatgaggaggagattgactacaccctgtgcttccgggtgaggaagatgattgatgtgtacaagccagactggtgtgaggtgcgggaggactggagcgtgtacctgttcagccctgagaaccgcttccgggtgctgtgccagaccatcatcgcccacaagctgtttgattatgtggtgctggccttcatcttcctgaactgcatcaccatcgccctggagcggccccagatcgaggccggcagcacagagcgcatcttcctgactgtgagcaactacatcttcaccgccatctttgtgggggagatgaccctgaaggtggtgtccctgggcctgtactttggagagcaggcctacctgcggagctcctggaatgtgctggatggcttcctggtgtttgtgtccatcattgatattgtggtgtccctggccagcgctgggggcgccaagatcctgggcgtgctgcgggtgctgcggctgctgcggaccctgcggcccctgcgggtcatcagccgggcccctggcctgaagctggtggtggagaccctcatcagcagcctgaagcccatcggcaacatcgtgctgatctgctgtgccttcttcatcatcttcggcatcctgggcgtgcagctgttcaagggcaagttctaccactgcctgggcgtggacaccaggaacatcaccaacagaagtgactgcatggccgccaactaccgctgggtgcaccacaagtacaactttgacaacctgggccaggccctgatgagcctgtttgtgctggccagcaaggatggctgggtgaacatcatgtacaacggcctggatgctgtggccgtggaccagcagcctgtgaccaaccacaacccctggatgctgctgtacttcatctccttcctgctgattgtgtccttctttgtgctgaacatgtttgtgggcgtggtggtggagaacttccacaagtgccggcagcaccaggaggccgaggaggcccggcggcgggaggagaagaggctgcggcggctggagaagaagaggaggaaggcccagaggctgccctactatgccacctactgccacacccggctgctgatccacagcatgtgcaccagccactacctggacatcttcatcaccttcatcatctgcctgaatgtggtgaccatgagcctggagcactacaaccagcccaccagcctggagacagccctgaagtactgcaactacatgttcaccaccgtgtttgtgctggaggccgtgctgaagctggtggccttcggcctgcggcgcttcttcaaggaccgctggaaccagctggacctggccatcgtgctgctgtctgtgatgggcatcaccctggaggagattgagatcaatgctgccctgcccatcaaccccaccatcatccgcatcatgagggtgctgcgcatcgcccgggtgctgaagctgctgaagatggccaccggcatgagggccctgctggacacagtggtgcaggccctgccccaggtgggcaacctgggcctgctcttcatgctgctcttcttcatctatgctgccctgggcgtggagctgtttgggaagctggtgtgcaatgatgagaacccctgtgagggcatgagcagacatgccacctttgagaactttggcatggccttcctgaccctcttccaggtgtccactggagacaactggaatggcatcatgaaggacaccctgcgggactgcacccatgatgagaggagctgcctgagcagcctgcagtttgtgagccccctgtactttgtgtcctttgtgctgacagcccagtttgtgctgatcaacgtggtggtggccgtgctgatgaagcacctggatgacagcaacaaggaggcccaggaggatgctgagatggatgctgagctggagctggagatggcccacggcctgggccctggcccccggctgcccaccggcagccctggggcccctggccggggccctgggggcgccggcggcggcggggacacagaaggaggcctgtgccgccgctgctacagccctgcccaggagaacctgtggctggacagcgtgtccctcatcatcaaggacagcctggagggggagctgaccatcatcgacaacctgagcggcagcatcttccaccactacagcagccctgctggctgcaagaagtgccaccacgacaagcaggaggtgcagctggccgagacagaggccttcagcctgaacagcgacaggagcagcagcatcctgctgggagatgacctgagcctggaggaccccacagcctgccccccaggcaggaaggacagcaagggggagctggaccccccagagcccatgagggtgggggacctgggggagtgcttcttccccctgagcagcacagctgtgtccccagaccctgagaacttcctgtgtgagatggaggagatccccttcaaccctgtgcgctcctggctgaagcatgacagcagccaggccccacccagccccttctccccagatgccagcagccccctgctgcccatgcctgctgagttcttccaccctgctgtgtctgccagccagaagggccctgagaagggcaccggcaccggcaccctgcccaagatcgccctgcagggctcctgggccagcctgcggagcccccgggtgaactgcaccctgctgcggcaggccactggaagtgacaccagcctggatgccagccccagcagcagcgctggcagcctgcagaccaccctggaggacagcctgaccctgagtgacagcccccggcgggccctgggccccccagccccagcccctggccccagggctggcctgagccctgctgcccggcggcggctgagcctgcggggccggggcctcttcagcctgcggggcctgcgggcccaccagaggagccacagcagcggcggcagcaccagccctggctgcacccaccacgacagcatggaccccagtgatgaggagggccggggcggggccggcggcggcggggccggcagcgagcacagcgagaccctgagcagcctgagcctgaccagcctcttctgccccccacctcctcctccagcccctggcctgaccccagccaggaagttcagcagcaccagcagcctggccgcccctggccggccccatgctgctgccctggcccacggcctggcccggagccccagctgggccgctgacaggagcaaggaccccccaggccgggcccccctgcccatgggcctgggccccctggcccccccaccccagcccctgcctggagagctggagcctggagatgctgccagcaagaggaagaggtag

SEQ ID NO: 145875 - DNA, 6567 bp, synthetic construct
  misc_feature 1..6567: note = Description of Artificial Sequence: Synthetic coding sequence
  source 1..6567: mol_type = other DNA
atggccgagagcgccagcccccccagcagcagcgctgctgccccagctgctgagcccggggtgaccacagagcagcccggccccaggagcccccccagcagccccccaggcctggaggagcccctggatggagctgacccccacgtgccccacccagacctggcccccatcgccttcttctgcctgcggcagaccaccagccccaggaactggtgcatcaagatggtgtgcaacccctggtttgaatgtgtgtccatgctggtgatcctgctgaactgtgtgaccctgggcatgtaccagccctgtgatgacatggactgcctgagtgaccgctgcaagatcctgcaggtgtttgatgacttcatcttcatcttctttgccatggagatggtgctgaagatggtggccctgggcatctttgggaagaagtgctacctgggggacacctggaaccggctggacttcttcatcgtgatggccggcatggtggagtacagcctggacctgcagaacatcaacctgagcgccatcagaacagtgcgggtgctgcggcccctgaaggccatcaacagagtgcccagcatgaggatcctggtgaacctgctgctggacaccctgcccatgctgggcaatgtgctgctgctgtgcttctttgtgttcttcatcttcggcatcatcggcgtgcagctgtgggccggcctgctgaggaaccgctgcttcctggaggagaacttcaccatccagggagatgtggccctgcccccctactaccagccagaagaagatgatgagatgcccttcatctgcagcctgagcggggacaatggcatcatgggctgccacgagatcccccccctgaaggagcagggccgggagtgctgcctgagcaaggatgatgtgtatgactttggagctggccggcaggacctgaatgccagcggcctgtgtgtgaactggaaccgctactacaacgtgtgcaggacaggcagcgccaacccccacaagggggccatcaactttgacaacatcggctacgcctggatcgtcatcttccaggtgatcaccctggagggctgggtggagatcatgtactacgtgatggatgcccacagcttctacaacttcatctacttcatcctgctgatcatcgtgggcagcttcttcatgatcaacctgtgcctggtggtgattgccacccagttcagcgagaccaagcagcgggagcaccggctgatgctggagcagaggcagcgctacctgagcagcagcacagtggccagctatgcagagcccggggactgctatgaggagatcttccagtatgtgtgccacatcctgaggaaggccaagagaagagccctgggcctgtaccaggccctgcagagccggcggcaggccctgggccctgaggccccagccccagccaagccaggcccccacgccaaggagcccaggcactaccagctgtgcccccagcacagccccctggatgccaccccccacaccctggtgcagcccatcccagccaccctggccagtgaccctgccagctgcccctgctgccagcatgaagatggaagaagacccagcggcctgggcagcacagattctggccaggagggcagcggcagcggcagcagcgctggaggagaagatgaagcagatggagatggagcccggagcagtgaagatggagccagcagcgagctgggcaaggaggaggaggaggaggagcaggctgatggagctgtgtggctgtgtggagatgtgtggagggagacccgggccaagctgcggggcatcgtggacagcaagtacttcaacagaggcatcatgatggccatcctggtgaacacagtgtccatgggcatcgagcaccacgagcagcctgaggagctgaccaacatcctggagatctgcaatgtggtgttcacctccatgtttgccctggagatgatcctgaagctggccgccttcggcctgtttgactacctgaggaacccctacaacatctttgacagcatcatcgtcatcatcagcatctgggagatcgtgggccaggctgatggcggcctgtctgtgctgcggaccttccggctgctgcgggtgctgaagctggtgcgcttcatgcctgccctgcggcggcagctggtggtgctgatgaagaccatggacaacgtggccaccttctgcatgctgctgatgctgttcatcttcatcttcagcatcctgggcatgcacatcttcggctgcaagttcagcctgaggacagacacaggagacacagtgcctgacaggaagaactttgacagcctgctgtgggccatcgtgaccgtcttccagatcctgacccaggaggactggaatgtggtgctgtacaacggcatggccagcaccagcccctgggccagcctgtactttgtggccctgatgacctttggaaactacgtgctcttcaacctgctggtggccatcctggtggagggcttccaggccgagggagatgccaacagaagctacagtgatgaggaccagagcagcagcaacatcgaggagtttgacaagctgcaggagggcctggacagcagcggggaccccaagctgtgccccatccccatgacccccaacggccacctggaccccagcctgcccctgggcggccacctgggccctgctggagctgctggccctgccccccggctgagcctgcagcctgaccccatgctggtggccctgggcagcaggaagagctctgtgatgagcctgggccgcatgtcctatgaccagaggagcctgagcagcagccgcagcagctactacggcccctggggccgctctgctgcctgggccagccgccgcagctcctggaacagcctgaagcacaagcccccatctgctgagcacgagagcctgctgtctgctgagcggggcggcggggcccgggtgtgtgaggtggccgcagatgagggccccccccgggccgcccccctgcacacccctcatgcccaccacatccaccacggcccccacctggcccaccgccaccgccaccacaggaggaccctgagcctggacaacagagattctgtggacctggccgagctggtgcctgctgtgggcgcccaccccagggctgcctggagggctgctggccctgcccctggccacgaggactgcaatggccgcatgcccagcatcgccaaggatgtgttcaccaagatgggagacagaggagacagaggagaagatgaggaggagattgactacaccctgtgcttccgggtgaggaagatgattgatgtgtacaagccagactggtgtgaggtgcgggaggactggagcgtgtacctgttctccccagaaaatcgcttccgggtgctgtgccagaccatcatcgcccacaagctgtttgattatgtggtgctggccttcatcttcctgaactgcatcaccatcgccctggagcggccccagattgaagctggcagcacagagcgcatcttcctgactgtgagcaactacatcttcaccgccatctttgtgggggagatgaccctgaaggtggtgtccctgggcctgtactttggagagcaggcctacctgcggagctcctggaatgtgctggatggcttcctggtgtttgtgtccatcatcgacatcgtggtgtccctggccagcgctggaggagccaagatcctgggcgtgctgcgggtgctgcggctgctgcggaccctgcggcccctgcgggtcatcagccgggcccctggcctgaagctggtggtggagaccctcatcagcagcctgaagcccatcggcaacatcgtgctgatctgctgtgccttcttcatcatcttcggcatcctgggcgtgcagctgttcaagggcaagttctaccactgcctgggcgtggacaccaggaacatcaccaacagaagtgactgcatggccgccaactaccgctgggtgcaccacaagtacaactttgacaacctgggccaggccctgatgagcctgtttgtgctggccagcaaggatggctgggtgaacatcatgtacaacggcctggatgctgtggccgtggaccagcagcctgtgaccaaccacaacccctggatgctgctgtacttcatctccttcctgctgattgtgtccttctttgtgctgaacatgtttgtgggcgtggtggtggagaacttccacaagtgccggcagcaccaggaggccgaggaggccaggagaagagaggagaagaggctgcggcggctggagaagaagaggaggaaggcccagaggctgccctactatgccacctactgccacacccggctgctgatccacagcatgtgcaccagccactacctggacatcttcatcaccttcatcatctgcctgaatgtggtgaccatgagcctggagcactacaaccagcccaccagcctggagacagccctgaagtactgcaactacatgttcaccaccgtgtttgtgctggaggccgtgctgaagctggtggccttcggcctgcggcgcttcttcaaggaccgctggaaccagctggacctggccatcgtgctgctgtctgtgatgggcatcaccctggaggagattgagatcaatgctgccctgcccatcaaccccaccatcatccgcatcatgagggtgctgagaattgcccgggtgctgaagctgctgaagatggccaccggcatgagggccctgctggacacagtggtgcaggccctgccccaggtgggcaacctgggcctgctcttcatgctgctcttcttcatctatgctgccctgggcgtggagctgtttgggaagctggtgtgcaatgatgagaacccctgtgagggcatgagcagacatgccacctttgaaaattttggcatggccttcctgaccctcttccaggtgtccactggagacaactggaatggcatcatgaaggacaccctgcgggactgcacccatgatgagaggagctgcctgagcagcctgcagtttgtgagccccctgtactttgtgtcctttgtgctgacagcccagtttgtgctgatcaacgtggtggtggccgtgctgatgaagcacctggatgacagcaacaaggaggcccaggaggatgctgagatggatgctgagctggagctggagatggcccacggcctgggccctggcccccggctgcccaccggcagccctggggcccctggccggggccctggaggagctgggggcggcggggacacagagggcggcctgtgccgccgctgctacagccctgcccaggagaacctgtggctggacagcgtgtccctcatcatcaaggacagcctggagggggagctgaccatcatcgacaacctgagcggcagcatcttccaccactacagcagccctgctggctgcaagaagtgccaccacgacaagcaggaggtgcagctggccgagacagaggccttcagcctgaacagcgacaggagcagcagcatcctgctgggagatgacctgagcctggaggaccccacagcctgccccccaggcaggaaggacagcaaaggagagctggaccccccagagcccatgagggtgggggacctgggggagtgcttcttccccctgagcagcacagctgtgtccccagaccctgagaacttcctgtgtgagatggaggagatccccttcaaccctgtgcgctcctggctgaagcatgacagcagccaggccccacccagccccttctccccagatgccagcagccccctgctgcccatgcctgctgagttcttccaccctgctgtgtctgccagccagaagggccctgagaagggcactggaacaggcaccctgcccaagatcgccctgcagggctcctgggccagcctgcggagcccccgggtgaactgcaccctgctgcggcaggccaccggcagtgacaccagcctggatgccagccccagcagcagcgctggcagcctgcagaccaccctggaggacagcctgaccctgagtgacagcccccggcgggccctgggccccccagccccagcccctggcccccgggccggcctgagccctgctgcccggcggcggctgagcctgcggggccggggcctcttcagcctgcggggcctgcgggcccaccagaggagccacagcagcggcggcagcaccagccctggctgcacccaccacgacagcatggaccccagtgatgaggagggccggggcggggccggcggcggcggggccggcagcgagcacagcgagaccctgagcagcctgagcctgaccagcctcttctgccccccacctcctcctccagcccctggcctgaccccagccaggaagttcagcagcaccagcagcctggccgcccctggccggccccacgccgccgccctggcccacggcctggcccggagccccagctgggccgctgacaggagcaaggaccccccaggccgggcccccctgcccatgggcctgggccccctggcccccccaccccagcccctgcccggggagctggagcctggagatgctgccagcaagaggaagaggtag

SEQ ID NO: 145876 - DNA, 5946 bp, synthetic construct
  misc_feature 1..5946: note = Description of Artificial Sequence: Synthetic coding sequence
  source 1..5946: mol_type = other DNA
atggccgagagcgccagcccccccagcagcagcgctgctgccccagctgctgagcccggggtgaccacagagcagcccggccccaggagcccccccagcagccccccaggcctggaggagcccctggatggagctgacccccacgtgccccacccagacctggcccccatcgccttcttctgcctgcggcagaccaccagccccaggaactggtgcatcaagatggtgtgcaacccctggtttgaatgtgtgtccatgctggtgatcctgctgaactgtgtgaccctgggcatgtaccagccctgtgatgacatggactgcctgagtgaccgctgcaagatcctgcaggtgtttgatgacttcatcttcatcttctttgccatggagatggtgctgaagatggtggccctgggcatctttgggaagaagtgctacctgggggacacctggaaccggctggacttcttcatcgtgatggccggcatggtggagtacagcctggacctgcagaacatcaacctgagcgccatcagaacagtgcgggtgctgcggcccctgaaggccatcaacagagtgcccagcatgaggatcctggtgaacctgctgctggacaccctgcccatgctgggcaatgtgctgctgctgtgcttctttgtgttcttcatcttcggcatcatcggcgtgcagctgtgggccggcctgctgaggaaccgctgcttcctggaggagaacttcaccatccagggagatgtggccctgcccccctactaccagccagaagaagatgatgagatgcccttcatctgcagcctgagcggggacaatggcatcatgggctgccacgagatcccccccctgaaggagcagggccgggagtgctgcctgagcaaggatgatgtgtatgactttggagctggccggcaggacctgaatgccagcggcctgtgtgtgaactggaaccgctactacaacgtgtgcaggacaggcagcgccaacccccacaagggggccatcaactttgacaacatcggctacgcctggatcgtcatcttccaggtgatcaccctggagggctgggtggagatcatgtactacgtgatggatgcccacagcttctacaacttcatctacttcatcctgctgatcatcgtgggcagcttcttcatgatcaacctgtgcctggtggtgattgccacccagttcagcgagaccaagcagcgggagcaccggctgatgctggagcagaggcagcgctacctgagcagcagcacagtggccagctatgcagagcccggggactgctatgaggagatcttccagtatgtgtgccacatcctgaggaaggccaagagaagagccctgggcctgtaccaggccctgcagagccggcggcaggccctgggccctgaggccccagccccagccaagccaggcccccacgccaaggagcccaggcactaccagctgtgcccccagcacagccccctggatgccaccccccacaccctggtgcagcccatcccagccaccctggccagtgaccctgccagctgcccctgctgccagcatgaagatggaagaagacccagcggcctgggcagcacagattctggccaggagggcagcggcagcggcagcagcgctggaggagaagatgaagcagatggagatggagcccggagcagtgaagatggagccagcagcgagctgggcaaggaggaggaggaggaggagcaggctgatggagctgtgtggctgtgtggagatgtgtggagggagacccgggccaagctgcggggcatcgtggacagcaagtacttcaacagaggcatcatgatggccatcctggtgaacacagtgtccatgggcatcgagcaccacgagcagcctgaggagctgaccaacatcctggagatctgcaatgtggtgttcacctccatgtttgccctggagatgatcctgaagctggccgccttcggcctgtttgactacctgaggaacccctacaacatctttgacagcatcatcgtcatcatcagcatctgggagatcgtgggccaggctgatggcggcctgtctgtgctgcggaccttccggctgctgcgggtgctgaagctggtgcgcttcatgcctgccctgcggcggcagctggtggtgctgatgaagaccatggacaacgtggccaccttctgcatgctgctgatgctgttcatcttcatcttcagcatcctgggcatgcacatcttcggctgcaagttcagcctgaggacagacacaggagacacagtgcctgacaggaagaactttgacagcctgctgtgggccatcgtgaccgtcttccagatcctgacccaggaggactggaatgtggtgctgtacaacggcatggccagcaccagcccctgggccagcctgtactttgtggccctgatgacctttggaaactacgtgctcttcaacctgctggtggccatcctggtggagggcttccaggccgagggagatgccaacagaagctacagtgatgaggaccagagcagcagcaacatcgaggagtttgacaagctgcaggagggcctggacagcagcggggaccccaagctgtgccccatccccatgacccccaacggccacctggaccccagcctgcccctgggcggccacctgggccctgctggagctgctggccctgccccccggctgagcctgcagcctgaccccatgctggtggccctgggcagcaggaagagctctgtgatgagcctgggccgcatgtcctatgaccagaggagcctgagcagcagccgcagcagctactacggcccctggggccgctctgctgcctgggccagccgccgcagctcctggaacagcctgaagcacaagcccccatctgctgagcacgagagcctgctgtctgctgagcggggcggcggggcccgggtgtgtgaggtggccgcagatgagggccccccccgggccgcccccctgcacacccctcatgcccaccacatccaccacggcccccacctggcccaccgccaccgccaccacaggaggaccctgagcctggacaacagagattctgtggacctggccgagctggtgcctgctgtgggcgcccaccccagggctgcctggagggctgctggccctgcccctggccacgaggactgcaatggccgcatgcccagcatcgccaaggatgtgttcaccaagatgggagacagaggagacagaggagaagatgaggaggagattgactacaccctgtgcttccgggtgaggaagatgattgatgtgtacaagccagactggtgtgaggtgcgggaggactggagcgtgtacctgttctccccagaaaatcgcttccgggtgctgtgccagaccatcatcgcccacaagctgtttgattatgtggtgctggccttcatcttcctgaactgcatcaccatcgccctggagcggccccagattgaagctggcagcacagagcgcatcttcctgactgtgagcaactacatcttcaccgccatctttgtgggggagatgaccctgaaggtggtgtccctgggcctgtactttggagagcaggcctacctgcggagctcctggaatgtgctggatggcttcctggtgtttgtgtccatcatcgacatcgtggtgtccctggccagcgctggaggagccaagatcctgggcgtgctgcgggtgctgcggctgctgcggaccctgcggcccctgcgggtcatcagccgggcccctggcctgaagctggtggtggagaccctcatcagcagcctgaagcccatcggcaacatcgtgctgatctgctgtgccttcttcatcatcttcggcatcctgggcgtgcagctgttcaagggcaagttctaccactgcctgggcgtggacaccaggaacatcaccaacagaagtgactgcatggccgccaactaccgctgggtgcaccacaagtacaactttgacaacctgggccaggccctgatgagcctgtttgtgctggccagcaaggatggctgggtgaacatcatgtacaacggcctggatgctgtggccgtggaccagcagcctgtgaccaaccacaacccctggatgctgctgtacttcatctccttcctgctgattgtgtccttctttgtgctgaacatgtttgtgggcgtggtggtggagaacttccacaagtgccggcagcaccaggaggccgaggaggccaggagaagagaggagaagaggctgcggcggctggagaagaagaggaggaaggcccagaggctgccctactatgccacctactgccacacccggctgctgatccacagcatgtgcaccagccactacctggacatcttcatcaccttcatcatctgcctgaatgtggtgaccatgagcctggagcactacaaccagcccaccagcctggagacagccctgaagtactgcaactacatgttcaccaccgtgtttgtgctggaggccgtgctgaagctggtggccttcggcctgcggcgcttcttcaaggaccgctggaaccagctggacctggccatcgtgctgctgtctgtgatgggcatcaccctggaggagattgagatcaatgctgccctgcccatcaaccccaccatcatccgcatcatgagggtgctgagaattgcccgggtgctgaagctgctgaagatggccaccggcatgagggccctgctggacacagtggtgcaggccctgccccaggtgggcaacctgggcctgctcttcatgctgctcttcttcatctatgctgccctgggcgtggagctgtttgggaagctggtgtgcaatgatgagaacccctgtgagggcatgagcagacatgccacctttgaaaattttggcatggccttcctgaccctcttccaggtgtccactggagacaactggaatggcatcatgaaggacaccctgcgggactgcacccatgatgagaggagctgcctgagcagcctgcagtttgtgagccccctgtactttgtgtcctttgtgctgacagcccagtttgtgctgatcaacgtggtggtggccgtgctgatgaagcacctggatgacagcaacaaggaggcccaggaggatgctgagatggatgctgagctggagctggagatggcccacggcctgggccctggcccccggctgcccaccggcagccctggggcccctggccggggccctggaggagctgggggcggcggggacacagagggcggcctgtgccgccgctgctacagccctgcccaggagaacctgtggctggacagcgtgtccctcatcatcaaggacagcctggagggggagctgaccatcatcgacaacctgagcggcagcatcttccaccactacagcagccctgctggctgcaagaagtgccaccacgacaagcaggaggtgcagctggccgagacagaggccttcagcctgaacagcgacaggagcagcagcatcctgctgggagatgacctgagcctggaggaccccacagcctgccccccaggcaggaaggacagcaaaggagagctggaccccccagagcccatgagggtgggggacctgggggagtgcttcttccccctgagcagcacagctgtgtccccagaccctgagaacttcctgtgtgagatggaggagatccccttcaaccctgtgcgctcctggctgaagcatgacagcagccaggccccacccagccccttctccccagatgccagcagccccctgctgcccatgcctgctgagttcttccaccctgctgtgtctgccagccagaagggccctgagaagggcactggaacaggcaccctgcccaagatcgccctgcagggctcctgggccagcctgcggagcccccgggtgaactgcaccctgctgcggcaggtgcccaccccaccccggccctag

SEQ ID NO: 145877 - DNA, 1041 bp, synthetic construct
  misc_feature 1..1041: note = Description of Artificial Sequence: Synthetic coding sequence
  source 1..1041: mol_type = other DNA
atgatggacaagttcaggatgatcttccagttcctgcagagcaaccaggagagcttcatgaatggcatctgtggcatcatggccctggccagcgcccagatgtacagcgcctttgacttcaactgcccctgcctgcccggctacaatgctgcctacagcgctggcatcctgctggccccacccctggtgctcttcctgctgggcctggtgatgaacaacaacgtgtccatgctggccgaggagtggaagaggcccctgggccggcgggccaaggaccctgctgtgctgcgctacatgttctgcagcatggcccagagggccctgattgcccctgtggtgtgggtggccgtgaccctgctggatggcaagtgcttcctgtgtgccttctgcacagctgtgcctgtgtctgccctgggcaatggcagcctggcccctggcctgcctgcccctgagctggcccggctgctggcccgggtgccctgcccagagatctatgatggagactggctgctggcccgggaggtggccgtgcgctacctgcgctgcatcagccaggccctgggctggagctttgtgctgctgaccaccctgctggcctttgtggtgcgctctgtgcggccctgcttcacccaggccgccttcctgaagagcaagtactggagccactacatcgacatcgagaggaagctgtttgatgagacctgcacagagcacgccaaggcctttgccaaggtgtgcatccagcagttctttgaggccatgaaccacgacctggagctgggccacacccacggcaccctggccacagccccagccagcgctgctgcccccaccaccccagatggagctgaggaggagcgggagaagctgcggggcatcacagaccagggcaccatgaaccggctgctgacctcctggcacaagtgcaagccacccctgcggctgggccaggaggagccccccctgatgggaaatggctgggccggcggcggcccccggccccccaggaaggaggtggccacctacttcagcaaggtgtag

SEQ ID NO: 145878 - DNA, 972 bp, synthetic construct
  misc_feature 1..972: note = Description of Artificial Sequence: Synthetic coding sequence
  source 1..972: mol_type = other DNA
atggccgccctgattgctgagaacttccgcttcctgagcctcttcttcaagagcaaggatgtgatgatcttcaacggcctggtggccctgggcaccgtgggcagccaggagctgttctctgtggtggccttccactgcccctgcagccctgccaggaactacctgtatggcctggccgccatcggcgtgcctgccctggtgctcttcatcatcggcatcatcctgaacaaccacacctggaacctggtggccgagtgccagcacaggaggaccaagaactgcagcgctgcccccaccttcctgctgctgagcagcatcctgggccgggctgctgtggcccctgtgacctggagcgtcatcagcctgctgcggggggaggcctacgtgtgtgccctgtctgaatttgtggaccccagcagcctgacagcccgggaggagcacttccccagcgcccacgccacagagatcctggcccgcttcccctgcaaggagaacccagacaacctgagtgacttccgggaggaggtgtcccggcggctgcgctatgagagccagctgtttggctggctgctgattggagtggtggccatcctggtgttcctgaccaagtgcctgaagcactactgcagccccctgagctaccggcaggaggcctactgggcccagtaccgggccaatgaagaccagctgttccagaggacagctgaggtgcacagccgggtgctggccgccaacaacgtgcggcgcttctttggatttgtggccctgaacaaggatgatgaggagctgattgccaacttccctgtggagggcacccagccccggccccagtggaatgccatcaccggggtgtacctgtaccgggagaaccagggcctgcccctgtacagccggctgcacaagtgggcccagggcctggccggaaatggagctgccccagacaacgtggagatggccctgctgcccagctag

SEQ ID NO: 145879 - DNA, 972 bp, synthetic construct; identical to SEQ ID NO: 145878
  misc_feature 1..972: note = Description of Artificial Sequence: Synthetic coding sequence
  source 1..972: mol_type = other DNA

SEQ ID NO: 145880 - DNA, 657 bp, synthetic construct
  misc_feature 1..657: note = Description of Artificial Sequence: Synthetic coding sequence
  source 1..657: mol_type = other DNA
atggccgccctgattgctgagaacttccgcttcctgagcctcttcttcaagagcaaggatgtgatgatcttcaacggcctggtggccctgggcaccgtgggcagccaggagctgttctctgtggtggccttccactgcccctgcagccctgccaggaactacctgtatggcctggccgccatcggcgtgcctgccctggtgctcttcatcatcggcatcatcctgaacaaccacacctggaacctggtggccgagtgccagcacaggaggaccaagaactgcagcgctgcccccaccttcctgctgctgagcagcatcctgggccgggctgctgtggcccctgtgacctggagcgtcatcagcctgctgcggggggaggcctacgtgtgtgccctgtctgaatttgtggaccccagcagcctgacagcccgggaggagcacttccccagcgcccacgccacagagatcctggcccgcttcccctgcaaggagaacccagacaacctgagtgacttccgggaggaggtgtcccggcggctgcgctatgagagccaggtgcgcagctgtgccaagggcagcagcagcagcctggtggtggccggggagaggtctggagatggcctggtgctgaagctgggcctggtgctgcggggctag

SEQ ID NO: 145881 - DNA, 891 bp, synthetic construct
  misc_feature 1..891: note = Description of Artificial Sequence: Synthetic coding sequence
  source 1..891: mol_type = other DNA
atggagagcatggctgtggccacagatggaggagagaggcctggggtgcctgctggcagcggcctgagcgccagccagaggagagctgagctgcggcggaggaagctgctgatgaacagcgagcagaggatcaaccgcatcatgggcttccacaggcctggcagcggggctgaggaggagagccagaccaagagcaagcagcaggacagcgacaagctgaacagcctgtctgtgcccagcgtgtccaagagggtggtgctgggggacagcgtgtccacaggcaccacagaccagcagggcggcgtggccgaggtgaagggcacccagctgggggacaagctggacagcttcatcaagcccccagagtgcagcagtgatgtgaacctggagctgcggcagaggaacagaggagacctgacagctgacagcgtgcagaggggcagccgccacggcctggagcagtacctgagcagatttgaggaggccatgaagctgaggaagcagctgatcagcgagaagcccagccaggaggatggcaacaccacagaggagtttgacagcttccgcatcttccggctggtgggctgtgccctgctggccctgggcgtgcgggcctttgtgtgcaagtacctgagcatctttgcccccttcctgaccctgcagctggcctacatgggcctgtacaagtacttccccaagtctgagaagaagatcaagaccaccgtgctgacagctgccctgctgctgagcggcatcccagctgaggtgatcaacagatccatggacacctacagcaagatgggagaggtgttcacagacctgtgtgtgtacttcttcaccttcatcttctgccacgagctgctggactactggggcagcgaggtgccctag

SEQ ID NO: 145882 - DNA, 1113 bp, synthetic construct
  misc_feature 1..1113: note = Description of Artificial Sequence: Synthetic coding sequence
  source 1..1113: mol_type = other DNA
atgctgggcgctgtggagggcccccgctggaagcaggccgaggacatccgggacatctatgacttcagagatgtgctgggcaccggggccttcagcgaggtgatcctggccgaggacaagaggacccagaagctggtggccatcaagtgcatcgccaaggaggccctggagggcaaggagggctccatggagaatgaaattgctgtgctgcacaagatcaagcaccccaacatcgtggccctggatgacatctatgaaagtggcggccacctgtacctgatcatgcagctggtgtctggaggagagctgtttgacagaattgtggagaagggcttctacacagaaagagatgccagccgcctcatcttccaggtgctggatgctgtgaagtacctgcatgacctgggcatcgtgcaccgggacctgaagccagagaacctgctgtactacagcctggatgaggacagcaagatcatgatcagtgactttggcctgagcaagatggaggaccccggctctgtgctgagcacagcctgtggcaccccaggctacgtggcccctgaggtgctggcccagaagccctacagcaaggctgtggactgctggagcattggagtgattgcctacatcctgctgtgtggctacccacccttctatgatgaaaatgatgccaagctgtttgagcagatcctgaaggccgagtatgaatttgacagcccctactgggatgacatcagtgacagcgccaaggacttcatccgccacctgatggagaaggaccctgagaagcgcttcacctgtgagcaggccctgcagcacccctggattgctggggacacagccctggacaagaacatccaccagagcgtgtctgagcagatcaagaagaactttgccaagagcaagtggaagcaggccttcaatgccacagctgtggtgcgccacatgaggaagctgcagctgggcaccagccaggagggccagggccagacagccagccacggggagctgctgacccctgtggccggcggccctgctgctggctgctgctgccgggactgctgcgtggagcccggcacagagctgagccccaccctgccccaccagctgtag

SEQ ID NO: 145883 - DNA, 1437 bp, synthetic construct
  misc_feature 1..1437: note = Description of Artificial Sequence: Synthetic coding sequence
  source 1..1437: mol_type = other DNA
atggccaccatcacctgcacccgcttcacagaggagtaccagctgtttgaggagctgggcaaaggagccttctctgtggtgcggcgctgtgtgaaggtgctggccggccaggagtatgctgccaagatcatcaacaccaagaagctgagcgcccgggaccaccagaagctggagcgggaggcccgcatctgccgcctgctgaagcaccccaacatcgtgcggctgcatgacagcatcagcgaggagggccaccactacctgatctttgacctggtgactggaggagagctgtttgaagatattgtggcccgggagtactacagcgaggctgatgccagccactgcatccagcagatcctggaggccgtgctgcactgccaccagatgggcgtggtgcaccgggacctgaagccagagaacctgctgctggccagcaagctgaagggagctgctgtgaagctggccgactttggcctggccatcgaggtggagggggagcagcaggcctggtttggatttgctggcaccccaggctacctgagccctgaggtgctgaggaaggacccctacggcaagcctgtggacctgtgggcctgtggggtcatcctgtacatcctgctggtgggctacccacccttctgggatgaggaccagcaccggctgtaccagcagatcaaggccggggcctatgacttccccagccctgagtgggacacagtgaccccagaggccaaggacctgatcaacaagatgctgaccatcaaccccagcaagaggatcacagctgctgaggccctgaagcacccctggatcagccacaggagcacagtggccagctgcatgcaccggcaggagaccgtggactgcctgaagaagttcaatgcccggaggaagctgaagggggccatcctgaccaccatgctggccaccaggaacttcagcggcggcaagagcggcggcaacaagaagagtgatggagtgaaggagagcagcgagagcaccaacaccaccattgaagatgaggacaccaaggtgaggaagcaggagatcatcaaggtgacagagcagctgattgaggccatcagcaatggagactttgagagctacaccaagatgtgtgaccccggcatgacagcctttgagcctgaggccctgggcaacctggtggagggcctggacttccaccgcttctactttgagaacctgtggagcaggaacagcaagcctgtgcacaccaccatcctgaacccccacatccacctgatgggagatgagagcgcctgcatcgcctacatccgcatcacccagtacctggatgctgggggcatccccaggacagcccagagcgaggagaccagggtgtggcacagaagagatggcaagtggcagatcgtgcacttccacaggtctggggcccccagcgtgctgccccactag

SEQ ID NO: 145884 - DNA, 1470 bp, synthetic construct
  misc_feature 1..1470: note = Description of Artificial Sequence: Synthetic coding sequence
  source 1..1470: mol_type = other DNA
atggccaccatcacctgcacccgcttcacagaggagtaccagctgtttgaggagctgggcaaaggagccttctctgtggtgcggcgctgtgtgaaggtgctggccggccaggagtatgctgccaagatcatcaacaccaagaagctgagcgcccgggaccaccagaagctggagcgggaggcccgcatctgccgcctgctgaagcaccccaacatcgtgcggctgcatgacagcatcagcgaggagggccaccactacctgatctttgacctggtgactggaggagagctgtttgaagatattgtggcccgggagtactacagcgaggctgatgccagccactgcatccagcagatcctggaggccgtgctgcactgccaccagatgggcgtggtgcaccgggacctgaagccagagaacctgctgctggccagcaagctgaagggagctgctgtgaagctggccgactttggcctggccatcgaggtggagggggagcagcaggcctggtttggatttgctggcaccccaggctacctgagccctgaggtgctgaggaaggacccctacggcaagcctgtggacctgtgggcctgtggggtcatcctgtacatcctgctggtgggctacccacccttctgggatgaggaccagcaccggctgtaccagcagatcaaggccggggcctatgacttccccagccctgagtgggacacagtgaccccagaggccaaggacctgatcaacaagatgctgaccatcaaccccagcaagaggatcacagctgctgaggccctgaagcacccctggatcagccacaggagcacagtggccagctgcatgcaccggcaggagaccgtggactgcctgaagaagttcaatgcccggaggaagctgaagggggccatcctgaccaccatgctggccaccaggaacttcagcggcggcaagagcggcggcaacaagaagagtgatggagtgaagaagaggaagagcagcagctctgtgcagctgatggagagcagcgagagcaccaacaccaccattgaagatgaggacaccaaggtgaggaagcaggagatcatcaaggtgacagagcagctgattgaggccatcagcaatggagactttgagagctacaccaagatgtgtgaccccggcatgacagcctttgagcctgaggccctgggcaacctggtggagggcctggacttccaccgcttctactttgagaacctgtggagcaggaacagcaagcctgtgcacaccaccatcctgaacccccacatccacctgatgggagatgaaagtgcctgcatcgcctacatccgcatcacccagtacctggatgctgggggcatccccaggacagcccagagcgaggagaccagggtgtggcacagaagagatggcaagtggcagatcgtgcacttccacaggtctggggcccccagcgtgctgccccactag

SEQ ID NO: 145885 - DNA, 276 bp, synthetic construct
  misc_feature 1..276: note = Description of Artificial Sequence: Synthetic coding sequence
  source 1..276: mol_type = other DNA
atggccaccatcacctgcacccgcttcacagaggagtaccagctgtttgaggagctgggcaaaggagccttctctgtggtgcggcgctgtgtgaaggtgctggccggccaggagtatgctgccaagatcatcaacaccaagaagctgagcgcccgggaccaccagaagctggagcgggaggcccgcatctgccgcctgctgaagcaccccaacatcgtgcggctgcatgacagcatcagcgaggagggccaccactacctgatctttgacctgtag

SEQ ID NO: 145886 - DNA, 1554 bp, synthetic construct
  misc_feature 1..1554: note = Description of Artificial Sequence: Synthetic coding sequence
  source 1..1554: mol_type = other DNA
atggccaccaccgtgacctgcacccgcttcacagatgagtaccagctgtatgaggacatcggcaagggggccttctctgtggtgagaagatgtgtgaagctgtgcaccggccacgagtatgctgccaagatcatcaacaccaagaagctgagcgcccgggaccaccagaagctggagcgggaggcccgcatctgccgcctgctgaagcacagcaacatcgtgcggctgcatgacagcatcagcgaggagggcttccactacctggtgtttgacctggtgactggaggagagctgtttgaggacatcgtggcccgggagtactacagcgaggctgatgccagccactgcatccagcagatcctggaggccgtgctgcactgccaccagatgggcgtggtgcaccgggacctgaagccagagaacctgctgctggccagcaaatgtaaaggagctgctgtgaagctggccgactttggcctggccatcgaggtgcagggcgaccagcaggcctggtttggatttgctggcaccccaggctacctgagccctgaggtgctgaggaaggaggcctacggcaagcctgtggacatctgggcctgtggggtcatcctgtacatcctgctggtgggctacccacccttctgggatgaggaccagcacaagctgtaccagcagatcaaggccggggcctatgacttccccagccctgagtgggacacagtgaccccagaggccaagaacctgatcaaccagatgctgaccatcaacccagccaagaggatcacagcccacgaggccctgaagcacccctgggtgtgccagaggagcacagtggcctccatgatgcaccggcaggagaccgtggagtgcctgaagaagttcaatgcccggaggaagctgaagggggccatcctgaccaccatgctggccaccaggaacttcagcgccaagagcctgctgaacaagaaggcagatggagtgaagccccagaccaacagcaccaagaacagcgctgctgccaccagccccaagggcaccctgcccccagctgccctggagccccagaccaccgtcatccacaaccctgtggatggcatcaaggagagcagtgacagcgccaacaccaccattgaagatgaagatgccaaggccaggaagcaggagatcatcaagaccacagagcagctgattgaagctgtgaacaacggggactttgaggcctatgccaagatctgtgaccccggcctgaccagctttgagcctgaggccctgggcaacctggtggagggcatggacttccaccgcttctactttgagaacctgctggccaagaacagcaagcccatccacaccaccatcctgaacccccacgtgcacgtgattggagaagatgctgcctgcatcgcctacatccggctgacccagtacattgatggccagggccggcccaggaccagccagagcgaggagaccagggtgtggcacagaagagatggcaagtggcagaatgtgcacttccactgcagcggggcccctgtggcccccctgcagtag

SEQ ID NO: 145887 - DNA, 1350 bp, synthetic construct
  misc_feature 1..1350: note = Description of Artificial Sequence: Synthetic coding sequence
  source 1..1350: mol_type = other DNA
atggccaccaccgtgacctgcacccgcttcacagatgagtaccagctgtatgaggacatcggcaagggggccttctctgtggtgagaagatgtgtgaagctgtgcaccggccacgagtatgctgccaagatcatcaacaccaagaagctgagcgcccgggaccaccagaagctggagcgggaggcccgcatctgccgcctgctgaagcacagcaacatcgtgcggctgcatgacagcatcagcgaggagggcttccactacctggtgtttgacctggtgactggaggagagctgtttgaggacatcgtggcccgggagtactacagcgaggctgatgccagccactgcatccagcagatcctggaggccgtgctgcactgccaccagatgggcgtggtgcaccgggacctgaagccagagaacctgctgctggccagcaaatgtaaaggagctgctgtgaagctggccgactttggcctggccatcgaggtgcagggcgaccagcaggcctggtttggatttgctggcaccccaggctacctgagccctgaggtgctgaggaaggaggcctacggcaagcctgtggacatctgggcctgtggggtcatcctgtacatcctgctggtgggctacccacccttctgggatgaggaccagcacaagctgtaccagcagatcaaggccggggcctatgacttccccagccctgagtgggacacagtgaccccagaggccaagaacctgatcaaccagatgctgaccatcaacccagccaagaggatcacagcccacgaggccctgaagcacccctgggtgtgccagaggagcacagtggcctccatgatgcaccggcaggagaccgtggagtgcctgaagaagttcaatgcccggaggaagctgaagggggccatcctgaccaccatgctggccaccaggaacttcagcgccaggaagcaggagatcatcaagaccacagagcagctgattgaagctgtgaacaacggggactttgaggcctatgccaagatctgtgaccccggcctgaccagctttgagcctgaggccctgggcaacctggtggagggcatggacttccaccgcttctactttgagaacctgctggccaagaacagcaagcccatccacaccaccatcctgaacccccacgtgcacgtgattggagaagatgctgcctgcatcgcctacatccggctgacccagtacattgatggccagggccggcccaggaccagccagagcgaggagaccagggtgtggcacagaagagatggcaagtggcagaatgtgcacttccactgcagcggggcccctgtggcccccctgcagtag

SEQ ID NO: 145888 - DNA, 1479 bp, synthetic construct
  misc_feature 1..1479: note = Description of Artificial Sequence: Synthetic coding sequence
  source 1..1479: mol_type = other DNA
atggccaccaccgtgacctgcacccgcttcacagatgagtaccagctgtatgaggacatcggcaagggggccttctctgtggtgagaagatgtgtgaagctgtgcaccggccacgagtatgctgccaagatcatcaacaccaagaagctgagcgcccgggaccaccagaagctggagcgggaggcccgcatctgccgcctgctgaagcacagcaacatcgtgcggctgcatgacagcatcagcgaggagggcttccactacctggtgtttgacctggtgactggaggagagctgtttgaggacatcgtggcccgggagtactacagcgaggctgatgccagccactgcatccagcagatcctggaggccgtgctgcactgccaccagatgggcgtggtgcaccgggacctgaagccagagaacctgctgctggccagcaaatgtaaaggagctgctgtgaagctggccgactttggcctggccatcgaggtgcagggcgaccagcaggcctggtttggatttgctggcaccccaggctacctgagccctgaggtgctgaggaaggaggcctacggcaagcctgtggacatctgggcctgtggggtcatcctgtacatcctgctggtgggctacccacccttctgggatgaggaccagcacaagctgtaccagcagatcaaggccggggcctatgacttccccagccctgagtgggacacagtgaccccagaggccaagaacctgatcaaccagatgctgaccatcaacccagccaagaggatcacagcccacgaggccctgaagcacccctgggtgtgccagaggagcacagtggcctccatgatgcaccggcaggagaccgtggagtgcctgaagaagttcaatgcccggaggaagctgaagggggccatcctgaccaccatgctggccaccaggaacttctctgtgggccggcagaccacagccccagccaccatgagcacagctgccagcggcaccaccatgggcctggtggagcaggccaagagcctgctgaacaagaaggcagatggagtgaaggagccccagaccaccgtcatccacaaccctgtggatggcatcaaggagagcagtgacagcgccaacaccaccattgaagatgaagatgccaaggccaggaagcaggagatcatcaagaccacagagcagctgattgaggccgtgaacaatggagactttgaggcctatgccttctactttgagaacctgctggccaagaacagcaagcccatccacaccaccatcctgaacccccacgtgcacgtgattggagaagatgctgcctgcatcgcctacatccggctgacccagtacattgatggccagggccggcccaggaccagccagagcgaggagaccagggtgtggcacagaagagatggcaagtggcagaatgtgcacttccactgcagcggggcccctgtggcccccctgcagtag

SEQ ID NO: 145889 - DNA, 1629 bp, synthetic construct
  misc_feature 1..1629: note = Description of Artificial Sequence: Synthetic coding sequence
  source 1..1629: mol_type = other DNA
atggccaccaccgtgacctgcacccgcttcacagatgagtaccagctgtatgaggacatcggcaagggggccttctctgtggtgagaagatgtgtgaagctgtgcaccggccacgagtatgctgccaagatcatcaacaccaagaagctgagcgcccgggaccaccagaagctggagcgggaggcccgcatctgccgcctgctgaagcacagcaacatcgtgcggctgcatgacagcatcagcgaggagggcttccactacctggtgtttgacctggtgactggaggagagctgtttgaggacatcgtggcccgggagtactacagcgaggctgatgccagccactgcatccagcagatcctggaggccgtgctgcactgccaccagatgggcgtggtgcaccgggacctgaagccagagaacctgctgctggccagcaaatgtaaaggagctgctgtgaagctggccgactttggcctggccatcgaggtgcagggcgaccagcaggcctggtttggatttgctggcaccccaggctacctgagccctgaggtgctgaggaaggaggcctacggcaagcctgtggacatctgggcctgtggggtcatcctgtacatcctgctggtgggctacccacccttctgggatgaggaccagcacaagctgtaccagcagatcaaggccggggcctatgacttccccagccctgagtgggacacagtgaccccagaggccaagaacctgatcaaccagatgctgaccatcaacccagccaagaggatcacagcccacgaggccctgaagcacccctgggtgtgccagaggagcacagtggcctccatgatgcaccggcaggagaccgtggagtgcctgaagaagttcaatgcccggaggaagctgaagggggccatcctgaccaccatgctggccaccaggaacttctctgtgggccggcagaccacagccccagccaccatgagcacagctgccagcggcaccaccatgggcctggtggagcaggccaagagcctgctgaacaagaaggcagatggagtgaagccccagaccaacagcaccaagaacagcgctgctgccaccagccccaagggcaccctgcccccagctgccctggagccccagaccaccgtcatccacaaccctgtggatggcatcaaggagagcagtgacagcgccaacaccaccattgaagatgaagatgccaaggccaggaagcaggagatcatcaagaccacagagcagctgattgaggccgtgaacaatggagactttgaggcctatgccaagatctgtgaccccggcctgaccagctttgagcctgaggccctgggcaacctggtggagggcatggacttccaccgcttctactttgagaacctgctggccaagaacagcaagcccatccacaccaccatcctgaacccccacgtgcacgtgattggagaagatgctgcctgcatcgcctacatccggctgacccagtacattgatggccagggccggcccaggaccagccagagcgaggagaccagggtgtggcacagaagagatggcaagtggcagaatgtgcacttccactgcagcggggcccctgtggcccccctgcagtag

SEQ ID NO: 145890 - DNA, 1440 bp, synthetic construct
  misc_feature 1..1440: note = Description of Artificial Sequence: Synthetic coding sequence
  source 1..1440: mol_type = other DNA
atggccaccaccgtgacctgcacccgcttcacagatgagtaccagctgtatgaggacatcggcaagggggccttctctgtggtgagaagatgtgtgaagctgtgcaccggccacgagtatgctgccaagatcatcaacaccaagaagctgagcgcccgggaccaccagaagctggagcgggaggcccgcatctgccgcctgctgaagcacagcaacatcgtgcggctgcatgacagcatcagcgaggagggcttccactacctggtgtttgacctggtgactggaggagagctgtttgaggacatcgtggcccgggagtactacagcgaggctgatgccagccactgcatccagcagatcctggaggccgtgctgcactgccaccagatgggcgtggtgcaccgggacctgaagccagagaacctgctgctggccagcaaatgtaaaggagctgctgtgaagctggccgactttggcctggccatcgaggtgcagggcgaccagcaggcctggtttggatttgctggcaccccaggctacctgagccctgaggtgctgaggaaggaggcctacggcaagcctgtggacatctgggcctgtggggtcatcctgtacatcctgctggtgggctacccacccttctgggatgaggaccagcacaagctgtaccagcagatcaaggccggggcctatgacttccccagccctgagtgggacacagtgaccccagaggccaagaacctgatcaaccagatgctgaccatcaacccagccaagaggatcacagcccacgaggccctgaagcacccctgggtgtgccagaggagcacagtggcctccatgatgcaccggcaggagaccgtggagtgcctgaagaagttcaatgcccggaggaagctgaagggggccatcctgaccaccatgctggccaccaggaacttctctgctgccaagagcctgctgaacaagaaggcagatggagtgaaggagagcagtgacagcgccaacaccaccattgaagatgaagatgccaaggccaggaagcaggagatcatcaagaccacagagcagctgattgaagctgtgaacaacggggactttgaggcctatgccaagatctgtgaccccggcctgaccagctttgagcctgaggccctgggcaacctggtggagggcatggacttccaccgcttctactttgagaacctgctggccaagaacagcaagcccatccacaccaccatcctgaacccccacgtgcacgtgattggagaagatgctgcctgcatcgcctacatccggctgacccagtacattgatggccagggccggcccaggaccagccagagcgaggagaccagggtgtggcacagaagagatggcaagtggcagaatgtgcacttccactgcagcggggcccctgtggcccccctgcagtag

SEQ ID NO: 145891 - DNA, 1512 bp, synthetic construct
  misc_feature 1..1512: note = Description of Artificial Sequence: Synthetic coding sequence
  source 1..1512: mol_type = other DNA
atggccaccaccgtgacctgcacccgcttcacagatgagtaccagctgtatgaggacatcggcaagggggccttctctgtggtgagaagatgtgtgaagctgtgcaccggccacgagtatgctgccaagatcatcaacaccaagaagctgagcgcccgggaccaccagaagctggagcgggaggcccgcatctgccgcctgctgaagcacagcaacatcgtgcggctgcatgacagcatcagcgaggagggcttccactacctggtgtttgacctggtgactggaggagagctgtttgaggacatcgtggcccgggagtactacagcgaggctgatgccagccactgcatccagcagatcctggaggccgtgctgcactgccaccagatgggcgtggtgcaccgggacctgaagccagagaacctgctgctggccagcaaatgtaaaggagctgctgtgaagctggccgactttggcctggccatcgaggtgcagggcgaccagcaggcctggtttggatttgctggcaccccaggctacctgagccctgaggtgctgaggaaggaggcctacggcaagcctgtggacatctgggcctgtggggtcatcctgtacatcctgctggtgggctacccacccttctgggatgaggaccagcacaagctgtaccagcagatcaaggccggggcctatgacttccccagccctgagtgggacacagtgaccccagaggccaagaacctgatcaaccagatgctgaccatcaacccagccaagaggatcacagcccacgaggccctgaagcacccctgggtgtgccagaggagcacagtggcctccatgatgcaccggcaggagaccgtggagtgcctgaagaagttcaatgcccggaggaagctgaagggggccatcctgaccaccatgctggccaccaggaacttctctgctgccaagagcctgctgaacaagaaggcagatggagtgaagccccagaccaacagcaccaagaacagcgctgctgccaccagccccaagggcaccctgcccccagctgccctggagagcagtgacagcgccaacaccaccattgaagatgaagatgccaaggccaggaagcaggagatcatcaagaccacagagcagctgattgaagctgtgaacaacggggactttgaggcctatgccaagatctgtgaccccggcctgaccagctttgagcctgaggccctgggcaacctggtggagggcatggacttccaccgcttctactttgagaacctgctggccaagaacagcaagcccatccacaccaccatcctgaacccccacgtgcacgtgattggagaagatgctgcctgcatcgcctacatccggctgacccagtacattgatggccagggccggcccaggaccagccagagcgaggagaccagggtgtggcacagaagagatggcaagtggcagaatgtgcacttccactgcagcggggcccctgtggcccccctgcagtag

SEQ ID NO: 145892 - DNA, 1557 bp, synthetic construct
  misc_feature 1..1557: note = Description of Artificial Sequence: Synthetic coding sequence
  source 1..1557: mol_type = other DNA
atggccaccaccgtgacctgcacccgcttcacagatgagtaccagctgtatgaggacatcggcaagggggccttctctgtggtgagaagatgtgtgaagctgtgcaccggccacgagtatgctgccaagatcatcaacaccaagaagctgagcgcccgggaccaccagaagctggagcgggaggcccgcatctgccgcctgctgaagcacagcaacatcgtgcggctgcatgacagcatcagcgaggagggcttccactacctggtgtttgacctggtgactggaggagagctgtttgaggacatcgtggcccgggagtactacagcgaggctgatgccagccactgcatccagcagatcctggaggccgtgctgcactgccaccagatgggcgtggtgcaccgggacctgaagccagagaacctgctgctggccagcaaatgtaaaggagctgctgtgaagctggccgactttggcctggccatcgaggtgcagggcgaccagcaggcctggtttggatttgctggcaccccaggctacctgagccctgaggtgctgaggaaggaggcctacggcaagcctgtggacatctgggcctgtggggtcatcctgtacatcctgctggtgggctacccacccttctgggatgaggaccagcacaagctgtaccagcagatcaaggccggggcctatgacttccccagccctgagtgggacacagtgaccccagaggccaagaacctgatcaaccagatgctgaccatcaacccagccaagaggatcacagcccacgaggccctgaagcacccctgggtgtgccagaggagcacagtggcctccatgatgcaccggcaggagaccgtggagtgcctgaagaagttcaatgcccggaggaagctgaagggggccatcctgaccaccatgctggccaccaggaacttctctgctgccaagagcctgctgaacaagaaggcagatggagtgaagccccagaccaacagcaccaagaacagcgctgctgccaccagccccaagggcaccctgcccccagctgccctggagccccagaccaccgtcatccacaaccctgtggatggcatcaaggagagcagtgacagcgccaacaccaccattgaagatgaagatgccaaggccaggaagcaggagatcatcaagaccacagagcagctgattgaggccgtgaacaatggagactttgaggcctatgccaagatctgtgaccccggcctgaccagctttgagcctgaggccctgggcaacctggtggagggcatggacttccaccgcttctactttgagaacctgctggccaagaacagcaagcccatccacaccaccatcctgaacccccacgtgcacgtgattggagaagatgctgcctgcatcgcctacatccggctgacccagtacattgatggccagggccggcccaggaccagccagagcgaggagaccagggtgtggcacagaagagatggcaagtggcagaatgtgcacttccactgcagcggggcccctgtggcccccctgcagtag

SEQ ID NO: 145893 - DNA, 2001 bp, synthetic construct
  misc_feature 1..2001: note = Description of Artificial Sequence: Synthetic coding sequence
  source 1..2001: mol_type = other DNA
atggccaccaccgtgacctgcacccgcttcacagatgagtaccagctgtatgaggacatcggcaagggggccttctctgtggtgagaagatgtgtgaagctgtgcaccggccacgagtatgctgccaagatcatcaacaccaagaagctgagcgcccgggaccaccagaagctggagcgggaggcccgcatctgccgcctgctgaagcacagcaacatcgtgcggctgcatgacagcatcagcgaggagggcttccactacctggtgtttgacctggtgactggaggagagctgtttgaggacatcgtggcccgggagtactacagcgaggctgatgccagccactgcatccagcagatcctggaggccgtgctgcactgccaccagatgggcgtggtgcaccgggacctgaagccagagaacctgctgctggccagcaaatgtaaaggagctgctgtgaagctggccgactttggcctggccatcgaggtgcagggcgaccagcaggcctggtttggatttgctggcaccccaggctacctgagccctgaggtgctgaggaaggaggcctacggcaagcctgtggacatctgggcctgtggggtcatcctgtacatcctgctggtgggctacccacccttctgggatgaggaccagcacaagctgtaccagcagatcaaggccggggcctatgacttccccagccctgagtgggacacagtgaccccagaggccaagaacctgatcaaccagatgctgaccatcaacccagccaagaggatcacagcccacgaggccctgaagcacccctgggtgtgccagaggagcacagtggcctccatgatgcaccggcaggagaccgtggagtgcctgaagaagttcaatgcccggaggaagctgaagggggccatcctgaccaccatgctggccaccaggaacttctctgtgggccggcagaccacagccccagccaccatgagcacagctgccagcggcaccaccatgggcctggtggagcaggccaagagcctgctgaacaagaaggcagatggagtgaagccccagaccaacagcaccaagaacagcgctgctgccaccagccccaagggcaccctgcccccagctgccctggagccccagaccaccgtcatccacaaccctgtggatggcatcaaggagagcagtgacagcgccaacaccaccattgaagatgaagatgccaaggccccccgggtgcctgacatcctgagctctgtgcggcggggcagcggggcccctgaggccgagggccccctgccctgccccagccctgcccccttcagccccctgcctgcccccagcccccgcatcagtgacatcctgaacagcgtgcggcggggcagcggcaccccagaggccgagggccccctgtctgctggccccccaccctgcctgagccctgccctgctgggccccctgagcagccccagcccccgcatcagtgacatcctgaacagcgtgagaagaggcagcggcaccccagaggccgagggccccagccctgtgggccccccaccctgccccagccccaccatccctggccccctgcccacccccagcaggaagcaggagatcatcaagaccacagagcagctgattgaggccgtgaacaatggagactttgaggcctatgccaagatctgtgaccccggcctgaccagctttgagcctgaggccctgggcaacctggtggagggcatggacttccaccgcttctactttgagaacctgctggccaagaacagcaagcccatccacaccaccatcctgaacccccacgtgcacgtgattggagaagatgctgcctgcatcgcctacatccggctgacccagtacattgatggccagggccggcccaggaccagccagagcgaggagaccagggtgtggcacagaagagatggcaagtggcagaatgtgcacttccactgcagcggggcccctgtggcccccctgcagtag

SEQ ID NO: 145894 - DNA, 1629 bp, synthetic construct; identical to SEQ ID NO: 145889
  misc_feature 1..1629: note = Description of Artificial Sequence: Synthetic coding sequence
  source 1..1629: mol_type = other DNA

SEQ ID NO: 145895 - DNA, 1557 bp, synthetic construct; identical to SEQ ID NO: 145892
  misc_feature 1..1557: note = Description of Artificial Sequence: Synthetic coding sequence
  source 1..1557: mol_type = other DNA

SEQ ID NO: 145896 - DNA, 918 bp, synthetic construct
  misc_feature 1..918: note = Description of Artificial Sequence: Synthetic coding sequence
  source 1..918: mol_type = other DNA
atgggcgtggtgcaccgggacctgaagccagagaacctgctgctggccagcaagtgcaagggagctgctgtgaagctggccgactttggcctggccatcgaggtgcagggcgaccagcaggcctggtttggatttgctggcaccccaggctacctgagccctgaggtgctgaggaaggaggcctacggcaagcctgtggacatctgggcctgtggggtcatcctgtacatcctgctggtgggctacccacccttctgggatgaggaccagcacaagctgtaccagcagatcaaggccggggcctatgacttccccagccctgagtgggacacagtgaccccagaggccaagaacctgatcaaccagatgctgaccatcaacccagccaagaggatcacagcccacgaggccctgaagcacccctgggtgtgccagaggagcacagtggcctccatgatgcaccggcaggagaccgtggagtgcctgaagaagttcaatgcccggaggaagctgaagggggccatcctgaccaccatgctggccaccaggaacttctctgtgggccggcagaccacagccccagccaccatgagcacagctgccagcggcaccaccatgggcctggtggagcaggccaagagcctgctgaacaagaaggcagatggagtgaagccccagaccaacagcaccaagaacagcgctgctgccaccagccccaagggcaccctgcccccagctgccctggagccccagaccaccgtcatccacaaccctgtggatggcatcaaggagagcagtgacagcgccaacaccaccattgaagatgaagatgccaaggccaggaagcaggagatcatcaagaccacagagcagctgattgaagctgtgaacaacggggactttgaggcctatgcctag

SEQ ID NO: 145897 - DNA, 1437 bp, synthetic construct
  misc_feature 1..1437: note = Description of Artificial Sequence: Synthetic coding sequence
  source 1..1437: mol_type = other DNA
atggccagcaccaccacctgcacccgcttcacagatgagtaccagctgtttgaggagctgggcaagggggccttctctgtggtgcggcgctgcatgaagatccccaccggccaggagtatgctgccaagatcatcaacaccaagaagctgagcgcccgggaccaccagaagctggagcgggaggcccgcatctgccgcctgctgaagcaccccaacatcgtgcggctgcatgacagcatcagcgaggagggcttccactacctggtgtttgacctggtgactggaggagagctgtttgaggacatcgtggcccgggagtactacagcgaggctgatgccagccactgcatccagcagatcctggagagcgtgaaccactgccacctgaatggcatcgtgcaccgggacctgaagccagagaacctgctgctggccagcaagagcaaaggagctgctgtgaagctggccgactttggcctggccatcgaggtgcagggcgaccagcaggcctggtttggatttgctggcaccccaggctacctgagccctgaggtgctgaggaaggacccctacggcaagcctgtggacatgtgggcctgtggggtcatcctgtacatcctgctggtgggctacccacccttctgggatgaggaccagcaccggctgtaccagcagatcaaggccggggcctatgacttccccagccctgagtgggacacagtgaccccagaggccaaggacctgatcaacaagatgctgaccatcaacccagccaagaggatcacagccagcgaggccctgaagcacccctggatctgccagaggagcacagtggcctccatgatgcaccggcaggagaccgtggactgcctgaagaagttcaatgcccggaggaagctgaagggggccatcctgaccaccatgctggccaccaggaacttctctgctgccaagagcctgctgaagaagccagatggagtgaaggagagcacagagagcagcaacaccaccattgaagatgaagatgtgaaggccaggaagcaggagatcatcaaggtgacagagcagctgattgaggccatcaacaatggagactttgaggcctacaccaagatctgtgaccccggcctgacagcctttgagcctgaggccctgggcaacctggtggagggcatggacttccaccgcttctactttgaaaatgccctgagcaagagcaacaagcccatccacaccatcatcctgaacccccacgtgcacctggtgggagatgatgctgcctgcatcgcctacatccggctgacccagtacatggatggcagcggcatgcccaagaccatgcagagcgaggagaccagggtgtggcacagaagagatggcaagtggcagaatgtgcacttccacaggagcggcagccccaccgtgcccatcaagtag

SEQ ID NO: 145898 - DNA, 1500 bp, synthetic construct
  misc_feature 1..1500: note = Description of Artificial Sequence: Synthetic coding sequence
  source 1..1500: mol_type = other DNA
atggccagcaccaccacctgcacccgcttcacagatgagtaccagctgtttgaggagctgggcaagggggccttctctgtggtgcggcgctgcatgaagatccccaccggccaggagtatgctgccaagatcatcaacaccaagaagctgagcgcccgggaccaccagaagctggagcgggaggcccgcatctgccgcctgctgaagcaccccaacatcgtgcggctgcatgacagcatcagcgaggagggcttccactacctggtgtttgacctggtgactggaggagagctgtttgaggacatcgtggcccgggagtactacagcgaggctgatgccagccactgcatccagcagatcctggagagcgtgaaccactgccacctgaatggcatcgtgcaccgggacctgaagccagagaacctgctgctggccagcaagagcaaaggagctgctgtgaagctggccgactttggcctggccatcgaggtgcagggcgaccagcaggcctggtttggatttgctggcaccccaggctacctgagccctgaggtgctgaggaaggacccctacggcaagcctgtggacatgtgggcctgtggggtcatcctgtacatcctgctggtgggctacccacccttctgggatgaggaccagcaccggctgtaccagcagatcaaggccggggcctatgacttccccagccctgagtgggacacagtgaccccagaggccaaggacctgatcaacaagatgctgaccatcaacccagccaagaggatcacagccagcgaggccctgaagcacccctggatctgccagaggagcacagtggcctccatgatgcaccggcaggagaccgtggactgcctgaagaagttcaatgcccggaggaagctgaagggggccatcctgaccaccatgctggccaccaggaacttctctgctgccaagagcctgctgaagaagccagatggagtgaaggagagcacagagagcagcaacaccaccattgaagatgaagatgtgaaggccaggaagcaggagatcatcaaggtgacagagcagctgattgaggccatcaacaatggagactttgaggcctacaccaagatctgtgaccccggcctgacagcctttgagcctgaggccctgggcaacctggtggagggcatggacttccaccgcttctactttgaaaatgccctgagcaagagcaacaagcccatccacaccatcatcctgaacccccacgtgcacctggtgggagatgatgctgcctgcatcgcctacatccggctgacccagtacatggatggcagcggcatgcccaagaccatgcagagcgaggagaccagggtgtggcacagaagagatggcaagtggcagaatgtgcacttccacaggagcggcagccccaccgtgcccatcaagccaccctgcatccccaacgggaaggagaacttcagcggcggcaccagcctgtggcagaacatctag

SEQ ID NO: 145899 - DNA, 1437 bp, synthetic construct; identical to SEQ ID NO: 145897
  misc_feature 1..1437: note = Description of Artificial Sequence: Synthetic coding sequence
  source 1..1437: mol_type = other DNA

SEQ ID NO: 145900 - DNA, 1479 bp, synthetic construct
  misc_feature 1..1479: note = Description of Artificial Sequence: Synthetic coding sequence
  source 1..1479: mol_type = other DNA
atggccagcaccaccacctgcacccgcttcacagatgagtaccagctgtttgaggagctgggcaagggggccttctctgtggtgcggcgctgcatgaagatccccaccggccaggagtatgctgccaagatcatcaacaccaagaagctgagcgcccgggaccaccagaagctggagcgggaggcccgcatctgccgcctgctgaagcaccccaacatcgtgcggctgcatgacagcatcagcgaggagggcttccactacctggtgtttgacctggtgactggaggagagctgtttgaggacatcgtggcccgggagtactacagcgaggctgatgccagccactgcatccagcagatcctggagagcgtgaaccactgccacctgaatggcatcgtgcaccgggacctgaagccagagaacctgctgctggccagcaagagcaaaggagctgctgtgaagctggccgactttggcctggccatcgaggtgcagggcgaccagcaggcctggtttggatttgctggcaccccaggctacctgagccctgaggtgctgaggaaggacccctacggcaagcctgtggacatgtgggcctgtggggtcatcctgtacatcctgctggtgggctacccacccttctgggatgaggaccagcaccggctgtaccagcagatcaaggccggggcctatgacttccccagccctgagtgggacacagtgaccccagaggccaaggacctgatcaacaagatgctgaccatcaacccagccaagaggatcacagccagcgaggccctgaagcacccctggatctgccagaggagcacagtggcctccatgatgcaccggcaggagaccgtggactgcctgaagaagttcaatgcccggaggaagctgaagggggccatcctgaccaccatgctggccaccaggaacttctctgctgccaagagcctgctgaagaagccagatggagtgaaggagccccagaccaccgtcatccacaacccagatggcaacaaggagagcacagagagcagcaacaccaccattgaagatgaagatgtgaaggccaggaagcaggagatcatcaaggtgacagagcagctgattgaggccatcaacaatggagactttgaggcctacaccaagatctgtgaccccggcctgacagcctttgagcctgaggccctgggcaacctggtggagggcatggacttccaccgcttctactttgaaaatgccctgagcaagagcaacaagcccatccacaccatcatcctgaacccccacgtgcacctggtgggagatgatgctgcctgcatcgcctacatccggctgacccagtacatggatggcagcggcatgcccaagaccatgcagagcgaggagaccagggtgtggcacagaagagatggcaagtggcagaatgtgcacttccacaggagcggcagccccaccgtgcccatcaagtag

SEQ ID NO: 145901 - DNA, 1533 bp, synthetic construct
  misc_feature 1..1533: note = Description of Artificial Sequence: Synthetic coding sequence
  source 1..1533: mol_type = other DNA
atggccagcaccaccacctgcacccgcttcacagatgagtaccagctgtttgaggagctgggcaagggggccttctctgtggtgcggcgctgcatgaagatccccaccggccaggagtatgctgccaagatcatcaacaccaagaagctgagcgcccgggaccaccagaagctggagcgggaggcccgcatctgccgcctgctgaagcaccccaacatcgtgcggctgcatgacagcatcagcgaggagggcttccactacctggtgtttgacctggtgactggaggagagctgtttgaggacatcgtggcccgggagtactacagcgaggctgatgccagccactgcatccagcagatcctggagagcgtgaaccactgccacctgaatggcatcgtgcaccgggacctgaagccagagaacctgctgctggccagcaagagcaaaggagctgctgtgaagctggccgactttggcctggccatcgaggtgcagggcgaccagcaggcctggtttggatttgctggcaccccaggctacctgagccctgaggtgctgaggaaggacccctacggcaagcctgtggacatgtgggcctgtggggtcatcctgtacatcctgctggtgggctacccacccttctgggatgaggaccagcaccggctgtaccagcagatcaaggccggggcctatgacttccccagccctgagtgggacacagtgaccccagaggccaaggacctgatcaacaagatgctgaccatcaacccagccaagaggatcacagccagcgaggccctgaagcacccctggatctgccagaggagcacagtggcctccatgatgcaccggcaggagaccgtggactgcctgaagaagttcaatgcccggaggaagctgaagggggccatcctgaccaccatgctggccaccaggaacttctctgctgccaagagcctgctgaagaagccagatggagtgaagaagaggaagagcagcagctctgtgcagatgatggagagcacagagagcagcaacaccaccattgaagatgaagatgtgaaggccaggaagcaggagatcatcaaggtgacagagcagctgattgaggccatcaacaacggggactttgaggcctacaccaagatctgtgaccccggcctgacagcctttgagcctgaggccctgggcaacctggtggagggcatggacttccaccgcttctactttgaaaatgccctgagcaagagcaacaagcccatccacaccatcatcctgaacccccacgtgcacctggtgggagatgatgctgcctgcatcgcctacatccggctgacccagtacatggatggcagcggcatgcccaagaccatgcagagcgaggagaccagggtgtggcacagaagagatggcaagtggcagaatgtgcacttccacaggagcggcagccccaccgtgcccatcaagccaccctgcatccccaacgggaaggagaacttcagcggcggcaccagcctgtggcagaacatctag

SEQ ID NO: 145902 - DNA, 1542 bp, synthetic construct
  misc_feature 1..1542: note = Description of Artificial Sequence: Synthetic coding sequence
  source 1..1542: mol_type = other DNA
atggccagcaccaccacctgcacccgcttcacagatgagtaccagctgtttgaggagctgggcaagggggccttctctgtggtgcggcgctgcatgaagatccccaccggccaggagtatgctgccaagatcatcaacaccaagaagctgagcgcccgggaccaccagaagctggagcgggaggcccgcatctgccgcctgctgaagcaccccaacatcgtgcggctgcatgacagcatcagcgaggagggcttccactacctggtgtttgacctggtgactggaggagagctgtttgaggacatcgtggcccgggagtactacagcgaggctgatgccagccactgcatccagcagatcctggagagcgtgaaccactgccacctgaatggcatcgtgcaccgggacctgaagccagagaacctgctgctggccagcaagagcaaaggagctgctgtgaagctggccgactttggcctggccatcgaggtgcagggcgaccagcaggcctggtttggatttgctggcaccccaggctacctgagccctgaggtgctgaggaaggacccctacggcaagcctgtggacatgtgggcctgtggggtcatcctgtacatcctgctggtgggctacccacccttctgggatgaggaccagcaccggctgtaccagcagatcaaggccggggcctatgacttccccagccctgagtgggacacagtgaccccagaggccaaggacctgatcaacaagatgctgaccatcaacccagccaagaggatcacagccagcgaggccctgaagcacccctggatctgccagaggagcacagtggcctccatgatgcaccggcaggagaccgtggactgcctgaagaagttcaatgcccggaggaagctgaagggggccatcctgaccaccatgctggccaccaggaacttctctgctgccaagagcctgctgaagaagccagatggagtgaaggagccccagaccaccgtcatccacaacccagatggcaacaaggagagcacagagagcagcaacaccaccattgaagatgaagatgtgaaggccaggaagcaggagatcatcaaggtgacagagcagctgattgaggccatcaacaatggagactttgaggcctacaccaagatctgtgaccccggcctgacagcctttgagcctgaggccctgggcaacctggtggagggcatggacttccaccgcttctactttgaaaatgccctgagcaagagcaacaagcccatccacaccatcatcctgaacccccacgtgcacctggtgggagatgatgctgcctgcatcgcctacatccggctgacccagtacatggatggcagcggcatgcccaagaccatgcagagcgaggagaccagggtgtggcacagaagagatggcaagtggcagaatgtgcacttccacaggagcggcagccccaccgtgcccatcaagccaccctgcatccccaacgggaaggagaacttcagcggcggcaccagcctgtggcagaacatctag

SEQ ID NO: 145903 - DNA, 1560 bp, synthetic construct
  misc_feature 1..1560: note = Description of Artificial Sequence: Synthetic coding sequence
  source 1..1560: mol_type = other DNA
atggccagcaccaccacctgcacccgcttcacagatgagtaccagctgtttgaggagctgggcaagggggccttctctgtggtgcggcgctgcatgaagatccccaccggccaggagtatgctgccaagatcatcaacaccaagaagctgagcgcccgggaccaccagaagctggagcgggaggcccgcatctgccgcctgctgaagcaccccaacatcgtgcggctgcatgacagcatcagcgaggagggcttccactacctggtgtttgacctggtgactggaggagagctgtttgaggacatcgtggcccgggagtactacagcgaggctgatgccagccactgcatccagcagatcctggagagcgtgaaccactgccacctgaatggcatcgtgcaccgggacctgaagccagagaacctgctgctggccagcaagagcaaaggagctgctgtgaagctggccgactttggcctggccatcgaggtgcagggcgaccagcaggcctggtttggatttgctggcaccccaggctacctgagccctgaggtgctgaggaaggacccctacggcaagcctgtggacatgtgggcctgtggggtcatcctgtacatcctgctggtgggctacccacccttctgggatgaggaccagcaccggctgtaccagcagatcaaggccggggcctatgacttccccagccctgagtgggacacagtgaccccagaggccaaggacctgatcaacaagatgctgaccatcaacccagccaagaggatcacagccagcgaggccctgaagcacccctggatctgccagaggagcacagtggcctccatgatgcaccggcaggagaccgtggactgcctgaagaagttcaatgcccggaggaagctgaagggggccatcctgaccaccatgctggccaccaggaacttctctgctgccaagagcctgctgaagaagccagatggagtgaagatcaacaacaaggccaacgtggtgaccagccccaaggagaacatccccaccccagccctggagagcacagagagcagcaacaccaccattgaagatgaagatgtgaaggccaggaagcaggagatcatcaaggtgacagagcagctgattgaggccatcaacaatggagactttgaggcctacaccaagatctgtgaccccggcctgacagcctttgagcctgaggccctgggcaacctggtggagggcatggacttccaccgcttctactttgaaaatgccctgagcaagagcaacaagcccatccacaccatcatcctgaacccccacgtgcacctggtgggagatgatgctgcctgcatcgcctacatccggctgacccagtacatggatggcagcggcatgcccaagaccatgcagagcgaggagaccagggtgtggcacagaagagatggcaagtggcagaatgtgcacttccacaggagcggcagccccaccgtgcccatcaagccaccctgcatccccaacgggaaggagaacttcagcggcggcaccagcctgtggcagaacatctag

SEQ ID NO: 145904 - DNA, 1575 bp, synthetic construct
  misc_feature 1..1575: note = Description of Artificial Sequence: Synthetic coding sequence
  source 1..1575: mol_type = other DNA
atggccagcaccaccacctgcacccgcttcacagatgagtaccagctgtttgaggagctgggcaagggggccttctctgtggtgcggcgctgcatgaagatccccaccggccaggagtatgctgccaagatcatcaacaccaagaagctgagcgcccgggaccaccagaagctggagcgggaggcccgcatctgccgcctgctgaagcaccccaacatcgtgcggctgcatgacagcatcagcgaggagggcttccactacctggtgtttgacctggtgactggaggagagctgtttgaggacatcgtggcccgggagtactacagcgaggctgatgccagccactgcatccagcagatcctggagagcgtgaaccactgccacctgaatggcatcgtgcaccgggacctgaagccagagaacctgctgctggccagcaagagcaaaggagctgctgtgaagctggccgactttggcctggccatcgaggtgcagggcgaccagcaggcctggtttggatttgctggcaccccaggctacctgagccctgaggtgctgaggaaggacccctacggcaagcctgtggacatgtgggcctgtggggtcatcctgtacatcctgctggtgggctacccacccttctgggatgaggaccagcaccggctgtaccagcagatcaaggccggggcctatgacttccccagccctgagtgggacacagtgaccccagaggccaaggacctgatcaacaagatgctgaccatcaacccagccaagaggatcacagccagcgaggccctgaagcacccctggatctgccagaggagcacagtggcctccatgatgcaccggcaggagaccgtggactgcctgaagaagttcaatgcccggaggaagctgaagggggccatcctgaccaccatgctggccaccaggaacttctctgctgccaagagcctgctgaagaagccagatggagtgaagaagaggaagagcagcagctctgtgcagatgatggagccccagaccaccgtcatccacaacccagatggcaacaaggagagcacagagagcagcaacaccaccattgaagatgaagatgtgaaggccaggaagcaggagatcatcaaggtgacagagcagctgattgaggccatcaacaacggggactttgaggcctacaccaagatctgtgaccccggcctgacagcctttgagcctgaggccctgggcaacctggtggagggcatggacttccaccgcttctactttgaaaatgccctgagcaagagcaacaagcccatccacaccatcatcctgaacccccacgtgcacctggtgggagatgatgctgcctgcatcgcctacatccggctgacccagtacatggatggcagcggcatgcccaagaccatgcagagcgaggagaccagggtgtggcacagaagagatggcaagtggcagaatgtgcacttccacaggagcggcagccccaccgtgcccatcaagccaccctgcatccccaacgggaaggagaacttcagcggcggcaccagcctgtggcagaacatctag

SEQ ID NO: 145905 - DNA, 1470 bp, synthetic construct
  misc_feature 1..1470: note = Description of Artificial Sequence: Synthetic coding sequence
  source 1..1470: mol_type = other DNA
atggccagcaccaccacctgcacccgcttcacagatgagtaccagctgtttgaggagctgggcaagggggccttctctgtggtgcggcgctgcatgaagatccccaccggccaggagtatgctgccaagatcatcaacaccaagaagctgagcgcccgggaccaccagaagctggagcgggaggcccgcatctgccgcctgctgaagcaccccaacatcgtgcggctgcatgacagcatcagcgaggagggcttccactacctggtgtttgacctggtgactggaggagagctgtttgaggacatcgtggcccgggagtactacagcgaggctgatgccagccactgcatccagcagatcctggagagcgtgaaccactgccacctgaatggcatcgtgcaccgggacctgaagccagagaacctgctgctggccagcaagagcaaaggagctgctgtgaagctggccgactttggcctggccatcgaggtgcagggcgaccagcaggcctggtttggatttgctggcaccccaggctacctgagccctgaggtgctgaggaaggacccctacggcaagcctgtggacatgtgggcctgtggggtcatcctgtacatcctgctggtgggctacccacccttctgggatgaggaccagcaccggctgtaccagcagatcaaggccggggcctatgacttccccagccctgagtgggacacagtgaccccagaggccaaggacctgatcaacaagatgctgaccatcaacccagccaagaggatcacagccagcgaggccctgaagcacccctggatctgccagaggagcacagtggcctccatgatgcaccggcaggagaccgtggactgcctgaagaagttcaatgcccggaggaagctgaagggggccatcctgaccaccatgctggccaccaggaacttctctgctgccaagagcctgctgaagaagccagatggagtgaagaagaggaagagcagcagctctgtgcagatgatggagagcacagagagcagcaacaccaccattgaagatgaagatgtgaaggccaggaagcaggagatcatcaaggtgacagagcagctgattgaggccatcaacaacggggactttgaggcctacaccaagatctgtgaccccggcctgacagcctttgagcctgaggccctgggcaacctggtggagggcatggacttccaccgcttctactttgaaaatgccctgagcaagagcaacaagcccatccacaccatcatcctgaacccccacgtgcacctggtgggagatgatgctgcctgcatcgcctacatccggctgacccagtacatggatggcagcggcatgcccaagaccatgcagagcgaggagaccagggtgtggcacagaagagatggcaagtggcagaatgtgcacttccacaggagcggcagccccaccgtgcccatcaagtag

SEQ ID NO: 145906 - DNA, 549 bp, synthetic construct
  misc_feature 1..549: note = Description of Artificial Sequence: Synthetic coding sequence
  source 1..549: mol_type = other DNA
tgaagaaagctgaagggggccatcctgaccaccatgctggccaccaggaacttctctgctgccaagagcctgctgaagaagccagatggagtgaaggagagcacagagagcagcaacaccaccattgaagatgaagatgtgaaggccaggaagcaggagatcatcaaggtgacagagcagctgattgaggccatcaacaatggagactttgaggcctacaccaagatctgtgaccccggcctgacagcctttgagcctgaggccctgggcaacctggtggagggcatggacttccaccgcttctactttgaaaatgccctgagcaagagcaacaagcccatccacaccatcatcctgaacccccacgtgcacctggtgggagatgatgctgcctgcatcgcctacatccggctgacccagtacatggatggcagcggcatgcccaagaccatgcagagcgaggagaccagggtgtggcacagaagagatggcaagtggcagaatgtgcacttccacaggagcggcagccccaccgtgcccatcaagtag

SEQ ID NO: 145907 - DNA, 1437 bp, synthetic construct
  misc_feature 1..1437: note = Description of Artificial Sequence: Synthetic coding sequence
  source 1..1437: mol_type = other DNA
atggccagcaccaccacctgcacccgcttcacagatgagtaccagctgtttgaggagctgggcaagggggccttctctgtggtgcggcgctgcatgaagatccccaccggccaggagtatgctgccaagatcatcaacaccaagaagctgagcgcccgggaccaccagaagctggagcgggaggcccgcatctgccgcctgctgaagcaccccaacatcgtgcggctgcatgacagcatcagcgaggagggcttccactacctggtgtttgacctggtgactggaggagagctgtttgaggacatcgtggcccgggagtactacagcgaggctgatgccagccactgcatccagcagatcctggagagcgtgaaccactgccacctgaatggcatcgtgcaccgggacctgaagccagagaacctgctgctggccagcaagagcaaaggagctgctgtgaagctggccgactttggcctggccatcgaggtgcagggcgaccagcaggcctggtttggatttgctggcaccccaggctacctgagccctgaggtgctgaggaaggacccctacggcaagcctgtggacatgtgggcctgtggggtcatcctgtacatcctgctggtgggctacccacccttctgggatgaggaccagcaccggctgtaccagcagatcaaggccggggcctatgacttccccagccctgagtgggacacagtgaccccagaggccaaggacctgatcaacaagatgctgaccatcaacccagccaagaggatcacagccagcgaggccctgaagcacccctggatctgccagaggagcacagtggcctccatgatgcaccggcaggagaccgtggactgcctgaagaagttcaatgcccggaggaagctgaagggggccatcctgaccaccatgctggccaccaggaacttctctgctgccaagagcctgctgaagaagccagatggagtgaaggagagcacagagagcagcaacaccaccattgaagatgaagatgtgaaggccaggaagcaggagatcatcaaggtgacagagcagctgattgaggccatcaacaatggagactttgaggcctacaccaagatctgtgaccccggcctgacagcctttgagcctgaggccctgggcaacctggtggagggcatggacttccaccgcttctactttgaaaatgccctgagcaagagcaacaagcccatccacaccatcatcctgaacccccacgtgcacctggtgggagatgatgctgcctgcatcgcctacatccggctgacccagtacatggatggcagcggcatgcccaagaccatgcagagcgaggagaccagggtgtggcacagaagagatggcaagtggcagaatgtgcacttccacaggagcggcagccccaccgtgcccatcaactag

SEQ ID NO: 145908 - DNA, 1590 bp, synthetic construct
  misc_feature 1..1590: note = Description of Artificial Sequence: Synthetic coding sequence
  source 1..1590: mol_type = other DNA
atggccaccacagccacctgcacccgcttcacagatgactaccagctgtttgaggagctgggcaagggggccttctctgtggtgagaagatgtgtgaagaagaccagcacccaggagtatgctgccaagatcatcaacaccaagaagctgagcgcccgggaccaccagaagctggagcgggaggcccgcatctgccgcctgctgaagcaccccaacatcgtgcggctgcatgacagcatcagcgaggagggcttccactacctggtgtttgacctggtgactggaggagagctgtttgaggacatcgtggcccgggagtactacagcgaggctgatgccagccactgcatccaccagatcctggagagcgtgaaccacatccaccagcacgacatcgtgcaccgggacctgaagccagagaacctgctgctggccagcaaatgtaaaggagctgctgtgaagctggccgactttggcctggccatcgaggtgcagggcgagcagcaggcctggtttggatttgctggcaccccaggctacctgagccctgaggtgctgaggaaggacccctacggcaagcctgtggacatctgggcctgtggggtcatcctgtacatcctgctggtgggctacccacccttctgggatgaggaccagcacaagctgtaccagcagatcaaggccggggcctatgacttccccagccctgagtgggacacagtgaccccagaggccaagaacctgatcaaccagatgctgaccatcaacccagccaagaggatcacagctgaccaggccctgaagcacccctgggtgtgccagaggagcacagtggcctccatgatgcaccggcaggagaccgtggagtgcctgaggaagttcaatgcccggaggaagctgaagggggccatcctgaccaccatgctggtgtccaggaacttctctgctgccaagagcctgctgaacaagaagagtgatggcggcgtgaagaagaggaagagcagcagctctgtgcacctgatgccccagagcaacaacaagaacagcctggtgtccccagcccaggagcccgcccccctgcagacagccatggagccccagaccaccgtggtgcacaatgccacagatggcatcaagggcagcacagagagctgcaacaccaccacagaagatgaggacctgaaggtgaggaagcaggagatcatcaagatcacagagcagctgattgaggccatcaacaacggggactttgaggcctacaccaagatctgtgaccccggcctgaccagctttgagcctgaggccctgggcaacctggtggagggcatggacttccacaagttctactttgagaacctgctgagcaagaacagcaagcccatccacaccaccatcctgaacccccacgtgcacgtgattggagaagatgctgcctgcatcgcctacatccggctgacccagtacattgatggccagggccggcccaggaccagccagagcgaggagaccagggtgtggcacagaagagatggcaagtggctgaatgtgcactaccactgcagcggggccccagctgcccccctgcagtag

SEQ ID NO: 145909 - DNA, 1584 bp, synthetic construct
  misc_feature 1..1584: note = Description of Artificial Sequence: Synthetic coding sequence
  source 1..1584: mol_type = other DNA
atggccaccacagccacctgcacccgcttcacagatgactaccagctgtttgaggagctgggcaagggggccttctctgtggtgagaagatgtgtgaagaagaccagcacccaggagtatgctgccaagatcatcaacaccaagaagctgagcgcccgggaccaccagaagctggagcgggaggcccgcatctgccgcctgctgaagcaccccaacatcgtgcggctgcatgacagcatcagcgaggagggcttccactacctggtgtttgacctggtgactggaggagagctgtttgaggacatcgtggcccgggagtactacagcgaggctgatgccagccactgcatccaccagatcctggagagcgtgaaccacatccaccagcacgacatcgtgcaccgggacctgaagccagagaacctgctgctggccagcaaatgtaaaggagctgctgtgaagctggccgactttggcctggccatcgaggtgcagggcgagcagcaggcctggtttggatttgctggcaccccaggctacctgagccctgaggtgctgaggaaggacccctacggcaagcctgtggacatctgggcctgtggggtcatcctgtacatcctgctggtgggctacccacccttctgggatgaggaccagcacaagctgtaccagcagatcaaggccggggcctatgacttccccagccctgagtgggacacagtgaccccagaggccaagaacctgatcaaccagatgctgaccatcaacccagccaagaggatcacagctgaccaggccctgaagcacccctgggtgtgccagaggagcacagtggcctccatgatgcaccggcaggagaccgtggagtgcctgaggaagttcaatgcccggaggaagctgaagggggccatcctgaccaccatgctggtgtccaggaacttctctgtgggccggcagagcagcgccccagccagccctgctgccagcgctgctggcctggccggccaggccgccaagagcctgctgaacaagaagagtgatggaggagtgaagaagaggaagagcagcagctctgtgcacctgatggagccccagaccaccgtggtgcacaatgccacagatggcatcaagggcagcacagagagctgcaacaccaccacagaagatgaggacctgaaggtgaggaagcaggagatcatcaagatcacagagcagctgattgaggccatcaacaacggggactttgaggcctacaccaagatctgtgaccccggcctgaccagctttgagcctgaggccctgggcaacctggtggagggcatggacttccacaagttctactttgagaacctgctgagcaagaacagcaagcccatccacaccaccatcctgaacccccacgtgcacgtgattggagaagatgctgcctgcatcgcctacatccggctgacccagtacattgatggccagggccggcccaggaccagccagagcgaggagaccagggtgtggcacagaagagatggcaagtggctgaatgtgcactaccactgcagcggggccccagctgcccccctgcagtag

SEQ ID NO: 145910 - DNA, 1671 bp, synthetic construct
  misc_feature 1..1671: note = Description of Artificial Sequence: Synthetic coding sequence
  source 1..1671: mol_type = other DNA
atggccaccacagccacctgcacccgcttcacagatgactaccagctgtttgaggagctgggcaagggggccttctctgtggtgagaagatgtgtgaagaagaccagcacccaggagtatgctgccaagatcatcaacaccaagaagctgagcgcccgggaccaccagaagctggagcgggaggcccgcatctgccgcctgctgaagcaccccaacatcgtgcggctgcatgacagcatcagcgaggagggcttccactacctggtgtttgacctggtgactggaggagagctgtttgaggacatcgtggcccgggagtactacagcgaggctgatgccagccactgcatccaccagatcctggagagcgtgaaccacatccaccagcacgacatcgtgcaccgggacctgaagccagagaacctgctgctggccagcaaatgtaaaggagctgctgtgaagctggccgactttggcctggccatcgaggtgcagggcgagcagcaggcctggtttggatttgctggcaccccaggctacctgagccctgaggtgctgaggaaggacccctacggcaagcctgtggacatctgggcctgtggggtcatcctgtacatcctgctggtgggctacccacccttctgggatgaggaccagcacaagctgtaccagcagatcaaggccggggcctatgacttccccagccctgagtgggacacagtgaccccagaggccaagaacctgatcaaccagatgctgaccatcaacccagccaagaggatcacagctgaccaggccctgaagcacccctgggtgtgccagaggagcacagtggcctccatgatgcaccggcaggagaccgtggagtgcctgaggaagttcaatgcccggaggaagctgaagggggccatcctgaccaccatgctggtgtccaggaacttctctgctgccaagagcctgctgaacaagaagagtgatggcggcgtgaagccccagagcaacaacaagaacagcctggtgtccccagcccaggagcccgcccccctgcagacagccatggagccccagaccaccgtggtgcacaatgccacagatggcatcaagggcagcacagagagctgcaacaccaccacagaagatgaggacctgaaggccgcccccctgaggactggaaatggcagctctgtgcctgagggccgcagcagccgggacagaacagcccccagcgctggcatgcagccccagcccagcctgtgcagcagcgccatgaggaagcaggagatcatcaagatcacagagcagctgattgaggccatcaacaatggagactttgaggcctacaccaagatctgtgaccccggcctgaccagctttgagcctgaggccctgggcaacctggtggagggcatggacttccacaagttctactttgagaacctgctgagcaagaacagcaagcccatccacaccaccatcctgaacccccacgtgcacgtgattggagaagatgctgcctgcatcgcctacatccggctgacccagtacattgatggccagggccggcccaggaccagccagagcgaggagaccagggtgtggcacagaagagatggcaagtggctgaatgtgcactaccactgcagcggggccccagctgcccccctgcagtag

SEQ ID NO: 145911 - DNA, 1488 bp, synthetic construct
  misc_feature 1..1488: note = Description of Artificial Sequence: Synthetic coding sequence
  source 1..1488: mol_type = other DNA
atggccaccacagccacctgcacccgcttcacagatgactaccagctgtttgaggagctgggcaagggggccttctctgtggtgagaagatgtgtgaagaagaccagcacccaggagtatgctgccaagatcatcaacaccaagaagctgagcgcccgggaccaccagaagctggagcgggaggcccgcatctgccgcctgctgaagcaccccaacatcgtgcggctgcatgacagcatcagcgaggagggcttccactacctggtgtttgacctggtgactggaggagagctgtttgaggacatcgtggcccgggagtactacagcgaggctgatgccagccactgcatccaccagatcctggagagcgtgaaccacatccaccagcacgacatcgtgcaccgggacctgaagccagagaacctgctgctggccagcaaatgtaaaggagctgctgtgaagctggccgactttggcctggccatcgaggtgcagggcgagcagcaggcctggtttggatttgctggcaccccaggctacctgagccctgaggtgctgaggaaggacccctacggcaagcctgtggacatctgggcctgtggggtcatcctgtacatcctgctggtgggctacccacccttctgggatgaggaccagcacaagctgtaccagcagatcaaggccggggcctatgacttccccagccctgagtgggacacagtgaccccagaggccaagaacctgatcaaccagatgctgaccatcaacccagccaagaggatcacagctgaccaggccctgaagcacccctgggtgtgccagaggagcacagtggcctccatgatgcaccggcaggagaccgtggagtgcctgaggaagttcaatgcccggaggaagctgaagggggccatcctgaccaccatgctggtgtccaggaacttctctgctgccaagagcctgctgaacaagaagagtgatggcggcgtgaaggagccccagaccaccgtggtgcacaatgccacagatggcatcaagggcagcacagagagctgcaacaccaccacagaagatgaggacctgaaggtgaggaagcaggagatcatcaagatcacagagcagctgattgaggccatcaacaacggggactttgaggcctacaccaagatctgtgaccccggcctgaccagctttgagcctgaggccctgggcaacctggtggagggcatggacttccacaagttctactttgagaacctgctgagcaagaacagcaagcccatccacaccaccatcctgaacccccacgtgcacgtgattggagaagatgctgcctgcatcgcctacatccggctgacccagtacattgatggccagggccggcccaggaccagccagagcgaggagaccagggtgtggcacagaagagatggcaagtggctgaatgtgcactaccactgcagcggggccccagctgcccccctgcagtag

SEQ ID NO: 145912 - DNA, 1551 bp, synthetic construct
  misc_feature 1..1551: note = Description of Artificial Sequence: Synthetic coding sequence
  source 1..1551: mol_type = other DNA
atggccaccacagccacctgcacccgcttcacagatgactaccagctgtttgaggagctgggcaagggggccttctctgtggtgagaagatgtgtgaagaagaccagcacccaggagtatgctgccaagatcatcaacaccaagaagctgagcgcccgggaccaccagaagctggagcgggaggcccgcatctgccgcctgctgaagcaccccaacatcgtgcggctgcatgacagcatcagcgaggagggcttccactacctggtgtttgacctggtgactggaggagagctgtttgaggacatcgtggcccgggagtactacagcgaggctgatgccagccactgcatccaccagatcctggagagcgtgaaccacatccaccagcacgacatcgtgcaccgggacctgaagccagagaacctgctgctggccagcaaatgtaaaggagctgctgtgaagctggccgactttggcctggccatcgaggtgcagggcgagcagcaggcctggtttggatttgctggcaccccaggctacctgagccctgaggtgctgaggaaggacccctacggcaagcctgtggacatctgggcctgtggggtcatcctgtacatcctgctggtgggctacccacccttctgggatgaggaccagcacaagctgtaccagcagatcaaggccggggcctatgacttccccagccctgagtgggacacagtgaccccagaggccaagaacctgatcaaccagatgctgaccatcaacccagccaagaggatcacagctgaccaggccctgaagcacccctgggtgtgccagaggagcacagtggcctccatgatgcaccggcaggagaccgtggagtgcctgaggaagttcaatgcccggaggaagctgaagggggccatcctgaccaccatgctggtgtccaggaacttctctgtgggccggcagagcagcgccccagccagccctgctgccagcgctgctggcctggccggccaggccgccaagagcctgctgaacaagaagagtgatggaggagtgaaggagccccagaccaccgtggtgcacaatgccacagatggcatcaagggcagcacagagagctgcaacaccaccacagaagatgaggacctgaaggtgaggaagcaggagatcatcaagatcacagagcagctgattgaggccatcaacaatggagactttgaggcctacaccaagatctgtgaccccggcctgaccagctttgagcctgaggccctgggcaacctggtggagggcatggacttccacaagttctactttgagaacctgctgagcaagaacagcaagcccatccacaccaccatcctgaacccccacgtgcacgtgattggagaagatgctgcctgcatcgcctacatccggctgacccagtacattgatggccagggccggcccaggaccagccagagcgaggagaccagggtgtggcacagaagagatggcaagtggctgaatgtgcactaccactgcagcggggccccagctgcccccctgcagtag

SEQ ID NO: 145913 - DNA, 1602 bp, synthetic construct
  misc_feature 1..1602: note = Description of Artificial Sequence: Synthetic coding sequence
  source 1..1602: mol_type = other DNA
atggccaccacagccacctgcacccgcttcacagatgactaccagctgtttgaggagctgggcaagggggccttctctgtggtgagaagatgtgtgaagaagaccagcacccaggagtatgctgccaagatcatcaacaccaagaagctgagcgcccgggaccaccagaagctggagcgggaggcccgcatctgccgcctgctgaagcaccccaacatcgtgcggctgcatgacagcatcagcgaggagggcttccactacctggtgtttgacctggtgactggaggagagctgtttgaggacatcgtggcccgggagtactacagcgaggctgatgccagccactgcatccaccagatcctggagagcgtgaaccacatccaccagcacgacatcgtgcaccgggacctgaagccagagaacctgctgctggccagcaaatgtaaaggagctgctgtgaagctggccgactttggcctggccatcgaggtgcagggcgagcagcaggcctggtttggatttgctggcaccccaggctacctgagccctgaggtgctgaggaaggacccctacggcaagcctgtggacatctgggcctgtggggtcatcctgtacatcctgctggtgggctacccacccttctgggatgaggaccagcacaagctgtaccagcagatcaaggccggggcctatgacttccccagccctgagtgggacacagtgaccccagaggccaagaacctgatcaaccagatgctgaccatcaacccagccaagaggatcacagctgaccaggccctgaagcacccctgggtgtgccagaggagcacagtggcctccatgatgcaccggcaggagaccgtggagtgcctgaggaagttcaatgcccggaggaagctgaagggggccatcctgaccaccatgctggtgtccaggaacttctctgctgccaagagcctgctgaacaagaagagtgatggcggcgtgaaggagccccagaccaccgtggtgcacaatgccacagatggcatcaagggcagcacagagagctgcaacaccaccacagaagatgaggacctgaaggccgcccccctgaggactggaaatggcagctctgtgcctgagggccgcagcagccgggacagaacagcccccagcgctggcatgcagccccagcccagcctgtgcagcagcgccatgaggaagcaggagatcatcaagatcacagagcagctgattgaggccatcaacaacggggactttgaggcctacaccaagatctgtgaccccggcctgaccagctttgagcctgaggccctgggcaacctggtggagggcatggacttccacaagttctactttgagaacctgctgagcaagaacagcaagcccatccacaccaccatcctgaacccccacgtgcacgtgattggagaagatgctgcctgcatcgcctacatccggctgacccagtacattgatggccagggccggcccaggaccagccagagcgaggagaccagggtgtggcacagaagagatggcaagtggctgaatgtgcactaccactgcagcggggccccagctgcccccctgcagtag

SEQ ID NO: 145914 - DNA, 1677 bp, synthetic construct
  misc_feature 1..1677: note = Description of Artificial Sequence: Synthetic coding sequence
  source 1..1677: mol_type = other DNA
atggccaccacagccacctgcacccgcttcacagatgactaccagctgtttgaggagctgggcaagggggccttctctgtggtgagaagatgtgtgaagaagaccagcacccaggagtatgctgccaagatcatcaacaccaagaagctgagcgcccgggaccaccagaagctggagcgggaggcccgcatctgccgcctgctgaagcaccccaacatcgtgcggctgcatgacagcatcagcgaggagggcttccactacctggtgtttgacctggtgactggaggagagctgtttgaggacatcgtggcccgggagtactacagcgaggctgatgccagccactgcatccaccagatcctggagagcgtgaaccacatccaccagcacgacatcgtgcaccgggacctgaagccagagaacctgctgctggccagcaaatgtaaaggagctgctgtgaagctggccgactttggcctggccatcgaggtgcagggcgagcagcaggcctggtttggatttgctggcaccccaggctacctgagccctgaggtgctgaggaaggacccctacggcaagcctgtggacatctgggcctgtggggtcatcctgtacatcctgctggtgggctacccacccttctgggatgaggaccagcacaagctgtaccagcagatcaaggccggggcctatgacttccccagccctgagtgggacacagtgaccccagaggccaagaacctgatcaaccagatgctgaccatcaacccagccaagaggatcacagctgaccaggccctgaagcacccctgggtgtgccagaggagcacagtggcctccatgatgcaccggcaggagaccgtggagtgcctgaggaagttcaatgcccggaggaagctgaagggggccatcctgaccaccatgctggtgtccaggaacttctctgctgccaagagcctgctgaacaagaagagtgatggcggcgtgaagaagaggaagagcagcagctctgtgcacctgatgccccagagcaacaacaagaacagcctggtgtccccagcccaggagcccgcccccctgcagacagccatggagccccagaccaccgtggtgcacaatgccacagatggcatcaagggcagcacagagagctgcaacaccaccacagaagatgaggacctgaagggctctgtgcctgagggccgcagcagccgggacagaacagcccccagcgctggcatgcagccccagcccagcctgtgcagcagcgccatgaggaagcaggagatcatcaagatcacagagcagctgattgaggccatcaacaatggagactttgaggcctacaccaagatctgtgaccccggcctgaccagctttgagcctgaggccctgggcaacctggtggagggcatggacttccacaagttctactttgagaacctgctgagcaagaacagcaagcccatccacaccaccatcctgaacccccacgtgcacgtgattggagaagatgctgcctgcatcgcctacatccggctgacccagtacattgatggccagggccggcccaggaccagccagagcgaggagaccagggtgtggcacagaagagatggcaagtggctgaatgtgcactaccactgcagcggggccccagctgcccccctgcagtag

SEQ ID NO: 145915 - DNA, 1767 bp, synthetic construct
  misc_feature 1..1767: note = Description of Artificial Sequence: Synthetic coding sequence
  source 1..1767: mol_type = other DNA
atggccaccacagccacctgcacccgcttcacagatgactaccagctgtttgaggagctgggcaagggggccttctctgtggtgagaagatgtgtgaagaagaccagcacccaggagtatgctgccaagatcatcaacaccaagaagctgagcgcccgggaccaccagaagctggagcgggaggcccgcatctgccgcctgctgaagcaccccaacatcgtgcggctgcatgacagcatcagcgaggagggcttccactacctggtgtttgacctggtgactggaggagagctgtttgaggacatcgtggcccgggagtactacagcgaggctgatgccagccactgcatccaccagatcctggagagcgtgaaccacatccaccagcacgacatcgtgcaccgggacctgaagccagagaacctgctgctggccagcaaatgtaaaggagctgctgtgaagctggccgactttggcctggccatcgaggtgcagggcgagcagcaggcctggtttggatttgctggcaccccaggctacctgagccctgaggtgctgaggaaggacccctacggcaagcctgtggacatctgggcctgtggggtcatcctgtacatcctgctggtgggctacccacccttctgggatgaggaccagcacaagctgtaccagcagatcaaggccggggcctatgacttccccagccctgagtgggacacagtgaccccagaggccaagaacctgatcaaccagatgctgaccatcaacccagccaagaggatcacagctgaccaggccctgaagcacccctgggtgtgccagaggagcacagtggcctccatgatgcaccggcaggagaccgtggagtgcctgaggaagttcaatgcccggaggaagctgaagggggccatcctgaccaccatgctggtgtccaggaacttctctgtgggccggcagagcagcgccccagccagccctgctgccagcgctgctggcctggccggccaggccgccaagagcctgctgaacaagaagagtgatggaggagtgaagaagaggaagagcagcagctctgtgcacctgatgccccagagcaacaacaagaacagcctggtgtccccagcccaggagcccgcccccctgcagacagccatggagccccagaccaccgtggtgcacaatgccacagatggcatcaagggcagcacagagagctgcaacaccaccacagaagatgaggacctgaaggccgcccccctgaggactggaaatggcagctctgtgcctgagggccgcagcagccgggacagaacagcccccagcgctggcatgcagccccagcccagcctgtgcagcagcgccatgaggaagcaggagatcatcaagatcacagagcagctgattgaggccatcaacaatggagactttgaggcctacaccaagatctgtgaccccggcctgaccagctttgagcctgaggccctgggcaacctggtggagggcatggacttccacaagttctactttgagaacctgctgagcaagaacagcaagcccatccacaccaccatcctgaacccccacgtgcacgtgattggagaagatgctgcctgcatcgcctacatccggctgacccagtacattgatggccagggccggcccaggaccagccagagcgaggagaccagggtgtggcacagaagagatggcaagtggctgaatgtgcactaccactgcagcggggccccagctgcccccctgcagtag

SEQ ID NO: 145916 - DNA, 1362 bp, synthetic construct
  misc_feature 1..1362: note = Description of Artificial Sequence: Synthetic coding sequence
  source 1..1362: mol_type = other DNA
cggctgctgaagcaccccaacatcgtgcggctgcatgacagcatcagcgaggagggcttccactacctggtgtttgacctggtgactggaggagagctgtttgaagatattgtggcccgggagtactacagcgaggctgatgccagccactgcatccaccagatcctggagagcgtgaaccacatccaccagcacgacatcgtgcaccgggacctgaagccagagaacctgctgctggccagcaagtgcaagggagctgctgtgaagctggccgactttggcctggccatcgaggtgcagggcgagcagcaggcctggtttggatttgctggcaccccaggctacctgagccctgaggtgctgaggaaggacccctacggcaagcctgtggacatctgggcctgtggggtcatcctgtacatcctgctggtgggctacccacccttctgggatgaggaccagcacaagctgtaccagcagatcaaggccggggcctatgacttccccagccctgagtgggacacagtgaccccagaggccaagaacctgatcaaccagatgctgaccatcaacccagccaagaggatcacagctgaccaggccctgaagcacccctgggtgtgccagaggagcacagtggcctccatgatgcaccggcaggagaccgtggagtgcctgaggaagttcaatgcccggaggaagctgaagggggccatcctgaccaccatgctggtgtccaggaacttctctgctgccaagagcctgctgaacaagaagagtgatggaggagtgaagccccagagcaacaacaagaacagcctggtgtccccagcccaggagcccgcccccctgcagacagccatggagccccagaccaccgtggtgcacaatgccacagatggcatcaagggcagcacagagagctgcaacaccaccacagaagatgaggacctgaaggtgaggaagcaggagatcatcaagatcacagagcagctgattgaggccatcaacaacggggactttgaggcctacaccaagatctgtgaccccggcctgaccagctttgagcctgaggccctgggcaacctggtggagggcatggacttccacaagttctactttgagaacctgctgagcaagaacagcaagcccatccacaccaccatcctgaacccccacgtgcacgtgattggagaagatgctgcctgcatcgcctacatccggctgacccagtacattgatggccagggccggcccaggaccagccagagcgaggagaccagggtgtggcacagaagagatggcaagtggctgaatgtgcactaccactgcagcggggccccagctgcccccctgcagtag

SEQ ID NO: 145917 - DNA, 1008 bp, synthetic construct
  misc_feature 1..1008: note = Description of Artificial Sequence: Synthetic coding sequence
  source 1..1008: mol_type = other DNA
tgataccagcagatcaaggccggggcctatgacttccccagccctgagtgggacacagtgaccccagaggccaagaacctgatcaaccagatgctgaccatcaacccagccaagaggatcacagctgaccaggccctgaagcacccctgggtgtgccagaggagcacagtggcctccatgatgcaccggcaggagaccgtggagtgcctgaggaagttcaatgcccggaggaagctgaagggggccatcctgaccaccatgctggtgtccaggaacttctctgctgccaagagcctgctgaacaagaagagtgatggaggagtgaagccccagagcaacaacaagaacagcctggtgtccccagcccaggagcccgcccccctgcagacagccatggagccccagaccaccgtggtgcacaatgccacagatggcatcaagggcagcacagagagctgcaacaccaccacagaagatgaggacctgaaggccgcccccctgaggactggaaatggcagctctgtgcctgagggccgcagcagccgggacagaacagcccccagcgctggcatgcagccccagcccagcctgtgcagcagcgccatgaggaagcaggagatcatcaagatcacagagcagctgattgaggccatcaacaacggggactttgaggcctacaccaagatctgtgaccccggcctgaccagctttgagcctgaggccctgggcaacctggtggagggcatggacttccacaagttctactttgagaacctgctgagcaagaacagcaagcccatccacaccaccatcctgaacccccacgtgcacgtgattggagaagatgctgcctgcatcgcctacatccggctgacccagtacattgatggccagggccggcccaggaccagccagagcgaggagaccagggtgtggcacagaagagatggcaagtggctgaatgtgcactaccactgcagcggggccccagctgcccccctgcagtag

SEQ ID NO: 145918 - DNA, 543 bp, synthetic construct
  misc_feature 1..543: note = Description of Artificial Sequence: Synthetic coding sequence
  source 1..543: mol_type = other DNA
atggccaccacagccacctgcacccgcttcacagatgactaccagctgtttgaggagctgggcaagggggccttctctgtggtgagaagatgtgtgaagaagaccagcacccaggagtatgctgccaagatcatcaacaccaagaagctgagcgcccgggaccaccagaagctggagcgggaggcccgcatctgccgcctgctgaagcaccccaacatcgccaccatccatggaggcatccatgatgccagcagcggggactgtggggtgtttgcccaggtgcagtgcccagagaagacagagggctgccacccccatgaccacgcctgcctgcaggagctgctgagctgccagaagcccatcgagcaggaggtgggctggcgctgccaggccacagagcagcagcagaagcagagcaggaagcccagcccccgggcccgggccctggctgatggccatggagccaccaaccactgcggcacccagcgctaccgctgggaccagggcctgcaccgggagctgcagcaccaccacagaagatag

SEQ ID NO: 145919 - DNA, 240 bp, synthetic construct
  misc_feature 1..240: note = Description of Artificial Sequence: Synthetic coding sequence
  source 1..240: mol_type = other DNA
atgtctgagatcctgccctacagcgaggacaagatgggccgctttggagctgaccctgagggcagtgacctgtccttcagctgccgcctgcaggacaccaacagcttctttgctggcaaccaggccaagaggcctcccaagctgggccagatcggccgggccaagagggtggtgattgaagatgacagaattgatgatgtgctgaagggcatgggagagaagcccccatctggagtgtag

SEQ ID NO: 145920 - DNA, 1422 bp, synthetic construct
  misc_feature 1..1422: note = Description of Artificial Sequence: Synthetic coding sequence
  source 1..1422: mol_type = other DNA
atgctgaaggtgacagtgcccagctgcagcgccagcagctgcagctctgtgacagccagcgctgcccctggaacagccagcctggtgcctgactactggattgatggcagcaacagagatgccctgagtgacttctttgaggtggagagcgagctgggccgcggggccaccagcatcgtgtaccgctgcaagcagaagggcacccagaagccctatgccctgaaggtgctgaagaagacagtggacaagaagatcgtgaggacagaaattggagtgctgctgcggctgagccaccccaacatcatcaagctgaaggagatctttgagacccccacagagatcagcctggtgctggagctggtgactggaggagagctgtttgaccgcatcgtggagaagggctactacagcgagagagatgctgctgatgctgtgaagcagatcctggaggccgtggcctacctgcatgaaaatggcatcgtgcaccgggacctgaagccagagaacctgctgtatgccaccccagccccagatgcccccctgaagattgctgactttggcctgagcaagatcgtggagcaccaggtgctgatgaagacagtgtgtggcaccccaggctactgtgcccctgagatcctgcggggctgtgcctacggccctgaggtggacatgtggagcgtgggcatcatcacctacatcctgctgtgtggctttgagcccttctatgatgagcggggggaccagttcatgttccgccgcatcctgaactgtgagtactacttcatcagcccctggtgggatgaggtgtccctgaatgccaaggacctggtgaggaagctgattgtgctggaccccaagaagaggctgaccaccttccaggccctgcagcacccctgggtgacaggcaaggccgccaactttgtgcacatggacacagcccagaagaagctgcaggagttcaatgcccggaggaagctgaaggctgctgtgaaggctgtggtggccagcagccggctgggcagcgccagcagcagccacggcagcatccaggagagccacaaggccagccgggaccccagccccatccaggatggaaatgaagacatgaaggccatccctgagggggagaagatccagggagatggagcccaggccgctgtgaagggggcccaggccgagctgatgaaggtgcaggccctggagaaggtgaagggagctgacatcaatgctgaggaggcccccaagatggtgcccaaggctgtggaggatggcatcaaggtggccgacctggagctggaggagggcctggccgaggagaagctgaagacagtggaggaggccgccgccccccgggagggccagggcagcagcgctgtgggctttgaggtgccccagcaggatgtgatcctgcctgagtactag

SEQ ID NO: 145921 - DNA, 429 bp, synthetic construct
  misc_feature 1..429: note = Description of Artificial Sequence: Synthetic coding sequence
  source 1..429: mol_type = other DNA
atgctgaaggtgacagtgcccagctgcagcgccagcagctgcagctctgtgacagccagcgctgcccctggaacagccagcctggtgcctgactactggattgatggcagcaacagagatgccctgagtgacttctttgaggtggagagcgagctgggccgcggggccaccagcatcgtgtaccgctgcaagcagaagggcacccagaagccctatgccctgaaggtgctgaagaagacagtggacaagaagatcgtgaggacagaaattggagtgctgctgcggctgagccaccccaacatcatcaagctgaaggagatctttgagacccccacagagatcagcctggtgctggagctggtgactggaggagagctgtttgaccgcatcgtggagaagggctactacagcgagagagatgctgcctag

SEQ ID NO: 145922 - DNA, 1422 bp, synthetic construct; identical to SEQ ID NO: 145920
  misc_feature 1..1422: note = Description of Artificial Sequence: Synthetic coding sequence
  source 1..1422: mol_type = other DNA

SEQ ID NO: 145923 - DNA, 2766 bp, synthetic construct
  misc_feature 1..2766: note = Description of Artificial Sequence: Synthetic coding sequence
  source 1..2766: mol_type = other DNA
atggctgatgatgatgtgctgtttgaagatgtgtatgagctgtgtgaggtgattggcaagggccccttctctgtggtgcggcgctgcatcaaccgggagaccggccagcagtttgctgtgaagatcgtggatgtggccaagttcaccagcagccctggcctgagcacagaggacctgaagcgggaggccagcatctgccacatgctgaagcacccccacatcgtggagctgctggagacctacagcagtgatggcatgctgtacatggtgtttgagttcatggatggagctgacctgtgctttgaaattgtgaagagagcagatgctggctttgtgtacagcgaggccgtggccagccactacatgaggcagatcctggaggccctgcgctactgccacgacaacaacatcatccacagagatgtgaagccccactgtgtgctgctggccagcaaagaaaattctgcccctgtgaagctgggcggctttggagtggccatccagctgggggagagcggcctggtggccggcggccgggtgggcaccccccacttcatggcccctgaggtggtgaagcgggagccctacggcaagcctgtggatgtgtggggctgtggggtcatcctcttcatcctgctgagcggctgcctgcccttctacggcaccaaggagcggctgtttgagggcatcatcaagggcaagtacaagatgaacccccggcagtggagccacatcagcgagagcgccaaggacctggtgcggaggatgctgatgctggaccctgctgagcgcatcaccgtgtatgaggccctgaaccacccctggctgaaggagcgggacagatatgcctacaagatccacctgcctgagaccgtggagcagctgaggaagttcaatgcccggaggaagctgaagggagctgtgctggccgctgtgagcagccacaagttcaacagcttctatggagaccccccagaggagctgcctgacttcagcgaggaccccaccagctctgtgctgctgattgtgtccagagctgtgtcccaggtgctggacagcctggaggagatccacgccctgacagactgcagcgagaaggacctggacttcctgcacagcgtcttccaggaccagcacctgcacaccctgctggacctgtatgacaagatcaacaccaagagcagcccccagatcagaaatcctccttctgatgctgtgcagagggccaaggaggtgctggaggagatcagctgctacccagaaaataatgatgccaaggagctgaagaggatcctgacccagccccacttcatggccctgctgcagacccatgatgtggtggcccacgaggtgtacagtgatgaggccctgcgggtgaccccaccacccaccagcccctacctgaatggagacagccctgagagcgccaatggagacatggacatggagaatgtgaccagggtgcggctggtgcagttccagaagaacacagatgagcccatgggcatcaccctgaagatgaatgagctgaaccactgcatcgtggcccgcatcatgcacggcggcatgatccaccggcagggcaccctgcacgtgggagatgagatccgggagatcaatggcatctctgtggccaaccagacagtggagcagctgcagaagatgctgcgggagatgaggggcagcatcaccttcaagatcgtgcccagctaccgcacccagagcagcagctgtgagcgggacagccccagcaccagccggcagagccctgccaacggccacagcagcaccaacaacagcgtgtctgacctgcccagcaccacccagcccaagggccggcagatctacgtgcgggcccagtttgaatatgaccctgccaaggatgacctgatcccctgcaaggaggccggcatccgcttccgggtgggggacatcatccagatcatcagcaaggatgaccacaactggtggcagggcaagctggagaacagcaagaatggaacagctggcctcatccccagccctgagctgcaggagtggagggtggcctgcatcgccatggagaagaccaagcaggagcagcaggccagctgcacctggtttgggaagaagaagaagcagtacaaggacaagtacctggccaagcacaatgctgacctggtgacctatgaggaggtggtgaagctgcctgccttcaagaggaagaccctggtgctgctgggcgcccatggagtgggcagaagacacatcaagaacaccctcatcaccaagcacccagacagatttgcctaccccatcccccacaccacccggccccccaagaaggatgaggagaatggcaagaactactactttgtgtcccatgaccagatgatgcaggacatcagcaacaatgagtacctggagtatggcagccatgaagatgccatgtatggcaccaagctggagaccatcaggaagatccacgagcagggcctgattgccatcctggatgtggagccccaggccctgaaggtgctgaggacagctgagtttgccccctttgtggtgttcatcgccgcccccaccatcaccccaggcctgaatgaagatgagagcctgcagaggctgcagaaggagagtgacatcctgcagaggacctacgcccactactttgacctgaccatcatcaacaatgaaattgatgagaccatccgccacctggaggaggccgtggagctggtgtgcacagccccccagtgggtgcctgtgtcctgggtgtactag

SEQ ID NO: 145924 - DNA, 2730 bp, synthetic construct
  misc_feature 1..2730: note = Description of Artificial Sequence: Synthetic coding sequence
  source 1..2730: mol_type = other DNA
atggctgatgatgatgtgctgtttgaagatgtgtatgagctgtgtgaggtgattggcaagggccccttctctgtggtgcggcgctgcatcaaccgggagaccggccagcagtttgctgtgaagatcgtggatgtggccaagttcaccagcagccctggcctgagcacagaggacctgaagcgggaggccagcatctgccacatgctgaagcacccccacatcgtggagctgctggagacctacagcagtgatggcatgctgtacatggtgtttgagttcatggatggagctgacctgtgctttgaaattgtgaagagagcagatgctggctttgtgtacagcgaggccgtggccagccactacatgaggcagatcctggaggccctgcgctactgccacgacaacaacatcatccacagagatgtgaagccccactgtgtgctgctggccagcaaagaaaattctgcccctgtgaagctgggcggctttggagtggccatccagctgggggagagcggcctggtggccggcggccgggtgggcaccccccacttcatggcccctgaggtggtgaagcgggagccctacggcaagcctgtggatgtgtggggctgtggggtcatcctcttcatcctgctgagcggctgcctgcccttctacggcaccaaggagcggctgtttgagggcatcatcaagggcaagtacaagatgaacccccggcagtggagccacatcagcgagagcgccaaggacctggtgcggaggatgctgatgctggaccctgctgagcgcatcaccgtgtatgaggccctgaaccacccctggctgaaggagcgggacagatatgcctacaagatccacctgcctgagaccgtggagcagctgaggaagttcaatgcccggaggaagctgaagggagctgtgctggccgctgtgagcagccacaagttcaacagcttctatggagaccccccagaggagctgcctgacttcagcgaggaccccaccagctctgtgctgctgattgtgtccagagctgtgtcccaggtgctggacagcctggaggagatccacgccctgacagactgcagcgagaaggacctggacttcctgcacagcgtcttccaggaccagcacctgcacaccctgctggacctgtatgacaagatcaacaccaagagcagcccccagatcagaaatcctccttctgatgctgtgcagagggccaaggaggtgctggaggagatcagctgctacccagaaaataatgatgccaaggagctgaagaggatcctgacccagccccacttcatggccctgctgcagacccatgatgtggtggcccacgaggtgtacagtgatgaggccctgcgggtgaccccaccacccaccagcccctacctgaatggagacagccctgagagcgccaatggagacatggacatggagaatgtgaccagggtgcggctggtgcagttccagaagaacacagatgagcccatgggcatcaccctgaagatgaatgagctgaaccactgcatcgtggcccgcatcatgcacggcggcatgatccaccggcagggcaccctgcacgtgggagatgagatccgggagatcaatggcatctctgtggccaaccagacagtggagcagctgcagaagatgctgcgggagatgaggggcagcatcaccttcaagatcgtgcccagctaccgcacccagagcagcagctgtgagcgggacagccccagcaccagccggcagagccctgccaacggccacagcagcaccaacaacagcgtgtccatctacgtgcgggcccagtttgaatatgaccctgccaaggatgacctgatcccctgcaaggaggccggcatccgcttccgggtgggggacatcatccagatcatcagcaaggatgaccacaactggtggcagggcaagctggagaacagcaagaatggaacagctggcctcatccccagccctgagctgcaggagtggagggtggcctgcatcgccatggagaagaccaagcaggagcagcaggccagctgcacctggtttgggaagaagaagaagcagtacaaggacaagtacctggccaagcacaatgctgacctggtgacctatgaggaggtggtgaagctgcctgccttcaagaggaagaccctggtgctgctgggcgcccatggagtgggcagaagacacatcaagaacaccctcatcaccaagcacccagacagatttgcctaccccatcccccacaccacccggccccccaagaaggatgaggagaatggcaagaactactactttgtgtcccatgaccagatgatgcaggacatcagcaacaatgagtacctggagtatggcagccatgaagatgccatgtatggcaccaagctggagaccatcaggaagatccacgagcagggcctgattgccatcctggatgtggagccccaggccctgaaggtgctgaggacagctgagtttgccccctttgtggtgttcatcgccgcccccaccatcaccccaggcctgaatgaagatgagagcctgcagaggctgcagaaggagagtgacatcctgcagaggacctacgcccactactttgacctgaccatcatcaacaatgaaattgatgagaccatccgccacctggaggaggccgtggagctggtgtgcacagccccccagtgggtgcctgtgtcctgggtgtactag

SEQ ID NO: 145925 - DNA, 1773 bp, synthetic construct
  misc_feature 1..1773: note = Description of Artificial Sequence: Synthetic coding sequence
  source 1..1773: mol_type = other DNA
atggctgatgatgatgtgctgtttgaagatgtgtatgagctgtgtgaggtgattggcaagggccccttctctgtggtgcggcgctgcatcaaccgggagaccggccagcagtttgctgtgaagatcgtggatgtggccaagttcaccagcagccctggcctgagcacagaggacctgaagcgggaggccagcatctgccacatgctgaagcacccccacatcgtggagctgctggagacctacagcagtgatggcatgctgtacatggtgtttgagttcatggatggagctgacctgtgctttgaaattgtgaagagagcagatgctggctttgtgtacagcgaggccgtggccagccactacatgaggcagatcctggaggccctgcgctactgccacgacaacaacatcatccacagagatgtgaagccccactgtgtgctgctggccagcaaagaaaattctgcccctgtgaagctgggcggctttggagtggccatccagctgggggagagcggcctggtggccggcggccgggtgggcaccccccacttcatggcccctgaggtggtgaagcgggagccctacggcaagcctgtggatgtgtggggctgtggggtcatcctcttcatcctgctgagcggctgcctgcccttctacggcaccaaggagcggctgtttgagggcatcatcaagggcaagtacaagatgaacccccggcagtggagccacatcagcgagagcgccaaggacctggtgcggaggatgctgatgctggaccctgctgagcgcatcaccgtgtatgaggccctgaaccacccctggctgaaggagcgggacagatatgcctacaagatccacctgcctgagaccgtggagcagctgaggaagttcaatgcccggaggaagctgaagggagctgtgctggccgctgtgagcagccacaagttcaacagcttctatggagaccccccagaggagctgcctgacttcagcgaggaccccaccagcagcggcctgctggccgctgagagagctgtgtcccaggtgctggacagcctggaggagatccacgccctgacagactgcagcgagaaggacctggacttcctgcacagcgtcttccaggaccagcacctgcacaccctgctggacctgtatgacaagatcaacaccaagagcagcccccagatcagaaatcctccttctgatgctgtgcagagggccaaggaggtgctggaggagatcagctgctacccagaaaataatgatgccaaggagctgaagaggatcctgacccagccccacttcatggccctgctgcagacccatgatgtggtggcccacgaggtgtacagtgatgaggccctgcgggtgaccccaccacccaccagcccctacctgaatggagacagccctgagagcgccaatggagacatggacatggagaatgtgaccagggtgcggctggtgcagttccagaagaacacagatgagcccatgggcatcaccctgaagatgaatgagctgaaccactgcatcgtggcccgcatcatgcacggcggcatgatccaccggcagggcaccctgcacgtgggagatgagatccgggagatcaatggcatctctgtggccaaccagacagtggagcagctgcagaagatgctgcgggagatgaggggcagcatcaccttcaagatcgtgcccagctaccgcacccagagcagcagctgtgaggtgatgaccctgaccaaccacccccacctgctgtag

SEQ ID NO: 145926 - DNA, 2730 bp, synthetic construct
  misc_feature 1..2730: note = Description of Artificial Sequence: Synthetic coding sequence
  source 1..2730: mol_type = other DNA
atggctgatgatgatgtgctgtttgaagatgtgtatgagctgtgtgaggtgattggcaagggccccttctctgtggtgcggcgctgcatcaaccgggagaccggccagcagtttgctgtgaagatcgtggatgtggccaagttcaccagcagccctggcctgagcacagaggacctgaagcgggaggccagcatctgccacatgctgaagcacccccacatcgtggagctgctggagacctacagcagtgatggcatgctgtacatggtgtttgagttcatggatggagctgacctgtgctttgaaattgtgaagagagcagatgctggctttgtgtacagcgaggccgtggccagccactacatgaggcagatcctggaggccctgcgctactgccacgacaacaacatcatccacagagatgtgaagccccactgtgtgctgctggccagcaaagaaaattctgcccctgtgaagctgggcggctttggagtggccatccagctgggggagagcggcctggtggccggcggccgggtgggcaccccccacttcatggcccctgaggtggtgaagcgggagccctacggcaagcctgtggatgtgtggggctgtggggtcatcctcttcatcctgctgagcggctgcctgcccttctacggcaccaaggagcggctgtttgagggcatcatcaagggcaagtacaagatgaacccccggcagtggagccacatcagcgagagcgccaaggacctggtgcggaggatgctgatgctggaccctgctgagcgcatcaccgtgtatgaggccctgaaccacccctggctgaaggagcgggacagatatgcctacaagatccacctgcctgagaccgtggagcagctgaggaagttcaatgcccggaggaagctgaagggagctgtgctggccgctgtgagcagccacaagttcaacagcttctatggagaccccccagaggagctgcctgacttcagcgaggaccccaccagcagcggcctgctggccgctgagagagctgtgtcccaggtgctggacagcctggaggagatccacgccctgacagactgcagcgagaaggacctggacttcctgcacagcgtcttccaggaccagcacctgcacaccctgctggacctgtatgacaagatcaacaccaagagcagcccccagatcagaaatcctccttctgatgctgtgcagagggccaaggaggtgctggaggagatcagctgctacccagaaaataatgatgccaaggagctgaagaggatcctgacccagccccacttcatggccctgctgcagacccatgatgtggtggcccacgaggtgtacagtgatgaggccctgcgggtgaccccaccacccaccagcccctacctgaatggagacagccctgagagcgccaatggagacatggacatggagaatgtgaccagggtgcggctggtgcagttccagaagaacacagatgagcccatgggcatcaccctgaagatgaatgagctgaaccactgcatcgtggcccgcatcatgcacggcggcatgatccaccggcagggcaccctgcacgtgggagatgagatccgggagatcaatggcatctctgtggccaaccagacagtggagcagctgcagaagatgctgcgggagatgaggggcagcatcaccttcaagatcgtgcccagctaccgcacccagagcagcagctgtgagcgggacagccccagcaccagccggcagagccctgccaacggccacagcagcaccaacaacagcgtgtccatctacgtgcgggcccagtttgaatatgaccctgccaaggatgacctgatcccctgcaaggaggccggcatccgcttccgggtgggggacatcatccagatcatcagcaaggatgaccacaactggtggcagggcaagctggagaacagcaagaatggaacagctggcctcatccccagccctgagctgcaggagtggagggtggcctgcatcgccatggagaagaccaagcaggagcagcaggccagctgcacctggtttgggaagaagaagaagcagtacaaggacaagtacctggccaagcacaatgctgacctggtgacctatgaggaggtggtgaagctgcctgccttcaagaggaagaccctggtgctgctgggcgcccatggagtgggcagaagacacatcaagaacaccctcatcaccaagcacccagacagatttgcctaccccatcccccacaccacccggccccccaagaaggatgaggagaatggcaagaactactactttgtgtcccatgaccagatgatgcaggacatcagcaacaatgagtacctggagtatggcagccatgaagatgccatgtatggcaccaagctggagaccatcaggaagatccacgagcagggcctgattgccatcctggatgtggagccccaggccctgaaggtgctgaggacagctgagtttgccccctttgtggtgttcatcgccgcccccaccatcaccccaggcctgaatgaagatgagagcctgcagaggctgcagaaggagagtgacatcctgcagaggacctacgcccactactttgacctgaccatcatcaacaatgaaattgatgagaccatccgccacctggaggaggccgtggagctggtgtgcacagccccccagtgggtgcctgtgtcctgggtgtactag

SEQ ID NO: 145927 - DNA, 2781 bp, synthetic construct
  misc_feature 1..2781: note = Description of Artificial Sequence: Synthetic coding sequence
  source 1..2781: mol_type = other DNA
atggctgatgatgatgtgctgtttgaagatgtgtatgagctgtgtgaggtgattggcaagggccccttctctgtggtgcggcgctgcatcaaccgggagaccggccagcagtttgctgtgaagatcgtggatgtggccaagttcaccagcagccctggcctgagcacagaggacctgaagcgggaggccagcatctgccacatgctgaagcacccccacatcgtggagctgctggagacctacagcagtgatggcatgctgtacatggtgtttgagttcatggatggagctgacctgtgctttgaaattgtgaagagagcagatgctggctttgtgtacagcgaggccgtggccagccactacatgaggcagatcctggaggccctgcgctactgccacgacaacaacatcatccacagagatgtgaagccccactgtgtgctgctggccagcaaagaaaattctgcccctgtgaagctgggcggctttggagtggccatccagctgggggagagcggcctggtggccggcggccgggtgggcaccccccacttcatggcccctgaggtggtgaagcgggagccctacggcaagcctgtggatgtgtggggctgtggggtcatcctcttcatcctgctgagcggctgcctgcccttctacggcaccaaggagcggctgtttgagggcatcatcaagggcaagtacaagatgaacccccggcagtggagccacatcagcgagagcgccaaggacctggtgcggaggatgctgatgctggaccctgctgagcgcatcaccgtgtatgaggccctgaaccacccctggctgaaggagcgggacagatatgcctacaagatccacctgcctgagaccgtggagcagctgaggaagttcaatgcccggaggaagctgaagggagctgtgctggccgctgtgagcagccacaagttcaacagcttctatggagaccccccagaggagctgcctgacttcagcgaggaccccaccagcagcggcctgctggccgctgagagagctgtgtcccaggtgctggacagcctggaggagatccacgccctgacagactgcagcgagaaggacctggacttcctgcacagcgtcttccaggaccagcacctgcacaccctgctggacctgtatgacaagatcaacaccaagagcagcccccagatcagaaatcctccttctgatgctgtgcagagggccaaggaggtgctggaggagatcagctgctacccagaaaataatgatgccaaggagctgaagaggatcctgacccagccccacttcatggccctgctgcagacccatgatgtggtggcccacgaggtgtacagtgatgaggccctgcgggtgaccccaccacccaccagcccctacctgaatggagacagccctgagagcgccaatggagacatggacatggagaatgtgaccagggtgcggctggtgcagttccagaagaacacagatgagcccatgggcatcaccctgaagatgaatgagctgaaccactgcatcgtggcccgcatcatgcacggcggcatgatccaccggcagggcaccctgcacgtgggagatgagatccgggagatcaatggcatctctgtggccaaccagacagtggagcagctgcagaagatgctgcgggagatgaggggcagcatcaccttcaagatcgtgcccagctaccgcacccagagcagcagctgtgagcgggacagccccagcaccagccggcagagccctgccaacggccacagcagcaccaacaacagcgtgtctgacctgcccagcaccacccagcccaagggccggcagatctacgtgcgggcccagtttgaatatgaccctgccaaggatgacctgatcccctgcaaggaggccggcatccgcttccgggtgggggacatcatccagatcatcagcaaggatgaccacaactggtggcagggcaagctggagaacagcaagaatggaacagctggcctcatccccagccctgagctgcaggagtggagggtggcctgcatcgccatggagaagaccaagcaggagcagcaggccagctgcacctggtttgggaagaagaagaagcagtacaaggacaagtacctggccaagcacaatgctgtgtttgaccagctggacctggtgacctatgaggaggtggtgaagctgcctgccttcaagaggaagaccctggtgctgctgggcgcccacggcgtgggccgccgccacatcaagaacaccctcatcaccaagcacccagacagatttgcctaccccatcccccacaccaccaggcctcccaagaaggatgaagaaaatggcaagaactactactttgtgtcccatgaccagatgatgcaggacatcagcaacaatgagtacctggagtatggcagccatgaagatgccatgtatggcaccaagctggagaccatcaggaagatccacgagcagggcctcatcgccatcctggatgtggagccccaggccctgaaggtgctgaggacagctgagtttgccccctttgtggtgttcatcgccgcccccaccatcaccccaggcctgaatgaagatgagagcctgcagaggctgcagaaggagagtgacatcctgcagaggacctacgcccactactttgacctgaccatcatcaacaatgaaattgatgagaccatccgccacctggaggaggccgtggagctggtgtgcacagccccccagtgggtgcctgtgtcctgggtgtactag

SEQ ID NO: 145928 - DNA, 2766 bp, synthetic construct
  misc_feature 1..2766: note = Description of Artificial Sequence: Synthetic coding sequence
  source 1..2766: mol_type = other DNA
atggctgatgatgatgtgctgtttgaagatgtgtatgagctgtgtgaggtgattggcaagggccccttctctgtggtgcggcgctgcatcaaccgggagaccggccagcagtttgctgtgaagatcgtggatgtggccaagttcaccagcagccctggcctgagcacagaggacctgaagcgggaggccagcatctgccacatgctgaagcacccccacatcgtggagctgctggagacctacagcagtgatggcatgctgtacatggtgtttgagttcatggatggagctgacctgtgctttgaaattgtgaagagagcagatgctggctttgtgtacagcgaggccgtggccagccactacatgaggcagatcctggaggccctgcgctactgccacgacaacaacatcatccacagagatgtgaagccccactgtgtgctgctggccagcaaagaaaattctgcccctgtgaagctgggcggctttggagtggccatccagctgggggagagcggcctggtggccggcggccgggtgggcaccccccacttcatggcccctgaggtggtgaagcgggagccctacggcaagcctgtggatgtgtggggctgtggggtcatcctcttcatcctgctgagcggctgcctgcccttctacggcaccaaggagcggctgtttgagggcatcatcaagggcaagtacaagatgaacccccggcagtggagccacatcagcgagagcgccaaggacctggtgcggaggatgctgatgctggaccctgctgagcgcatcaccgtgtatgaggccctgaaccacccctggctgaaggagcgggacagatatgcctacaagatccacctgcctgagaccgtggagcagctgaggaagttcaatgcccggaggaagctgaagggagctgtgctggccgctgtgagcagccacaagttcaacagcttctatggagaccccccagaggagctgcctgacttcagcgaggaccccaccagcagcggcctgctggccgctgagagagctgtgtcccaggtgctggacagcctggaggagatccacgccctgacagactgcagcgagaaggacctggacttcctgcacagcgtcttccaggaccagcacctgcacaccctgctggacctgtatgacaagatcaacaccaagagcagcccccagatcagaaatcctccttctgatgctgtgcagagggccaaggaggtgctggaggagatcagctgctacccagaaaataatgatgccaaggagctgaagaggatcctgacccagccccacttcatggccctgctgcagacccatgatgtggtggcccacgaggtgtacagtgatgaggccctgcgggtgaccccaccacccaccagcccctacctgaatggagacagccctgagagcgccaatggagacatggacatggagaatgtgaccagggtgcggctggtgcagttccagaagaacacagatgagcccatgggcatcaccctgaagatgaatgagctgaaccactgcatcgtggcccgcatcatgcacggcggcatgatccaccggcagggcaccctgcacgtgggagatgagatccgggagatcaatggcatctctgtggccaaccagacagtggagcagctgcagaagatgctgcgggagatgaggggcagcatcaccttcaagatcgtgcccagctaccgcacccagagcagcagctgtgagcgggacagccccagcaccagccggcagagccctgccaacggccacagcagcaccaacaacagcgtgtctgacctgcccagcaccacccagcccaagggccggcagatctacgtgcgggcccagtttgaatatgaccctgccaaggatgacctgatcccctgcaaggaggccggcatccgcttccgggtgggggacatcatccagatcatcagcaaggatgaccacaactggtggcagggcaagctggagaacagcaagaatggaacagctggcctcatccccagccctgagctgcaggagtggagggtggcctgcatcgccatggagaagaccaagcaggagcagcaggccagctgcacctggtttgggaagaagaagaagcagtacaaggacaagtacctggccaagcacaatgctgacctggtgacctatgaggaggtggtgaagctgcctgccttcaagaggaagaccctggtgctgctgggcgcccatggagtgggcagaagacacatcaagaacaccctcatcaccaagcacccagacagatttgcctaccccatcccccacaccacccggccccccaagaaggatgaggagaatggcaagaactactactttgtgtcccatgaccagatgatgcaggacatcagcaacaatgagtacctggagtatggcagccatgaagatgccatgtatggcaccaagctggagaccatcaggaagatccacgagcagggcctgattgccatcctggatgtggagccccaggccctgaaggtgctgaggacagctgagtttgccccctttgtggtgttcatcgccgcccccaccatcaccccaggcctgaatgaagatgagagcctgcagaggctgcagaaggagagtgacatcctgcagaggacctacgcccactactttgacctgaccatcatcaacaatgaaattgatgagaccatccgccacctggaggaggccgtggagctggtgtgcacagccccccagtgggtgcctgtgtcctgggtgtactag

SEQ ID NO: 145929 - DNA, 1146 bp, synthetic construct
  misc_feature 1..1146: note = Description of Artificial Sequence: Synthetic coding sequence
  source 1..1146: mol_type = other DNA
gatgagatccgggagatcaatggcatctctgtggccaaccagacagtggagcagctgcagaagatgctgcgggagatgaggggcagcatcaccttcaagatcgtgcccagctaccgcacccagagcagcagctgtgagcgggacagccccagcaccagccggcagagccctgccaacggccacagcagcaccaacaacagcgtgtccatctacgtgcgggcccagtttgaatatgaccctgccaaggatgacctgatcccctgcaaggaggccggcatccgcttccgggtgggggacatcatccagatcatcagcaaggatgaccacaactggtggcagggcaagctggagaacagcaagaatggaacagctggcctcatccccagccctgagctgcaggagtggagggtggcctgcatcgccatggagaagaccaagcaggagcagcaggccagctgcacctggtttgggaagaagaagaagcagtacaaggacaagtacctggccaagcacaatgctgtgtttgaccagctggacctggtgacctatgaggaggtggtgaagctgcctgccttcaagaggaagaccctggtgctgctgggcgcccatggagtgggcagaagacacatcaagaacaccctcatcaccaagcacccagacagatttgcctaccccatcccccacaccacccggccccccaagaaggatgaggagaatggcaagaactactactttgtgtcccatgaccagatgatgcaggacatcagcaacaatgagtacctggagtatggcagccatgaagatgccatgtatggcaccaagctggagaccatcaggaagatccacgagcagggcctgattgccatcctggatgtggagccccaggccctgaaggtgctgaggacagctgagtttgccccctttgtggtgttcatcgccgcccccaccatcaccccaggcctgaatgaagatgagagcctgcagaggctgcagaaggagagtgacatcctgcagaggacctacgcccactactttgacctgaccatcatcaacaatgaaattgatgagaccatccgccacctggaggaggccgtggagctggtgtgcacagccccccagtgggtgcctgtgtcctgggtgtactag

SEQ ID NO: 145930 - DNA, 1557 bp, synthetic construct
  misc_feature 1..1557: note = Description of Artificial Sequence: Synthetic coding sequence
  source 1..1557: mol_type = other DNA
ctctatgacaagatcaacaccaagagcagcccccagatccggaaccccccatctgatgctgtgcagagggccaaggaggtgctggaggagatcagctgctacccagagaacaatgatgccaaggagctgaagaggatcctgacccagccccacttcatggccctgctgcagacccatgatgtggtggcccacgaggtgtacagtgatgaggccctgcgggtgaccccaccacccaccagcccctacctgaatggagacagccctgagagcgccaacggggacatggacatggagaatgtgaccagggtgcggctggtgcagttccagaagaacacagatgagcccatgggcatcaccctgaagatgaatgagctgaaccactgcatcgtggcccgcatcatgcatggaggcatgatccaccggcagggcaccctgcacgtgggagatgagatccgggagatcaatggcatctctgtggccaaccagacagtggagcagctgcagaagatgctgcgggagatgaggggcagcatcaccttcaagatcgtgcccagctaccgcacccagagcagcagctgtgaggacctgcccagcaccacccagcccaagggccggcagatctacgtgcgggcccagtttgaatatgaccctgccaaggatgacctgatcccctgcaaggaggccggcatccgcttccgggtgggggacatcatccagatcatcagcaaggatgaccacaactggtggcagggcaagctggagaacagcaagaatggaacagctggcctcatccccagccctgagctgcaggagtggagggtggcctgcatcgccatggagaagaccaagcaggagcagcaggccagctgcacctggtttgggaagaagaagaagcagtacaaggacaagtacctggccaagcacaatgctgtgtttgaccagctggacctggtgacctatgaggaggtggtgaagctgcctgccttcaagaggaagaccctggtgctgctgggcgcccacggcgtgggccgccgccacatcaagaacaccctcatcaccaagcacccagacagatttgcctaccccatcccccacaccaccaggcctcccaagaaggatgaagaaaatggcaagaactactactttgtgtcccatgaccagatgatgcaggacatcagcaacaatgagtacctggagtatggcagccatgaagatgccatgtatggcaccaagctggagaccatcaggaagatccacgagcagggcctcatcgccatcctggatgtggagccccaggccctgaaggtgctgaggacagctgagtttgccccctttgtggtgttcatcgccgcccccaccatcaccccaggcctgaatgaagatgagagcctgcagaggctgcagaaggagagtgacatcctgcagaggacctacgcccactactttgacctgaccatcatcaacaatgaaattgatgagaccatccgccacctggaggaggccgtggagctggtgtgcacagccccccagtgggtgcctgtgtcctgggtgtactag

SEQ ID NO: 145931 - DNA, 2694 bp, synthetic construct
  misc_feature 1..2694: note = Description of Artificial Sequence: Synthetic coding sequence
  source 1..2694: mol_type = other DNA
atggctgatgatgatgtgctgtttgaagatgtgtatgagctgtgtgaggtgattggcaagggccccttctctgtggtgcggcgctgcatcaaccgggagaccggccagcagtttgctgtgaagatcgtggatgtggccaagttcaccagcagccctggcctgagcacagaggacctgaagcgggaggccagcatctgccacatgctgaagcacccccacatcgtggagctgctggagacctacagcagtgatggcatgctgtacatggtgtttgagttcatggatggagctgacctgtgctttgaaattgtgaagagagcagatgctggctttgtgtacagcgaggccgtggccagccactacatgaggcagatcctggaggccctgcgctactgccacgacaacaacatcatccacagagatgtgaagccccactgtgtgctgctggccagcaaagaaaattctgcccctgtgaagctgggcggctttggagtggccatccagctgggggagagcggcctggtggccggcggccgggtgggcaccccccacttcatggcccctgaggtggtgaagcgggagccctacggcaagcctgtggatgtgtggggctgtggggtcatcctcttcatcctgctgagcggctgcctgcccttctacggcaccaaggagcggctgtttgagggcatcatcaagggcaagtacaagatgaacccccggcagtggagccacatcagcgagagcgccaaggacctggtgcggaggatgctgatgctggaccctgctgagcgcatcaccgtgtatgaggccctgaaccacccctggctgaaggagcgggacagatatgcctacaagatccacctgcctgagaccgtggagcagctgaggaagttcaatgcccggaggaagctgaagggagctgtgctggccgctgtgagcagccacaagttcaacagcttctatggagaccccccagaggagctgcctgacttcagcgaggaccccaccagcagcggggctgtgtcccaggtgctggacagcctggaggagatccacgccctgacagactgcagcgagaaggacctggacttcctgcacagcgtcttccaggaccagcacctgcacaccctgctggacctgtatgacaagatcaacaccaagagcagcccccagatcagaaatcctccttctgatgctgtgcagagggccaaggaggtgctggaggagatcagctgctacccagaaaataatgatgccaaggagctgaagaggatcctgacccagccccacttcatggccctgctgcagacccatgatgtggtggcccacgaggtgtacagtgatgaggccctgcgggtgaccccaccacccaccagcccctacctgaatggagacagccctgagagcgccaatggagacatggacatggagaatgtgaccagggtgcggctggtgcagttccagaagaacacagatgagcccatgggcatcaccctgaagatgaatgagctgaaccactgcatcgtggcccgcatcatgcacggcggcatgatccaccggcagggcaccctgcacgtgggagatgagatccgggagatcaatggcatctctgtggccaaccagacagtggagcagctgcagaagatgctgcgggagatgaggggcagcatcaccttcaagatcgtgcccagctaccgcacccagagcagcagctgtgaggacctgcccagcaccacccagcccaagggccggcagatctacgtgcgggcccagtttgaatatgaccctgccaaggatgacctgatcccctgcaaggaggccggcatccgcttccgggtgggggacatcatccagatcatcagcaaggatgaccacaactggtggcagggcaagctggagaacagcaagaatggaacagctggcctcatccccagccctgagctgcaggagtggagggtggcctgcatcgccatggagaagaccaagcaggagcagcaggccagctgcacctggtttgggaagaagaagaagcagtacaaggacaagtacctggccaagcacaatgctgtgtttgaccagctggacctggtgacctatgaggaggtggtgaagctgcctgccttcaagaggaagaccctggtgctgctgggcgcccatggagtgggcagaagacacatcaagaacaccctcatcaccaagcacccagacagatttgcctaccccatcccccacaccacccggccccccaagaaggatgaggagaatggcaagaactactactttgtgtcccatgaccagatgatgcaggacatcagcaacaatgagtacctggagtatggcagccatgaagatgccatgtatggcaccaagctggagaccatcaggaagatccacgagcagggcctgattgccatcctggatgtggagccccaggccctgaaggtgctgaggacagctgagtttgccccctttgtggtgttcatcgccgcccccaccatcaccccaggcctgaatgaagatgagagcctgcagaggctgcagaaggagagtgacatcctgcagaggacctacgcccactactttgacctgaccatcatcaacaatgaaattgatgagaccatccgccacctggaggaggccgtggagctggtgtgcacagccccccagtgggtgcctgtgtcctgggtgtactag

SEQ ID NO: 145932 - DNA, 2697 bp, synthetic construct
  misc_feature 1..2697: note = Description of Artificial Sequence: Synthetic coding sequence
  source 1..2697: mol_type = other DNA
atggctgatgatgatgtgctgtttgaagatgtgtatgagctgtgtgaggtgattggcaagggccccttctctgtggtgcggcgctgcatcaaccgggagaccggccagcagtttgctgtgaagatcgtggatgtggccaagttcaccagcagccctggcctgagcacagaggacctgaagcgggaggccagcatctgccacatgctgaagcacccccacatcgtggagctgctggagacctacagcagtgatggcatgctgtacatggtgtttgagttcatggatggagctgacctgtgctttgaaattgtgaagagagcagatgctggctttgtgtacagcgaggccgtggccagccactacatgaggcagatcctggaggccctgcgctactgccacgacaacaacatcatccacagagatgtgaagccccactgtgtgctgctggccagcaaagaaaattctgcccctgtgaagctgggcggctttggagtggccatccagctgggggagagcggcctggtggccggcggccgggtgggcaccccccacttcatggcccctgaggtggtgaagcgggagccctacggcaagcctgtggatgtgtggggctgtggggtcatcctcttcatcctgctgagcggctgcctgcccttctacggcaccaaggagcggctgtttgagggcatcatcaagggcaagtacaagatgaacccccggcagtggagccacatcagcgagagcgccaaggacctggtgcggaggatgctgatgctggaccctgctgagcgcatcaccgtgtatgaggccctgaaccacccctggctgaaggagcgggacagatatgcctacaagatccacctgcctgagaccgtggagcagctgaggaagttcaatgcccggaggaagctgaagggagctgtgctggccgctgtgagcagccacaagttcaacagcttctatggagaccccccagaggagctgcctgacttcagcgaggaccccaccagcagcggcctgctggccgctgagagagctgtgtcccaggtgctggacagcctggaggagatccacgccctgacagactgcagcgagaaggacctggacttcctgcacagcgtcttccaggaccagcacctgcacaccctgctggacctgtatgacaagatcaacaccaagagcagcccccagatcagaaatcctccttctgatgctgtgcagagggccaaggaggtgctggaggagatcagctgctacccagaaaataatgatgccaaggagctgaagaggatcctgacccagccccacttcatggccctgctgcagacccatgatgtggtggcccacgaggtgtacagtgatgaggccctgcgggtgaccccaccacccaccagcccctacctgaatggagacagccctgagagcgccaatggagacatggacatggagaatgtgaccagggtgcggctggtgcagttccagaagaacacagatgagcccatgggcatcaccctgaagatgaatgagctgaaccactgcatcgtggcccgcatcatgcacggcggcatgatccaccggcagggcaccctgcacgtgggagatgagatccgggagatcaatggcatctctgtggccaaccagacagtggagcagctgcagaagatgctgcgggagatgaggggcagcatcaccttcaagatcgtgcccagctaccgcacccagagcagcagctgtgaggacctgcccagcaccacccagcccaagggccggcagatctacgtgcgggcccagtttgaatatgaccctgccaaggatgacctgatcccctgcaaggaggccggcatccgcttccgggtgggggacatcatccagatcatcagcaaggatgaccacaactggtggcagggcaagctggagaacagcaagaatggaacagctggcctcatccccagccctgagctgcaggagtggagggtggcctgcatcgccatggagaagaccaagcaggagcagcaggccagctgcacctggtttgggaagaagaagaagcagtacaaggacaagtacctggccaagcacaatgctgacctggtgacctatgaggaggtggtgaagctgcctgccttcaagaggaagaccctggtgctgctgggcgcccacggcgtgggccgccgccacatcaagaacaccctcatcaccaagcacccagacagatttgcctaccccatcccccacaccaccaggcctcccaagaaggatgaagaaaatggcaagaactactactttgtgtcccatgaccagatgatgcaggacatcagcaacaatgagtacctggagtatggcagccatgaagatgccatgtatggcaccaagctggagaccatcaggaagatccacgagcagggcctcatcgccatcctggatgtggagccccaggccctgaaggtgctgaggacagctgagtttgccccctttgtggtgttcatcgccgcccccaccatcaccccaggcctgaatgaagatgagagcctgcagaggctgcagaaggagagtgacatcctgcagaggacctacgcccactactttgacctgaccatcatcaacaatgaaattgatgagaccatccgccacctggaggaggccgtggagctggtgtgcacagccccccagtgggtgcctgtgtcctgggtgtactag

SEQ ID NO: 145933 - DNA, 3237 bp, synthetic construct
  misc_feature 1..3237: note = Description of Artificial Sequence: Synthetic coding sequence
  source 1..3237: mol_type = other DNA
atggccttctacagctgctgctgggtgctgctggccctgacctggcacaccagcgcctacggccctgaccagagggcccagaagaagggggacatcatcctgggcggcctcttccccatccactttggagtggccgccaaggaccaggacctgaagagcaggcctgagagcgtggagtgcatccgctacaacttccggggcttccgctggctgcaggccatgatctttgccatcgaggagatcaacagcagccctgccctgctgcccaacctgaccctgggctaccgcatctttgacacctgcaacacagtgtccaaggccctggaggccaccctgagctttgtggcccagaacaagattgacagcctgaacctggatgagttctgcaactgcagcgagcacatccccagcaccatcgctgtggtgggcgccactggaagtggagtgtccacagctgtggccaacctgctgggcctcttctacatcccccaggtgtcctatgccagcagcagccggctgctgagcaacaagaaccagttcaagagcttcctgcggaccatccccaatgatgagcaccaggccacagccatggctgacatcatcgagtacttccgctggaactgggtgggcaccatcgccgcagatgatgattatggccggcccggcatcgagaagttccgggaggaggccgaggagcgggacatctgcatcgacttcagcgagctgatcagccagtacagtgatgaggaggagatccagcacgtggtggaggtgatccagaacagcacagccaaggtgattgtggtgttcagcagcggccctgacctggagcccctcatcaaggagatcgtgagaagaaacatcaccgggaagatctggctggccagcgaggcctgggccagcagcagcctgattgccatgccccagtacttccacgtggtgggcggcaccatcggctttgccctgaaggccggccagatccctggcttccgggagttcctgaagaaggtgcaccccaggaagtctgtgcacaatggatttgccaaggagttctgggaggagaccttcaactgccacctgcaggagggcgccaagggccccctgcctgtggacaccttcctgcggggccacgaggagagcggggaccgcttcagcaacagcagcacagccttccggcccctgtgcacaggagatgagaacatcagctctgtggagaccccctacatcgactacacccacctgcgcatctcctacaacgtgtacctggccgtgtacagcatcgcccacgccctgcaggacatctacacctgcctgcccggccggggcctcttcaccaacggcagctgtgccgacatcaagaaggtggaggcctggcaggtgctgaagcacctgcggcacctgaacttcaccaacaacatgggagagcaggtgacctttgatgaatgtggggacctggtgggcaactacagcatcatcaactggcacctgagcccagaagatggcagcatcgtgttcaaggaggtgggctactacaacgtgtatgccaagaagggggagcggctcttcatcaatgaggagaagatcctgtggagcggcttcagccgggaggtgcccttcagcaactgcagccgggactgcctggccggcaccaggaagggcatcattgaaggagagcccacctgctgctttgaatgtgtggagtgcccagatggagagtacagtgatgaaacagatgccagcgcctgcaacaagtgcccagatgacttctggagcaatgaaaaccacaccagctgcatcgccaaggagattgagttcctgtcctggacagagcccttcggcatcgccctgaccctgtttgctgtgctgggcatcttcctgacagcctttgtgctgggcgtcttcatcaagttcaggaacacccccatcgtgaaggccaccaaccgggagctgagctacctgctgctcttcagcctgctgtgctgcttcagcagcagcctcttcttcatcggggagccccaggactggacctgccgcctgcggcagcctgccttcggcatcagctttgtgctgtgcatcagctgcatcctggtgaagaccaacagagtgctgctggtgtttgaggccaagatccccaccagcttccacaggaagtggtggggcctgaacctgcagttcctgctggtgttcctgtgcaccttcatgcagatcgtcatctgtgtgatctggctgtacacagccccacccagcagctacagaaaccaggagctggaggatgagatcatcttcatcacctgccacgagggcagcctgatggccctgggcttcctgattggctacacctgcctgctggccgccatctgcttcttctttgccttcaagagcaggaagctgcctgagaacttcaatgaggccaagttcatcaccttctccatgctgatcttcttcatcgtgtggatctccttcatcccagcctatgccagcacctacggcaagtttgtgtctgctgtggaggtgattgccatcctggccgccagctttggcctgctggcctgcatcttcttcaacaagatctacatcatcctcttcaagcccagcaggaacaccatcgaggaggtgcgctgcagcacagctgcccacgccttcaaggtggccgcccgggccaccctgcggcgcagcaatgtgtccaggaagaggagcagcagcctgggcggcagcacaggcagcacccccagcagcagcatcagcagcaagagcaacagcgaggaccccttcccccagcctgagcggcagaagcagcagcagcccctggccctgacccagcaggagcagcagcagcagcccctgaccctgccccagcagcagaggagccagcagcagccccgctgcaagcagaaggtgatcttcggcagcggcaccgtgaccttcagcctgagctttgatgagccccagaagaatgccatggcccacaggaacagcacccaccagaacagcctggaggcccagaagagcagtgacaccctgaccaggcatgagcccctgctgcccctgcagtgtggggagacagacctggacctgactgtgcaggagaccggcctgcagggccctgtgggcggggaccagaggcctgaggtggaggaccctgaggagctgagccctgccctggtggtgagcagcagccagagctttgtgatcagcggcggcggcagcacagtgacagaaaatgtggtgaacagctag

SEQ ID NO: 145934 - DNA, 3237 bp, synthetic construct; identical to SEQ ID NO: 145933
  misc_feature 1..3237: note = Description of Artificial Sequence: Synthetic coding sequence
  source 1..3237: mol_type = other DNA

SEQ ID NO: 145935 - DNA, 3267 bp, synthetic construct
  misc_feature 1..3267: note = Description of Artificial Sequence: Synthetic coding sequence
  source 1..3267: mol_type = other DNA
atggccttctacagctgctgctgggtgctgctggccctgacctggcacaccagcgcctacggccctgaccagagggcccagaagaagggggacatcatcctgggcggcctcttccccatccactttggagtggccgccaaggaccaggacctgaagagcaggcctgagagcgtggagtgcatccgctacaacttccggggcttccgctggctgcaggccatgatctttgccatcgaggagatcaacagcagccctgccctgctgcccaacctgaccctgggctaccgcatctttgacacctgcaacacagtgtccaaggccctggaggccaccctgagctttgtggcccagaacaagattgacagcctgaacctggatgagttctgcaactgcagcgagcacatccccagcaccatcgctgtggtgggcgccactggaagtggagtgtccacagctgtggccaacctgctgggcctcttctacatcccccaggtgtcctatgccagcagcagccggctgctgagcaacaagaaccagttcaagagcttcctgcggaccatccccaatgatgagcaccaggccacagccatggctgacatcatcgagtacttccgctggaactgggtgggcaccatcgccgcagatgatgattatggccggcccggcatcgagaagttccgggaggaggccgaggagcgggacatctgcatcgacttcagcgagctgatcagccagtacagtgatgaggaggagatccagcacgtggtggaggtgatccagaacagcacagccaaggtgattgtggtgttcagcagcggccctgacctggagcccctcatcaaggagatcgtgagaagaaacatcaccgggaagatctggctggccagcgaggcctgggccagcagcagcctgattgccatgccccagtacttccacgtggtgggcggcaccatcggctttgccctgaaggccggccagatccctggcttccgggagttcctgaagaaggtgcaccccaggaagtctgtgcacaatggatttgccaaggagttctgggaggagaccttcaactgccacctgcaggagggcgccaagggccccctgcctgtggacaccttcctgcggggccacgaggagagcggggaccgcttcagcaacagcagcacagccttccggcccctgtgcacaggagatgagaacatcagctctgtggagaccccctacatcgactacacccacctgcgcatctcctacaacgtgtacctggccgtgtacagcatcgcccacgccctgcaggacatctacacctgcctgcccggccggggcctcttcaccaacggcagctgtgccgacatcaagaaggtggaggcctggcaggtgctgaagcacctgcggcacctgaacttcaccaacaacatgggagagcaggtgacctttgatgaatgtggggacctggtgggcaactacagcatcatcaactggcacctgagcccagaagatggcagcatcgtgttcaaggaggtgggctactacaacgtgtatgccaagaagggggagcggctcttcatcaatgaggagaagatcctgtggagcggcttcagccgggagcccctgacctttgtgctgtctgtgctgcaggtgcccttcagcaactgcagccgggactgcctggccggcaccaggaagggcatcattgaaggagagcccacctgctgctttgaatgtgtggagtgcccagatggagagtacagtgatgaaacagatgccagcgcctgcaacaagtgcccagatgacttctggagcaatgaaaaccacaccagctgcatcgccaaggagattgagttcctgtcctggacagagcccttcggcatcgccctgaccctgtttgctgtgctgggcatcttcctgacagcctttgtgctgggcgtcttcatcaagttcaggaacacccccatcgtgaaggccaccaaccgggagctgagctacctgctgctcttcagcctgctgtgctgcttcagcagcagcctcttcttcatcggggagccccaggactggacctgccgcctgcggcagcctgccttcggcatcagctttgtgctgtgcatcagctgcatcctggtgaagaccaacagagtgctgctggtgtttgaggccaagatccccaccagcttccacaggaagtggtggggcctgaacctgcagttcctgctggtgttcctgtgcaccttcatgcagatcgtcatctgtgtgatctggctgtacacagccccacccagcagctacagaaaccaggagctggaggatgagatcatcttcatcacctgccacgagggcagcctgatggccctgggcttcctgattggctacacctgcctgctggccgccatctgcttcttctttgccttcaagagcaggaagctgcctgagaacttcaatgaggccaagttcatcaccttctccatgctgatcttcttcatcgtgtggatctccttcatcccagcctatgccagcacctacggcaagtttgtgtctgctgtggaggtgattgccatcctggccgccagctttggcctgctggcctgcatcttcttcaacaagatctacatcatcctcttcaagcccagcaggaacaccatcgaggaggtgcgctgcagcacagctgcccacgccttcaaggtggccgcccgggccaccctgcggcgcagcaatgtgtccaggaagaggagcagcagcctgggcggcagcacaggcagcacccccagcagcagcatcagcagcaagagcaacagcgaggaccccttcccccagcctgagcggcagaagcagcagcagcccctggccctgacccagcaggagcagcagcagcagcccctgaccctgccccagcagcagaggagccagcagcagccccgctgcaagcagaaggtgatcttcggcagcggcaccgtgaccttcagcctgagctttgatgagccccagaagaatgccatggcccacaggaacagcacccaccagaacagcctggaggcccagaagagcagtgacaccctgaccaggcatgagcccctgctgcccctgcagtgtggggagacagacctggacctgactgtgcaggagaccggcctgcagggccctgtgggcggggaccagaggcctgaggtggaggaccctgaggagctgagccctgccctggtggtgagcagcagccagagctttgtgatcagcggcggcggcagcacagtgacagaaaatgtggtgaacagctag

SEQ ID NO: 145936 - DNA, 978 bp, synthetic construct
  misc_feature 1..978: note = Description of Artificial Sequence: Synthetic coding sequence
  source 1..978: mol_type = other DNA
atggcccggcctgtgtctgacaggaccccagcccccctgctgctgggcggccctgctggcaccccacctgggggcggggccctgctgggcctgcggagcctgctgcagggcaccagcaagcccaaggagcccgccagctgcctgctgaaggagaaggagaggaaggccgccctgcctgctgccaccaccccaggccctggcctggagacagctggccctgcagatgccccagctggagctgtggtgggcggcggcagcccccggggccggcccggccctgtgcctgcccctggcctgctggcccccctgctgtgggagaggaccctgccctttggagatgtggagtatgtggacctggatgccttcctgctggagcacggcctgccccccagccccccacctcctgggggccccagccctgagcccagccctgcccggaccccagcccccagccctggccctggcagctgtggcagcgccagccccaggagcagccctggccacgccccagcccgggccgccctgggcacagccagcggccacagagctggcctgaccagccgggacacccccagccctgtggaccctgacacagtggaggtgctgatgacctttgagccagaccctgctgacctggccctgagcagcatccctggccacgagacctttgacccccggcggcaccgcttcagcgaggaggagctgaagccccagcccatcatgaagaaggccaggaagatccaggtgcctgaggagcagaaggatgagaagtactggagccgccgctacaagaacaatgaggccgccaagaggagcagagatgcccggcggctgaaggagaaccagatctctgtgcgggccgccttcctggagaaggaaaatgccctgctgcggcaggaggtggtggccgtgcggcaggagctgagccactacagagctgtgctgagccgctaccaggcccagcacggggccctgtag

SEQ ID NO: 145937 - DNA, 969 bp, synthetic construct
  misc_feature 1..969: note = Description of Artificial Sequence: Synthetic coding sequence
  source 1..969: mol_type = other DNA
agccagaggggcaagggcacctgccccggcagccacagaaatcatgccagcagcctgcccagccacggcctggtgtccatccagggcatcagcgccccagctggccagtggccagcccccccaccctggagccaggagggcatgcagtgccaccgggacctggccctgagccaggccctgtggggctggcagctgagcaagcagagcggctgggcccaccccagcctgccccacagccccctgcccagcacagtgcacagctgctcctgggccccaccccacctgcagaggcacctgcccctggccaccgtgtccccaggcaccacccagctgacccagggccctgctggccgcaccctgggccagacccaggccagctgcccagagccccggcccagcatggatgctgtggatgccaccatggagaagctgcgggcccagtgcctgagcagaggagccagcggcatccagggcctggcccgcttcttccggcagctggacagagatggcagccgcagcctggatgctgatgagttccggcagggcctggccaagctgggcctggtgctggaccaggccgaggccgagggcgtgtgcaggaagtgggacagaaatggaagtggcaccctggacctggaggagttcctgcgggccctgcggccccccatgagccaggcccgggaggccgtgattgctgctgcctttgccaagctggacagaagtggagatggagtggtgacagtggatgacctgcggggcgtgtacagcggccgggcccaccccaaggtgcgctctggagagtggacagaagatgaggtgctgcggcgcttcctggacaactttgacagcagcgagaaggatggccaggtgaccctggccgagttccaggactactacagcggcgtgtctgcctccatgaacacagatgaggagtttgtggccatgatgaccagcgcctggcagctgtag

SEQ ID NO: 145938 - DNA, 489 bp, synthetic construct
  misc_feature 1..489: note = Description of Artificial Sequence: Synthetic coding sequence
  source 1..489: mol_type = other DNA
atggatgctgtggatgccaccatggagaagctgcgggcccagtgcctgagcagaggagccagcggcatccagggcctggcccgcttcttccggcagctggacagagatggcagccgcagcctggatgctgatgagttccggcagggcctggccaagctgggcctggtgctggaccaggccgaggccgagggcgtgtgcaggaagtgggacagaaatggcagcggcaccctggacctggaggagttcctgcgggccctgcggccccccatgagccaggcccgggaggccgtgattgctgctgcctttgccaagctggacagaagtggagatggagtggtgacagtggatgacctgcggggcgtgtacagcggccgggcccaccccaaggtgaccctggccgagttccaggactactacagcggcgtgtctgcctccatgaacacagatgaggagtttgtggccatgatgaccagcgcctggcagctgtag

SEQ ID NO: 145939 - DNA, 882 bp, synthetic construct
  misc_feature 1..882: note = Description of Artificial Sequence: Synthetic coding sequence
  source 1..882: mol_type = other DNA
ctcatcaacatcctgtaccgggccgtcatcagtgaccctgagcagaacctggccatcgagcagaaggagagtgaccacatcctgcctgacagcaagatgacccccctgcgcttcaggaagaggaccctgcacgagaccaagatccgcacccacagcaccctgacagaaaatgtgctgagccacaagctgcagtttgatggaagaattgtgtccaggaccaacgtgctgcccttcatccagaagagcatctacagccaccagtgtggccgcaggaagggcaagcagtaccgcctgggggacttctacgtgggcgccaccctgaccttcctgagcagtgaccacctgagcctgcctgagagcatcaaggagaacaccctgctgaagctgcgcatcaccaacatcgaccagatcgccctggacagcctgaagacagcctccatggagcaggaggatgacatcatcatccaggagaccaatgaccggctggtgttcaaggccatccaggatgtgctgaaggagaagctgcacaagaggggcgtgcgcatcctgaccggcctgggcaagtacttccagcagctggacaaggagggcaatggcctgctggacaaggctgacttcaagcaggccctgaaggtgttccacctggaggtgtctgagaaggactttgagagcgcctggctgatcctgaatgacaatggaaatggcaaggtggactatggagagttcaagaggggcatcattggagagatgaatgagtacaggaagagctatgtgaggaaggccttcatgaagctggacttcaacaagagcggctctgtgcccatcatcaacatcaggaagtgctactgtgccaagaagcacagccaggtgatcagcggctag

SEQ ID NO: 145940 - DNA, 1149 bp, synthetic construct
  misc_feature 1..1149: note = Description of Artificial Sequence: Synthetic coding sequence
  source 1..1149: mol_type = other DNA
atgattgaccacctgagccgggccgtcatcagtgaccctgagcagaacctggccatcgagcagaaggagagtgaccacatcctgcctgacagcaagatgacccccctgcgcttcaggaagaggaccctgcacgagaccaagatccgcacccacagcaccctgacagaaaatgtgctgagccacaagctgcagtttgatggaagaattgtgtccagaaatggaagagatgcctgccgggagctgattggcttcttcttcacccatgaccagagcctgaccatctatgagtaccggcagtttgggaagaacagaaccaacgtgctgcccttcatccagaagagcatctacagccaccagtgtggccgcaggaagggcaagcagtaccgcctgggggacttctacgtgggcgccaccctgaccttcctgagcagtgaccacctgagcctgcctgagagcatcaaggagaacaccctgctgaagctgcgcatcaccaacatcgaccagatcgccctggacagcctgaagacagcctccatggagcaggaggatgacatcatcatccaggagaccaatgaccggctggtgttcaaggccatccaggatgtgctgaaggagaagctgcacaagaggggcgtgcgcatcctgaccggcctgggcaagtacttccagcagctggacaaggagggcaatggcctgctggacaaggctgacttcaagcaggccctgaaggtgttccacctggaggtgtctgagaaggactttgagagcgcctggctgatcctgaatgacaatggaaatggcaaggtggactatggagagttcaagaggggcatcattggagagatgaatgagtacaggaagagctatgtgaggaaggccttcatgaagctggacttcaacaagagcggctctgtgcccatcatcaacatcaggaagtgctactgtgccaagaagcacagccaggtgatcagcggccacagcacagaggaggagatcaagagcagcttcctggagaccctgaaggtggcctgcagcaagagtgatgaggtgtcctatggagaatttgaggactactatgagggcctgagcatcggcatcgtggatgatgaggactttgtgaacatcctgcggaccccctggggcatctag

SEQ ID NO: 145941 - DNA, 1674 bp, synthetic construct
  misc_feature 1..1674: note = Description of Artificial Sequence: Synthetic coding sequence
  source 1..1674: mol_type = other DNA
atgggcaacagcttctgctacacagctgtgtactgcatgatcaacacaggcacccagatggacctggaggtgaagggcgtggccgccaccagccgcagccagatccagcccttctttggaaggaagaagcccctgcagcagcgctggaccagcgagagctggaccaaccagaacagctgcccccctgtggtgccccggctggacctgggcagcctggtggacagtgatgatgaggacaacttctcctacatccccctgagcacagccaacctgcccaacagcagcagcaccctgggctgggtgaccccctgccagaccccctacacccagtaccacctgaacaagctggaccagaacatcatccctgagaacctgcctgcccccacagacaagtgcaagctgaagtaccagcagtgcaagacagagatcaaggagggctacaagcagtacagccagagaaatgctgagaacaccaagagcaatgtgacccacaagcagagccccaggaacaagattgatgagaagtgtgtgcaggatgaggaggccaacacagatgacctgaccaccctggacaggaaggccatcctgcagcagggctatgctgacaacagctgtgacaagcagcagagggccaggaagctggatgctgagatcgtggccgctgagaagaagaagcagatcgtggccgagcaggtgatgattgaccacctgagccgggccgtcatcagtgaccctgagcagaacctggccatcgagcagaaggagagtgaccacatcctgcctgacagcaagatgacccccctgcgcttcaggaagaggaccctgcacgagaccaagatccgcacccacagcaccctgacagaaaatgtgctgagccacaagctgcagtttgatggaagaattgtgtccagaaatggaagagatgcctgccgggagctgattggcttcttcttcacccatgaccagagcctgaccatctatgagtaccggcagtttgggaagaacagaaccaacgtgctgcccttcatccagaagagcatctacagccaccagtgtggccgcaggaagggcaagcagtaccgcctgggggacttctacgtgggcgccaccctgaccttcctgagcagtgaccacctgagcctgcctgagagcatcaaggagaacaccctgctgaagctgcgcatcaccaacatcgaccagatcgccctggacagcctgaagacagcctccatggagcaggaggatgacatcatcatccaggagaccaatgaccggctggtgttcaaggccatccaggatgtgctgaaggagaagctgcacaagaggggcgtgcgcatcctgaccggcctgggcaagtacttccagcagctggacaaggagggcaatggcctgctggacaaggctgacttcaagcaggccctgaaggtgttccacctggaggtgtctgagaaggactttgagagcgcctggctgatcctgaatgacaatggaaatggcaaggtggactatggagagttcaagaggggcatcattggagagatgaatgagtacaggaagagctatgtgaggaaggccttcatgaagctggacttcaacaagagcggctctgtgcccatcatcaacatcaggaagtgctactgtgccaagaagcacagccaggtgatcagcggctag

SEQ ID NO: 145942 - DNA, 615 bp, synthetic construct
  misc_feature 1..615: note = Description of Artificial Sequence: Synthetic coding sequence
  source 1..615: mol_type = other DNA
atggagcaggaggatgacatcatcatccaggagaccaatgaccggctggtgttcaaggccatccaggatgtgctgaaggagaagctgcacaagaggggcgtgcgcatcctgaccggcctgggcaagtacttccagcagctggacaaggagggcaatggcctgctggacaaggctgacttcaagcaggccctgaaggtgttccacctggaggtgtctgagaaggactttgagagcgcctggctgatcctgaatgacaatggaaatggcaaggtggactatggagagttcaagaggggcatcattggagagatgaatgagtacaggaagagctatgtgaggaaggccttcatgaagctggacttcaacaagagcggctctgtgcccatcatcaacatcaggaagtgctactgtgccaagaagcacagccaggtgatcagcggccacagcacagaggaggagatcaagagcagcttcctggagaccctgaaggtggcctgcagcaagagtgatgaggtgtcctatggagaatttgaggactactatgagggcctgagcatcggcatcgtggatgatgaggactttgtgaacatcctgcggaccccctggggcatctag

SEQ ID NO: 145943 - DNA, 3009 bp, synthetic construct
  misc_feature 1..3009: note = Description of Artificial Sequence: Synthetic coding sequence
  source 1..3009: mol_type = other DNA
atggccgcccacgagtgggactggttccagcgggaggagctgattggccagatcagtgacatccgggtgcagaacctgcaggtggagagagaaaatgtgcagaagaggaccttcacccgctggatcaacctgcacctggagaagtgcaacccccccctggaggtgaaggacctgtttgtggacatccaggacggcaagatcctgatggccctgctggaggtgctgagcggcaggaacctgctgcacgagtacaagagcagcagccaccgcatcttccggctgaacaacatcgccaaggccctgaagttcctggaggacagcaatgtgaagctggtgtccattgatgctgctgagattgctgatggcaaccccagcctggtgctgggcctcatctggaacatcatcctcttcttccagatcaaggagctgaccggcaacctgagcaggaacagccccagcagcagcctgagccctggcagcggcggcacagacagcgacagcagcttcccccccacccccacagctgagaggtctgtggccatctctgtgaaggaccagaggaaggccatcaaggccctgctggcctgggtgcagaggaagaccaggaaatatggagtggccgtgcaggactttgctggctcctggaggagcggcctggccttcctggccgtcatcaaggccatcgaccccagcctggtggacatgaagcaggccctggagaacagcacccgggagaacctggagaaggccttcagcatcgcccaggatgccctgcacatcccccggctgctggagcctgaggacatcatggtggacaccccagatgagcagagcatcatgacctacgtggcccagttcctggagcgcttccctgagctggaggccgaggacatctttgacagcgacaaggaggtgcccatcgagagcacctttgtgcgcatcaaggagaccccatctgagcaggagagcaaggtgtttgtgctgacagaaaatggagagaggacctacacagtgaaccacgagaccagccaccccccacccagcaaggtgtttgtgtgtgacaagccagagagcatgaaggagttccggctggatggagtgagcagccacgccctgagtgacagcagcacagagttcatgcaccagatcatcgaccaggtgctgcagggcggccctgggaagaccagtgacatcagcgagcccagccctgagagcagcatcctgagcagcaggaaagaaaatggccgcagcaacagcctgcccatcaagaagacagtgcactttgaggccgacacctacaaggaccccttctgcagcaagaacctgagcctgtgctttgagggcagcccccgggtggccaaggagagcctgcggcaggacggccacgtgctggccgtggaggtggccgaggagaaggagcagaagcaggagagcagcaagatccctgagagcagcagtgacaaggtggccggggacatcttcctggtggagggcaccaacaacaacagccagagcagcagctgcaatggagccctggagagcacagcccggcatgatgaggagagccacagcctgagccccccaggagagaacacagtgatggctgacagcttccagatcaaggtgaacctgatgacagtggaggccctggaggagggggactactttgaggccatccccctgaaggccagcaagttcaacagcgacctgattgactttgccagcaccagccaggccttcaacaaggtgcccagcccccatgagaccaagccagatgaagatgctgaggcctttgaaaatcatgctgagaagctgggcaagaggagcatcaagagcgcccacaagaagaaggacagccctgagccccaggtgaagatggacaagcatgagccccaccaggacagcggggaggaggccgagggctgccccagcgcccctgaggagacccctgtggacaagaagccagaggtgcatgagaaggccaagaggaagagcacccggccccactatgaggaggagggagaagatgatgacctgcagggcgtgggggaggagctgagcagcagcccccccagcagctgtgtgtccctggagaccctgggcagccacagcgaggagggcctggacttcaagcccagcccccccctgagcaaggtgtctgtcatcccccatgacctcttctacttcccccactatgaggtgcccctggccgctgtgctggaggcctacgtggaggaccctgaggacctgaagaatgaggagatggacctggaggagcctgagggctacatgccagacctggacagccgggaggaggaggctgatggcagccagagcagcagcagcagctctgtgcctggagagagcctgcccagcgccagtgaccaggtgctgtacctgagcagaggaggagtgggcaccaccccagccagcgagcccgcccccctggcccctcatgaggaccaccagcagcgggagaccaaggaaaatgaccccatggacagccaccagagccaggagagccccaacctggagaacatcgccaaccccctggaggagaatgtgaccaaggagagcatcagcagcaagaagaaggagaagaggaagcacgtggaccacgtggagagcagcctgtttgtggcccctggctctgtgcagagcagtgatgacctggaggaggacagcagtgactacagcatccccagcaggaccagccacagcgacagcagcatctacctgcggcggcacacccacaggagcagcgagagtgaccacttctcctatgtgcagctgagaaatgctgctgacctggatgacagaagaaaccgcatcctgaccaggaaggccaacagcagcggggaggccatgagcctgggcagccacagcccccagagcgacagcctgacccagctggtgcagcagcctgacatgatgtacttcatcctcttcctgtggctgctggtgtactgcctgctgctcttcccccagctggatgtgtcccggctgtag

SEQ ID NO: 145944 - DNA, 450 bp, synthetic construct
  misc_feature 1..450: note = Description of Artificial Sequence: Synthetic coding sequence
  source 1..450: mol_type = other DNA
atggctgaccagctgacagaggagcagattgctgagttcaaggaggccttcagcctgtttgacaaggatggagatggcaccatcaccaccaaggagctgggcaccgtgatgaggagcctgggccagaaccccacagaagctgagctgcaggacatgatcaatgaggtggatgctgatggaaatggcaccatcgacttccctgagttcctgaccatgatggccaggaagatgaaggacacagacagcgaggaggagatccgggaggccttccgggtgtttgacaaggatggaaatggctacatctctgctgctgagctgcggcacgtgatgaccaacctgggggagaagctgacagatgaggaggtggatgagatgatccgggaggccgacattgatggagatggccaggtgaactatgaggagtttgtgcagatgatgacagccaagtag

SEQ ID NO: 145945 - DNA, 450 bp, synthetic construct; identical to SEQ ID NO: 145944
  misc_feature 1..450: note = Description of Artificial Sequence: Synthetic coding sequence
  source 1..450: mol_type = other DNA

SEQ ID NO: 145946 - DNA, 450 bp, synthetic construct; identical to SEQ ID NO: 145944
  misc_feature 1..450: note = Description of Artificial Sequence: Synthetic coding sequence
  source 1..450: mol_type = other DNA

SEQ ID NO: 145947 - DNA, 450 bp, synthetic construct; identical to SEQ ID NO: 145944
  misc_feature 1..450: note = Description of Artificial Sequence: Synthetic coding sequence
  source 1..450: mol_type = other DNA

SEQ ID NO: 145948 - DNA, 5022 bp, synthetic construct
  misc_feature 1..5022: note = Description of Artificial Sequence: Synthetic coding sequence
  source 1..5022: mol_type = other DNA
atgtggagggctgagggcaagtggctgcccaagaccagcaggaagtctgtgtcccagagcgtcttctgtggcaccagcacctactgtgtgctgaacacagtgccccccattgaagatgaccacggcaacagcaacagcagccacgtgaagatcttcctgcccaagaagctgctggagtgcctgcccaagtgcagcagcctgcccaaggagcggcaccgctggaacaccaatgaggagattgctgcctacctgatcacctttgagaagcatgaggagtggctgaccaccagccccaagacccggccccagaatggctccatgatcctgtacaacaggaagaaggtgaagtacaggaaggatggctactgctggaagaagaggaaggatggcaagaccacccgggaggaccacatgaagctgaaggtgcagggcgtggagtgcctgtatggctgctacgtgcacagcagcatcatccccaccttccaccggcgctgctactggctgctgcagaacccagacatcgtgctggtgcactacctgaatgtgcctgccatcgaggactgtgggaagccctgtggccccatcctgtgcagcatcaacacagacaagaaggagtgggccaagtggaccaaggaggagctgattggccagctgaagcccatgtttcatggcatcaagtggacctgcagcaatggaaacagcagcagcggcttctctgtggagcagctggtgcagcagatcctggacagccaccagaccaagccccagcccaggacccacaactgcctgtgcaccggcagcctgggcgctgggggctctgtgcaccacaagtgcaacagcgccaagcaccgcatcatcagccccaaggtggagcccaggactggaggctacggcagccacagcgaggtgcagcacaatgatgtgtctgagggcaagcatgagcacagccacagcaagggcagcagccgggagaagagaaatggcaaggtggccaagcctgtgctgctgcaccagagcagcacagaggtgagcagcaccaaccaggtggaggtgcctgacaccacccagagcagccctgtgtccatcagcagcggcctgaacagcgaccctgacatggtggacagccctgtggtgactggagtgtctggcatggctgtggcctctgtgatgggcagcctgagccagagcgccaccgtcttcatgtctgaggtgaccaatgaggccgtgtacaccatgagccccacagctggccccaaccaccacctgctgagcccagatgccagccagggcctggtgctggccgtgtccagtgatggccacaagtttgccttccccaccaccggcagcagcgagagcctgtccatgctgcccaccaacgtgtctgaggagctggtgctgagcaccaccctggatggcggcaggaagatccctgagaccaccatgaactttgatcctgactgcttcctgaacaaccccaagcagggccagacctacggcggcggcggcctgaaggccgagatggtgagcagcaacatccgccacagccccccaggagagaggagcttctccttcaccaccgtgctgaccaaggagatcaagacagaggacaccagctttgagcagcagatggccaaggaggcctacagcagcagcgctgctgctgtggccgccagcagcctgaccctgacagctggcagcagcctgctgcccagcggcggcggcctgagccccagcaccaccctggagcagatggacttcagcgccatcgacagcaacaaggactacaccagcagcttcagccagacaggccacagcccccacatccaccagacccccagccccagcttcttcctgcaggatgccagcaagcccctgcctgtggagcagaacacccacagcagcctgagtgacagcggcggcacctttgtgatgcccaccgtgaagacagaggccagcagccagaccagcagctgcagcggccacgtggagacccgcatcgagagcaccagcagcctgcacctgatgcagttccaggccaacttccaggccatgacagctgagggggaggtgaccatggagaccagccaggccgctgagggcagcgaggtgctgctgaagtctggagagctgcaggcctgcagcagcgagcactacctgcagcctgagaccaacggggtcatccgctctgctgggggcgtgcccatcctgcctggaaatgtggtgcagggcctgtaccctgtggcccagcccagcctgggcaatgccagcaacatggagctgagcctggaccactttgacatctccttcagcaaccagttcagtgacctgatcaatgacttcatctctgtggagggcggcagcagcaccatctacggccaccagctggtgtctggggacagcacagccctgagccagagtgaagatggagcccgggcccccttcacccaggccgagatgtgcctgccctgctgcagcccccagcagggcagcctgcagctgagcagcagcgagggcggggccagcaccatggcctacatgcacgtggccgaggtggtgtctgctgccagcgcccagggcaccctgggcatgctgcagcagagcggccgggtcttcatggtgacagactacagccctgagtggagctacccagagggcggcgtgaaggtgctgatcaccggcccctggcaggaggccagcaacaactacagctgcctgtttgaccagatctctgtgcctgccagcctcatccagcccggggtgctgcgctgctactgcccagcccatgacaccggcctggtgaccctgcaggtggccttcaacaaccagatcatcagcaacagcgtggtgtttgagtacaaggcccgggccctgcccaccctgcccagcagccagcacgactggctgagcctggatgacaaccagttcaggatgagcatcctggagcggctggagcagatggagaggaggatggccgagatgacaggcagccagcagcacaagcaggccagcggcggcggcagcagcggcggcggcagcggcagcggaaatggaggcagccaggcccagtgtgccagcggcactggagccctgggcagctgctttgagagccgggtggtggtggtgtgtgagaagatgatgagccgggcctgctgggccaagagcaagcacctgatccacagcaagaccttccggggcatgaccctgctgcacctggccgccgcccagggctacgccaccctcatccagaccctcatcaagtggaggaccaagcacgccgacagcattgacctggagctggaggtggaccccctgaatgtggaccacttcagctgcacccccctgatgtgggcctgtgccctgggccacctggaggccgctgtggtgctgtacaagtgggaccggcgggccatcagcatcccagacagcctgggccgcctgcccctgggcatcgcccggagccggggccacgtgaagctggctgaatgtctggagcacctgcagagagatgagcaggcccagctgggccagaacccccgcatccactgcccagccagcgaggagcccagcacagagagctggatggcccagtggcacagcgaggccatcagcagccctgagatccccaagggcgtgaccgtcatcgccagcaccaaccctgagctgcggcggcccaggtctgagcccagcaactactacagcagcgagagccacaaggactacccagcccccaagaagcacaagctgaaccctgagtacttccagacccggcaggagaagctgctgcccacagccctgagcctggaggagcccaacatcaggaagcagagccccagcagcaagcagagcgtgcctgagaccctgagccccagcgagggcgtgcgggacttcagccgggagctgagcccccccaccccagagacagctgccttccaggccagcggcagccagcctgtgggcaagtggaacagcaaggacctgtacatcggcgtgtccacagtgcaggtgacaggcaaccccaagggcacctctgtgggcaaggaggccgcccccagccaggtgcggccccgggagcccatgtctgtgctgatgatggccaaccgggaggtggtgaacacagagctgggcagctacagagacagcgcagaaaatgaagaatgtggccagcccatggatgacatccaggtgaacatgatgaccctggccgagcacatcatcgaggccaccccagaccgcatcaagcaggagaactttgtgcccatggagagcagcggcctggagaggacagatcctgccaccatcagcagcaccatgtcctggctggccagctacctggctgatgctgactgcctgcccagcgctgcccagatccgcagcgcctacaatgagcccctgacccccagcagcaacaccagcctgagccctgtgggcagccctgtgtctgagatcgcctttgagaagcccaacctgcccagcgctgctgactggagcgagttcctgagcgccagcaccagcgagaaggtggagaatgaatttgcccagctgaccctgagtgaccacgagcagcgggagctgtatgaagctgcccggctggtgcagacagccttcaggaagtacaagggccggcccctgcgggagcagcaggaggtggccgccgccgtcatccagcgctgctacaggaagtacaagcagtatgccctgtacaagaagatgacccaggccgccatcctgatccagagcaagttccgcagctactatgagcagaagaagttccagcagagccggcgggctgctgtgctgatccagaagtactaccgcagctacaagaagtgtgggaagaggcggcaggccaggagaacagctgtgattgtgcagcagaagctgcggagcagcctgctgaccaagaagcaggaccaggccgccaggaagatcatgaggttcctgcggcgctgccgccacagccccctggtggaccaccggctgtacaagagaagtgaaagaattgagaagggccagggcacctag

SEQ ID NO: 145949 - DNA, 1911 bp, synthetic construct
  misc_feature 1..1911: note = Description of Artificial Sequence: Synthetic coding sequence
  source 1..1911: mol_type = other DNA
atgatgagccgggcctgctgggccaagagcaagcacctgatccacagcaagaccttccggggcatgaccctgctgcacctggccgccgcccagggctacgccaccctcatccagaccctcatcaagtggaggaccaagcacgccgacagcattgacctggagctggaggtggaccccctgaatgtggaccacttcagctgcacccccctgatgtgggcctgtgccctgggccacctggaggccgctgtggtgctgtacaagtgggaccggcgggccatcagcatcccagacagcctgggccgcctgcccctgggcatcgcccggagccggggccacgtgaagctggctgaatgtctggagcacctgcagagagatgagcaggcccagctgggccagaacccccgcatccactgcccagccagcgaggagcccagcacagagagctggatggcccagtggcacagcgaggccatcagcagccctgagatccccaagggcgtgaccgtcatcgccagcaccaaccctgagctgcggcggcccaggtctgagcccagcaactactacagcagcgagagccacaaggactacccagcccccaagaagcacaagctgaaccctgagtacttccagacccggcaggagaagctgctgcccacagccctgagcctggaggagcccaacatcaggaagcagagccccagcagcaagcagagcgtgcctgagaccctgagccccagcgagggcgtgcgggacttcagccgggagctgagcccccccaccccagagacagctgccttccaggccagcggcagccagcctgtgggcaagtggaacagcaaggacctgtacatcggcgtgtccacagtgcaggtgacaggcaaccccaagggcacctctgtgggcaaggaggccgcccccagccaggtgcggccccgggagcccatgtctgtgctgatgatggccaaccgggaggtggtgaacacagagctgggcagctacagagacagcgcagaaaatgaagaatgtggccagcccatggatgacatccaggtgaacatgatgaccctggccgagcacatcatcgaggccaccccagaccgcatcaagcaggagaactttgtgcccatggagagcagcggcctggagaggacagatcctgccaccatcagcagcaccatgtcctggctggccagctacctggctgatgctgactgcctgcccagcgctgcccagatccgcagcgcctacaatgagcccctgacccccagcagcaacaccagcctgagccctgtgggcagccctgtgtctgagatcgcctttgagaagcccaacctgcccagcgctgctgactggagcgagttcctgagcgccagcaccagcgagaaggtggagaatgaatttgcccagctgaccctgagtgaccacgagcagcgggagctgtatgaagctgcccggctggtgcagacagccttcaggaagtacaagggccggcccctgcgggagcagcaggaggtggccgccgccgtcatccagcgctgctacaggaagtacaagcagggcaagaacatctgcctgaagtatgccctgtacaagaagatgacccaggccgccatcctgatccagagcaagttccgcagctactatgagcagaagaagttccagcagagcagaagagctgctgtgctgatccagaagtactaccgcagctacaagaagtgtgggaagaggcggcaggcccggaggacagctgtgattgtgcagcagaagctgcggagcagcctgctgaccaagaagcaggaccaggccgccaggaagatcatgaggttcctgcggcgctgccgccaccgggtgaaggagctgaagaaggccaaggagctggaggacatccagcagcaccccctggccatgtag

SEQ ID NO: 145950 - DNA, 2151 bp, synthetic construct
  misc_feature 1..2151: note = Description of Artificial Sequence: Synthetic coding sequence
  source 1..2151: mol_type = other DNA
atggcctgccctgtgtccccagaccacaagcaggagggcgcccatgacaccggcctggtgaccctgcaggtggccttcaacaaccagatcatcagcaacagcgtggtgtttgagtacaaggcccgggccctgcccaccctgcccagcagccagcacgactggctgagcctggatgacaaccagttcaggatgagcatcctggagcggctggagcagatggagaggaggatggccgagatgacaggcagccagcagcacaagcaggccagcggcggcggcagcagcggcggcggcagcggcagcggaaatggaggcagccaggcccagtgtgccagcggcaccggggccctgggcagctgctttgagagccgggtggtggtggtgtgtgagaagatgatgagccgggcctgctgggccaagagcaagcacctgatccacagcaagaccttccggggcatgaccctgctgcacctggccgccgcccagggctacgccaccctcatccagaccctcatcaagtggaggaccaagcatgctgacagcattgacctggagctggaggtggaccccctgaatgtggaccacttcagctgcacccccctgatgtgggcctgtgccctgggccacctggaggccgctgtggtgctgtacaagtgggacagaagagccatcagcatcccagacagcctgggccgcctgcccctgggcatcgcccggagccggggccacgtgaagctggccgagtgcctggagcacctgcagagagatgagcaggcccagctgggccagaacccccgcatccactgcccagccagcgaggagcccagcacagagagctggatggcccagtggcacagcgaggccatcagcagccctgagatccccaagggcgtgacagtgattgccagcaccaaccctgagctgcggcggcccaggtctgagcccagcaactactacagcagcgagagccacaaggactacccagcccccaagaagcacaagctgaaccctgagtacttccagacccggcaggagaagctgctgcccacagccctgagcctggaggagcccaacatcaggaagcagagccccagcagcaagcagagcgtgcctgagaccctgagccccagcgagggcgtgcgggacttcagccgggagctgagcccccccaccccagagacagctgccttccaggccagcggcagccagcctgtgggcaagtggaacagcaaggacctgtacatcggcgtgtccacagtgcaggtgactggaaaccccaagggcacctctgtgggcaaggaggccgcccccagccaggtgcggccccgggagcccatgtctgtgctgatgatggccaaccgggaggtggtgaacacagagctgggcagctacagagattctgcagaaaatgaggagtgtggccagcccatggatgacatccaggtgaacatgatgaccctggccgagcacatcatcgaggccaccctgagcagcaccatgtcctggctggccagctacctggctgatgctgactgcctgcccagcgctgcccagatccgcagcgcctacaatgagcccctgacccccagcagcaacaccagcctgagccctgtgggcagccctgtgtctgaaattgcctttgagaaggtggagaatgaatttgcccagctgaccctgagtgaccacgagcagcgggagctgtatgaggccgcccggctggtgcagacagccttcaggaagtacaagggccggcccctgcgggagcagcaggaggtggccgctgctgtgatccagcgctgctacaggaagtacaagcagtatgccctgtacaagaagatgacccaggccgccatcctgatccagagcaagttccgcagctactatgagcagaagaagttccagcagagcagaagagctgctgtgctgatccagaagtactaccgcagctacaagaagtgtgggaagaggcggcaggcccggaggacagctgtgattgtgcagcagaagctgcggagcagcctgctgaccaagaagcaggaccaggccgccaggaagatcatgaggttcctgcggcgctgccgccaccgggtgaaggagctgaagaaggccaaggagctggaggacatccagcagcaccccctggccatgtag

SEQ ID NO: 145951 - DNA, 4980 bp, synthetic construct
  misc_feature 1..4980: note = Description of Artificial Sequence: Synthetic coding sequence
  source 1..4980: mol_type = other DNA
atgtggagggctgagggcaagtggctgcccaagaccagcaggaagtctgtgtcccagagcgtcttctgtggcaccagcacctactgtgtgctgaacacagtgccccccattgaagatgaccacggcaacagcaacagcagccacgtgaagatcttcctgcccaagaagctgctggagtgcctgcccaagtgcagcagcctgcccaaggagcggcaccgctggaacaccaatgaggagattgctgcctacctgatcacctttgagaagcatgaggagtggctgaccaccagccccaagacccggccccagaatggctccatgatcctgtacaacaggaagaaggtgaagtacaggaaggatggctactgctggaagaagaggaaggatggcaagaccacccgggaggaccacatgaagctgaaggtgcagggcgtggagtgcctgtatggctgctacgtgcacagcagcatcatccccaccttccaccggcgctgctactggctgctgcagaacccagacatcgtgctggtgcactacctgaatgtgcctgccatcgaggactgtgggaagccctgtggccccatcctgtgcagcatcaacacagacaagaaggagtgggccaagtggaccaaggaggagctgattggccagctgaagcccatgtttcatggcatcaagtggacctgcagcaatggaaacagcagcagcggcttctctgtggagcagctggtgcagcagatcctggacagccaccagaccaagccccagcccaggacccacaactgcctgtgcaccggcagcctgggcgctgggggctctgtgcaccacaagtgcaacagcgccaagcaccgcatcatcagccccaaggtggagcccaggactggaggctacggcagccacagcgaggtgcagcacaatgatgtgtctgagggcaagcatgagcacagccacagcaagggcagcagccgggagaagagaaatggcaaggtggccaagcctgtgctgctgcaccagagcagcacagaggtgagcagcaccaaccaggtggaggtgcctgacaccacccagagcagccctgtgtccatcagcagcggcctgaacagcgaccctgacatggtggacagccctgtggtgactggagtgtctggcatggctgtggcctctgtgatgggcagcctgagccagagcgccaccgtcttcatgtctgaggtgaccaatgaggccgtgtacaccatgagccccacagctggccccaaccaccacctgctgagcccagatgccagccagggcctggtgctggccgtgtccagtgatggccacaagtttgccttccccaccaccggcagcagcgagagcctgtccatgctgcccaccaacgtgtctgaggagctggtgctgagcaccaccctggatggcggcaggaagatccctgagaccaccatgaactttgatcctgactgcttcctgaacaaccccaagcagggccagacctacggcggcggcggcctgaaggccgagatggtgagcagcaacatccgccacagccccccaggagagaggagcttctccttcaccaccgtgctgaccaaggagatcaagacagaggacaccagctttgagcagcagatggccaaggaggcctacagcagcagcgctgctgctgtggccgccagcagcctgaccctgacagctggcagcagcctgctgcccagcggcggcggcctgagccccagcaccaccctggagcagatggacttcagcgccatcgacagcaacaaggactacaccagcagcttcagccagacaggccacagcccccacatccaccagacccccagccccagcttcttcctgcaggatgccagcaagcccctgcctgtggagcagaacacccacagcagcctgagtgacagcggcggcacctttgtgatgcccaccgtgaagacagaggccagcagccagaccagcagctgcagcggccacgtggagacccgcatcgagagcaccagcagcctgcacctgatgcagttccaggccaacttccaggccatgacagctgagggggaggtgaccatggagaccagccaggccgctgagggcagcgaggtgctgctgaagtctggagagctgcaggcctgcagcagcgagcactacctgcagcctgagaccaacggggtcatccgctctgctgggggcgtgcccatcctgcctggaaatgtggtgcagggcctgtaccctgtggcccagcccagcctgggcaatgccagcaacatggagctgagcctggaccactttgacatctccttcagcaaccagttcagtgacctgatcaatgacttcatctctgtggagggcggcagcagcaccatctacggccaccagctggtgtctggggacagcacagccctgagccagagtgaagatggagcccgggcccccttcacccaggccgagatgtgcctgccctgctgcagcccccagcagggcagcctgcagctgagcagcagcgagggcggggccagcaccatggcctacatgcacgtggccgaggtggtgtctgctgccagcgcccagggcaccctgggcatgctgcagcagagcggccgggtcttcatggtgacagactacagccctgagtggagctacccagagggcggcgtgaaggtgctgatcaccggcccctggcaggaggccagcaacaactacagctgcctgtttgaccagatctctgtgcctgccagcctcatccagcccggggtgctgcgctgctactgcccagcccatgacaccggcctggtgaccctgcaggtggccttcaacaaccagatcatcagcaacagcgtggtgtttgagtacaaggcccgggccctgcccaccctgcccagcagccagcacgactggctgagcctggatgacaaccagttcaggatgagcatcctggagcggctggagcagatggagaggaggatggccgagatgacaggcagccagcagcacaagcaggccagcggcggcggcagcagcggcggcggcagcggcagcggaaatggaggcagccaggcccagtgtgccagcggcactggagccctgggcagctgctttgagagccgggtggtggtggtgtgtgagaagatgatgagccgggcctgctgggccaagagcaagcacctgatccacagcaagaccttccggggcatgaccctgctgcacctggccgccgcccagggctacgccaccctcatccagaccctcatcaagtggaggaccaagcacgccgacagcattgacctggagctggaggtggaccccctgaatgtggaccacttcagctgcacccccctgatgtgggcctgtgccctgggccacctggaggccgctgtggtgctgtacaagtgggaccggcgggccatcagcatcccagacagcctgggccgcctgcccctgggcatcgcccggagccggggccacgtgaagctggctgaatgtctggagcacctgcagagagatgagcaggcccagctgggccagaacccccgcatccactgcccagccagcgaggagcccagcacagagagctggatggcccagtggcacagcgaggccatcagcagccctgagatccccaagggcgtgaccgtcatcgccagcaccaaccctgagctgcggcggcccaggtctgagcccagcaactactacagcagcgagagccacaaggactacccagcccccaagaagcacaagctgaaccctgagtacttccagacccggcaggagaagctgctgcccacagccctgagcctggaggagcccaacatcaggaagcagagccccagcagcaagcagagcgtgcctgagaccctgagccccagcgagggcgtgcgggacttcagccgggagctgagcccccccaccccagagacagctgccttccaggccagcggcagccagcctgtgggcaagtggaacagcaaggacctgtacatcggcgtgtccacagtgcaggtgacaggcaaccccaagggcacctctgtgggcaaggaggccgcccccagccaggtgcggccccgggagcccatgtctgtgctgatgatggccaaccgggaggtggtgaacacagagctgggcagctacagagacagcgcagaaaatgaagaatgtggccagcccatggatgacatccaggtgaacatgatgaccctggccgagcacatcatcgaggccaccccagaccgcatcaagcaggagaactttgtgcccatggagagcagcggcctggagaggacagatcctgccaccatcagcagcaccatgtcctggctggccagctacctggctgatgctgactgcctgcccagcgctgcccagatccggctgagccctgtgggcagccctgtgtctgagatcgcctttgagaagcccaacctgcccagcgctgctgactggagcgagttcctgagcgccagcaccagcgagaaggtggagaatgaatttgcccagctgaccctgagtgaccacgagcagcgggagctgtatgaagctgcccggctggtgcagacagccttcaggaagtacaagggccggcccctgcgggagcagcaggaggtggccgccgccgtcatccagcgctgctacaggaagtacaagcagtatgccctgtacaagaagatgacccaggccgccatcctgatccagagcaagttccgcagctactatgagcagaagaagttccagcagagccggcgggctgctgtgctgatccagaagtactaccgcagctacaagaagtgtgggaagaggcggcaggccaggagaacagctgtgattgtgcagcagaagctgcggagcagcctgctgaccaagaagcaggaccaggccgccaggaagatcatgaggttcctgcggcgctgccgccaccgggtgaaggagctgaagaaggccaaggagctggaggacatccagcagcaccccctggccatgtag

SEQ ID NO: 145952 - DNA, 243 bp, synthetic construct
  misc_feature 1..243: note = Description of Artificial Sequence: Synthetic coding sequence
  source 1..243: mol_type = other DNA
atgtggagggctgagggcaagtggctgcccaagaccagcaggaagtctgtgtcccagagcgtcttctgtggcaccagcacctactgtgtgctgaacacagtgccccccattgaagatgaccacggcaacagcaacagcagccacgtgaagatcttcctgcccaagaagctgctggagtgcctgcccaagtgcagcagcctgcccaaggagcggcaccgctggaacaccaatgaaagaagctag

SEQ ID NO: 145953 - DNA, 306 bp, synthetic construct
  misc_feature 1..306: note = Description of Artificial Sequence: Synthetic coding sequence
  source 1..306: mol_type = other DNA
atgtggagggctgagggcaagtggctgcccaagaccagcaggaagtctgtgtcccagagcgtcttctgtggcaccagcacctactgtgtgctgaacacagtgccccccattgaagatgaccacggcaacagcaacagcagccacgtgaagatcttcctgcccaagaagctgctggagtgcctgcccaagtgcagcagcctgcccaaggagcggcaccgctggaacaccaatgaggccctgaccacccacctgttcatgggcgccgccaagaagagggacccccagagctggagccatgagggctag

SEQ ID NO: 145954 - DNA, 3609 bp, synthetic construct
  misc_feature 1..3609: note = Description of Artificial Sequence: Synthetic coding sequence
  source 1..3609: mol_type = other DNA
atgaacaccaaggacaccacagaggtggccgagaacagccaccacctgaagatcttcctgcccaagaagctgctggagtgcctgccccgctgccccctgctgcccccagagcggctgcgctggaacaccaatgaggagatcgccagctacctgatcacctttgagaagcatgatgagtggctgagctgtgcccccaagacccggccccagaatggcagcatcatcctgtacaacaggaagaaggtgaagtacaggaaggatggctacctgtggaagaagaggaaggatggcaagaccacccgggaggaccacatgaagctgaaggtgcagggcatggagtgcctgtatggctgctacgtgcacagcagcatcgtgcccaccttccaccggcgctgctactggctgctgcagaacccagacatcgtgctggtgcactacctgaatgtgcctgccctggaggactgtgggaagggctgcagccccatcttctgcagcatcagcagtgaccggcgggagtggctgaagtggagccgggaggagctgctgggccagctgaagcccatgttccacggcatcaagtggagctgtggaaatggaacagaggagttctctgtggagcacctggtgcagcagatcctggacacccaccccaccaagccagcccccaggacccacgcctgcctgtgcagcggcggcctgggcagcggcagcctgacccacaagtgcagcagcaccaagcaccgcatcatcagccccaaggtggagccccgggccctgaccctgaccagcatcccccacgcccaccccccagagcccccacccctcatcgcccccctgcccccagagctgcccaaggcccacaccagccccagcagcagcagcagcagcagcagcagcggctttgctgagcccctggagatccggcccagcccccccaccagccggggcggcagcagcagaggaggaacagccatcctgctgctgaccggcctggagcagagagctgggggcctgacccccaccaggcacctggccccccaggccgacccccggcccagcatgagcctggccgtggtggtgggcacagagcccagcgcccccccagccccacccagccctgcctttgatcctgaccgcttcctgaacagcccccagaggggccagacctacggcggcggccagggcgtgtccccagacttccctgaggccgaggccgcccacaccccctgcagcgccctggagcctgctgctgccctggagccccaggccgccgcccggggccccccaccccagagcgtggccggcggcagaagaggcaactgcttcttcatccaggatgatgattctggagaggagctgaagggccacggggccgccccacccatccccagccccccacccagccccccacccagccctgcccccctggagcccagcagccgggtgggccgcggggaggccctgtttggaggccctgtgggcgccagcgagctggagcccttcagcctgagcagcttcccagacctgatgggagagctgatcagtgatgaggcccccagcatcccagcccccaccccccagctgagccctgccctgagcaccatcacagacttcagccctgagtggagctacccagagggcggcgtgaaggtgctgatcaccggcccctggacagaggccgctgagcactacagctgtgtgtttgaccacatcgctgtgcctgccagcctggtgcagcccggggtgctgcgctgctactgcccagcccacgaggtgggcctggtgtccctgcaggtggccggccgggagggccccctgagcgcctctgtgctgtttgagtaccgggcccggcgcttcctgagcctgcccagcacccagctggactggctgagcctggatgacaaccagttcaggatgagcatcctggagcggctggagcagatggagaagaggatggccgagattgctgctgctggccaggtgccctgccagggcccagatgcccctcctgtgcaggatgagggccagggccctggctttgaggcccgggtggtggtgctggtggagagcatgatccccaggagcacctggaagggccctgagcggctggcccacggcagccccttccggggcatgagcctgctgcacctggccgccgcccagggctacgcccggctgattgagaccctgagccagtggaggtctgtggagaccggcagcctggacctggagcaggaggtggaccccctgaatgtggaccacttcagctgcacccccctgatgtgggcctgtgccctgggccacctggaggccgctgtgctgctcttccgctggaaccggcaggccctgagcatcccagacagcctgggccgcctgcccctgtctgtggcccacagccggggccacgtgcggctggcccgctgcctggaggagctgcagaggcaggagcccagcgtggagcccccatttgccctgagcccccccagcagcagcccagacaccggcctgagctctgtgagcagccccagcgagctgagtgatggcaccttctctgtgaccagcgcctacagcagcgccccagatggcagccccccaccagcccccctgcctgccagcgagatgaccatggaggacatggcccctggccagctgagcagcggcgtgcctgaggcccccctgctgctgatggactatgaggccaccaacagcaagggccccctgagcagcctgcctgccctgcccccagccagtgatgatggagctgccccagaagatgctgacagcccccaggccgtggatgtgattcctgtggacatgatcagcctggccaagcagatcatcgaggccaccccagagcgcatcaagagagaagattttgtgggcctgcctgaggccggggcctccatgagggagaggactggagctgtgggcctgtctgagaccatgtcctggctggccagctacctggagaatgtggaccacttccccagcagcaccccacccagcgagctgccctttgagcggggccgcctggccgtgcccagcgcccccagctgggccgagttcctgagcgccagcaccagcggcaagatggagagtgactttgccctgctgaccctgagtgaccacgagcagcgggagctgtatgaagctgcccgggtcatccagacagccttcaggaagtacaagggccgccgcctgaaggagcagcaggaggtggccgccgccgtcatccagcgctgctacaggaagtacaagcagctgacctggatcgccctgaagtttgccctgtacaagaagatgacccaggccgccatcctgatccagagcaagttccgcagctactatgagcagaagcgcttccagcagagcagaagagctgctgtgctgatccagcagcactaccgcagctacagaagaagacctggccccccccacaggaccagcgccaccctgcctgccagaaataaaggcagcttcctgaccaagaagcaggaccaggccgccaggaagatcatgaggttcctgcggcgctgccgccacaggatgagggagctgaagcagaaccaggagctggagggcctgccccagcccggcctggccacctag

SEQ ID NO: 145955 - DNA, 3588 bp, synthetic construct
  misc_feature 1..3588: note = Description of Artificial Sequence: Synthetic coding sequence
  source 1..3588: mol_type = other DNA
atgaacaccaaggacaccacagaggtggccgagaacagccaccacctgaagatcttcctgcccaagaagctgctggagtgcctgccccgctgccccctgctgcccccagagcggctgcgctggaacaccaatgaggagatcgccagctacctgatcacctttgagaagcatgatgagtggctgagctgtgcccccaagacccggccccagaatggcagcatcatcctgtacaacaggaagaaggtgaagtacaggaaggatggctacctgtggaagaagaggaaggatggcaagaccacccgggaggaccacatgaagctgaaggtgcagggcatggagtgcctgtatggctgctacgtgcacagcagcatcgtgcccaccttccaccggcgctgctactggctgctgcagaacccagacatcgtgctggtgcactacctgaatgtgcctgccctggaggactgtgggaagggctgcagccccatcttctgcagcatcagcagtgaccggcgggagtggctgaagtggagccgggaggagctgctgggccagctgaagcccatgttccacggcatcaagtggagctgtggaaatggaacagaggagttctctgtggagcacctggtgcagcagatcctggacacccaccccaccaagccagcccccaggacccacgcctgcctgtgcagcggcggcctgggcagcggcagcctgacccacaagtgcagcagcaccaagcaccgcatcatcagccccaaggtggagccccgggccctgaccctgaccagcatcccccacgcccaccccccagagcccccacccctcatcgcccccctgcccccagagctgcccaaggcccacaccagccccagcagcagcagcagcagcagcagcagcggctttgctgagcccctggagatccggcccagcccccccaccagccggggcggcagcagcagaggaggaacagccatcctgctgctgaccggcctggagcagagagctgggggcctgacccccaccaggcacctggccccccaggccgacccccggcccagcatgagcctggccgtggtggtgggcacagagcccagcgcccccccagccccacccagccctgcctttgatcctgaccgcttcctgaacagcccccagaggggccagacctacggcggcggccagggcgtgtccccagacttccctgaggccgaggccgcccacaccccctgcagcgccctggagcctgctgctgccctggagccccaggccgccgcccggggccccccaccccagagcgtggccggcggcagaagaggcaactgcttcttcatccaggatgatgattctggagaggagctgaagggccacggggccgccccacccatccccagccccccacccagccccccacccagccctgcccccctggagcccagcagccgggtgggccgcggggaggccctgtttggaggccctgtgggcgccagcgagctggagcccttcagcctgagcagcttcccagacctgatgggagagctgatcagtgatgaggcccccagcatcccagcccccaccccccagctgagccctgccctgagcaccatcacagacttcagccctgagtggagctacccagagggcggcgtgaaggtgctgatcaccggcccctggacagaggccgctgagcactacagctgtgtgtttgaccacatcgctgtgcctgccagcctggtgcagcccggggtgctgcgctgctactgcccagcccacgaggtgggcctggtgtccctgcaggtggccggccgggagggccccctgagcgcctctgtgctgtttgagtaccgggcccggcgcttcctgagcctgcccagcacccagctggactggctgagcctggatgacaaccagttcaggatgagcatcctggagcggctggagcagatggagaagaggatggccgagattgctgctgctggccaggtgccctgccagggcccagatgcccctcctgtgcaggatgagggccagggccctggctttgaggcccgggtggtggtgctggtggagagcatgatccccaggagcacctggaagggccctgagcggctggcccacggcagccccttccggggcatgagcctgctgcacctggccgccgcccagggctacgcccggctgattgagaccctgagccagtggaggtctgtggagaccggcagcctggacctggagcaggaggtggaccccctgaatgtggaccacttcagctgcacccccctgatgtgggcctgtgccctgggccacctggaggccgctgtgctgctcttccgctggaaccggcaggccctgagcatcccagacagcctgggccgcctgcccctgtctgtggcccacagccggggccacgtgcggctggcccgctgcctggaggagctgcagaggcaggagcccagcgtggagcccccatttgccctgagcccccccagcagcagcccagacaccggcctgagctctgtgagcagccccagcgagctgagtgatggcaccttctctgtgaccagcgcctacagcagcgccccagatggcagccccccaccagcccccctgcctgccagcgagatgaccatggaggacatggcccctggccagctgagcagcggcgtgcctgaggcccccctgctgctgatggactatgaggccaccaacagcaagggccccctgagcagcctgcctgccctgcccccagccagtgatgatggagctgccccagaagatgctgacagcccccaggccgtggatgtgattcctgtggacatgatcagcctggccaagcagatcatcgaggccaccccagagcgcatcaagagagaagattttgtgggcctgcctgaggccggggcctccatgagggagaggactggagctgtgggcctgtctgagaccatgtcctggctggccagctacctggagaatgtggaccacttccccagcagcaccccacccagcgagctgccctttgagcggggccgcctggccgtgcccagcgcccccagctgggccgagttcctgagcgccagcaccagcggcaagatggagagtgactttgccctgctgaccctgagtgaccacgagcagcgggagctgtatgaagctgcccgggtcatccagacagccttcaggaagtacaagggccgccgcctgaaggagcagcaggaggtggccgccgccgtcatccagcgctgctacaggaagtacaagcagtttgccctgtacaagaagatgacccaggccgccatcctgatccagagcaagttccgcagctactatgagcagaagcgcttccagcagagccggcgggctgctgtgctgatccagcagcactaccgcagctacagaagaagacctggccccccccacaggaccagcgccaccctgcctgccaggaacaagggcagcttcctgaccaagaagcaggaccaggccgccaggaagatcatgaggttcctgcggcgctgccgccacaggatgagggagctgaagcagaaccaggagctggagggcctgccccagcccggcctggccacctag

SEQ ID NO: 145956 - DNA, 3606 bp, synthetic construct
  misc_feature 1..3606: note = Description of Artificial Sequence: Synthetic coding sequence
  source 1..3606: mol_type = other DNA
atgggcacagacagccccagcccccggcccctgcggcctggggtgaccctgcccccaggggccctgaccatgaacaccaaggacaccacagaggtggccgagaacagccaccacctgaagatcttcctgcccaagaagctgctggagtgcctgccccgctgccccctgctgcccccagagcggctgcgctggaacaccaatgaggagatcgccagctacctgatcacctttgagaagcatgatgagtggctgagctgtgcccccaagacccggccccagaatggcagcatcatcctgtacaacaggaagaaggtgaagtacaggaaggatggctacctgtggaagaagaggaaggatggcaagaccacccgggaggaccacatgaagctgaaggtgcagggcatggagaacccagacatcgtgctggtgcactacctgaatgtgcctgccctggaggactgtgggaagggctgcagccccatcttctgcagcatcagcagtgacagaagagagtggctgaagtggagccgggaggagctgctgggccagctgaagcccatgtttcatggcatcaagtggagctgtggaaatggaacagaggagttctctgtggagcacctggtgcagcagatcctggacacccaccccaccaagccagcccccaggacccacgcctgcctgtgcagcggcggcctgggcagcggcagcctgacccacaagtgcagcagcaccaagcaccgcatcatcagccccaaggtggagccccgggccctgaccctgaccagcatcccccacgcccaccccccagagcccccacccctgattgcccccctgcccccagagctgcccaaggcccacaccagccccagcagcagcagcagcagcagcagcagcggctttgctgagcccctggagatccggcccagcccccccaccagcagaggaggcagcagccggggcggcacagccatcctgctgctgaccggcctggagcagagagctgggggcctgacccccaccaggcacctggccccccaggccgacccccggcccagcatgagcctggccgtggtggtgggcacagagcccagcgcccccccagccccacccagccctgcctttgatcctgaccgcttcctgaacagcccccagaggggccagacctatggaggcggccagggcgtgtccccagacttccctgaggccgaggccgcccacaccccctgcagcgccctggagcctgctgctgccctggagccccaggccgccgcccggggccccccaccccagagcgtggccggcggccggcggggcaactgcttcttcatccaggatgatgacagcggggaggagctgaagggccatggagctgccccacccatccccagccccccacccagccccccacccagccctgcccccctggagcccagcagccgggtgggccgcggggaggccctgtttggaggccctgtgggcgccagcgagctggagcccttcagcctgagcagcttcccagacctgatgggagagctgatcagtgatgaggcccccagcatcccagcccccaccccccagctgagccctgccctgagcaccatcacagacttcagccctgagtggagctacccagagggcggcgtgaaggtgctgatcaccggcccctggacagaagctgctgagcactacagctgtgtgtttgaccacatcgctgtgcctgccagcctggtgcagcccggggtgctgcgctgctactgcccagcccacgaggtgggcctggtgtccctgcaggtggccggccgggagggccccctgagcgcctctgtgctgtttgagtaccgggcccggcgcttcctgagcctgcccagcacccagctggactggctgagcctggatgacaaccagttcaggatgagcatcctggagcggctggagcagatggagaagaggatggccgagattgctgctgctggccaggtgccctgccagggcccagatgcccctcctgtgcaggatgagggccagggccctggctttgaggcccgggtggtggtgctggtggagagcatgatccccaggagcacctggaagggccctgagcggctggcccacggcagccccttccggggcatgagcctgctgcacctggccgccgcccagggctacgcccggctcatcgagaccctgagccagtggaggtctgtggagaccggcagcctggacctggagcaggaggtggaccccctgaatgtggaccacttcagctgcacccccctgatgtgggcctgtgccctgggccacctggaggccgctgtgctgctcttccgctggaaccggcaggccctgagcatcccagacagcctgggccgcctgcccctgtctgtggcccacagccggggccacgtgcggctggcccgctgcctggaggagctgcagaggcaggagcccagcgtggagcccccatttgccctgagcccccccagcagcagcccagacaccggcctgagctctgtgagcagccccagcgagctgagtgatggcaccttctctgtgaccagcgcctacagcagcgccccagatggcagccccccaccagcccccctgcctgccagcgagatgaccatggaggacatggcccctggccagctgagcagtggagtgcctgaggcccccctgctgctgatggactatgaggccaccaacagcaagggccccctgagcagcctgcctgccctgcccccagccagtgatgatggagctgccccagaagatgctgacagcccccaggccgtggatgtgattcctgtggacatgatcagcctggccaagcagatcatcgaggccaccccagagcgcatcaagcgggaggactttgtgggcctgcctgaggccggggcctccatgagggagaggactggagctgtgggcctgtctgagaccatgtcctggctggccagctacctggagaatgtggaccacttccccagcagcaccccaccttctgagctgccctttgagcggggccgcctggccgtgcccagcgcccccagctgggccgagttcctgagcgccagcaccagcggcaagatggagagtgactttgccctgctgaccctgagtgaccacgagcagcgggagctgtatgaggccgcccgggtcatccagacagccttcaggaagtacaagggccggcggctgaaggagcagcaggaggtggccgctgctgtgatccagcgctgctacaggaagtacaagcagctgacctggatcgccctgaagtttgccctgtacaagaagatgacccaggccgccatcctgatccagagcaagttccgcagctactatgagcagaagcgcttccagcagagccggcgggctgctgtgctgatccagcagcactaccgcagctacagaagaagacctggccccccccacaggaccagcgccaccctgcctgccaggaacaagggcagcttcctgaccaagaagcaggaccaggccgccaggaagatcatgaggttcctgcggcgctgccgccacaggatgagggagctgaagcagaaccaggagctggagggcctgccccagcccggcctggccacctag

SEQ ID NO: 145957 - DNA, 3594 bp, synthetic construct
  misc_feature 1..3594: note = Description of Artificial Sequence: Synthetic coding sequence
  source 1..3594: mol_type = other DNA
atggctgctgctgctgtgacccggggcaccccaggagagaacagccaccacctgaagatcttcctgcccaagaagctgctggagtgcctgccccgctgccccctgctgcccccagagcggctgcgctggaacaccaatgaggagatcgccagctacctgatcacctttgagaagcatgatgagtggctgagctgtgcccccaagacccggccccagaatggcagcatcatcctgtacaacaggaagaaggtgaagtacaggaaggatggctacctgtggaagaagaggaaggatggcaagaccacccgggaggaccacatgaagctgaaggtgcagggcatggagtgcctgtatggctgctacgtgcacagcagcatcgtgcccaccttccaccggcgctgctactggctgctgcagaacccagacatcgtgctggtgcactacctgaatgtgcctgccctggaggactgtgggaagggctgcagccccatcttctgcagcatcagcagtgaccggcgggagtggctgaagtggagccgggaggagctgctgggccagctgaagcccatgttccacggcatcaagtggagctgtggaaatggaacagaggagttctctgtggagcacctggtgcagcagatcctggacacccaccccaccaagccagcccccaggacccacgcctgcctgtgcagcggcggcctgggcagcggcagcctgacccacaagtgcagcagcaccaagcaccgcatcatcagccccaaggtggagccccgggccctgaccctgaccagcatcccccacgcccaccccccagagcccccacccctcatcgcccccctgcccccagagctgcccaaggcccacaccagccccagcagcagcagcagcagcagcagcagcggctttgctgagcccctggagatccggcccagcccccccaccagccggggcggcagcagcagaggaggaacagccatcctgctgctgaccggcctggagcagagagctgggggcctgacccccaccaggcacctggccccccaggccgacccccggcccagcatgagcctggccgtggtggtgggcacagagcccagcgcccccccagccccacccagccctgcctttgatcctgaccgcttcctgaacagcccccagaggggccagacctacggcggcggccagggcgtgtccccagacttccctgaggccgaggccgcccacaccccctgcagcgccctggagcctgctgctgccctggagccccaggccgccgcccggggccccccaccccagagcgtggccggcggcagaagaggcaactgcttcttcatccaggatgatgattctggagaggagctgaagggccacggggccgccccacccatccccagccccccacccagccccccacccagccctgcccccctggagcccagcagccgggtgggccgcggggaggccctgtttggaggccctgtgggcgccagcgagctggagcccttcagcctgagcagcttcccagacctgatgggagagctgatcagtgatgaggcccccagcatcccagcccccaccccccagctgagccctgccctgagcaccatcacagacttcagccctgagtggagctacccagagggcggcgtgaaggtgctgatcaccggcccctggacagaggccgctgagcactacagctgtgtgtttgaccacatcgctgtgcctgccagcctggtgcagcccggggtgctgcgctgctactgcccagcccacgaggtgggcctggtgtccctgcaggtggccggccgggagggccccctgagcgcctctgtgctgtttgagtaccgggcccggcgcttcctgagcctgcccagcacccagctggactggctgagcctggatgacaaccagttcaggatgagcatcctggagcggctggagcagatggagaagaggatggccgagattgctgctgctggccaggtgccctgccagggcccagatgcccctcctgtgcaggatgagggccagggccctggctttgaggcccgggtggtggtgctggtggagagcatgatccccaggagcacctggaagggccctgagcggctggcccacggcagccccttccggggcatgagcctgctgcacctggccgccgcccagggctacgcccggctgattgagaccctgagccagtggaggtctgtggagaccggcagcctggacctggagcaggaggtggaccccctgaatgtggaccacttcagctgcacccccctgatgtgggcctgtgccctgggccacctggaggccgctgtgctgctcttccgctggaaccggcaggccctgagcatcccagacagcctgggccgcctgcccctgtctgtggcccacagccggggccacgtgcggctggcccgctgcctggaggagctgcagaggcaggagcccagcgtggagcccccatttgccctgagcccccccagcagcagcccagacaccggcctgagctctgtgagcagccccagcgagctgagtgatggcaccttctctgtgaccagcgcctacagcagcgccccagatggcagccccccaccagcccccctgcctgccagcgagatgaccatggaggacatggcccctggccagctgagcagcggcgtgcctgaggcccccctgctgctgatggactatgaggccaccaacagcaagggccccctgagcagcctgcctgccctgcccccagccagtgatgatggagctgccccagaagatgctgacagcccccaggccgtggatgtgattcctgtggacatgatcagcctggccaagcagatcatcgaggccaccccagagcgcatcaagagagaagattttgtgggcctgcctgaggccggggcctccatgagggagaggactggagctgtgggcctgtctgagaccatgtcctggctggccagctacctggagaatgtggaccacttccccagcagcaccccacccagcgagctgccctttgagcggggccgcctggccgtgcccagcgcccccagctgggccgagttcctgagcgccagcaccagcggcaagatggagagtgactttgccctgctgaccctgagtgaccacgagcagcgggagctgtatgaagctgcccgggtcatccagacagccttcaggaagtacaagggccgccgcctgaaggagcagcaggaggtggccgccgccgtcatccagcgctgctacaggaagtacaagcagtttgccctgtacaagaagatgacccaggccgccatcctgatccagagcaagttccgcagctactatgagcagaagcgcttccagcagagccggcgggctgctgtgctgatccagcagcactaccgcagctacagaagaagacctggccccccccacaggaccagcgccaccctgcctgccaggaacaagggcagcttcctgaccaagaagcaggaccaggccgccaggaagatcatgaggttcctgcggcgctgccgccacaggatgagggagctgaagcagaaccaggagctggagggcctgccccagcccggcctggccacctag

SEQ ID NO: 145958 - DNA, 3726 bp, synthetic construct
  misc_feature 1..3726: note = Description of Artificial Sequence: Synthetic coding sequence
  source 1..3726: mol_type = other DNA
atgggcacagacagccccagcccccggcccctgcggcctggggtgaccctgcccccaggggccctgaccatgaacaccaaggacaccacagaggtggccgagaacagccaccacctgaagatcttcctgcccaagaagctgctggagtgcctgccccgctgccccctgctgcccccagagcggctgcgctggaacaccaatgaggagatcgccagctacctgatcacctttgagaagcatgatgagtggctgagctgtgcccccaagacccggccccagaatggcagcatcatcctgtacaacaggaagaaggtgaagtacaggaaggatggctacctgtggaagaagaggaaggatggcaagaccacccgggaggaccacatgaagctgaaggtgcagggcatggagtgcctgtatggctgctacgtgcacagcagcatcgtgcccaccttccaccggcgctgctactggctgctgcagaacccagacatcgtgctggtgcactacctgaatgtgcctgccctggaggactgtgggaagggctgcagccccatcttctgcagcatcagcagtgacagaagagagtggctgaagtggagccgggaggagctgctgggccagctgaagcccatgtttcatggcatcaagtggagctgtggaaatggaacagaggagttctctgtggagcacctggtgcagcagatcctggacacccaccccaccaagccagcccccaggacccacgcctgcctgtgcagcggcggcctgggcagcggcagcctgacccacaagtgcagcagcaccaagcaccgcatcatcagccccaaggtggagccccgggccctgaccctgaccagcatcccccacgcccaccccccagagcccccacccctgattgcccccctgcccccagagctgcccaaggcccacaccagccccagcagcagcagcagcagcagcagcagcggctttgctgagcccctggagatccggcccagcccccccaccagcagaggaggcagcagccggggcggcacagccatcctgctgctgaccggcctggagcagagagctgggggcctgacccccaccaggcacctggccccccaggccgacccccggcccagcatgagcctggccgtggtggtgggcacagagcccagcgcccccccagccccacccagccctgcctttgatcctgaccgcttcctgaacagcccccagaggggccagacctatggaggcggccagggcgtgtccccagacttccctgaggccgaggccgcccacaccccctgcagcgccctggagcctgctgctgccctggagccccaggccgccgcccggggccccccaccccagagcgtggccggcggccggcggggcaactgcttcttcatccaggatgatgacagcggggaggagctgaagggccatggagctgccccacccatccccagccccccacccagccccccacccagccctgcccccctggagcccagcagccgggtgggccgcggggaggccctgtttggaggccctgtgggcgccagcgagctggagcccttcagcctgagcagcttcccagacctgatgggagagctgatcagtgatgaggcccccagcatcccagcccccaccccccagctgagccctgccctgagcaccatcacagacttcagccctgagtggagctacccagagggcggcgtgaaggtgctgatcaccggcccctggacagaagctgctgagcactacagctgtgtgtttgaccacatcgctgtgcctgccagcctggtgcagcccggggtgctgcgctgctactgcccagcccacgaggtgggcctggtgtccctgcaggtggccggccgggagggccccctgagcgcctctgtgctgtttgagtaccgggcccggcgcttcctgagcctgcccagcacccagctggactggctgagcctggatgacaaccagttcaggatgagcatcctggagcggctggagcagatggagaagaggatggccgagattgctgctgctggccaggtgccctgccagggcccagatgcccctcctgtgcaggatgagggccagggccctggctttgaggcccgggtggtggtgctggtggagagcatgatccccaggagcacctggaagggccctgagcggctggcccacggcagccccttccggggcatgagcctgctgcacctggccgccgcccagggctacgcccggctcatcgagaccctgagccagtggaggtctgtggagaccggcagcctggacctggagcaggaggtggaccccctgaatgtggaccacttcagctgcacccccctgatgtgggcctgtgccctgggccacctggaggccgctgtgctgctcttccgctggaaccggcaggccctgagcatcccagacagcctgggccgcctgcccctgtctgtggcccacagccggggccacgtgcggctggcccgctgcctggaggagctgcagaggcaggagcccagcgtggagcccccatttgccctgagcccccccagcagcagcccagacaccggcctgagctctgtgagcagccccagcgagctgagtgatggcaccttctctgtgaccagcgcctacagcagcgccccagatggcagccccccaccagcccccctgcctgccagcgagatgaccatggaggacatggcccctggccagctgagcagtggagtgcctgaggcccccctgctgctgatggactatgaggccaccaacagcaagggccccctgagcagcctgcctgccctgcccccagccagtgatgatggagctgccccagaagatgctgacagcccccaggccgtggatgtgattcctgtggacatgatcagcctggccaagcagatcatcgaggccaccccagagcgcatcaagcgggaggactttgtgggcctgcctgaggccggggcctccatgagggagaggactggagctgtgggcctgtctgagaccatgtcctggctggccagctacctggagaatgtggaccacttccccagcagcaccccaccttctgagctgccctttgagcggggccgcctggccgtgcccagcgcccccagctgggccgagttcctgagcgccagcaccagcggcaagatggagagtgactttgccctgctgaccctgagtgaccacgagcagcgggagctgtatgaggccgcccgggtcatccagacagccttcaggaagtacaagggccggcggctgaaggagcagcaggaggtggccgctgctgtgatccagcgctgctacaggaagtacaagcagctgacctggatcgccctgaagtttgccctgtacaagaagatgacccaggccgccatcctgatccagagcaagttccgcagctactatgagcagaagcgcttccagcagagccggcgggctgctgtgctgatccagcagcactaccgcagctacagaagaagacctggccccccccacaggaccagcgccaccctgcctgccaggaacaagctgctgagccaccaggaggccggccctggcagcccagaagatcatgagatcccagctgccctgcccacccaggatgagggcacagaggccgagcccggggccggccgggccagccctgctggcaccggccacatgacctggcccccacccttcagccccccctggggccgcctggtgcagagctag

SEQ ID NO: 145959 - DNA, 4470 bp, synthetic construct
  misc_feature 1..4470: note = Description of Artificial Sequence: Synthetic coding sequence
  source 1..4470: mol_type = other DNA
atgggagatgctgctgacccccgggagatgaggaagaccttcatcgtgcctgccatcaagccctttgaccactatgacttcagccgggccaagatcgcctgcaacctggcctggctggtggccaaggccttcggcacagaaaatgtgcctgaggagctgcaggagcccttctacacagaccagtatgaccaggagcacatcaagccccctgtggtgaacctgctgctgtctgctgagctgtactgccgggccggcagcctcatcctgaagagtgatgctgccaagcccctgctgggccatgatgctgtgatccaggccctggcccagaagggcctgtatgtgacagaccaggagaagctggtgacagagcgggacctgcacaagaagcccatccagatgtctgcccacctggccatgattgacaccctgatgatggcctacacagtggagatggtgtccattgagaaggtgattgcctgtgcccagcagtacagcgccttcttccaggccacagacctgccctatgacattgaagatgctgtgatgtactggatcaacaaggtgaatgagcacctgaaggacatcatggagcaggagcagaagctgaaggagcaccacacagtggaggcccctgggggccagaagagccccagcaagtggttctggaagctggtgcctgcccgctacaggaaggagcagaccctgctgaagcagctgccctgcatccccctggtggagaacctgctgaaggatggaacagatggctgtgccctggccgccctgatccacttctactgcccagatgtggtgcggctggaggacatctgcctgaaggagaccatgagcctggccgacagcctgtacaacctgcagctgatccaggagttctgccaggagtacctgaaccagtgctgccacttcaccctggaggacatgctgtatgctgccagcagcatcaagagcaactacctggtgttcatggccgagctgttctggtggtttgaggtggtgaagcccagctttgtgcagccccgggtggtgcggccccagggcgctgagcctgtgaaggacatgcccagcatccctgtgctgaatgctgccaagagaaatgtgctggacagcagcagtgacttccccagcagtggagagggcgccaccttcacccagagccaccaccacctgcccagccgctacagccggccccaggcccacagcagcgccagcggcggcatccgccgcagcagctccatgtcctatgtggatggcttcatcggcacctggcccaaggagaagaggagctctgtgcacggcgtgtcctttgacatcagctttgacaaggaggacagcgtgcagaggagcacccccaacagaggcatcaccaggagcatcagcaatgaaggcctgaccctgaacaacagccacgtgtccaagcacatcaggaagaacctgtccttcaagcccatcaatggagaggaggaggccgagagcattgaggaggagctgaacatcgacagccacagcgacctgaagagctgtgtgcccctgaacaccaatgagctgaacagcaatgaaaacatccactacaagctgcccaacggggccctgcagaaccgcatcctgctggatgaatttggaaaccagatcgagacccccagcattgaggaggccctgcagatcatccatgacacagagaagagcccccacaccccccagcctgaccagatcgccaacggcttcttcctgcacagccaggagatgagcatcctgaacagcaacatcaagctgaaccagagcagcccagacaacgtgacagacaccaagggggccctgagccccatcacagacaacacagaggtggacaccggcatccacgtgcccagcgaggacatccctgagaccatggatgaggacagcagcctgcgggactacacagtgtccctggacagcgacatggatgatgccagcaagttcctgcaggactatgacatcagaactggaaacacccgggaggccctgagcccctgccccagcacagtgtccaccaagagccagcccggcagcagcgccagcagcagcagtggagtgaagatgaccagctttgctgagcagaagttcaggaagctgaaccacacagatggcaagagcagcggcagcagcagccagaagaccaccccagagggcagcgagctgaacatcccccacgtggtggcctgggcccagatccctgaggagaccggcctgccccagggccgggacaccacccagctgctggccagcgagatggtgcacctgaggatgaagctggaggagaagaggcgggccatcgaggcccagaagaagaagatggaggccgccttcaccaagcagaggcagaagatgggccgcacagccttcctgactgtggtgaagaagaagggagatggcatcagccccctgcgggaggaggccgccggggctgaagatgagaaggtgtacacagaccgggccaaggagaaggagagccagaagacagatggccagaggagcaagagcctggccgacatcaaggagagcatggagaacccccaggccaagtggctgaagagccccaccacccccattgatcctgagaagcagtggaacctggccagccccagcgaggagaccctgaatgaaggagagatcctggagtacaccaagagcattgagaagctgaacagcagcctgcacttcctgcagcaggagatgcagaggctgagcctgcagcaggagatgctgatgcagatgagggagcagcagagctgggtgatcagccccccccagcccagcccccagaagcagatccgggacttcaagcccagcaagcaggccggcctgagcagcgccatcgcccccttcagcagtgacagcccccggcccacccaccccagcccccagagcagcaacaggaagagcgccagcttctctgtgaagagccagaggaccccccggcccaatgagctgaagatcacccccctgaacagaaccctgaccccacccaggtctgtggacagcctgccccggctgcggcgcttcagccccagccaggtgcccatccagaccaggagctttgtgtgctttggagatgatggagagccccagctgaaggagagcaagcccaaggaggaggtgaagaaggaggagctggagagcaagggcaccctggagcagaggggccacaaccctgaggagaaggagatcaagccctttgagagcacagtgtctgaggtgctgagcctgcctgtgacagaaacagtgtgcctgaccccaaatgaagaccagctgaaccagcccacagagcccccacccaagcctgtgttccccccaacagcccccaagaatgtgaacctgattgaggtgtccctgagtgacctgaagcccccagagaaggcagatgtgcctgtggagaagtatgatggagagagtgacaaggagcagtttgatgatgaccagaaggtgtgctgcggcttcttcttcaaggatgaccagaaggccgagaatgacatggccatgaagagagctgccctgctggagaagaggctgcggcgggagaaggagacccagctgaggaagcagcagctggaggccgagatggagcacaagaaggaggagaccaggaggaagacagaggaggagcggcagaagaaggaggatgagcgggcccggcgggagttcatccggcaggagtacatgaggaggaagcagctgaagctgatggaggacatggacaccgtcatcaagccccggccccaggtggtgaagcagaagaagcagaggcccaagagcatccaccgggaccacatcgagagccccaagacccccatcaagggcccccctgtgagcagcctgagcctggccagcctgaacacaggagacaatgaatctgtgcacagcggcaagaggacccccaggtctgagagcgtggagggcttcctgagccccagccgctgtggcagcagaaatggagagaaggactgggagaatgccagcaccaccagctctgtggccagcggcacagagtacacaggccccaagctgtacaaggagcccagcgccaagagcaacaagcacatcatccagaatgccctggcccactgctgcctggccggcaaggtgaatgaaggccagaagaagaagatcctggaggagatggagaagagtgatgccaacaacttcctgatcctcttccgggacagcggctgccagttccgcagcctgtacacctactgcccagagacagaggagatcaacaagctgaccggcatcggccccaagagcatcaccaagaagatgattgagggcctgtacaagtacaacagcgacaggaagcagttcagccacatcccagccaagaccctgagcgcctctgtggatgccatcaccatccacagccacctgtggcagaccaagaggcctgtgacccccaagaagctgctgcccaccaaggcctag

SEQ ID NO: 145960 - DNA, 4437 bp, synthetic construct
  misc_feature 1..4437: note = Description of Artificial Sequence: Synthetic coding sequence
  source 1..4437: mol_type = other DNA
atgggagatgctgctgacccccgggagatgaggaagaccttcatcgtgcctgccatcaagccctttgaccactatgacttcagccgggccaagatcgcctgcaacctggcctggctggtggccaaggccttcggcacagaaaatgtgcctgaggagctgcaggagcccttctacacagaccagtatgaccaggagcacatcaagccccctgtggtgaacctgctgctgtctgctgagctgtactgccgggccggcagcctcatcctgaagagtgatgctgccaagcccctgctgggccatgatgctgtgatccaggccctggcccagaagggcctgtatgtgacagaccaggagaagctggtgacagagcgggacctgcacaagaagcccatccagatgtctgcccacctggccatgattgacaccctgatgatggcctacacagtggagatggtgtccattgagaaggtgattgcctgtgcccagcagtacagcgccttcttccaggccacagacctgccctatgacattgaagatgctgtgatgtactggatcaacaaggtgaatgagcacctgaaggacatcatggagcaggagcagaagctgaaggagcaccacacagtggaggcccctgggggccagaaggcccgctacaggaaggagcagaccctgctgaagcagctgccctgcatccccctggtggagaacctgctgaaggatggaacagatggctgtgccctggccgccctgatccacttctactgcccagatgtggtgcggctggaggacatctgcctgaaggagaccatgagcctggccgacagcctgtacaacctgcagctgatccaggagttctgccaggagtacctgaaccagtgctgccacttcaccctggaggacatgctgtatgctgccagcagcatcaagagcaactacctggtgttcatggccgagctgttctggtggtttgaggtggtgaagcccagctttgtgcagccccgggtggtgcggccccagggcgctgagcctgtgaaggacatgcccagcatccctgtgctgaatgctgccaagagaaatgtgctggacagcagcagtgacttccccagcagcggggagggcgccaccttcacccagagccaccaccacctgcccagccgctacagccggccccaggcccacagcagcgccagcggcggcatcagaagaagcagctccatgtcctatgtggatggcttcatcggcacctggcccaaggagaagaggagctctgtgcatggagtgtcctttgacatcagctttgacaaggaggacagcgtgcagaggagcacccccaacagaggcatcaccaggagcatcagcaatgaaggcctgaccctgaacaacagccacgtgtccaagcacatcaggaagaacctgtccttcaagcccatcaacggggaggaggaggccgagagcattgaggaggagctgaacatcgacagccacagcgacctgaagagctgtgtgcccctgaacaccaatgagctgaacagcaatgaaaacatccactacaagctgcccaatggagccctgcagaaccgcatcctgctggatgaatttggaaaccagatcgagacccccagcattgaggaggccctgcagatcatccatgacacagagaagagcccccacaccccccagcctgaccagatcgccaacggcttcttcctgcacagccaggagatgagcatcctgaacagcaacatcaagctgaaccagagcagcccagacaacgtgacagacaccaagggggccctgagccccatcacagacaacacagaggtggacaccggcatccacgtgcccagcgaggacatccctgagaccatggatgaggacagcagcctgcgggactacacagtgtccctggacagcgacatggatgatgccagcaagttcctgcaggactatgacatcagaacaggcaacacccgggaggccctgagcccctgccccagcacagtgtccaccaagagccagcccggcagcagcgccagcagcagcagcggcgtgaagatgaccagctttgctgagcagaagttcaggaagctgaaccacacagatggcaagagcagcggcagcagcagccagaagaccaccccagagggcagcgagctgaacatcccccacgtggtggcctgggcccagatccctgaggagaccggcctgccccagggccgggacaccacccagctgctggccagcgagatggtgcacctgaggatgaagctggaggagaagagaagagccatcgaggcccagaagaagaagatggaggccgccttcaccaagcagaggcagaagatgggccgcacagccttcctgactgtggtgaagaagaagggagatggcatcagccccctgcgggaggaggccgccggggctgaagatgagaaggtgtacacagaccgggccaaggagaaggagagccagaagacagatggccagaggagcaagagcctggccgacatcaaggagagcatggagaacccccaggccaagtggctgaagagccccaccacccccatcgaccctgagaagcagtggaacctggccagccccagcgaggagaccctgaatgaaggagagatcctggagtacaccaagagcattgagaagctgaacagcagcctgcacttcctgcagcaggagatgcagaggctgagcctgcagcaggagatgctgatgcagatgagggagcagcagagctgggtgatcagccccccccagcccagcccccagaagcagatccgggacttcaagcccagcaagcaggccggcctgagcagcgccatcgcccccttcagcagtgacagcccccggcccacccaccccagcccccagagcagcaacaggaagagcgccagcttctctgtgaagagccagaggaccccccggcccaatgagctgaagatcacccccctgaacagaaccctgaccccacccaggtctgtggacagcctgccccggctgcggcgcttcagccccagccaggtgcccatccagaccaggagctttgtgtgctttggagatgatggagagccccagctgaaggagagcaagcccaaggaggaggtgaagaaggaggagctggagagcaagggcaccctggagcagaggggccacaaccctgaggagaaggagatcaagccctttgagagcacagtgtctgaggtgctgagcctgcctgtgacagagaccgtgtgcctgaccccaaatgaagaccagctgaaccagcccacagagcccccacccaagcctgtgtttcctcccacagcccccaagaatgtgaacctgattgaggtgtccctgagtgacctgaagcccccagagaaggcagatgtgcctgtggagaagtatgatggagagagtgacaaggagcagtttgatgatgaccagaaggtgtgctgcggcttcttcttcaaggatgaccagaaggcagaaaatgacatggccatgaagagagctgccctgctggagaagaggctgcggcgggagaaggagacccagctgaggaagcagcagctggaggccgagatggagcacaagaaggaggagaccaggaggaagacagaggaggagcggcagaagaaggaggatgagcgggcccggcgggagttcatccggcaggagtacatgaggaggaagcagctgaagctgatggaggacatggacaccgtcatcaagccccggccccaggtggtgaagcagaagaagcagaggcccaagagcatccaccgggaccacatcgagagccccaagacccccatcaagggcccccctgtgagcagcctgagcctggccagcctgaacacaggagacaatgaatctgtgcacagcggcaagaggacccccaggtctgagagcgtggagggcttcctgagccccagccgctgtggcagcagaaatggagagaaggactgggagaatgccagcaccaccagctctgtggccagcggcacagagtacacaggccccaagctgtacaaggagcccagcgccaagagcaacaagcacatcatccagaatgccctggcccactgctgcctggccggcaaggtgaatgaaggccagaagaagaagatcctggaggagatggagaagagtgatgccaacaacttcctgatcctcttccgggacagcggctgccagttccgcagcctgtacacctactgcccagagacagaggagatcaacaagctgactggaattggccccaagagcatcaccaagaagatgattgagggcctgtacaagtacaacagcgacaggaagcagttcagccacatcccagccaagaccctgagcgcctctgtggatgccatcaccatccacagccacctgtggcagaccaagaggcctgtgacccccaagaagctgctgcccaccaaggcctag

SEQ ID NO: 145961 - DNA, 4389 bp, synthetic construct
  misc_feature 1..4389: note = Description of Artificial Sequence: Synthetic coding sequence
  source 1..4389: mol_type = other DNA
atgggagatgctgctgacccccgggagatgaggaagaccttcatcgtgcctgccatcaagccctttgaccactatgacttcagccgggccaagatcgcctgcaacctggcctggctggtggccaaggccttcggcacagaaaatgtgcctgaggagctgcaggagcccttctacacagaccagtatgaccaggagcacatcaagccccctgtggtgaacctgctgctgtctgctgagctgtactgccgggccggcagcctcatcctgaagagtgatgctgccaagcccctgctgggccatgatgctgtgatccaggccctggcccagaagggcctgtatgtgacagaccaggagaagctggtgacagagcgggacctgcacaagaagcccatccagatgtctgcccacctggccatgattgacaccctgatgatggcctacacagtggagatggtgtccattgagaaggtgattgcctgtgcccagcagtacagcgccttcttccaggccacagacctgccctatgacattgaagatgctgtgatgtactggatcaacaaggtgaatgagcacctgaaggacatcatggagcaggagcagaagctgaaggagcaccacacagtggaggcccctgggggccagaaggcccgctacaggaaggagcagaccctgctgaagcagctgccctgcatccccctggtggagaacctgctgaaggatggaacagatggctgtgccctggccgccctgatccacttctactgcccagatgtggtgcggctggaggacatctgcctgaaggagaccatgagcctggccgacagcctgtacaacctgcagctgatccaggagttctgccaggagtacctgaaccagtgctgccacttcaccctggaggacatgctgtatgctgccagcagcatcaagagcaactacctggtgttcatggccgagctgttctggtggtttgaggtggtgaagcccagctttgtgcagccccgggtggtgcggccccagggcgctgagcctgtgaaggacatgcccagcatccctgtgctgaatgctgccaagagaaatgtgctggacagcagcagtgacttccccagccgctacagccggccccaggcccacagcagcgccagcggcggcatcagaagaagcagctccatgtcctatgtggatggcttcatcggcacctggcccaaggagaagaggagctctgtgcatggagtgtcctttgacatcagctttgacaaggaggacagcgtgcagaggagcacccccaacagaggcatcaccaggagcatcagcaatgaaggcctgaccctgaacaacagccacgtgtccaagcacatcaggaagaacctgtccttcaagcccatcaacggggaggaggaggccgagagcattgaggaggagctgaacatcgacagccacagcgacctgaagagctgtgtgcccctgaacaccaatgagctgaacagcaatgaaaacatccactacaagctgcccaatggagccctgcagaaccgcatcctgctggatgaatttggaaaccagatcgagacccccagcattgaggaggccctgcagatcatccatgacacagagaagagcccccacaccccccagcctgaccagatcgccaacggcttcttcctgcacagccaggagatgagcatcctgaacagcaacatcaagctgaaccagagcagcccagacaacgtgacagacaccaagggggccctgagccccatcacagacaacacagaggtggacaccggcatccacgtgcccagcgaggacatccctgagaccatggatgaggacagcagcctgcgggactacacagtgtccctggacagcgacatggatgatgccagcaagttcctgcaggactatgacatcagaacaggcaacacccgggaggccctgagcccctgccccagcacagtgtccaccaagagccagcccggcagcagcgccagcagcagcagcggcgtgaagatgaccagctttgctgagcagaagttcaggaagctgaaccacacagatggcaagagcagcggcagcagcagccagaagaccaccccagagggcagcgagctgaacatcccccacgtggtggcctgggcccagatccctgaggagaccggcctgccccagggccgggacaccacccagctgctggccagcgagatggtgcacctgaggatgaagctggaggagaagagaagagccatcgaggcccagaagaagaagatggaggccgccttcaccaagcagaggcagaagatgggccgcacagccttcctgactgtggtgaagaagaagggagatggcatcagccccctgcgggaggaggccgccggggctgaagatgagaaggtgtacacagaccgggccaaggagaaggagagccagaagacagatggccagaggagcaagagcctggccgacatcaaggagagcatggagaacccccaggccaagtggctgaagagccccaccacccccatcgaccctgagaagcagtggaacctggccagccccagcgaggagaccctgaatgaaggagagatcctggagtacaccaagagcattgagaagctgaacagcagcctgcacttcctgcagcaggagatgcagaggctgagcctgcagcaggagatgctgatgcagatgagggagcagcagagctgggtgatcagccccccccagcccagcccccagaagcagatccgggacttcaagcccagcaagcaggccggcctgagcagcgccatcgcccccttcagcagtgacagcccccggcccacccaccccagcccccagagcagcaacaggaagagcgccagcttctctgtgaagagccagaggaccccccggcccaatgagctgaagatcacccccctgaacagaaccctgaccccacccaggtctgtggacagcctgccccggctgcggcgcttcagccccagccaggtgcccatccagaccaggagctttgtgtgctttggagatgatggagagccccagctgaaggagagcaagcccaaggaggaggtgaagaaggaggagctggagagcaagggcaccctggagcagaggggccacaaccctgaggagaaggagatcaagccctttgagagcacagtgtctgaggtgctgagcctgcctgtgacagagaccgtgtgcctgaccccaaatgaagaccagctgaaccagcccacagagcccccacccaagcctgtgtttcctcccacagcccccaagaatgtgaacctgattgaggtgtccctgagtgacctgaagcccccagagaaggcagatgtgcctgtggagaagtatgatggagagagtgacaaggagcagtttgatgatgaccagaaggtgtgctgcggcttcttcttcaaggatgaccagaaggcagaaaatgacatggccatgaagagagctgccctgctggagaagaggctgcggcgggagaaggagacccagctgaggaagcagcagctggaggccgagatggagcacaagaaggaggagaccaggaggaagacagaggaggagcggcagaagaaggaggatgagcgggcccggcgggagttcatccggcaggagtacatgaggaggaagcagctgaagctgatggaggacatggacaccgtcatcaagccccggccccaggtggtgaagcagaagaagcagaggcccaagagcatccaccgggaccacatcgagagccccaagacccccatcaagggcccccctgtgagcagcctgagcctggccagcctgaacacaggagacaatgaatctgtgcacagcggcaagaggacccccaggtctgagagcgtggagggcttcctgagccccagccgctgtggcagcagaaatggagagaaggactgggagaatgccagcaccaccagctctgtggccagcggcacagagtacacaggccccaagctgtacaaggagcccagcgccaagagcaacaagcacatcatccagaatgccctggcccactgctgcctggccggcaaggtgaatgaaggccagaagaagaagatcctggaggagatggagaagagtgatgccaacaacttcctgatcctcttccgggacagcggctgccagttccgcagcctgtacacctactgcccagagacagaggagatcaacaagctgactggaattggccccaagagcatcaccaagaagatgattgagggcctgtacaagtacaacagcgacaggaagcagttcagccacatcccagccaagaccctgagcgcctctgtggatgccatcaccatccacagccacctgtggcagaccaagaggcctgtgacccccaagaagctgctgcccaccaaggcctag

SEQ ID NO: 145962 - DNA, 450 bp, synthetic construct
  misc_feature 1..450: note = Description of Artificial Sequence: Synthetic coding sequence
  source 1..450: mol_type = other DNA
atggctgaccagctgacagaggagcaggtgacagagttcaaggaggccttcagcctgtttgacaaggatggagatggctgcatcaccacccgggagctgggcaccgtgatgaggagcctgggccagaaccccacagaagctgagctgcgggacatgatgtctgaaattgacagagatggaaatggaacagtggacttccctgagttcctgggcatgatggccaggaagatgaaggacacagacaatgaggaggagatccgggaggccttccgggtgtttgacaaggatggaaatggatttgtgtctgctgctgagctgcggcacgtgatgacccggctgggggagaagctgagtgatgaggaggtggatgagatgatccgggctgctgacacagatggagatggccaggtgaactatgaggagtttgtgcgggtgctggtgtccaagtag

SEQ ID NO: 145963 - DNA, 546 bp, synthetic construct
  misc_feature 1..546: note = Description of Artificial Sequence: Synthetic coding sequence
  source 1..546: mol_type = other DNA
atgggcctgcagcaggagatcagcctgcagccctggtgccaccaccctgctgagagctgccagaccaccacagacatgacagagcggctgtctgctgagcagatcaaggagtacaagggcgtgtttgagatgtttgatgaggagggcaatggagaggtgaagacaggagagctggagtggctgatgagcctgctgggcatcaaccccaccaagtctgagctggcctccatggccaaggatgtggaccgggacaacaagggcttcttcaactgtgatggcttcctggccctgatgggcgtgtaccacgagaaggcccagaaccaggagagcgagctgcgggccgccttccgggtgtttgacaaggagggcaagggctacatcgactggaacaccctgaagtatgtgctgatgaatgctggggagcccctgaatgaggtggaggccgagcagatgatgaaggaggccgacaaggatggagacaggaccattgattatgaggagtttgtggccatgatgactggagagagcttcaagctgatccagtag

SEQ ID NO: 145964 - DNA, 495 bp, synthetic construct
  misc_feature 1..495: note = Description of Artificial Sequence: Synthetic coding sequence
  source 1..495: mol_type = other DNA
atgggcctgcagcaggagatcagcctgacagagcggctgtctgctgagcagatcaaggagtacaagggcgtgtttgagatgtttgatgaggagggcaatggagaggtgaagacaggagagctggagtggctgatgagcctgctgggcatcaaccccaccaagtctgagctggcctccatggccaaggatgtggaccgggacaacaagggcttcttcaactgtgatggcttcctggccctgatgggcgtgtaccacgagaaggcccagaaccaggagagcgagctgcgggccgccttccgggtgtttgacaaggagggcaagggctacatcgactggaacaccctgaagtatgtgctgatgaatgctggggagcccctgaatgaggtggaggccgagcagatgatgaaggaggccgacaaggatggagacaggaccatcgactatgaggagtttgtggccatgatgaccggggagagcttcaagctgatccagtag

SEQ ID NO: 145965 - DNA, 1779 bp, synthetic construct
  misc_feature 1..1779: note = Description of Artificial Sequence: Synthetic coding sequence
  source 1..1779: mol_type = other DNA
atggagggcaagtggctgctgtgcatgctgctggtgctgggcacagccatcgtggaggcccatgatggccatgatgatgatgtgattgatattgaagatgacctggatgatgtgattgaggaggtggaggacagcaagccagacaccacagccccacccagcagccccaaggtgacctacaaggcccctgtgcccaccggggaggtgtactttgctgacagctttgaccggggcaccctgagcggctggatcctgagcaaggccaagaaggatgacacagatgatgaaattgccaagtatgatggcaagtgggaggtggaggagatgaaggagagcaagctgcccggggacaagggcctggtgctgatgagccgggccaagcaccacgccatcagcgccaagctgaacaagcccttcctgtttgacaccaagcccctgattgtgcagtatgaggtgaacttccagaatggaattgaatgtggcggggcctacgtgaagctgctgagcaagaccccagagctgaacctggaccagttccatgacaagaccccctacaccatcatgtttggaccagacaagtgtggggaggactacaagctgcacttcatcttccgccacaagaaccccaagacaggcatctatgaggagaagcacgccaagaggccagatgctgacctgaagacctacttcacagacaagaagacccacctgtacaccctcatcctgaacccagacaacagctttgagatcctggtggaccagagcgtggtgaacagcggcaacctgctgaatgacatgaccccacctgtgaaccccagccgggagattgaagatcctgaggacaggaagccagaggactgggatgagcggcccaagatcccagaccctgaggccgtgaagccagatgactgggatgaagatgccccagccaagatcccagatgaggaggccaccaagccagagggctggctggatgatgagccagaatatgtgcctgaccctgatgctgagaagccagaggactgggatgaggacatggatggagagtgggaggccccccagatcgccaacccccgctgtgagagcgcccctggctgcggcgtgtggcagaggcctgtgattgacaaccccaactacaagggcaagtggaagccacccatgattgacaaccccagctaccagggcatctggaagcccaggaagatccccaacccagacttctttgaggacctggagcccttcaggatgacccccttcagcgccatcggcctggagctgtggagcatgaccagtgacatcttctttgacaacttcatcatctgtgccgaccggcgcatcgtggatgactgggccaatgatggctggggcctgaagaaggctgctgatggagctgctgagcccggggtggtgggccagatgattgaggccgctgaggagcggccctggctgtgggtggtgtacatcctgactgtggccctgcccgtcttcctggtgatcctcttctgctgcagcggcaagaagcagaccagcggcatggagtacaagaagacagatgccccccagccagatgtgaaggaggaggaggaggagaaggaggaggagaaggacaagggagatgaggaggaggagggggaggagaagctggaggagaagcagaagagtgatgctgaggaggatggcggcaccgtgtcccaggaggaggaggacaggaagcccaaggccgaggaggatgagatcctgaacagaagccccaggaacaggaagccccggcgggagtag

SEQ ID NO: 145966 - DNA, 852 bp, synthetic construct
  misc_feature 1..852: note = Description of Artificial Sequence: Synthetic coding sequence
  source 1..852: mol_type = other DNA
atgctgctggtgctgggcacagccatcgtggaggcccatgatggccatgatgatgatgtgattgatattgaagatgacctggatgatgtgattgaggaggtggaggacagcaagccagacaccacagccccacccagcagccccaaggtgacctacaaggcccctgtgcccaccggggaggtgtactttgctgacagctttgaccggggcaccctgagcggctggatcctgagcaaggccaagaaggatgacacagatgatgaaattgccaagtatgatggcaagtgggaggtggaggagatgaaggagagcaagctgcccggggacaagggcctggtgctgatgagccgggccaagcaccacgccatcagcgccaagctgaacaagcccttcctgtttgacaccaagcccctgattgtgcagtatgaggtgaacttccagaatggaattgaatgtggcggggcctacaactgcttcctgaagcaccagaacagcacctgggaccagttccatgacaagaccccctacaccatcatgtttggaccagacaagtgtggggaggactacaagctgcacttcatcttccgccacaagaaccccaagacaggcatctatgaggagaagcacgccaagaggccagatgctgacctgaagacctacttcacagacaagaagacccacctgtacaccctcatcctgaacccagacaacagctttgagatcctggtggaccagagcgtgccccctgtgaaccccagccgggagattgaagatcctgaggacaggaagccagaggactgggatgagcggcccaagatcccagaccctgaggccgtgaagccagatgactag

SEQ ID NO: 145967 - DNA, 984 bp, synthetic construct
  misc_feature 1..984: note = Description of Artificial Sequence: Synthetic coding sequence
  source 1..984: mol_type = other DNA
atggagggcaagtggctgctgtgcatgctgctggtgctgggcacagccatcgtggaggcccatgatggccatgatgatgatgtgattgatattgaagatgacctggatgatgtgattgaggaggtggaggagatgaaggagagcaagctgcccggggacaagggcctggtgctgatgagccgggccaagcaccacgccatcagcgccaagctgaacaagcccttcctgtttgacaccaagcccctgattgtgcagtatgaggtgaacttccagaatggaattgaatgtggcggggcctacgtgaagctgctgagcaagaccccagagctgaacctggaccagttccatgacaagaccccctacaccatcatgtttggaccagacaagtgtggggaggactacaagctgcacttcatcttccgccacaagaaccccaagacaggcatctatgaggagaagcacgccaagaggccagatgctgacctgaagacctacttcacagacaagaagacccacctgtacaccctcatcctgaacccagacaacagctttgagatcctggtggaccagagcgtggtgaacagcggcaacctgctgaatgacatgaccccacctgtgaaccccagccgggagattgaagatcctgaggacaggaagccagaggactgggatgagcggcccaagatcccagaccctgaggccgtgaagccagatgactgggatgaagatgccccagccaagatcccagatgaggaggccaccaagccagagggctggctggatgatgagccagaatatgtgcctgaccctgatgctgagaagccagaggactgggatgaggacatggatggagagtgggaggccccccagatcgccaacccccgctgtgagagcgcccctggctgcggcgtgtggcagaggcctgtggtggacatccagaagaccagccgccaccaccaccagcaggcccctgtggagcactag

SEQ ID NO: 145968 - DNA, 1884 bp, synthetic construct
  misc_feature 1..1884: note = Description of Artificial Sequence: Synthetic coding sequence
  source 1..1884: mol_type = other DNA
atggctgacaggaggacccccaccccatttgctggctgccgcctgccccggcagaggcgggccagagatgccagccaggtgtctgcccctggcacccggcgcatcatggagggcaagtggctgctgtgcatgctgctggtgctgggcacagccatcgtggaggcccatgatggccatgatgatgatgtgattgatattgaagatgacctggatgatgtgattgaggaggtggaggacagcaagccagacaccacagccccacccagcagccccaaggtgacctacaaggcccctgtgcccactggagaggtgtactttgctgacagctttgaccggggcaccctgagcggctggatcctgagcaaggccaagaaggatgacacagatgatgagatcgccaagtatgatggcaagtgggaggtggaggagatgaaggagagcaagctgcccggggacaagggcctggtgctgatgagccgggccaagcaccacgccatcagcgccaagctgaacaagcccttcctgtttgacaccaagcccctcatcgtgcagtatgaggtgaacttccagaatggaattgaatgtggcggggcctacgtgaagctgctgagcaagaccccagagctgaacctggaccagttccatgacaagaccccctacaccatcatgtttggaccagacaagtgtggggaggactacaagctgcacttcatcttccgccacaagaaccccaagacaggcatctatgaggagaagcacgccaagaggccagatgctgacctgaagacctacttcacagacaagaagacccacctgtacaccctcatcctgaacccagacaacagctttgagatcctggtggaccagagcgtggtgaacagcggcaacctgctgaatgacatgaccccacctgtgaaccccagccgggagattgaggaccctgaggacaggaagccagaggactgggatgagcggcccaagatcccagaccctgaggccgtgaagccagatgactgggatgaagatgccccagccaagatcccagatgaggaggccaccaagccagagggctggctggatgatgagccagaatatgtgcctgaccctgatgctgagaagccagaggactgggatgaggacatggatggagagtgggaggccccccagatcgccaacccccgctgtgagagcgcccctggctgcggcgtgtggcagaggcctgtgattgacaaccccaactacaagggcaagtggaagccacccatgattgacaaccccagctaccagggcatctggaagcccaggaagatccccaacccagacttctttgaggacctggagcccttcaggatgacccccttcagcgccatcggcctggagctgtggagcatgaccagtgacatcttctttgacaacttcatcatctgtgccgacagaagaattgtggatgactgggccaatgatggctggggcctgaagaaggccgcagatggagctgctgagcccggggtggtgggccagatgattgaagctgctgaggagcggccctggctgtgggtggtgtacatcctgactgtggccctgcctgtgttcctggtgatcctcttctgctgcagcggcaagaagcagaccagcggcatggagtacaagaagacagatgccccccagccagatgtgaaggaggaggaggaggagaaggaggaggagaaggacaagggagatgaggaggaggagggggaggagaagctggaggagaagcagaagagtgatgctgaagaagatggcggcaccgtgtcccaggaggaggaggacaggaagcccaaggccgaggaggatgagatcctgaacagaagccccaggaacaggaagccccggcgggagtag

SEQ ID NO: 145969 - DNA, 1779 bp, synthetic construct; identical to SEQ ID NO: 145965
  misc_feature 1..1779: note = Description of Artificial Sequence: Synthetic coding sequence
  source 1..1779: mol_type = other DNA

SEQ ID NO: 145970 - DNA, 405 bp, synthetic construct
  misc_feature 1..405: note = Description of Artificial Sequence: Synthetic coding sequence
  source 1..405: mol_type = other DNA
atggagggcaagtggctgctgtgcatgctgctggtgctgggcacagccatcgtggaggcccatgatggccatgatgatgatgtgattgatattgaagatgacctggatgatgtgattgaggaggtggaggacagcaagccagacaccacagccccacccagcagccccaaggtgacctacaaggcccctgtgcccaccggggaggtgtactttgctgacagctttgaccggggcaccctgagcggctggatcctgagcaaggccaagaaggatgacacagatgatgaaattgccaagtatgatggcaagtgggaggtggaggagatgaaggagagcaagctgcccggggacaagggcctggtgctgatgagccgggccaagcaccacgccatcagcgccaagtag

SEQ ID NO: 145971 - DNA, 507 bp, synthetic construct
  misc_feature 1..507: note = Description of Artificial Sequence: Synthetic coding sequence
  source 1..507: mol_type = other DNA
atggagggcaagtggctgctgtgcatgctgctggtgctgggcacagccatcgtggaggcccatgatggccatgatgatgatgtgattgatattgaagatgacctggatgatgtgattgaggaggtggaggacagcaagccagacaccacagccccacccagcagccccaaggtgacctacaaggcccctgtgcccaccggggaggtgtactttgctgacagctttgaccggggcaccctgagcggctggatcctgagcaaggccaagaaggatgacacagatgatgaaattgccaagtatgatggcaagtgggaggtggaggagatgaaggagagcaagctgcccggggacaagggcctggtgctgatgagccgggccaagcaccacgccatcagcgccaagctgaacaagcccttcctgtttgacaccaagcccctgattgtgcagtatgaggtgaacttccagaatggaattgaatgtggcggggcctacgtgaagctgctgtag

SEQ ID NO: 145972 - DNA, 1779 bp, synthetic construct; identical to SEQ ID NO: 145965
  misc_feature 1..1779: note = Description of Artificial Sequence: Synthetic coding sequence
  source 1..1779: mol_type = other DNA

SEQ ID NO: 145973 - DNA, 240 bp, synthetic construct
  misc_feature 1..240: note = Description of Artificial Sequence: Synthetic coding sequence
  source 1..240: mol_type = other DNA
atggagggcaagtggctgctgtgcatgctgctggtgctgggcacagccatcgtggaggcccatgatggccatgatgatgatgtgattgatattgaagatgacctggatgatgtgattgaggaggtggaggacagcaagccagacaccacagccccacccagcagccccaaggtgacctacaaggcccctgtgcccaccggggaggtgtactttgctgacagctttgaccggggcacctag

SEQ ID NO: 145974 - DNA, 99 bp, synthetic construct
  misc_feature 1..99: note = Description of Artificial Sequence: Synthetic coding sequence
  source 1..99: mol_type = other DNA
atggagggcaagtggctgctgtgcatgctgctggtgctgggcacagccatcgtggaggcccatgatggccatgatgatgatgtgattgatattgaatag

SEQ ID NO: 145975 - DNA, 1455 bp, synthetic construct
  misc_feature 1..1455: note = Description of Artificial Sequence: Synthetic coding sequence
  source 1..1455: mol_type = other DNA
atgaaggagagcaagctgcccggggacaagggcctggtgctgatgagccgggccaagcaccacgccatcagcgccaagctgaacaagcccttcctgtttgacaccaagcccctgattgtgcagtatgaggtgaacttccagaatggaattgaatgtggcggggcctacgtgaagctgctgagcaagaccccagagctgaacctggaccagttccatgacaagaccccctacaccatcatgtttggaccagacaagtgtggggaggactacaagctgcacttcatcttccgccacaagaaccccaagacaggcatctatgaggagaagcacgccaagaggccagatgctgacctgaagacctacttcacagacaagaagacccacctgtacaccctcatcctgaacccagacaacagctttgagatcctggtggaccagagcgtggtgaacagcggcaacctgctgaatgacatgaccccacctgtgaaccccagccgggagattgaagatcctgaggacaggaagccagaggactgggatgagcggcccaagatcccagaccctgaggccgtgaagccagatgactgggatgaagatgccccagccaagatcccagatgaggaggccaccaagccagagggctggctggatgatgagccagaatatgtgcctgaccctgatgctgagaagccagaggactgggatgaggacatggatggagagtgggaggccccccagatcgccaacccccgctgtgagagcgcccctggctgcggcgtgtggcagaggcctgtgattgacaaccccaactacaagggcaagtggaagccacccatgattgacaaccccagctaccagggcatctggaagcccaggaagatccccaacccagacttctttgaggacctggagcccttcaggatgacccccttcagcgccatcggcctggagctgtggagcatgaccagtgacatcttctttgacaacttcatcatctgtgccgaccggcgcatcgtggatgactgggccaatgatggctggggcctgaagaaggctgctgatggagctgctgagcccggggtggtgggccagatgattgaggccgctgaggagcggccctggctgtgggtggtgtacatcctgactgtggccctgcccgtcttcctggtgatcctcttctgctgcagcggcaagaagcagaccagcggcatggagtacaagaagacagatgccccccagccagatgtgaaggaggaggaggaggagaaggaggaggagaaggacaagggagatgaggaggaggagggggaggagaagctggaggagaagcagaagagtgatgctgaggaggatggcggcaccgtgtcccaggaggaggaggacaggaagcccaaggccgaggaggatgagatcctgaacagaagccccaggaacaggaagccccggcgggagtag

SEQ ID NO: 145976 - DNA, 324 bp, synthetic construct
  misc_feature 1..324: note = Description of Artificial Sequence: Synthetic coding sequence
  source 1..324: mol_type = other DNA
atggagggcaagtggctgctgtgcatgctgctggtgctgggcacagccatcgtggaggcccatgatggccatgatgatgatgtgattgatattgaagatgacctggatgatgtgattgaggaggtggaggacagcaagccagacaccacagccccacccagcagccccaaggtgacctacaaggcccctgtgcccaccggggaggtgtactttgctgacagctttgaccggggcaccctgagcggctggatcctgagcaaggccaagaaggatgacacagatgatgaaattgccaagtatgatggcaagtgggaggtggagtag

SEQ ID NO: 145977 - DNA, 435 bp, synthetic construct
  misc_feature 1..435: note = Description of Artificial Sequence: Synthetic coding sequence
  source 1..435: mol_type = other DNA
atggagggcaagtggctgctgtgcatgctgctggtgctgggcacagccatcgtggaggcccatgatggccatgatgatgatgtgattgatattgaagatgacctggatgatgtgattgaggaggtggaggacagcaagccagacaccacagccccacccagcagccccaaggtgacctacaaggcccctgtgcccaccggggaggtgtactttgctgacagctttgaccggggcaccctgagcggctggatcctgagcaaggccaagaaggatgacacagatgatgaaattgccaagtatgatggcaagtgggaggtggaggagatgaaggagagcaagctgcccggggacaagggcctggtgctgatgagccgggccaagcaccacgccatcagcgccaagctgaacaagcccttcctgtttgacaccaagtag

SEQ ID NO: 145978 - DNA, 420 bp, synthetic construct
  misc_feature 1..420: note = Description of Artificial Sequence: Synthetic coding sequence
  source 1..420: mol_type = other DNA
atgagagctggccgcggggccaccccagcccgggagctgttcagagatgctgccttccctgctgctgacagcagcctcttctgtgacctgagcacccccctggcccagttccgggaggacatcacctggaggcggccccaggagatctgtgccacccccaggctcttcccagatgacccccgggagggccaggtgaagcagggcctgctgggggactgctggttcctgtgtgcctgtgccgccctgcagaagagccgccacctgctggaccaggtgtcctgccctgtgcagctgcctgctgactggacctgcaaggtgcagcctgtgtggctggagttcccctgcctgcccatcagctgccgcctgcgggtgtccagtgacaccagcccagacagcgccacctggggctcctggaagtag

SEQ ID NO: 145979 - DNA, 417 bp, synthetic construct
  misc_feature 1..417: note = Description of Artificial Sequence: Synthetic coding sequence
  source 1..417: mol_type = other DNA
atgagagctggccgcggggccaccccagcccgggagctgttcagagatgctgccttccctgctgctgacagcagcctcttctgtgacctgagcacccccctggcccagttccgggaggacatcacctggaggcggccccaggtgcctgagggcggccgcagccaggatgccccacccctgctgctgcaggagcccctgctgagctgtgtgccccacagatatgcccaggaggtgtcccggctgtgcctgctgcctgctggcacctacaaggtggtgcccagcacctacctgcctgacacagagggcgccttcaccgtgaccatcgccaccagaattgaccggcccagcatccacagccaggagatgctgggccagttcctgcaggaggtgtccatcatggctgtgatgaagacctag

SEQ ID NO: 145980 - DNA, 1554 bp, synthetic construct
  misc_feature 1..1554: note = Description of Artificial Sequence: Synthetic coding sequence
  source 1..1554: mol_type = other DNA
atgagagctggccgcggggccaccccagcccgggagctgttcagagatgctgccttccctgctgctgacagcagcctcttctgtgacctgagcacccccctggcccagttccgggaggacatcacctggaggcggccccaggagatctgtgccacccccaggctcttcccagatgacccccgggagggccaggtgaagcagggcctgctgggggactgctggttcctgtgtgcctgtgccgccctgcagaagagccgccacctgctggaccaggtgatccccccaggccagcccagctgggccgaccaggagtaccggggcagcttcacctgccgcatctggcagtttggccgctgggtggaggtgaccacagatgaccggctgccctgcctggccggccgcctgtgcttcagccgctgccagagagaagatgtgttctggctgcccctgctggagaaggtgtatgccaaggtgcacggcagctatgagcacctgtgggccggccaggtggctgatgccctggtggacctgaccggcggcctggccgagcgctggaacctgaagggcgtggccggcagcggcggccagcaggaccggcccggccgctgggagcacaggacctgccggcagctgctgcacctgaaggaccagtgcctgatcagctgctgcgtgctgagccccagggctggggcccgggagctgggggagttccacgccttcatcgtgtctgacctgcgggagctgcagggccaggccggccagtgcatcctgctgctgcgcatccagaacccctggggccgccgctgctggcagggcctgtggagggagggcggggagggctggagccaggtggatgctgctgtggccagcgagctgctgagccagctgcaggagggggagttctgggtggaggaggaggagttcctgcgggagtttgatgagctgactgtgggctaccctgtgacagaggccggccacctgcagagcctgtacacagagcggctgctgtgccacacccgggccctgcccggggcctgggtgaagggccagagcgctgggggctgcaggaacaacagcggcttccccagcaaccccaagttctggctgcgggtgtctgagcccagcgaggtgtacatcgctgtgctgcagaggagccggctgcatgctgctgactgggccggccgggcccgggccctggtgggggacagccacacctcctggagccctgccagcatccctgggaagcactaccaggccgtgggcctgcacctgtggaaggtgcctgagggcggccgcagccaggatgccccacccctgctgctgcaggagcccctgctgagctgtgtgccccacagatatgcccaggaggtgtcccggctgtgcctgctgcctgctggcacctacaaggtggtgcccagcacctacctgcctgacacagaaggagccttcaccgtgaccatcgccaccagaattgaccggcccagcatccacagccaggagatgctgggccagttcctgcaggaggtgtccatcatggctgtgatgaagacctag

SEQ ID NO: 145981 - DNA, 1335 bp, synthetic construct
  misc_feature 1..1335: note = Description of Artificial Sequence: Synthetic coding sequence
  source 1..1335: mol_type = other DNA
atgagagctggccgcggggccaccccagcccgggagctgttcagagatgctgccttccctgctgctgacagcagcctcttctgtgacctgagcacccccctggcccagttccgggaggacatcacctggaggcggccccaggagatctgtgccacccccaggctcttcccagatgacccccgggagggccaggtgaagcagggcctgctgggggactgctggttcctgtgtgcctgtgccgccctgcagaagagccgccacctgctggaccaggtgatccccccaggccagcccagctgggccgaccaggagtaccggggcagcttcacctgccgcatctggcagtttggccgctgggtggaggtgaccacagatgaccggctgccctgcctggccggccgcctgtgcttcagccgctgccagagagaagatgtgttctggctgcccctgctggagaaggtgtatgccaaggtgcacggcagctatgagcacctgtgggccggccaggtggctgatgccctggtggacctgaccggcggcctggccgagcgctggaacctgaagggcgtggccggcagcggcggccagcaggaccggcccggccgctgggagcacaggacctgccggcagctgctgcacctgaaggaccagtgcctgatcagctgctgcgtgctgagccccagggctggggcccgggagctgggggagttccacgccttcatcgtgtctgacctgcgggagctgcagggccaggccggccagtgcatcctgctgctgcgcatccagaacccctggggccgccgctgctggcagggcctgtggagggagggcggggagggctggagccaggtggatgctgctgtggccagcgagctgctgagccagctgcaggagggggagttctgggtggaggaggaggagttcctgcgggagtttgatgagctgactgtgggctaccctgtgacagaggccggccacctgcagagcctgtacacagagcggctgctgtgccacacccgggccctgcccggggcctgggtgaagggccagagcgctgggggctgcaggaacaacagcggcttccccagcaaccccaagttctggctgcgggtgtctgagcccagcgaggtgtacatcgctgtgctgcagaggagccggctgcatgctgctgactgggccggccgggcccgggccctggtgggggacagccacacctcctggagccctgccagcatccctgggaagcactaccaggccgtgggcctgcacctgtggaagggcgtgaccctgggcaccaccctcttccctgtgcccagctggatgtggcccacctag

SEQ ID NO: 145982 - DNA, 2019 bp, synthetic construct
  misc_feature 1..2019: note = Description of Artificial Sequence: Synthetic coding sequence
  source 1..2019: mol_type = other DNA
atgagagctggccgcggggccaccccagcccgggagctgttcagagatgctgccttccctgctgctgacagcagcctcttctgtgacctgagcacccccctggcccagttccgggaggacatcacctggaggcggccccaggagatctgtgccacccccaggctcttcccagatgacccccgggagggccaggtgaagcagggcctgctgggggactgctggttcctgtgtgcctgtgccgccctgcagaagagccgccacctgctggaccaggtgatccccccaggccagcccagctgggccgaccaggagtaccggggcagcttcacctgccgcatctggcagtttggccgctgggtggaggtgaccacagatgaccggctgccctgcctggccggccgcctgtgcttcagccgctgccagagagaagatgtgttctggctgcccctgctggagaaggtgtatgccaaggtgcacggcagctatgagcacctgtgggccggccaggtggctgatgccctggtggacctgaccggcggcctggccgagcgctggaacctgaagggcgtggccggcagcggcggccagcaggaccggcccggccgctgggagcacaggacctgccggcagctgctgcacctgaaggaccagtgcctgatcagctgctgcgtgctgagccccagggctggggcccgggagctgggggagttccacgccttcatcgtgtctgacctgcgggagctgcagggccaggccggccagtgcatcctgctgctgcgcatccagaacccctggggccgccgctgctggcagggcctgtggagggagggcggggagggctggagccaggtggatgctgctgtggccagcgagctgctgagccagctgcaggagggggagttctgggtggaggaggaggagttcctgcgggagtttgatgagctgactgtgggctaccctgtgacagaggccggccacctgcagagcctgtacacagagcggctgctgtgccacacccgggccctgcccggggcctgggtgaagggccagagcgctgggggctgcaggaacaacagcggcttccccagcaaccccaagttctggctgcgggtgtctgagcccagcgaggtgtacatcgctgtgctgcagaggagccggctgcatgctgctgactgggccggccgggcccgggccctggtgggggacagccacacctcctggagccctgccagcatccctgggaagcactaccaggccgtgggcctgcacctgtggaaggtggagaagagaagagtgaacctgccccgggtgctgtccatgcctcctgtggccggcacagcctgccacgcctatgaccgggaggtgcacctgcgctgtgagctgagccctggctactacctggccgtgcccagcaccttcctgaaggatgcccctggagagttcctgctgcgggtcttcagcacaggccgggtgtccctgagcgccatccgggctgtggccaagaacaccaccccaggagctgccctgcctgctggggagtggggcaccgtgcagctgcggggctcctggagggtgggccagacagctgggggcagcaggaactttgccagctaccccaccaacccctgcttccccttctctgtgcctgagggccctggcccccgctgtgtgcgcatcaccctgcaccagcactgccggcccagcgacacagagttccaccccatcggcttccacatcttccaggtgcctgagggcggccgcagccaggatgccccacccctgctgctgcaggagcccctgctgagctgtgtgccccacagatatgcccaggaggtgtcccggctgtgcctgctgcctgctggcacctacaaggtggtgcccagcacctacctgcctgacacagagggcgccttcaccgtgaccatcgccaccagaattgaccggcccagcatccacagccaggagatgctgggccagttcctgcaggaggtgtccatcatggctgtgatgaagacctag

SEQ ID NO: 145983 - DNA, 2220 bp, synthetic construct
  misc_feature 1..2220: note = Description of Artificial Sequence: Synthetic coding sequence
  source 1..2220: mol_type = other DNA
atgctgtacagccctggccccagcctgcctgagagcgctgagagcctggatggcagccaggaggacaagccccggggcagctgtgccgagcccaccttcacagacaccggcatggtggcccacatcaacaacagccggctgaaggccaagggcgtgggccagcacgacaatgcccagaactttggaaaccagagctttgaggagctgcgggccgcctgcctgaggaagggggagctgtttgaggaccccctcttccctgctgagcccagcagcctgggcttcaaggacctgggccccaacagcaagaatgtgcagaacatctcctggcagaggcccaaggacatcatcaacaaccccctcttcatcatggatggcatcagccccacagacatctgccagggcatcctgggggactgctggctgctggccgccatcggcagcctgaccacctgccccaagctgctgtacagagtggtgccccggggccagagcttcaagaagaactatgccggcatcttccacttccagatctggcagtttggccagtgggtgaatgtggtggtggatgaccggctgcccaccaagaatgacaagctggtgtttgtgcacagcacagagaggtctgagttctggagcgccctgctggagaaggcctatgccaagctgagcggcagctatgaggccctgagcggcggcagcaccatggagggcctggaggacttcaccggcggcgtggcccagagcttccagctgcagaggcctccccagaacctgctgcggctgctgaggaaggctgtggagaggagcagcctgatgggctgcagcattgaggtgaccagtgacagcgagctggagagcatgacagacaagatgctggtgcggggccacgcctacagcgtgacaggcctgcaggatgtgcactaccggggcaagatggagaccctcatccgggtgaggaacccctggggcagaattgagtggaatggagcctggagcgacagcgcccgggagtgggaggaggtggccagtgacatccagatgcagctgctgcacaagacagaagatggagagttctggatgagctaccaggacttcctgaacaacttcaccctgctggagatctgcaacctgaccccagacaccctgagcggggactacaagagctactggcacaccaccttctatgagggctcctggaggcggggcagcagcgctgggggctgcaggaaccaccctggcaccttctggaccaacccccagttcaagatcagcctgcctgaaggagatgatcctgaagatgatgctgagggcaatgtggtggtgtgcacctgcctggtggccctgatgcagaagaactggaggcatgcccggcagcagggcgcccagctgcagaccatcggctttgtgctgtatgctgtgcccaaggagttccagaacatccaggatgtgcacctgaagaaggagttcttcaccaagtaccaggaccacggcttcagcgagatcttcaccaacagccgggaggtgagcagccagctgcggctgcccccaggagagtacatcatcatccccagcacctttgagccccacagagatgctgacttcctgctgcgggtcttcacagagaagcacagcgagagctgggagctggatgaggtgaactatgcagagcagctgcaggaggagaaggtgtctgaagatgacatggaccaggacttcctgcacctgttcaagatcgtggccggggagggcaaggagattggagtgtatgagctgcagaggctgctgaacaggatggccatcaagttcaagagcttcaagaccaagggcttcggcctggatgcctgccgctgcatgatcaacctgatggacaaggatggcagcggcaagctgggcctgctggagttcaagatcctgtggaagaagctgaagaagtggatggacatcttcagagaatgtgaccaggaccacagcggcaccctgaacagctatgagatgaggctggtgattgagaaggccggcatcaagctgaacaacaaggtgatgcaggtgctggtggcccgctatgcagatgatgacctgatcatcgactttgacagcttcatcagctgcttcctgcggctgaagaccatgttcaccttcttcctgaccatggaccccaagaacacaggccacatctgcctgagcctggagcagtggctgcagatgaccatgtggggctag

SEQ ID NO: 145984 - DNA, 2220 bp, synthetic construct
  misc_feature 1..2220: note = Description of Artificial Sequence: Synthetic coding sequence
  source 1..2220: mol_type = other DNA
atgctgtacagccctggccccagcctgcctgagagcgctgagagcctggatggcagccaggaggacaagccccggggcagctgtgccgagcccaccttcacagacaccggcatggtggcccacatcaacaacagccggctgaaggccaagggcgtgggccagcacgacaatgcccagaactttggaaaccagagctttgaggagctgcgggccgcctgcctgaggaagggggagctgtttgaggaccccctcttccctgctgagcccagcagcctgggcttcaaggacctgggccccaacagcaagaatgtgcagaacatctcctggcagaggcccaaggacatcatcaacaaccccctcttcatcatggatggcatcagccccacagacatctgccagggcatcctgggggactgctggctgctggccgccatcggcagcctgaccacctgccccaagctgctgtacagagtggtgccccggggccagagcttcaagaagaactatgccggcatcttccacttccagatctggcagtttggccagtgggtgaatgtggtggtggatgaccggctgcccaccaagaatgacaagctggtgtttgtgcacagcacagagaggtctgagttctggagcgccctgctggagaaggcctatgccaagctgagcggcagctatgaggccctgagcggcggcagcaccatggagggcctggaggacttcaccggcggcgtggcccagagcttccagctgcagaggcctccccagaacctgctgcggctgctgaggaaggctgtggagaggagcagcctgatgggctgcagcattgaggtgaccagtgacagcgagctggagagcatgacagacaagatgctggtgcggggccacgcctacagcgtgacaggcctgcaggatgtgcactaccggggcaagatggagaccctcatccgggtgaggaacccctggggcagaattgagtggaatggagcctggagcgacagcgcccgggagtgggaggaggtggccagtgacatccagatgcagctgctgcacaagacagaagatggagagttctggatgagctaccaggacttcctgaacaacttcaccctgctggagatctgcaacctgaccccagacaccctgagcggggactacaagagctactggcacaccaccttctatgagggctcctggaggcggggcagcagcgctgggggctgcaggaaccaccctggcaccttctggaccaacccccagttcaagatcagcctgcctgaaggagatgatcctgaagatgatgctgagggcaatgtggtggtgtgcacctgcctggtggccctgatgcagaagaactggaggcatgcccggcagcagggcgcccagctgcagaccatcggctttgtgctgtatgctgtggccagccccttccagaacatccaggatgtgcacctgaagaaggagttcttcaccaagtaccaggaccacggcttcagcgagatcttcaccaacagccgggaggtgagcagccagctgcggctgcccccaggagagtacatcatcatccccagcacctttgagccccacagagatgctgacttcctgctgcgggtcttcacagagaagcacagcgagagctgggagctggatgaggtgaactatgcagagcagctgcaggaggagaaggtgtctgaagatgacatggaccaggacttcctgcacctgttcaagatcgtggccggggagggcaaggagattggagtgtatgagctgcagaggctgctgaacaggatggccatcaagttcaagagcttcaagaccaagggcttcggcctggatgcctgccgctgcatgatcaacctgatggacaaggatggcagcggcaagctgggcctgctggagttcaagatcctgtggaagaagctgaagaagtggatggacatcttcagagaatgtgaccaggaccacagcggcaccctgaacagctatgagatgaggctggtgattgagaaggccggcatcaagctgaacaacaaggtgatgcaggtgctggtggcccgctatgcagatgatgacctgatcatcgactttgacagcttcatcagctgcttcctgcggctgaagaccatgttcaccttcttcctgaccatggaccccaagaacacaggccacatctgcctgagcctggagcagtggctgcagatgaccatgtggggctag

SEQ ID NO: 145985 - DNA, 2160 bp, synthetic construct
  misc_feature 1..2160: note = Description of Artificial Sequence: Synthetic coding sequence
  source 1..2160: mol_type = other DNA
atggccagcagcagcggccgggtgaccatccagctggtggatgaggaggccggcgtgggcgccggccgcctgcagctgttccggggccagagctatgaggccatccgggccgcctgcctggacagcggcatcctcttccgggacccctacttccctgctggcccagatgccctgggctatgaccagctgggcccagattctgagaaggccaagggcgtgaagtggatgaggcctcatgagttctgtgccgagcccaagttcatctgtgaggacatgagcaggacagatgtgtgccagggcagcctgggcaactgctggttcctggccgctgctgccagcctgaccctgtacccccggctgctgcggcgggtggtgcccccaggccaggacttccagcacggctacgccggggtcttccacttccagctgtggcagtttggccgctggatggatgtggtggtggatgaccggctgcctgtgcgggagggcaagctgatgtttgtgcgctctgagcagagaaatgagttctgggcccccctgctggagaaggcctatgccaagctgcacggcagctatgaggtgatgagaggaggccacatgaatgaggcctttgtggacttcaccggcggcgtgggggaggtgctgtacctgcggcagaacagcatgggcctcttcagcgccctgcggcatgccctggccaaggagagcctggtgggcgccacagccctgagtgacagaggagagtacagaacagaggagggcctggtgaagggccacgcctacagcatcaccggcacccacaaggtgttcctgggcttcaccaaggtgcggctgctgcggctgaggaacccctggggctgtgtggagtggacaggagcctggagcgacagctgcccccgctgggacaccctgcccacagaatgtagagatgccctgctggtgaagaaggaggatggagagttctggatggagctgcgggacttcctgctgcactttgacacagtgcagatctgcagcctgagccctgaggtgctgggccccagccctgagggcggcggctggcacgtgcacaccttccagggccgctgggtgcggggcttcaacagcggcggcagccagcccaatgctgagaccttctggaccaacccccagttccggctgaccctgctggagccagatgaagaagatgatgaagatgaggagggcccctggggcggctggggcgccgccggggcccggggccctgcccggggcggccgcacccccaagtgcaccgtgctgctgagcctcatccagaggaacagaagaaggctgcgggccaagggcctgacctacctgactgtgggcttccacgtgttccagatccctgaggagctgctgggcctgtgggacagccccaggagccacgccctgctgccccggctgctgcgggctgacaggagccccctgagcgccaggagagatgtgacccggcgctgctgcctgcggcccggccactacctggtggtgcccagcacagcccatgctggagatgaagctgacttcaccctgcgggtcttcagcgagaggaggcacacagctgtggagattgatgatgtgatctctgctgacctgcagagcctgcagggcccctacctgcccctggagctgggcctggagcagctgttccaggagctggccggggaggaggaggagctgaatgccagccagctgcaggccctgctgagcatcgccctggagcccgcccgggcccacaccagcaccccccgggagatcggcctgcggacctgtgagcagctgctgcagtgcttcggccacggccagagcctggccctgcaccacttccagcagctgtggggctacctgctggagtggcaggccatcttcaacaagtttgatgaggacaccagcggcaccatgaacagctatgagctgcggctggccctgaatgctgctggcttccacctgaacaaccagctgacccagaccctgaccagccgctacagagacagccggctgcgggtggactttgaaagatttgtgtcctgtgtggcccacctgacctgcatcttctgccactgcagccagcacctggatggaggagaaggagtcatctgcctgacccaccggcagtggatggaggtggccaccttctcctag

SEQ ID NO: 145986 - DNA, 2448 bp, synthetic construct
  misc_feature 1..2448: note = Description of Artificial Sequence: Synthetic coding sequence
  source 1..2448: mol_type = other DNA
atgcccaccgtcatcagcgcctctgtggcccccaggacagctgctgagcccaggagccctggccctgtgccccacccagcccagagcaaggccacagaggccggcggcggcaaccccagcggcatctacagcgccatcatcagcaggaacttccccatcatcggcgtgaaggagaagacctttgagcagctgcacaagaagtgcctggagaagaaggtgctgtatgtggaccctgagttccccccagatgagaccagcctcttctacagccagaagttccccatccagtttgtgtggaagaggcctcctgagatctgtgagaacccccgcttcatcattgatggagccaacagaacagacatctgccagggcgagctgggggactgctggttcctggccgccatcgcctgcctgaccctgaaccagcacctgctcttccgggtcatcccccatgaccagagcttcattgaaaattatgccggcatcttccacttccagttctggaggtatggagagtgggtggatgtggtgattgatgactgcctgcccacctacaacaaccagctggtgttcaccaagagcaaccacagaaatgagttctggagcgccctgctggagaaggcctatgccaagctgcacggcagctatgaggccctgaagggcggcaacaccacagaggccatggaggacttcaccggcggcgtggccgagttctttgagatcagagatgcccccagcgacatgtacaagatcatgaagaaggccatcgagcggggcagcctgatgggctgcagcattgatgatggcaccaacatgacctacggcaccagccccagcggcctgaacatgggagagctgattgccaggatggtgaggaacatggacaacagcctgctgcaggacagcgacctggacccccggggcagtgatgagcggcccaccaggaccatcatccctgtgcagtatgagaccaggatggcctgtggcctggtgcggggccacgcctacagcgtgacaggcctggatgaggtgcccttcaagggggagaaggtgaagctggtgcggctgaggaacccctggggccaggtggagtggaatggctcctggagcgaccgctggaaggactggagctttgtggacaaggatgagaaggcccggctgcagcaccaggtgacagaagatggagagttctggatgtcctatgaggacttcatctaccacttcaccaagctggagatctgcaacctgacagcagatgccctgcagagcgacaagctgcagacctggacagtgtctgtgaatgaaggccgctgggtgcggggctgcagcgctgggggctgcaggaacttcccagacaccttctggaccaacccccagtaccgcctgaagctgctggaggaggatgatgatcctgatgacagcgaggtgatctgcagcttcctggtggccctgatgcagaagaacagaaggaaggacaggaagctgggcgccagcctcttcaccatcggctttgccatctatgaggtgccccaccagatgcacggcaacaagcagcacctgcagaaggacttcttcctgtacaatgccagcaaggcccggagcaagacctacatcaacatgagggaggtgtcccagcgcttccggctgcccccatctgaatatgtgattgtgcccagcacctatgagccccaccaggagggggagttcatcctgcgggtcttcagcgagaagaggaacctgtctgaggaggtggagaacaccatctctgtggacaggcctgtgcccatcatctttgtgtctgaccgggccaacagcaacaaggagctgggcgtggaccaggagagcgaggagggcaagggcaagaccagcccagacaagcagaagcagagcccccagccccagcccggcagcagtgaccaggagagcgaggagcagcagcagttcaggaacatcttcaagcagattgctggagatgacatggagatctgtgctgatgagctgaagaaggtgctgaacacagtggtgaacaagcacaaggacctgaagacccacggcttcaccctggagagctgccgctccatgattgccctgatggacacagatggcagcggcaagctgaacctgcaggagttccaccacctgtggaacaagatcaaggcctggcagaagatcttcaagcactatgacacagaccagagcggcaccatcaacagctatgagatgagaaatgctgtgaatgatgctggcttccacctgaacaaccagctgtatgacatcatcaccatgagatatgctgacaagcacatgaacatcgactttgacagcttcatctgctgctttgtgcggctggagggcatgttccgggccttccacgcctttgacaaggatggagatggcatcatcaagctgaatgtgctggagtggctgcagctgaccatgtatgcctag

SEQ ID NO: 145987 - DNA, 930 bp, synthetic construct
  misc_feature 1..930: note = Description of Artificial Sequence: Synthetic coding sequence
  source 1..930: mol_type = other DNA
atgcacggcaacaagcagcacctgcagaaggacttcttcctgtacaatgccagcaaggcccggagcaagacctacatcaacatgagggaggtgtcccagcgcttccggctgcccccatctgaatatgtgattgtgcccagcacctatgagccccaccaggagggggagttcatcctgcgggtcttcagcgagaagaggaacctgtctgaggaggtggagaacaccatctctgtggacaggcctgtgaggaaggagacctacaagcccatcatctttgtgtctgaccgggccaacagcaacaaggagctgggcgtggaccaggagagcgaggagggcaagggcaagaccagcccagacaagcagaagcagagcccccagccccagcccggcagcagtgaccaggagagcgaggagcagcagcagttcaggaacatcttcaagcagattgctggagatgacatggagatctgtgctgatgagctgaagaaggtgctgaacacagtggtgaacaagcacaaggacctgaagacccacggcttcaccctggagagctgccgctccatgattgccctgatggacacagatggcagcggcaagctgaacctgcaggagttccaccacctgtggaacaagatcaaggcctggcagaagatcttcaagcactatgacacagaccagagcggcaccatcaacagctatgagatgagaaatgctgtgaatgatgctggcttccacctgaacaaccagctgtatgacatcatcaccatgagatatgctgacaagcacatgaacatcgactttgacagcttcatctgctgctttgtgcggctggagggcatgttccgggccttccacgcctttgacaaggatggagatggcatcatcaagctgaatgtgctggagtggctgcagctgaccatgtatgcctag

SEQ ID NO: 145988 - DNA, 471 bp, synthetic construct
  misc_feature 1..471: note = Description of Artificial Sequence: Synthetic coding sequence
  source 1..471: mol_type = other DNA
atggagatctgtgctgatgagctgaagaaggtgctgaacacagtggtgaacaagcacaaggacctgaagacccacggcttcaccctggagagctgccgctccatgattgccctgatggacacagatggcagcggcaagctgaacctgcaggagttccaccacctgtggaacaagatcaaggcctggcagaagatcttcaagcactatgacacagaccagagcggcaccatcaacagctatgagatgagaaatgctgtgaatgatgctggcttccacctgaacaaccagctgtatgacatcatcaccatgagatatgctgacaagcacatgaacatcgactttgacagcttcatctgctgctttgtgcggctggagggcatgttccgggccttccacgcctttgacaaggatggagatggcatcatcaagctgaatgtgctggagtggctgcagctgaccatgtatgcctag

SEQ ID NO: 145989 - DNA, 2190 bp, synthetic construct
  misc_feature 1..2190: note = Description of Artificial Sequence: Synthetic coding sequence
  source 1..2190: mol_type = other DNA
atgcccaccgtcatcagcgcctctgtggcccccaggacagctgctgagcccaggagccctggccctgtgccccacccagcccagagcaaggccacagaggccggcggcggcaaccccagcggcatctacagcgccatcatcagcaggaacttccccatcatcggcgtgaaggagaagacctttgagcagctgcacaagaagtgcctggagaagaaggtgctgtatgtggaccctgagttccccccagatgagaccagcctcttctacagccagaagttccccatccagtttgtgtggaagaggcctcctgagatctgtgagaacccccgcttcatcattgatggagccaacagaacagacatctgccagggcgagctgggggactgctggttcctggccgccatcgcctgcctgaccctgaaccagcacctgctcttccgggtcatcccccatgaccagagcttcattgaaaattatgccggcatcttccacttccagttctggaggtatggagagtgggtggatgtggtgattgatgactgcctgcccacctacaacaaccagctggtgttcaccaagagcaaccacagaaatgagttctggagcgccctgctggagaaggcctatgccaagctgcacggcagctatgaggccctgaagggcggcaacaccacagaggccatggaggacttcaccggcggcgtggccgagttctttgagatcagagatgcccccagcgacatgtacaagatcatgaagaaggccatcgagcggggcagcctgatgggctgcagcattgacaccatcatccctgtgcagtatgagaccaggatggcctgtggcctggtgcggggccacgcctacagcgtgacaggcctggatgaggtgcccttcaagggggagaaggtgaagctggtgcggctgaggaacccctggggccaggtggagtggaatggctcctggagcgaccgctggaaggactggagctttgtggacaaggatgagaaggcccggctgcagcaccaggtgacagaagatggagagttctggatgtcctatgaggacttcatctaccacttcaccaagctggagatctgcaacctgacagcagatgccctgcagagcgacaagctgcagacctggacagtgtctgtgaatgaaggccgctgggtgcggggctgcagcgctgggggctgcaggaacttcccagacaccttctggaccaacccccagtaccgcctgaagctgctggaggaggatgatgatcctgatgacagcgaggtgatctgcagcttcctggtggccctgatgcagaagaacagaaggaaggacaggaagctgggcgccagcctcttcaccatcggctttgccatctatgaggtgcccaaggagatgcacggcaacaagcagcacctgcagaaggacttcttcctgtacaatgccagcaaggcccggagcaagacctacatcaacatgagggaggtgtcccagcgcttccggctgcccccatctgaatatgtgattgtgcccagcacctatgagccccaccaggagggggagttcatcctgcgggtcttcagcgagaagaggaacctgtctgaggaggtggagaacaccatctctgtggacaggcctgtgccccagcccggcagcagtgaccaggagagcgaggagcagcagcagttcaggaacatcttcaagcagattgctggagatgacatggagatctgtgctgatgagctgaagaaggtgctgaacacagtggtgaacaagcacaaggacctgaagacccacggcttcaccctggagagctgccgctccatgattgccctgatggacacagatggcagcggcaagctgaacctgcaggagttccaccacctgtggaacaagatcaaggcctggcagaagatcttcaagcactatgacacagaccagagcggcaccatcaacagctatgagatgagaaatgctgtgaatgatgctggcttccacctgaacaaccagctgtatgacatcatcaccatgagatatgctgacaagcacatgaacatcgactttgacagcttcatctgctgctttgtgcggctggagggcatgttccgggccttccacgcctttgacaaggatggagatggcatcatcaagctgaatgtgctggagtggctgcagctgaccatgtatgcctag

SEQ ID NO: 145990 - DNA, 2187 bp, synthetic construct
  misc_feature 1..2187: note = Description of Artificial Sequence: Synthetic coding sequence
  source 1..2187: mol_type = other DNA
atgtcctggcagatcagcctgaagacccagaccacccagcagaagaatgagatctgtgagaacccccgcttcatcattgatggagccaacagaacagacatctgccagggcgagctgggggactgctggttcctggccgccatcgcctgcctgaccctgaaccagcacctgctcttccgggtcatcccccatgaccagagcttcatcgagaactatgccggcatcttccacttccagttctggaggtatggagagtgggtggatgtggtgattgatgactgcctgcccacctacaacaaccagctggtgttcaccaagagcaaccacagaaatgagttctggagcgccctgctggagaaggcctatgccaagctgcacggcagctatgaggccctgaagggcggcaacaccacagaggccatggaggacttcaccggaggagtggccgagttctttgagatcagagatgcccccagcgacatgtacaagatcatgaagaaggccatcgagcggggcagcctgatgggctgcagcattgatgatggcaccaacatgacctacggcaccagccccagcggcctgaacatgggagagctgattgccaggatggtgaggaacatggacaacagcctgctgcaggacagcgacctggacccccggggcagtgatgagcggcccaccaggaccatcatccctgtgcagtatgagaccaggatggcctgtggcctggtgcggggccacgcctacagcgtgacaggcctggatgaggtgcccttcaagggggagaaggtgaagctggtgcggctgaggaacccctggggccaggtggagtggaatggctcctggagcgaccgctggaaggactggagctttgtggacaaggatgagaaggcccggctgcagcaccaggtgacagaagatggagagttctggatgtcctatgaggacttcatctaccacttcaccaagctggagatctgcaacctgacagcagatgccctgcagagcgacaagctgcagacctggacagtgtctgtgaatgaaggccgctgggtgcggggctgcagcgctgggggctgcaggaacttcccagacaccttctggaccaacccccagtaccgcctgaagctgctggaggaggatgatgatcctgatgattctgaggtgatctgcagcttcctggtggccctgatgcagaagaacagaaggaaggacaggaagctgggcgccagcctcttcaccatcggctttgccatctatgaggtgcccaaggagatgcacggcaacaagcagcacctgcagaaggacttcttcctgtacaatgccagcaaggcccggagcaagacctacatcaacatgagggaggtgtcccagcgcttccggctgcccccatctgaatatgtgattgtgcccagcacctatgagccccaccaggagggggagttcatcctgcgggtcttcagcgagaagaggaacctgtctgaggaggtggagaacaccatctctgtggacaggcctgtgcccatcatctttgtgtctgaccgggccaacagcaacaaggagctgggcgtggaccaggagagcgaggagggcaagggcaagaccagcccagacaagcagaagcagagcccccagccccagcccggcagcagtgaccaggagagcgaggagcagcagcagttcaggaacatcttcaagcagattgctggagatgacatggagatctgtgctgatgagctgaagaaggtgctgaacacagtggtgaacaagcacaaggacctgaagacccacggcttcaccctggagagctgccgctccatgattgccctgatggacacagatggcagcggcaagctgaacctgcaggagttccaccacctgtggaacaagatcaaggcctggcagaagatcttcaagcactatgacacagaccagagcggcaccatcaacagctatgagatgagaaatgctgtgaatgatgctggcttccacctgaacaaccagctgtatgacatcatcaccatgagatatgctgacaagcacatgaacatcgactttgacagcttcatctgctgctttgtgcggctggagggcatgttccgggccttccacgcctttgacaaggatggagatggcatcatcaagctgaatgtgctggagtggctgcagctgaccatgtatgcctag

SEQ ID NO: 145991 - DNA, 2448 bp, synthetic construct
  misc_feature 1..2448: note = Description of Artificial Sequence: Synthetic coding sequence
  source 1..2448: mol_type = other DNA
atgcccaccgtcatcagcgcctctgtggcccccaggacagctgctgagcccaggagccctggccctgtgccccacccagcccagagcaaggccacagaggccggcggcggcaaccccagcggcatctacagcgccatcatcagcaggaacttccccatcatcggcgtgaaggagaagacctttgagcagctgcacaagaagtgcctggagaagaaggtgctgtatgtggaccctgagttccccccagatgagaccagcctcttctacagccagaagttccccatccagtttgtgtggaagaggcctcctgagatctgtgagaacccccgcttcatcattgatggagccaacagaacagacatctgccagggcgagctgggggactgctggttcctggccgccatcgcctgcctgaccctgaaccagcacctgctcttccgggtcatcccccatgaccagagcttcattgaaaattatgccggcatcttccacttccagttctggaggtatggagagtgggtggatgtggtgattgatgactgcctgcccacctacaacaaccagctggtgttcaccaagagcaaccacagaaatgagttctggagcgccctgctggagaaggcctatgccaagctgcacggcagctatgaggccctgaagggcggcaacaccacagaggccatggaggacttcaccggcggcgtggccgagttctttgagatcagagatgcccccagcgacatgtacaagatcatgaagaaggccatcgagcggggcagcctgatgggctgcagcattgatgatggcaccaacatgacctacggcaccagccccagcggcctgaacatgggagagctgattgccaggatggtgaggaacatggacaacagcctgctgcaggacagcgacctggacccccggggcagtgatgagcggcccaccaggaccatcatccctgtgcagtatgagaccaggatggcctgtggcctggtgcggggccacgcctacagcgtgacaggcctggatgaggtgcccttcaagggggagaaggtgaagctggtgcggctgaggaacccctggggccaggtggagtggaatggctcctggagcgaccgctggaaggactggagctttgtggacaaggatgagaaggcccggctgcagcaccaggtgacagaagatggagagttctggatgtcctatgaggacttcatctaccacttcaccaagctggagatctgcaacctgacagcagatgccctgcagagcgacaagctgcagacctggacagtgtctgtgaatgaaggccgctgggtgcggggctgcagcgctgggggctgcaggaacttcccagacaccttctggaccaacccccagtaccgcctgaagctgctggaggaggatgatgatcctgatgacagcgaggtgatctgcagcttcctggtggccctgatgcagaagaacagaaggaaggacaggaagctgggcgccagcctcttcaccatcggctttgccatctatgaggtgcccaaggagatgcacggcaacaagcagcacctgcagaaggacttcttcctgtacaatgccagcaaggcccggagcaagacctacatcaacatgagggaggtgtcccagcgcttccggctgcccccatctgaatatgtgattgtgcccagcacctatgagccccaccaggagggggagttcatcctgcgggtcttcagcgagaagaggaacctgtctgaggaggtggagaacaccatctctgtggacaggcctgtgcccatcatctttgtgtctgaccgggccaacagcaacaaggagctgggcgtggaccaggagagcgaggagggcaagggcaagaccagcccagacaagcagaagcagagcccccagccccagcccggcagcagtgaccaggagagcgaggagcagcagcagttcaggaacatcttcaagcagattgctggagatgacatggagatctgtgctgatgagctgaagaaggtgctgaacacagtggtgaacaagcacaaggacctgaagacccacggcttcaccctggagagctgccgctccatgattgccctgatggacacagatggcagcggcaagctgaacctgcaggagttccaccacctgtggaacaagatcaaggcctggcagaagatcttcaagcactatgacacagaccagagcggcaccatcaacagctatgagatgagaaatgctgtgaatgatgctggcttccacctgaacaaccagctgtatgacatcatcaccatgagatatgctgacaagcacatgaacatcgactttgacagcttcatctgctgctttgtgcggctggagggcatgttccgggccttccacgcctttgacaaggatggagatggcatcatcaagctgaatgtgctggagtggctgcagctgaccatgtatgcctag

SEQ ID NO: 145992 - DNA, 2466 bp, synthetic construct
  misc_feature 1..2466: note = Description of Artificial Sequence: Synthetic coding sequence
  source 1..2466: mol_type = other DNA
atgcccaccgtcatcagcgcctctgtggcccccaggacagctgctgagcccaggagccctggccctgtgccccacccagcccagagcaaggccacagaggccggcggcggcaaccccagcggcatctacagcgccatcatcagcaggaacttccccatcatcggcgtgaaggagaagacctttgagcagctgcacaagaagtgcctggagaagaaggtgctgtatgtggaccctgagttccccccagatgagaccagcctcttctacagccagaagttccccatccagtttgtgtggaagaggcctcctgagatctgtgagaacccccgcttcatcattgatggagccaacagaacagacatctgccagggcgagctgggggactgctggttcctggccgccatcgcctgcctgaccctgaaccagcacctgctcttccgggtcatcccccatgaccagagcttcattgaaaattatgccggcatcttccacttccagttctggaggtatggagagtgggtggatgtggtgattgatgactgcctgcccacctacaacaaccagctggtgttcaccaagagcaaccacagaaatgagttctggagcgccctgctggagaaggcctatgccaagctgcacggcagctatgaggccctgaagggcggcaacaccacagaggccatggaggacttcaccggcggcgtggccgagttctttgagatcagagatgcccccagcgacatgtacaagatcatgaagaaggccatcgagcggggcagcctgatgggctgcagcattgatgatggcaccaacatgacctacggcaccagccccagcggcctgaacatgggagagctgattgccaggatggtgaggaacatggacaacagcctgctgcaggacagcgacctggacccccggggcagtgatgagcggcccaccaggaccatcatccctgtgcagtatgagaccaggatggcctgtggcctggtgcggggccacgcctacagcgtgacaggcctggatgaggtgcccttcaagggggagaaggtgaagctggtgcggctgaggaacccctggggccaggtggagtggaatggctcctggagcgaccgctggaaggactggagctttgtggacaaggatgagaaggcccggctgcagcaccaggtgacagaagatggagagttctggatgtcctatgaggacttcatctaccacttcaccaagctggagatctgcaacctgacagcagatgccctgcagagcgacaagctgcagacctggacagtgtctgtgaatgaaggccgctgggtgcggggctgcagcgctgggggctgcaggaacttcccagacaccttctggaccaacccccagtaccgcctgaagctgctggaggaggatgatgatcctgatgacagcgaggtgatctgcagcttcctggtggccctgatgcagaagaacagaaggaaggacaggaagctgggcgccagcctcttcaccatcggctttgccatctatgaggtgcccaaggagatgcacggcaacaagcagcacctgcagaaggacttcttcctgtacaatgccagcaaggcccggagcaagacctacatcaacatgagggaggtgtcccagcgcttccggctgcccccatctgaatatgtgattgtgcccagcacctatgagccccaccaggagggggagttcatcctgcgggtcttcagcgagaagaggaacctgtctgaggaggtggagaacaccatctctgtggacaggcctgtgaagaagaagaagaccaagcccatcatctttgtgtctgaccgggccaacagcaacaaggagctgggcgtggaccaggagagcgaggagggcaagggcaagaccagcccagacaagcagaagcagagcccccagccccagcccggcagcagtgaccaggagagcgaggagcagcagcagttcaggaacatcttcaagcagattgctggagatgacatggagatctgtgctgatgagctgaagaaggtgctgaacacagtggtgaacaagcacaaggacctgaagacccacggcttcaccctggagagctgccgctccatgattgccctgatggacacagatggcagcggcaagctgaacctgcaggagttccaccacctgtggaacaagatcaaggcctggcagaagatcttcaagcactatgacacagaccagagcggcaccatcaacagctatgagatgagaaatgctgtgaatgatgctggcttccacctgaacaaccagctgtatgacatcatcaccatgagatatgctgacaagcacatgaacatcgactttgacagcttcatctgctgctttgtgcggctggagggcatgttccgggccttccacgcctttgacaaggatggagatggcatcatcaagctgaatgtgctggagtggctgcagctgaccatgtatgcctag

SEQ ID NO: 145993 - DNA, 930 bp, synthetic construct
  misc_feature 1..930: note = Description of Artificial Sequence: Synthetic coding sequence
  source 1..930: mol_type = other DNA
atgcacggcaacaagcagcacctgcagaaggacttcttcctgtacaatgccagcaaggcccggagcaagacctacatcaacatgagggaggtgtcccagcgcttccggctgcccccatctgaatatgtgattgtgcccagcacctatgagccccaccaggagggggagttcatcctgcgggtcttcagcgagaagaggaacctgtctgaggaggtggagaacaccatctctgtggacaggcctgtgaagaagaagaagaccaagcccatcatctttgtgtctgaccgggccaacagcaacaaggagctgggcgtggaccaggagagcgaggagggcaagggcaagaccagcccagacaagcagaagcagagcccccagccccagcccggcagcagtgaccaggagagcgaggagcagcagcagttcaggaacatcttcaagcagattgctggagatgacatggagatctgtgctgatgagctgaagaaggtgctgaacacagtggtgaacaagcacaaggacctgaagacccacggcttcaccctggagagctgccgctccatgattgccctgatggacacagatggcagcggcaagctgaacctgcaggagttccaccacctgtggaacaagatcaaggcctggcagaagatcttcaagcactatgacacagaccagagcggcaccatcaacagctatgagatgagaaatgctgtgaatgatgctggcttccacctgaacaaccagctgtatgacatcatcaccatgagatatgctgacaagcacatgaacatcgactttgacagcttcatctgctgctttgtgcggctggagggcatgttccgggccttccacgcctttgacaaggatggagatggcatcatcaagctgaatgtgctggagtggctgcagctgaccatgtatgcctag

SEQ ID NO: 145994 - DNA, 471 bp, synthetic construct; identical to SEQ ID NO: 145988
  misc_feature 1..471: note = Description of Artificial Sequence: Synthetic coding sequence
  source 1..471: mol_type = other DNA

SEQ ID NO: 145995 - DNA, 1923 bp, synthetic construct
  misc_feature 1..1923: note = Description of Artificial Sequence: Synthetic coding sequence
  source 1..1923: mol_type = other DNA
atgttcagctgtgtgaagccctatgaggaccagaactacagcgccctgcggcgggactgcagaagaaggaaggtgctgtttgaggaccccctcttccctgccacagatgacagcctgtactacaagggcaccccaggccctgctgtgcgctggaagaggcccaagggcatctgtgaggacccccggctgtttgtggatggcatcagcagccatgacctgcaccagggccaggtgggcaactgctggtttgtggccgcctgcagcagcctggccagccgggagagcctgtggcagaaggtgatcccagactggaaggagcaggagtgggaccctgagaagcccaatgcctatgccggcatcttccacttccacttctggaggtttggagagtgggtggatgtggtgattgatgaccggctgcccaccgtgaacaaccagctgatctactgccacagcaacagcagaaatgagttctggtgtgccctggtggagaaggcctatgccaagctggccggctgctaccaggccctggatggcggcaacacagcagatgccctggtggacttcaccggcggcgtgtctgagcccatcgacctgacagaaggagactttgccaatgatgagaccaagaggaaccagctgtttgagaggatgctgaaggtgcacagcagaggaggcctcatcagcgccagcatcaaggctgtgacagctgctgacatggaggcccggctggcctgtggcctggtgaagggccacgcctatgctgtgacagatgtgaggaaggtgcggctgggccacggcctgctggccttcttcaagtctgagaagctggacatgatccggctgaggaacccctggggcgagcgggagtggaatggcccctggagcgacaccagcgaggagtggcagaaggtgtccaagtctgagcgggagaagatgggcgtgacagtgcaggatgatggagagttctggatgacctttgaagatgtgtgccgctacttcacagacatcatcaagtgcagggtcatcaacaccagccacctgagcatccacaagacctgggaggaggcccggctgcacggggcctggaccctgcacgaggacccccggcagaacagaggaggcggctgcatcaaccacaaggacaccttcttccagaacccccagtacatctttgaggtgaagaagccagaagatgaggtgctgatctgcatccagcagaggcccaagaggagcacccggcgggagggcaagggggagaacctggccatcggctttgacatctacaaggtggaggagaaccggcagtacaggatgcacagcctgcagcacaaggccgccagcagcatctacatcaacagccgcagcgtcttcctgaggacagaccagcctgagggccgctacgtgatcatccccaccacctttgagcccggccacactggagagttcctgctgcgggtcttcacagatgtgcccagcaactgccgggagctgcggctggatgagcccccccacacctgctggagcagcctgtgtggctacccccagctggtgacccaggtgcacgtgctgggcgctgctggcctgaaggacagccccaccggggccaacagctatgtgatcatcaagtgtgagggggacaaggtgcgctctgctgtgcagaagggcaccagcaccccagagtacaacgtgaagggcatcttctacaggaagaagctgagccagcccatcaccgtgcaggtgtggaaccaccgggtgctgaaggatgagttcctgggccaggtgcacctgaaggctgaccctgacaacctgcaggccctgcacaccctgcacctgcgggacaggaacagccggcagcccagcaacctgcccggcaccgtggccgtgcacatcctgagcagcaccagcctgatggctgtgtag

SEQ ID NO: 145996 - DNA, 2043 bp, synthetic construct
  misc_feature 1..2043: note = Description of Artificial Sequence: Synthetic coding sequence
  source 1..2043: mol_type = other DNA
atgagctgcaccggcacccccagctgcatctacctgctgagcgccctgagcctgcaggacctggtgctggactgggagccccggggcgtgcccccacccctgcctggagctgctgccaccatgttcagctgtgtgaagccctatgaggaccagaactacagcgccctgcggcgggactgcagaagaaggaaggtgctgtttgaggaccccctcttccctgccacagatgacagcctgtactacaagggcaccccaggccctgctgtgcgctggaagaggcccaagggcatctgtgaggacccccggctgtttgtggatggcatcagcagccatgacctgcaccagggccaggtgggcaactgctggtttgtggccgcctgcagcagcctggccagccgggagagcctgtggcagaaggtgatcccagactggaaggagcaggagtgggaccctgagaagcccaatgcctatgccggcatcttccacttccacttctggaggtttggagagtgggtggatgtggtgattgatgaccggctgcccaccgtgaacaaccagctgatctactgccacagcaacagcagaaatgagttctggtgtgccctggtggagaaggcctatgccaagctggccggctgctaccaggccctggatggcggcaacacagcagatgccctggtggacttcaccggcggcgtgtctgagcccatcgacctgacagaaggagactttgccaatgatgagaccaagaggaaccagctgtttgagaggatgctgaaggtgcacagcagaggaggcctcatcagcgccagcatcaaggctgtgacagctgctgacatggaggcccggctggcctgtggcctggtgaagggccacgcctatgctgtgacagatgtgaggaaggtgcggctgggccacggcctgctggccttcttcaagtctgagaagctggacatgatccggctgaggaacccctggggcgagcgggagtggaatggcccctggagcgacaccagcgaggagtggcagaaggtgtccaagtctgagcgggagaagatgggcgtgacagtgcaggatgatggagagttctggatgacctttgaagatgtgtgccgctacttcacagacatcatcaagtgcagggtcatcaacaccagccacctgagcatccacaagacctgggaggaggcccggctgcacggggcctggaccctgcacgaggacccccggcagaacagaggaggcggctgcatcaaccacaaggacaccttcttccagaacccccagtacatctttgaggtgaagaagccagaagatgaggtgctgatctgcatccagcagaggcccaagaggagcacccggcgggagggcaagggggagaacctggccatcggctttgacatctacaaggtggaggagaaccggcagtacaggatgcacagcctgcagcacaaggccgccagcagcatctacatcaacagccgcagcgtcttcctgaggacagaccagcctgagggccgctacgtgatcatccccaccacctttgagcccggccacactggagagttcctgctgcgggtcttcacagatgtgcccagcaactgccgggagctgcggctggatgagcccccccacacctgctggagcagcctgtgtggctacccccagctggtgacccaggtgcacgtgctgggcgctgctggcctgaaggacagccccaccggggccaacagctatgtgatcatcaagtgtgagggggacaaggtgcgctctgctgtgcagaagggcaccagcaccccagagtacaacgtgaagggcatcttctacaggaagaagctgagccagcccatcaccgtgcaggtgtggaaccaccgggtgctgaaggatgagttcctgggccaggtgcacctgaaggctgaccctgacaacctgcaggccctgcacaccctgcacctgcgggacaggaacagccggcagcccagcaacctgcccggcaccgtggccgtgcacatcctgagcagcaccagcctgatggctgtgtag

SEQ ID NO: 145997 - DNA, 294 bp, synthetic construct
  misc_feature 1..294: note = Description of Artificial Sequence: Synthetic coding sequence
  source 1..294: mol_type = other DNA
atgttcagctgtgtgaagccctatgaggaccagaactacagcgccctgcggcgggactgcagaagaaggaaggtgctgtttgaggaccccctcttccctgccacagatgacagcctgtactacaagggcaccccaggccctgctgtgcgctggaagaggcccaagggcatctgtgaggacccccggctgtttgtggatggcatcagcagccatgacctgcaccagggccaggtgggcaactgctggtttgtggccgcctgcagcagcctggccagccgggagagcctgtggtag

SEQ ID NO: 145998 - DNA, 1923 bp, synthetic construct; identical to SEQ ID NO: 145995
  misc_feature 1..1923: note = Description of Artificial Sequence: Synthetic coding sequence
  source 1..1923: mol_type = other DNA

SEQ ID NO: 145999 - DNA, 1674 bp, synthetic construct
  misc_feature 1..1674: note = Description of Artificial Sequence: Synthetic coding sequence
  source 1..1674: mol_type = other DNA
atgttcagctgtgtgaagccctatgaggaccagaactacagcgccctgcggcgggactgcagaagaaggaaggtgctgtttgaggaccccctcttccctgccacagatgacagcctgtactacaagggcaccccaggccctgctgtgcgctggaagaggcccaagtacagcggccacagcctggccccccaccggcccggctggggagatgcccggaggatggagaatgtgccccggcccggcagcagcggctgccccagcagcagcctgcgggcccgggacctgggcatctgtgaggacccccggctgtttgtggatggcatcagcagccatgacctgcaccagggccaggtgggcaactgctggtttgtggccgcctgcagcagcctggccagccgggagagcctgtggcagaaggtgatcccagactggaaggagcaggagtgggaccctgagaagcccaatgcctatgccggcatcttccacttccacttctggaggtttggagagtgggtggatgtggtgattgatgaccggctgcccaccgtgaacaaccagctgatctactgccacagcaacagcagaaatgagttctggtgtgccctggtggagaaggcctatgccaagctggccggctgctaccaggccctggatggcggcaacacagcagatgccctggtggacttcaccggcggcgtgtctgagcccatcgacctgacagaaggagactttgccaatgatgagaccaagaggaaccagctgtttgagaggatgctgaaggtgcacagcagaggaggcctcatcagcgccagcatcaaggctgtgacagctgctgacatggaggcccggctggcctgtggcctggtgaagggccacgcctatgctgtgacagatgtgaggaaggtgcggctgggccacggcctgctggccttcttcaagtctgagaagctggacatgatccggctgaggaacccctggggcgagcgggagtggaatggcccctggagcgacaccagcgaggagtggcagaaggtgtccaagtctgagcgggagaagatgggcgtgacagtgcaggatgatggagagttctggatgacctttgaagatgtgtgccgctacttcacagacatcatcaagtgcagggtcatcaacaccagccacctgagcatccacaagacctgggaggaggcccggctgcacggggcctggaccctgcacgaggacccccggcagaacagaggaggcggctgcatcaaccacaaggacaccttcttccagaacccccagtacatctttgaggtgaagaagccagaagatgaggtgctgatctgcatccagcagaggcccaagaggagcacccggcgggagggcaagggggagaacctggccatcggctttgacatctacaaggtggaggagaaccggcagtacaggatgcacagcctgcagcacaaggccgccagcagcatctacatcaacagccgcagcgtcttcctgaggacagaccagcctgagggccgctacgtgatcatccccaccacctttgagcccggccacactggagagttcctgctgcgggtcttcacagatgtgcccagcaactgccgggagctgcggctggatgagcccccccacacctgctggagcagcctgtgtggctacccccagtggtag

SEQ ID NO: 146000 - DNA, 2442 bp, synthetic construct
  misc_feature 1..2442: note = Description of Artificial Sequence: Synthetic coding sequence
  source 1..2442: mol_type = other DNA
atggatgccacagccctggagagagatgctgtgcagtttgcccggctggccgtgcagagggaccacgagggccgctacagcgaggccgtgttctactacaaggaggccgcccaggccctgatctatgcagagatggccggcagcagcctggagaacatccaggagaagatcacagagtacctggagcgggtgcaggccctgcacagcgctgtgcagagcaagtctgctgaccccctgaagagcaagcaccagctggacctggagcgggcccacttcctggtgacccaggcctttgatgaagatgagaaggaaaatgtggaggatgccatcgagctgtacacagaggccgtggacctgtgcctgaagaccagctatgaaacagctgacaaggtgctgcagaacaagctgaagcagctggcccggcaggccctggacagagctgaggccctgtctgagcccctgaccaagcctgtgggcaagatcagcagcacctctgtgaagcccaagcccccacctgtgcgggcccacttccccctgggcgccaaccccttcctggagcggccccagagcttcatcagcccccagagctgtgatgcccagggccagcgctacacagctgaggagattgaggtgctgcggaccaccagcaagatcaatggaattgaatatgtgcccttcatgaatgtggacctgcgggagagatttgcctaccccatgcccttctgtgaccgctggggcaagctgcccctgagccccaagcagaagaccaccttcagcaagtgggtgcggcctgaggacctgaccaacaaccccaccatgatctacacagtgtcctccttcagcatcaagcagaccatcgtgtctgactgcagctttgtggccagcctggccatctctgctgcctatgaaagacgcttcaacaagaagctgatcaccggcatcatctacccccagaacaaggatggagagcctgagtacaacccctgtgggaagtacatggtgaagctgcacctgaatggagtgcccaggaaggtgatcattgatgaccagctgcctgtggaccacaagggggagctgctgtgcagctacagcaacaacaagtctgagctgtgggtgtccctgattgagaaggcctacatgaaggtgatgggcggctatgacttccctggcagcaacagcaacatcgacctgcacgccctgaccggctggatccctgagcgcatcgccatgcacagcgacagccagaccttcagcaaggacaacagcttcaggatgctgtaccagcgcttccacaagggagatgtgctgatcacagccagcacaggcatgatgacagaagctgagggggagaagtggggcctggtgcccacccacgcctatgctgtgctggacatccgggagttcaagggcctgcgcttcatccagctgaagaacccctggagccacctgcgctggaagggccgctacagtgaaaatgatgtgaagaactggaccccagagctgcagaagtacctgaactttgaccccaggacagcccagaagattgacaatggcatcttctggatctcctgggatgacctgtgccagtactatgatgtgatctacctgtcctggaaccctggcctcttcaaggagagcacctgcatccacagcacctgggatgccaagcagggccctgtgaaggatgcctacagcctggccaacaacccccagtacaagctggaggtgcagtgcccccagggcggcgctgctgtgtgggtgctgctgagccgccacatcacagacaaggatgactttgccaacaaccgggagttcatcaccatggtggtgtacaagacagatggcaagaaggtgtactacccagctgaccccccaccctacattgatggcatccgcatcaacagcccccactacctgaccaagatcaagctgaccaccccaggcacccacaccttcaccctggtggtgtcccagtatgagaagcagaacaccatccactacacagtgcgggtgtacagcgcctgcagcttcaccttcagcaagatccccagcccctacaccctgagcaagaggatcaatggcaagtggagcggccagagcgctgggggctgcggcaacttccaggagacccacaagaacaaccccatctaccagttccacatcgagaagacaggccccctgctgattgagctgcggggcccccggcagtacagcgtgggctttgaggtggtgacagtgtccaccctgggggaccccggcccccacggcttcctgaggaagagcagcggggactaccgctgtggcttctgctacctggagctggagaacatccccagcggcatcttcaacatcatccccagcaccttcctgcccaagcaggagggccccttcttcctggacttcaacagcatcatccccatcaagatcacccagctgcagtag

SEQ ID NO: 146001 - DNA, 2073 bp, synthetic construct
  misc_feature 1..2073: note = Description of Artificial Sequence: Synthetic coding sequence
  source 1..2073: mol_type = other DNA
atgccctacctgtaccgggcccctggcccccaggcccaccctgtgcccaaggatgcccgcatcacccacagcagcggccagagctttgagcagatgaggcaggagtgcctgcagaggggcaccctgtttgaagatgctgacttccctgccagcaacagcagcctcttctacagcgagcggccccagatcccctttgtgtggaagaggcctggagaaattgtgaagaaccctgagttcatcctgggcggggccaccaggacagacatctgccagggcgagctgggggactgctggctgctggccgccatcgccagcctgaccctgaaccagaaggccctggcccgggtcatcccccaggaccagagctttggacctggctacgccggcatcttccacttccagttctggcagcacagcgagtggctggatgtggtgattgatgaccggctgcccaccttccgggaccggctggtgttcctgcacagcgctgaccacaatgagttctggagcgccctgctggagaaggcctatgccaagctgaatggcagctatgaggccctgaagggcggcagcgccatcgaggccatggaggacttcaccggcggcgtggccgagaccttccagaccaaggaggcccctgagaacttctatgagatcctggagaaggccctgaagaggggcagcctgctgggctgcttcatcgacaccaggtctgctgctgagagcgaggcccggacccccttcggcctcatcaagggccacgcctacagcgtgactggaattgaccaggtgtccttccggggccagagaattgagctgatccgcatccggaacccctggggccaggtggagtggaatggctcctggagcgacagcagccctgagtggaggtctgtgggccctgctgagcagaagaggctgtgccacacagccctggatgatggagagttctggatggccttcaaggacttcaaggcccactttgacaaggtggagatctgcaacctgaccccagatgccctggaggaggatgccatccacaagtgggaggtgacagtgcaccagggctcctgggtgcggggcagcacagctgggggctgcaggaacttcctggacaccttctggaccaacccccagatcaagctgagcctgacagagaaggatgagggccaggaggagtgcagcttcctggtggccctgatgcagaaggacaggaggaagctgaagagatttggagccaacgtgctgaccatcggctacgccatctatgagtgcccagacaaggatgagcacctgaacaaggacttcttccgctaccacgccagccgggcccggagcaagaccttcatcaacctgcgggaggtgtctgaccgcttcaagctgcccccaggagagtacatcctgatccccagcacctttgagccccaccaggaggccgacttctgcctgcgcatcttcagcgagaagaaggccatcacccgggacatggatggaaatgtggacatcgacctgcctgagccccccaagcccaccccaccagaccaggagacagaggaggagcagcgcttccgggccctgtttgagcaggtggccggggaggacatggaggtgacagctgaggagctggagtatgtgctgaatgctgtgctgcagaagaagaaggacatcaagttcaagaagctgagcctcatcagctgcaagaacatcatcagcctgatggacaccagcggaaatggcaagctggagtttgatgagttcaaggtgttctgggacaagctgaagcagtggatcaacctcttcctgcgctttgatgctgacaagagcggcaccatgagcacctatgagctgaggacagccctgaaggctgctggcttccagctgagcagccacctgctgcagctgattgtgctgcgctatgcagatgaggagctgcagctggactttgatgacttcctgaactgcctggtgcggctggagaatgccagcagggtcttccaggccctgagcaccaagaacaaggagttcatccacctgaacatcaatgagttcatccacctgaccatgaacatctag

SEQ ID NO: 146002 - DNA, 1995 bp, synthetic construct
  misc_feature 1..1995: note = Description of Artificial Sequence: Synthetic coding sequence
  source 1..1995: mol_type = other DNA
atgccctacctgtaccgggcccctggcccccaggcccaccctgtgcccaaggatgcccgcatcacccacagcagcggccagagctttgagcagatgaggcaggagtgcctgcagaggggcaccctgtttgaagatgctgacttccctgccagcaacagcagcctcttctacagcgagcggccccagatcccctttgtgtggaagaggcctggagaaattgtgaagaaccctgagttcatcctgggcggggccaccaggacagacatctgccagggcgagctgggggactgctggctgctggccgccatcgccagcctgaccctgaaccagaaggccctggcccgggtcatcccccaggaccagagctttggacctggctacgccggcatcttccacttccagttctggcagcacagcgagtggctggatgtggtgattgatgaccggctgcccaccttccgggaccggctggtgttcctgcacagcgctgaccacaatgagttctggagcgccctgctggagaaggcctatgccaagctgaatggcagctatgaggccctgaagggcggcagcgccatcgaggccatggaggacttcaccggcggcgtggccgagaccttccagaccaaggaggcccctgagaacttctatgagatcctggagaaggccctgaagaggggcagcctgctgggctgcttcatcgacaccaggtctgctgctgagagcgaggcccggacccccttcggcctcatcaagggccacgcctacagcgtgactggaattgaccaggtgtccttccggggccagagaattgagctgatccgcatccggaacccctggggccaggtggagtggaatggctcctggagcgacaggatggccttcaaggacttcaaggcccactttgacaaggtggagatctgcaacctgaccccagatgccctggaggaggatgccatccacaagtgggaggtgacagtgcaccagggctcctgggtgcggggcagcacagctgggggctgcaggaacttcctggacaccttctggaccaacccccagatcaagctgagcctgacagagaaggatgagggccaggaggagtgcagcttcctggtggccctgatgcagaaggacaggaggaagctgaagagatttggagccaacgtgctgaccatcggctacgccatctatgagtgcccagacaaggatgagcacctgaacaaggacttcttccgctaccacgccagccgggcccggagcaagaccttcatcaacctgcgggaggtgtctgaccgcttcaagctgcccccaggagagtacatcctgatccccagcacctttgagccccaccaggaggccgacttctgcctgcgcatcttcagcgagaagaaggccatcacccgggacatggatggaaatgtggacatcgacctgcctgagccccccaagcccaccccaccagaccaggagacagaggaggagcagcgcttccgggccctgtttgagcaggtggccggggaggacatggaggtgacagctgaggagctggagtatgtgctgaatgctgtgctgcagaagaagaaggacatcaagttcaagaagctgagcctcatcagctgcaagaacatcatcagcctgatggacaccagcggaaatggcaagctggagtttgatgagttcaaggtgttctgggacaagctgaagcagtggatcaacctcttcctgcgctttgatgctgacaagagcggcaccatgagcacctatgagctgaggacagccctgaaggctgctggcttccagctgagcagccacctgctgcagctgattgtgctgcgctatgcagatgaggagctgcagctggactttgatgacttcctgaactgcctggtgcggctggagaatgccagcagggtcttccaggccctgagcaccaagaacaaggagttcatccacctgaacatcaatgagttcatccacctgaccatgaacatctag

SEQ ID NO: 146003 - DNA, 1884 bp, synthetic construct
  misc_feature 1..1884: note = Description of Artificial Sequence: Synthetic coding sequence
  source 1..1884: mol_type = other DNA
atgccctacctgtaccgggcccctggcccccaggcccaccctgtgcccaaggatgcccgcatcacccacagcagcggccagagctttgagcagatgaggcaggagtgcctgcagaggggcaccctgtttgaagatgctgacttccctgccagcaacagcagcctcttctacagcgagcggccccagatcccctttgtgtggaagaggcctggcttctggcagcacagcgagtggctggatgtggtgattgatgaccggctgcccaccttccgggaccggctggtgttcctgcacagcgctgaccacaatgagttctggagcgccctgctggagaaggcctatgccaagctgaatggcagctatgaggccctgaagggcggcagcgccatcgaggccatggaggacttcaccggaggagtggccgagaccttccagaccaaggaggcccctgagaacttctatgagatcctggagaaggccctgaagaggggcagcctgctgggctgcttcatcgacaccaggtctgctgctgagagcgaggcccggaccccatttggcctcatcaagggccacgcctacagcgtgacaggcatcgaccaggtgtccttccggggccagagaattgagctgatccgcatccggaacccctggggccaggtggagtggaatggctcctggagcgacagcagccctgagtggaggtctgtgggccctgctgagcagaagaggctgtgccacacagccctggatgatggagagttctggatggccttcaaggacttcaaggcccactttgacaaggtggagatctgcaacctgaccccagatgccctggaggaggatgccatccacaagtgggaggtgacagtgcaccagggctcctgggtgcggggcagcacagctgggggctgcaggaacttcctggacaccttctggaccaacccccagatcaagctgagcctgacagagaaggatgagggccaggaggagtgcagcttcctggtggccctgatgcagaaggacaggaggaagctgaagagatttggagccaacgtgctgaccatcggctacgccatctatgaatgtcctgacaaggatgagcacctgaacaaggacttcttccgctaccacgccagccgggcccggagcaagaccttcatcaacctgcgggaggtgtctgaccgcttcaagctgcccccaggagagtacatcctgatccccagcacctttgagccccaccaggaggccgacttctgcctgcgcatcttcagcgagaagaaggccatcacccgggacatggatggaaatgtggacatcgacctgcctgagccccccaagcccaccccaccagaccaggagacagaggaggagcagcgcttccgggccctgtttgagcaggtggccggggaggacatggaggtgacagctgaggagctggagtatgtgctgaatgctgtgctgcagaagaagaaggacatcaagttcaagaagctgagcctcatcagctgcaagaacatcatcagcctgatggacaccagcggaaatggcaagctggagtttgatgagttcaaggtgttctgggacaagctgaagcagtggatcaacctcttcctgcgctttgatgctgacaagagcggcaccatgagcacctatgagctgaggacagccctgaaggccgccggcttccagctgagcagccacctgctgcagctgattgtgctgcgctatgcagatgaggagctgcagctggactttgatgacttcctgaactgcctggtgcggctggagaatgccagcagggtcttccaggccctgagcaccaagaacaaggagttcatccacctgaacatcaatgagttcatccacctgaccatgaacatctag

SEQ ID NO: 146004 - DNA, 807 bp, synthetic construct
  misc_feature 1..807: note = Description of Artificial Sequence: Synthetic coding sequence
  source 1..807: mol_type = other DNA
atgttcctggtgaacagcttcctgaagggcggcggcggcggcggcggcggcggcggcggcctgggcggcggcctgggcaatgtgctgggcggcctcatcagcggggccggcggcggcggcggcggcggcggcggcggcggcggcggcggcggcggcggcggcggcggcacagccatgaggatcctgggcggcgtcatcagcgccatcagcgaggccgccgcccagtacaaccctgagcccccaccacccaggacccactacagcaacatcgaggccaatgaaagtgaggaggtgcggcagttccggcggctgtttgcccagctggccggagatgacatggaggtgtctgccacagagctgatgaacatcctgaacaaggtggtgaccaggcacccagacctgaagacagatggctttggaattgacacctgccgctccatggtggccgtgatggacagcgacaccaccgggaagctgggctttgaggagttcaagtacctgtggaacaacatcaagcgctggcaggccatctacaagcagtttgacacagacaggagcggcaccatctgcagcagcgagctgcccggggcctttgaggccgccggcttccacctgaatgagcacctgtacaacatgatcatccgccgctacagtgatgaaagtggcaacatggactttgacaacttcatcagctgcctggtgcggctggatgccatgttccgggccttcaagagcctggacaaggatggcaccggccagatccaggtgaacatccaggagtggctgcagctgaccatgtacagctag

SEQ ID NO: 146005 - DNA, 2061 bp, synthetic construct
  misc_feature 1..2061: note = Description of Artificial Sequence: Synthetic coding sequence
  source 1..2061: mol_type = other DNA
atgaaccccacagagaccaaggctgtgaagacagagcctgagaagaagagccagagcaccaagctgtctgtggtgcatgagaagaagagccaggagggcaagcccaaggagcacacagagcccaagagcctgcccaagcaggccagtgacaccggcagcaatgatgcccacaacaagaaggctgtgagccgctctgctgagcagcagcccagcgagaagagcacagagcccaagaccaagccccaggacatgatctctgctggaggagagagcgtggccggcatcacagccatcagcggcaagccaggggacaagaagaaggagaagaagagcctgaccccagctgtgcctgtggagagcaagccagacaagcccagcggcaagagcggcatggatgctgccctggatgacctgattgacaccctgggcggccctgaggagacagaggaggagaacaccacctacacaggccctgaggtgtctgaccccatgagcagcacctacatcgaggagctgggcaagcgggaggtgaccatcccccccaagtaccgggagctgctggccaagaaggagggcatcaccggccccccagctgacagcagcaagcccatcggcccagatgatgccattgatgccctgagcagtgacttcacctgtggcagccccacagctgctgggaagaagacagagaaggaggagagcacagaggtgctgaaggcccagagcgctggcaccgtgcgctctgctgccccaccccaggagaagaagaggaaggtggagaaggacaccatgtctgaccaggccctggaggccctgagcgccagcctgggcacccggcaggccgagcctgagctggacctgcggagcatcaaggaggtggatgaggccaaggccaaggaggagaagctggagaagtgtggggaggatgatgagaccatccccagcgagtaccgcctgaagccagccacagacaaggatggcaagcccctgctgcctgagcctgaggagaagcccaagcccaggtctgagagcgagctgattgatgagctgtctgaggactttgacagaagtgagtgcaaggagaagcccagcaagcccacagagaagacagaggagagcaaggccgccgccccagcccctgtgtctgaggccgtgtgcaggacctccatgtgcagcatccagagcgcccctcctgagcccgccaccctgaagggcaccgtgcctgatgatgctgtggaggccctggccgacagcctgggcaagaaggaggccgaccctgaagatggcaagcctgtgatggacaaggtgaaggagaaggccaaggaggaggaccgggagaagctgggggagaaggaggagaccatccccccagactaccgcctggaggaggtgaaggacaaggatggcaagcccctgctgcccaaggagagcaaggagcagctgccccccatgtctgaggacttcctgctggatgccctgtctgaggacttcagcggcccccagaatgccagcagcctgaagtttgaagatgccaagctggccgccgccatcagcgaggtggtgtcccagaccccagccagcaccacccaggccggggccccaccccgggacaccagccagagcgacaaggacctggatgatgccctggacaagctgagtgacagcctgggccagaggcagcctgaccctgatgagaacaagcccatggaggacaaggtgaaggagaaggccaaggccgagcaccgggacaagctgggggagagagatgacaccatccccccagagtaccgccacctgctggatgacaatggccaggacaagcctgtgaagccacccaccaagaagtctgaggacagcaagaagccagcagatgaccaggaccccattgatgccctgagcggggacctggacagctgccccagcaccacagagaccagccagaacacagccaaggacaagtgcaagaaggccgccagcagcagcaaggcccccaagaatggaggcaaggccaaggacagcgccaagaccacagaggagaccagcaagcccaaggatgactag

SEQ ID NO: 146006 - DNA, 2271 bp, synthetic construct
  misc_feature 1..2271: note = Description of Artificial Sequence: Synthetic coding sequence
  source 1..2271: mol_type = other DNA
atgagccagcccggccagaagccagctgccagcccccggcccaggagagctgctgctgcccggaggacccatgagcacgtgtctgagaagaccagcgagagccccagcaagccaggagagaagaagggcagtgatgagaagaaggccgccagcctgggcagcagccagagcagcaggacctacgccggcggcacagccagcgccaccaaggtgtctgccagcagcggggccaccagcaagagcagctccatgaaccccacagagaccaaggctgtgaagacagagcctgagaagaagagccagagcaccaagctgtctgtggtgcatgagaagaagagccaggagggcaagcccaaggagcacacagagcccaagagcctgcccaagcaggccagtgacaccggcagcaatgatgcccacaacaagaaggctgtgagccgctctgctgagcagcagcccagcgagaagagcacagagcccaagaccaagccccaggacatgatctctgctggaggagagagcgtggccggcatcacagccatcagcggcaagccaggggacaagaagaaggagaagaagagcctgaccccagctgtgcctgtggagagcaagccagacaagcccagcggcaagagcggcatggatgctgccctggatgacctgattgacaccctgggcggccctgaggagacagaggaggagaacaccacctacacaggccctgaggtgtctgaccccatgagcagcacctacatcgaggagctgggcaagcgggaggtgaccatcccccccaagtaccgggagctgctggccaagcccatcggcccagatgatgccattgatgccctgagcagtgacttcacctgtggcagccccacagctgctgggaagaagacagagaaggaggagagcacagaggtgctgaaggcccagagcgctggcaccgtgcgctctgctgccccaccccaggagaagaagaggaaggtggagaaggacaccatgtctgaccaggccctggaggccctgagcgccagcctgggcacccggcaggccgagcctgagctggacctgcggagcatcaaggaggtggatgaggccaaggccaaggaggagaagctggagaagtgtggggaggatgatgagaccatccccagcgagtaccgcctgaagccagccacagacaaggatggcaagcccctgctgcctgagcctgaggagaagcccaagcccaggtctgagagcgagctgattgatgagctgtctgaggactttgacagaagtgagtgcaaggagaagcccagcaagcccacagagaagacagaggagagcaaggccgccgccccagcccctgtgtctgaggccgtgtgcaggacctccatgtgcagcatccagagcgcccctcctgagcccgccaccctgaagggcaccgtgcctgatgatgctgtggaggccctggccgacagcctgggcaagaaggaggccgaccctgaagatggcaagcctgtgatggacaaggtgaaggagaaggccaaggaggaggaccgggagaagctgggggagaaggaggagaccatccccccagactaccgcctggaggaggtgaaggacaaggatggcaagcccctgctgcccaaggagagcaaggagcagctgccccccatgtctgaggacttcctgctggatgccctgtctgaggacttcagcggcccccagaatgccagcagcctgaagtttgaagatgccaagctggccgccgccatcagcgaggtggtgtcccagaccccagccagcaccacccaggccggggccccaccccgggacaccagccagagcgacaaggacctggatgatgccctggacaagctgagtgacagcctgggccagaggcagcctgaccctgatgagaacaagcccatggaggacaaggtgaaggagaaggccaaggccgagcaccgggacaagctgggggagagagatgacaccatccccccagagtaccgccacctgctggatgacaatggccaggacaagcctgtgaagccacccaccaagaagtctgaggacagcaagaagccagcagatgaccaggaccccattgatgccctgagcggggacctggacagctgccccagcaccacagagaccagccagaacacagccaaggacaagtgcaagaaggccgccagcagcagcaaggcccccaagaatggaggcaaggccaaggacagcgccaagaccacagaggagaccagcaagcccaaggatgactag

SEQ ID NO: 146007 - DNA, 2088 bp, synthetic construct
  misc_feature 1..2088: note = Description of Artificial Sequence: Synthetic coding sequence
  source 1..2088: mol_type = other DNA
atgaaccccacagagaccaaggccatccctgtgtcccagcagatggagggcccccacctgcccaacaagaagaagcacaagaagcaggccgtgaagacagagcctgagaagaagagccagagcaccaagctgtctgtggtgcatgagaagaagagccaggagggcaagcccaaggagcacacagagcccaagagcctgcccaagcaggccagtgacaccggcagcaatgatgcccacaacaagaaggctgtgagccgctctgctgagcagcagcccagcgagaagagcacagagcccaagaccaagccccaggacatgatctctgctggaggagagagcgtggccggcatcacagccatcagcggcaagccaggggacaagaagaaggagaagaagagcctgaccccagctgtgcctgtggagagcaagccagacaagcccagcggcaagagcggcatggatgctgccctggatgacctgattgacaccctgggcggccctgaggagacagaggaggagaacaccacctacacaggccctgaggtgtctgaccccatgagcagcacctacatcgaggagctgggcaagcgggaggtgaccatcccccccaagtaccgggagctgctggccaagcccatcggcccagatgatgccattgatgccctgagcagtgacttcacctgtggcagccccacagctgctgggaagaagacagagaaggaggagagcacagaggtgctgaaggcccagagcgctggcaccgtgcgctctgctgccccaccccaggagaagaagaggaaggtggagaaggacaccatgtctgaccaggccctggaggccctgagcgccagcctgggcacccggcaggccgagcctgagctggacctgcggagcatcaaggaggtggatgaggccaaggccaaggaggagaagctggagaagtgtggagaagatgatgagaccatccccagcgagtaccgcctgaagccagccacagacaaggatggcaagcccctgctgcctgagcctgaggagaagcccaagcccaggtctgagagcgagctgattgatgagctgtctgaagattttgacagaagtgagtgcaaggagaagcccagcaagcccacagagaagacagaggagagcaaggctgctgccccagcccctgtgtctgaggccgtgtgcaggacctccatgtgcagcatccagagcgcccctcctgagcccgccaccctgaagggcaccgtgcctgatgatgctgtggaggccctggccgacagcctgggcaagaaggaggccgaccctgaagatggcaagcctgtgatggacaaggtgaaggagaaggccaaggaggaggaccgggagaagctgggggagaaggaggagaccatccccccagactaccgcctggaggaggtgaaggacaaggatggcaagcccctgctgcccaaggagagcaaggagcagctgccccccatgtctgaggacttcctgctggatgccctgtctgaggacttcagcggcccccagaatgccagcagcctgaagtttgaagatgccaagctggccgccgccatcagcgaggtggtgtcccagaccccagccagcaccacccaggccggggccccaccccgggacaccagccagagcgacaaggacctggatgatgccctggacaagctgagtgacagcctgggccagaggcagcctgaccctgatgagaacaagcccatggaggacaaggtgaaggagaaggccaaggccgagcaccgggacaagctgggggagagagatgacaccatccccccagagtaccgccacctgctggatgacaatggccaggacaagcctgtgaagccacccaccaagaagtctgaggacagcaagaagccagcagatgaccaggaccccattgatgccctgagcggggacctggacagctgccccagcaccacagagaccagccagaacacagccaaggacaagtgcaagaaggccgccagcagcagcaaggcccccaagaatggaggcaaggccaaggacagcgccaagaccacagaggagaccagcaagcccaaggatgactag

SEQ ID NO: 146008 - DNA, 2127 bp, synthetic construct
  misc_feature 1..2127: note = Description of Artificial Sequence: Synthetic coding sequence
  source 1..2127: mol_type = other DNA
atgaaccccacagagaccaaggccatccctgtgtcccagcagatggagggcccccacctgcccaacaagaagaagcacaagaagcaggccgtgaagacagagcctgagaagaagagccagagcaccaagctgtctgtggtgcatgagaagaagagccaggagggcaagcccaaggagcacacagagcccaagagcctgcccaagcaggccagtgacaccggcagcaatgatgcccacaacaagaaggctgtgagccgctctgctgagcagcagcccagcgagaagagcacagagcccaagaccaagccccaggacatgatctctgctggaggagagagcgtggccggcatcacagccatcagcggcaagccaggggacaagaagaaggagaagaagagcctgaccccagctgtgcctgtggagagcaagccagacaagcccagcggcaagagcggcatggatgctgccctggatgacctgattgacaccctgggcggccctgaggagacagaggaggagaacaccacctacacaggccctgaggtgtctgaccccatgagcagcacctacatcgaggagctgggcaagcgggaggtgaccatcccccccaagtaccgggagctgctggccaagaaggagggcatcaccggccccccagctgacagcagcaagcccatcggcccagatgatgccattgatgccctgagcagtgacttcacctgtggcagccccacagctgctgggaagaagacagagaaggaggagagcacagaggtgctgaaggcccagagcgctggcaccgtgcgctctgctgccccaccccaggagaagaagaggaaggtggagaaggacaccatgtctgaccaggccctggaggccctgagcgccagcctgggcacccggcaggccgagcctgagctggacctgcggagcatcaaggaggtggatgaggccaaggccaaggaggagaagctggagaagtgtggggaggatgatgagaccatccccagcgagtaccgcctgaagccagccacagacaaggatggcaagcccctgctgcctgagcctgaggagaagcccaagcccaggtctgagagcgagctgattgatgagctgtctgaggactttgacagaagtgagtgcaaggagaagcccagcaagcccacagagaagacagaggagagcaaggccgccgccccagcccctgtgtctgaggccgtgtgcaggacctccatgtgcagcatccagagcgcccctcctgagcccgccaccctgaagggcaccgtgcctgatgatgctgtggaggccctggccgacagcctgggcaagaaggaggccgaccctgaagatggcaagcctgtgatggacaaggtgaaggagaaggccaaggaggaggaccgggagaagctgggggagaaggaggagaccatccccccagactaccgcctggaggaggtgaaggacaaggatggcaagcccctgctgcccaaggagagcaaggagcagctgccccccatgtctgaggacttcctgctggatgccctgtctgaggacttcagcggcccccagaatgccagcagcctgaagtttgaagatgccaagctggccgccgccatcagcgaggtggtgtcccagaccccagccagcaccacccaggccggggccccaccccgggacaccagccagagcgacaaggacctggatgatgccctggacaagctgagtgacagcctgggccagaggcagcctgaccctgatgagaacaagcccatggaggacaaggtgaaggagaaggccaaggccgagcaccgggacaagctgggggagagagatgacaccatccccccagagtaccgccacctgctggatgacaatggccaggacaagcctgtgaagccacccaccaagaagtctgaggacagcaagaagccagcagatgaccaggaccccattgatgccctgagcggggacctggacagctgccccagcaccacagagaccagccagaacacagccaaggacaagtgcaagaaggccgccagcagcagcaaggcccccaagaatggaggcaaggccaaggacagcgccaagaccacagaggagaccagcaagcccaaggatgactag

SEQ ID NO: 146009 - DNA, 2319 bp, synthetic construct
  misc_feature 1..2319: note = Description of Artificial Sequence: Synthetic coding sequence
  source 1..2319: mol_type = other DNA
atgagccagcccggccagaagccagctgccagcccccggcccaggagagctgctgctgcccggaggacccatgagcacgtgtctgagaagaccagcgagagccccagcaagccaggagagaagaagggcagtgatgagaagaaggccgccagcctgggcagcagccagagcagcaggacctacgccggcggcacagccagcgccaccaaggtgtctgccagcagcggggccaccagcaagagcagctccatgaaccccacagagaccaaggccatccctgtgtcccagcagatggagggcccccacctgcccaacaagaagaagcacaagaagcaggccgtgaagacagagcctgagaagaagagccagagcaccaagcccaagagcctgcccaagcaggccagtgacaccggcagcaatgatgcccacaacaagaaggctgtgagccgctctgctgagcagcagcccagcgagaagagcacagagcccaagaccaagccccaggacatgatctctgctggaggagagagcgtggccggcatcacagccatcagcggcaagccaggggacaagaagaaggagaagaagagcctgaccccagctgtgcctgtggagagcaagccagacaagcccagcggcaagagcggcatggatgctgccctggatgacctgattgacaccctgggcggccctgaggagacagaggaggagaacaccacctacacaggccctgaggtgtctgaccccatgagcagcacctacatcgaggagctgggcaagcgggaggtgaccatcccccccaagtaccgggagctgctggccaagaaggagggcatcaccggccccccagctgacagcagcaagcccatcggcccagatgatgccattgatgccctgagcagtgacttcacctgtggcagccccacagctgctgggaagaagacagagaaggaggagagcacagaggtgctgaaggcccagagcgctggcaccgtgcgctctgctgccccaccccaggagaagaagaggaaggtggagaaggacaccatgtctgaccaggccctggaggccctgagcgccagcctgggcacccggcaggccgagcctgagctggacctgcggagcatcaaggaggtggatgaggccaaggccaaggaggagaagctggagaagtgtggggaggatgatgagaccatccccagcgagtaccgcctgaagccagccacagacaaggatggcaagcccctgctgcctgagcctgaggagaagcccaagcccaggtctgagagcgagctgattgatgagctgtctgaggactttgacagaagtgagtgcaaggagaagcccagcaagcccacagagaagacagaggagagcaaggccgccgccccagcccctgtgtctgaggccgtgtgcaggacctccatgtgcagcatccagagcgcccctcctgagcccgccaccctgaagggcaccgtgcctgatgatgctgtggaggccctggccgacagcctgggcaagaaggaggccgaccctgaagatggcaagcctgtgatggacaaggtgaaggagaaggccaaggaggaggaccgggagaagctgggggagaaggaggagaccatccccccagactaccgcctggaggaggtgaaggacaaggatggcaagcccctgctgcccaaggagagcaaggagcagctgccccccatgtctgaggacttcctgctggatgccctgtctgaggacttcagcggcccccagaatgccagcagcctgaagtttgaagatgccaagctggccgccgccatcagcgaggtggtgtcccagaccccagccagcaccacccaggccggggccccaccccgggacaccagccagagcgacaaggacctggatgatgccctggacaagctgagtgacagcctgggccagaggcagcctgaccctgatgagaacaagcccatggaggacaaggtgaaggagaaggccaaggccgagcaccgggacaagctgggggagagagatgacaccatccccccagagtaccgccacctgctggatgacaatggccaggacaagcctgtgaagccacccaccaagaagtctgaggacagcaagaagccagcagatgaccaggaccccattgatgccctgagcggggacctggacagctgccccagcaccacagagaccagccagaacacagccaaggacaagtgcaagaaggccgccagcagcagcaaggcccccaagaatggaggcaaggccaaggacagcgccaagaccacagaggagaccagcaagcccaaggatgactag

SEQ ID NO: 146010 - DNA, 2376 bp, synthetic construct
  misc_feature 1..2376: note = Description of Artificial Sequence: Synthetic coding sequence
  source 1..2376: mol_type = other DNA
atgagccagcccggccagaagccagctgccagcccccggcccaggagagctgctgctgcccggaggacccatgagcacgtgtctgagaagaccagcgagagccccagcaagccaggagagaagaagggcagtgatgagaagaaggccgccagcctgggcagcagccagagcagcaggacctacgccggcggcacagccagcgccaccaaggtgtctgccagcagcggggccaccagcaagagcagctccatgaaccccacagagaccaaggccatccctgtgtcccagcagatggagggcccccacctgcccaacaagaagaagcacaagaagcaggccgtgaagacagagcctgagaagaagagccagagcaccaagctgtctgtggtgcatgagaagaagagccaggagggcaagcccaaggagcacacagagcccaagagcctgcccaagcaggccagtgacaccggcagcaatgatgcccacaacaagaaggctgtgagccgctctgctgagcagcagcccagcgagaagagcacagagcccaagaccaagccccaggacatgatctctgctggaggagagagcgtggccggcatcacagccatcagcggcaagccaggggacaagaagaaggagaagaagagcctgaccccagctgtgcctgtggagagcaagccagacaagcccagcggcaagagcggcatggatgctgccctggatgacctgattgacaccctgggcggccctgaggagacagaggaggagaacaccacctacacaggccctgaggtgtctgaccccatgagcagcacctacatcgaggagctgggcaagcgggaggtgaccatcccccccaagtaccgggagctgctggccaagaaggagggcatcactggacctcctgctgacagcagcaagcccatcggcccagatgatgccattgatgccctgagcagtgacttcacctgtggcagccccacagctgctgggaagaagacagagaaggaggagagcacagaggtgctgaaggcccagagcgctggcaccgtgcgctctgctgccccaccccaggagaagaagaggaaggtggagaaggacaccatgtctgaccaggccctggaggccctgagcgccagcctgggcacccggcaggccgagcctgagctggacctgcggagcatcaaggaggtggatgaggccaaggccaaggaggagaagctggagaagtgtggagaagatgatgagaccatccccagcgagtaccgcctgaagccagccacagacaaggatggcaagcccctgctgcctgagcctgaggagaagcccaagcccaggtctgagagcgagctgattgatgagctgtctgaagattttgacagaagtgagtgcaaggagaagcccagcaagcccacagagaagacagaggagagcaaggctgctgccccagcccctgtgtctgaggccgtgtgcaggacctccatgtgcagcatccagagcgcccctcctgagcccgccaccctgaagggcaccgtgcctgatgatgctgtggaggccctggccgacagcctgggcaagaaggaggccgaccctgaagatggcaagcctgtgatggacaaggtgaaggagaaggccaaggaggaggaccgggagaagctgggggagaaggaggagaccatccccccagactaccgcctggaggaggtgaaggacaaggatggcaagcccctgctgcccaaggagagcaaggagcagctgccccccatgtctgaggacttcctgctggatgccctgtctgaggacttcagcggcccccagaatgccagcagcctgaagtttgaagatgccaagctggccgccgccatcagcgaggtggtgtcccagaccccagccagcaccacccaggccggggccccaccccgggacaccagccagagcgacaaggacctggatgatgccctggacaagctgagtgacagcctgggccagaggcagcctgaccctgatgagaacaagcccatggaggacaaggtgaaggagaaggccaaggccgagcaccgggacaagctgggggagagagatgacaccatccccccagagtaccgccacctgctggatgacaatggccaggacaagcctgtgaagccacccaccaagaagtctgaggacagcaagaagccagcagatgaccaggaccccattgatgccctgagcggggacctggacagctgccccagcaccacagagaccagccagaacacagccaaggacaagtgcaagaaggccgccagcagcagcaaggcccccaagaatggaggcaaggccaaggacagcgccaagaccacagaggagaccagcaagcccaaggatgactag

SEQ ID NO: 146011 - DNA, 2265 bp, synthetic construct
  misc_feature 1..2265: note = Description of Artificial Sequence: Synthetic coding sequence
  source 1..2265: mol_type = other DNA
atggcctttgcctcctggtggtacaagacccacgtgtctgagaagaccagcgagagccccagcaagccaggagagaagaagggcagtgatgagaagaaggccgccagcctgggcagcagccagagcagcaggacctacgccggcggcacagccagcgccaccaaggtgtctgccagcagcggggccaccagcaagagcagctccatgaaccccacagagaccaaggctgtgaagacagagcctgagaagaagagccagagcaccaagctgtctgtggtgcatgagaagaagagccaggagggcaagcccaaggagcacacagagcccaagagcctgcccaagcaggccagtgacaccggcagcaatgatgcccacaacaagaaggctgtgagccgctctgctgagcagcagcccagcgagaagagcacagagcccaagaccaagccccaggacatgatctctgctggaggagagagcgtggccggcatcacagccatcagcggcaagccaggggacaagaagaaggagaagaagagcctgaccccagctgtgcctgtggagagcaagccagacaagcccagcggcaagagcggcatggatgctgccctggatgacctgattgacaccctgggcggccctgaggagacagaggaggagaacaccacctacacaggccctgaggtgtctgaccccatgagcagcacctacatcgaggagctgggcaagcgggaggtgaccatcccccccaagtaccgggagctgctggccaagaaggagggcatcaccggccccccagctgacagcagcaagcccatcggcccagatgatgccattgatgccctgagcagtgacttcacctgtggcagccccacagctgctgggaagaagacagagaaggaggagagcacagaggtgctgaaggcccagagcgctggcaccgtgcgctctgctgccccaccccaggagaagaagaggaaggtggagaaggacaccatgtctgaccaggccctggaggccctgagcgccagcctgggcacccggcaggccgagcctgagctggacctgcggagcatcaaggaggtggatgaggccaaggccaaggaggagaagctggagaagtgtggggaggatgatgagaccatccccagcgagtaccgcctgaagccagccacagacaaggatggcaagcccctgctgcctgagcctgaggagaagcccaagcccaggtctgagagcgagctgattgatgagctgtctgaggactttgacagaagtgagtgcaaggagaagcccagcaagcccacagagaagacagaggagagcaaggccgccgccccagcccctgtgtctgaggccgtgtgcaggacctccatgtgcagcatccagagcgcccctcctgagcccgccaccctgaagggcaccgtgcctgatgatgctgtggaggccctggccgacagcctgggcaagaaggaggccgaccctgaagatggcaagcctgtgatggacaaggtgaaggagaaggccaaggaggaggaccgggagaagctgggggagaaggaggagaccatccccccagactaccgcctggaggaggtgaaggacaaggatggcaagcccctgctgcccaaggagagcaaggagcagctgccccccatgtctgaggacttcctgctggatgccctgtctgaggacttcagcggcccccagaatgccagcagcctgaagtttgaagatgccaagctggccgccgccatcagcgaggtggtgtcccagaccccagccagcaccacccaggccggggccccaccccgggacaccagccagagcgacaaggacctggatgatgccctggacaagctgagtgacagcctgggccagaggcagcctgaccctgatgagaacaagcccatggaggacaaggtgaaggagaaggccaaggccgagcaccgggacaagctgggggagagagatgacaccatccccccagagtaccgccacctgctggatgacaatggccaggacaagcctgtgaagccacccaccaagaagtctgaggacagcaagaagccagcagatgaccaggaccccattgatgccctgagcggggacctggacagctgccccagcaccacagagaccagccagaacacagccaaggacaagtgcaagaaggccgccagcagcagcaaggcccccaagaatggaggcaaggccaaggacagcgccaagaccacagaggagaccagcaagcccaaggatgactag

SEQ ID NO: 146012 - DNA, 2376 bp, synthetic construct; identical to SEQ ID NO: 146010
  misc_feature 1..2376: note = Description of Artificial Sequence: Synthetic coding sequence
  source 1..2376: mol_type = other DNA

SEQ ID NO: 146013 - DNA, 1929 bp, synthetic construct
  misc_feature 1..1929: note = Description of Artificial Sequence: Synthetic coding sequence
  source 1..1929: mol_type = other DNA
atgaaccccacagagaccaaggccatccctgtgtcccagcagatggagggcccccacctgcccaacaagaagaagcacaagaagcaggccgtgaagacagagcctgagaagaagagccagagcaccaagctgtctgtggtgcatgagaagaagagccaggagggcaagcccaaggagcacacagagcccaagagcctgcccaagcaggccagtgacaccggcagcaatgatgcccacaacaagaaggctgtgagccgctctgctgagcagcagcccagcgagaagagcacagagcccaagaccaagccccaggacatgatctctgctggaggagagagcgtggccggcatcacagccatcagcggcaagccaggggacaagaagaaggagaagaagagcctgaccccagctgtgcctgtggagagcaagccagacaagcccagcggcaagagcggcatggatgctgccctggatgacctgattgacaccctgggcggccctgaggagacagaggaggagaacaccacctacacaggccctgaggtgtctgaccccatgagcagcacctacatcgaggagctgggcaagcgggaggtgaccatcccccccaagtaccgggagctgctggccaagaaggagggcatcaccggccccccagctgacagcagcaagcccatcggcccagatgatgccattgatgccctgagcagtgacttcacctgtggcagccccacagctgctgggaagaagacagagaaggaggagagcacagaggtgctgaaggcccagagcgctggcaccgtgcgctctgctgccccaccccaggagaagaagaggaaggtggagaaggacaccatgtctgaccaggccctggaggccctgagcgccagcctgggcacccggcaggccgagcctgagctggacctgcggagcatcaaggaggtggatgaggccaaggccaaggaggagaagctggagaagtgtggggaggatgatgagaccatccccagcgagtaccgcctgaagccagccacagacaaggatggcaagcccctgctgcctgagcctgaggagaagcccaagcccaggtctgagagcgagctgattgatgagctgtctgaggactttgacagaagtgagtgcaaggagaagcccagcaagcccacagagaagacagaggagagcaaggccgccgccccagcccctgtgtctgaggccgtgtgcaggacctccatgtgcagcatccagagcgcccctcctgagcccgccaccctgaagggcaccgtgcctgatgatgctgtggaggccctggccgacagcctgggcaagaaggaggccgaccctgaagatggcaagcctgtgatggacaaggtgaaggagaaggccaaggaggaggaccgggagaagctgggggagaaggaggagaccatccccccagactaccgcctggaggaggtgaaggacaaggatggcaagcccctgctgcccaaggagagcaaggagcagctgccccccatgtctgaggacttcctgctggatgccctgtctgaggacttcagcggcccccagaatgccagcagcctgaagtttgaagatgccaagctggccgccgccatcagcgaggtggtgtcccagaccccagccagcaccacccaggccggggccccaccccgggacaccagccagagcgacaaggacctggatgatgccctggacaagctgagtgacagcctgggccagaggcagcctgaccctgatgagaacaagcccatggaggacaaggtgaaggagaaggccaaggccgagcaccgggacaagctgggggagagagatgacaccatccccccagagtaccgccacctgctggatgacaatggccaggacaagcctgtgaagccacccaccaagaagtctgaggacagcaagtag

SEQ ID NO: 146014 - DNA, 2085 bp, synthetic construct
  misc_feature 1..2085: note = Description of Artificial Sequence: Synthetic coding sequence
  source 1..2085: mol_type = other DNA
atggagggcccccacctgcccaacaagaagaagcacaagaagcaggccgtgaagacagagcctgagaagaagagccagagcaccaagctgtctgtggtgcatgagaagaagagccaggagggcaagcccaaggagcacacagagcccaagagcctgcccaagcaggccagtgacaccggcagcaatgatgcccacaacaagaaggctgtgagccgctctgctgagcagcagcccagcgagaagagcacagagcccaagaccaagccccaggacatgatctctgctggaggagagagcgtggccggcatcacagccatcagcggcaagccaggggacaagaagaaggagaagaagagcctgaccccagctgtgcctgtggagagcaagccagacaagcccagcggcaagagcggcatggatgctgccctggatgacctgattgacaccctgggcggccctgaggagacagaggaggagaacaccacctacacaggccctgaggtgtctgaccccatgagcagcacctacatcgaggagctgggcaagcgggaggtgaccatcccccccaagtaccgggagctgctggccaagaaggagggcatcaccggccccccagctgacagcagcaagcccatcggcccagatgatgccattgatgccctgagcagtgacttcacctgtggcagccccacagctgctgggaagaagacagagaaggaggagagcacagaggtgctgaaggcccagagcgctggcaccgtgcgctctgctgccccaccccaggagaagaagaggaaggtggagaaggacaccatgtctgaccaggccctggaggccctgagcgccagcctgggcacccggcaggccgagcctgagctggacctgcggagcatcaaggaggtggatgaggccaaggccaaggaggagaagctggagaagtgtggggaggatgatgagaccatccccagcgagtaccgcctgaagccagccacagacaaggatggcaagcccctgctgcctgagcctgaggagaagcccaagcccaggtctgagagcgagctgattgatgagctgtctgaggactttgacagaagtgagtgcaaggagaagcccagcaagcccacagagaagacagaggagagcaaggccgccgccccagcccctgtgtctgaggccgtgtgcaggacctccatgtgcagcatccagagcgcccctcctgagcccgccaccctgaagggcaccgtgcctgatgatgctgtggaggccctggccgacagcctgggcaagaaggaggccgaccctgaagatggcaagcctgtgatggacaaggtgaaggagaaggccaaggaggaggaccgggagaagctgggggagaaggaggagaccatccccccagactaccgcctggaggaggtgaaggacaaggatggcaagcccctgctgcccaaggagagcaaggagcagctgccccccatgtctgaggacttcctgctggatgccctgtctgaggacttcagcggcccccagaatgccagcagcctgaagtttgaagatgccaagctggccgccgccatcagcgaggtggtgtcccagaccccagccagcaccacccaggccggggccccaccccgggacaccagccagagcgacaaggacctggatgatgccctggacaagctgagtgacagcctgggccagaggcagcctgaccctgatgagaacaagcccatggaggacaaggtgaaggagaaggccaaggccgagcaccgggacaagctgggggagagagatgacaccatccccccagagtaccgccacctgctggatgacaatggccaggacaagcctgtgaagccacccaccaagaagtctgaggacagcaagaagccagcagatgaccaggaccccattgatgccctgagcggggacctggacagctgccccagcaccacagagaccagccagaacacagccaaggacaagtgcaagaaggccgccagcagcagcaaggcccccaagaatggaggcaaggccaaggacagcgccaagaccacagaggagaccagcaagcccaaggatgactag

SEQ ID NO: 146015 - DNA, 2253 bp, synthetic construct
  misc_feature 1..2253: note = Description of Artificial Sequence: Synthetic coding sequence
  source 1..2253: mol_type = other DNA
atgagccagcccggccagaagccagctgccagcccccggcccaggagagctgctgctgcccggaggacccatgagcacgtgtctgagaagaccagcgagagccccagcaagccaggagagaagaagggcagtgatgagaagaaggccgccagcctgggcagcagccagagcagcaggacctacgccggcggcacagccagcgccaccaaggtgtctgccagcagcggggccaccagcaagagcagctccatgaaccccacagagaccaaggctgtgaagacagagcctgagaagaagagccagagcaccaagcccaagagcctgcccaagcaggccagtgacaccggcagcaatgatgcccacaacaagaaggctgtgagccgctctgctgagcagcagcccagcgagaagagcacagagcccaagaccaagccccaggacatgatctctgctggaggagagagcgtggccggcatcacagccatcagcggcaagccaggggacaagaagaaggagaagaagagcctgaccccagctgtgcctgtggagagcaagccagacaagcccagcggcaagagcggcatggatgctgccctggatgacctgattgacaccctgggcggccctgaggagacagaggaggagaacaccacctacacaggccctgaggtgtctgaccccatgagcagcacctacatcgaggagctgggcaagcgggaggtgaccatcccccccaagtaccgggagctgctggccaagaaggagggcatcaccggccccccagctgacagcagcaagcccatcggcccagatgatgccattgatgccctgagcagtgacttcacctgtggcagccccacagctgctgggaagaagacagagaaggaggagagcacagaggtgctgaaggcccagagcgctggcaccgtgcgctctgctgccccaccccaggagaagaagaggaaggtggagaaggacaccatgtctgaccaggccctggaggccctgagcgccagcctgggcacccggcaggccgagcctgagctggacctgcggagcatcaaggaggtggatgaggccaaggccaaggaggagaagctggagaagtgtggggaggatgatgagaccatccccagcgagtaccgcctgaagccagccacagacaaggatggcaagcccctgctgcctgagcctgaggagaagcccaagcccaggtctgagagcgagctgattgatgagctgtctgaggactttgacagaagtgagtgcaaggagaagcccagcaagcccacagagaagacagaggagagcaaggccgccgccccagcccctgtgtctgaggccgtgtgcaggacctccatgtgcagcatccagagcgcccctcctgagcccgccaccctgaagggcaccgtgcctgatgatgctgtggaggccctggccgacagcctgggcaagaaggaggccgaccctgaagatggcaagcctgtgatggacaaggtgaaggagaaggccaaggaggaggaccgggagaagctgggggagaaggaggagaccatccccccagactaccgcctggaggaggtgaaggacaaggatggcaagcccctgctgcccaaggagagcaaggagcagctgccccccatgtctgaggacttcctgctggatgccctgtctgaggacttcagcggcccccagaatgccagcagcctgaagtttgaagatgccaagctggccgccgccatcagcgaggtggtgtcccagaccccagccagcaccacccaggccggggccccaccccgggacaccagccagagcgacaaggacctggatgatgccctggacaagctgagtgacagcctgggccagaggcagcctgaccctgatgagaacaagcccatggaggacaaggtgaaggagaaggccaaggccgagcaccgggacaagctgggggagagagatgacaccatccccccagagtaccgccacctgctggatgacaatggccaggacaagcctgtgaagccacccaccaagaagtctgaggacagcaagaagccagcagatgaccaggaccccattgatgccctgagcggggacctggacagctgccccagcaccacagagaccagccagaacacagccaaggacaagtgcaagaaggccgccagcagcagcaaggcccccaagaatggaggcaaggccaaggacagcgccaagaccacagaggagaccagcaagcccaaggatgactag

SEQ ID NO: 146016 - DNA, 1254 bp, synthetic construct
  misc_feature 1..1254: note = Description of Artificial Sequence: Synthetic coding sequence
  source 1..1254: mol_type = other DNA
atgctgctgtctgtgcccctgctgctgggcctgctgggcctggccgtggccgagcctgctgtgtacttcaaggagcagttcctggatggagatggctggaccagccgctggattgagagcaagcacaagagtgactttgggaagtttgtgctgagcagcggcaagttctatggagatgaggagaaggacaagggcctgcagaccagccaggatgcccgcttctacgccctgagcgccagctttgagcccttcagcaacaagggccagaccctggtggtgcagttcaccgtgaagcatgagcagaacatcgactgtggcggcggctacgtgaagctgttccccaacagcctggaccagacagacatgcatggagacagcgagtacaacatcatgtttggaccagacatctgtggccctggcaccaagaaggtgcacgtgatcttcaactacaagggcaagaatgtgctgatcaacaaggacatccgctgcaaggatgatgagttcacccacctgtacaccctgattgtgcggccagacaacacctatgaggtgaagattgacaacagccaggtggagagcggcagcctggaggatgactgggacttcctgccccccaagaagatcaaggaccctgatgccagcaagccagaggactgggatgagcgggccaagattgatgaccccacagacagcaagccagaggactgggacaagccagagcacatcccagaccctgatgccaagaagccagaggactgggatgaggagatggatggagagtgggagccccctgtgatccagaaccctgagtacaagggggagtggaagccccggcagattgacaacccagactacaagggcacctggatccaccctgagattgacaaccctgagtacagcccagaccccagcatctatgcctatgacaactttggagtgctgggcctggacctgtggcaggtgaagagcggcaccatctttgacaacttcctgatcaccaatgatgaggcctatgcagaggagtttggaaatgagacctggggcgtgaccaaggctgctgagaagcagatgaaggacaagcaggatgaggagcagaggctgaaggaggaggaggaggacaagaagaggaaggaggaggaggaggccgaggacaaggaggatgatgaggacaaggatgaagatgaggaggatgaggaggacaaggaggaggatgaggaggaggatgtgcccggccaggccaaggatgagctgtag

SEQ ID NO: 146017 - DNA, 891 bp, synthetic construct
  misc_feature 1..891: note = Description of Artificial Sequence: Synthetic coding sequence
  source 1..891: mol_type = other DNA
atgcacggggacagcgagtacaacatcatgtttggaccagacatctgtggccctggcaccaagaaggtgcacgtgatcttcaactacaagggcaagaatgtgctgatcaacaaggacatccgctgcaaggatgatgagttcacccacctgtacaccctcatcgtgcggccagacaacacctatgaggtgaagattgacaacagccaggtggagagcggcagcctggaggatgactgggacttcctgccccccaagaagatcaaggaccctgatgccagcaagccagaggactgggatgagcgggccaagattgatgaccccacagacagcaagccagaggactgggacaagccagagcacatcccagaccctgatgccaagaagccagaggactgggatgaggagatggatggagagtgggagccccctgtgatccagaaccctgagtacaagggggagtggaagccccggcagattgacaacccagactacaagggcacctggatccaccctgagattgacaaccctgagtacagcccagaccccagcatctatgcctatgacaactttggagtgctgggcctggacctgtggcaggtgaagagcggcaccatctttgacaacttcctgatcaccaatgatgaggcctatgcagaggagtttggaaatgagacctggggcgtgaccaaggctgctgagaagcagatgaaggacaagcaggatgaggagcagaggctgaaggaggaggaggaggacaagaagaggaaggaggaggaggaggccgaggacaaggaggatgatgaggacaaggatgaagatgaagaagatgaggaggacaaggaggaggatgaggaggaggatgtgcccggccaggccaaggatgagctgtag

SEQ ID NO: 146018 - DNA, 1155 bp, synthetic construct
  misc_feature 1..1155: note = Description of Artificial Sequence: Synthetic coding sequence
  source 1..1155: mol_type = other DNA
atggcccgggccctggtgcagctgtgggccatctgcatgctgcgggtggccctggccaccgtgtacttccaggaggagttcctggatggagagcactggaggaaccgctggctgcagagcaccaatgacagccgcttcggccacttccggctgagcagcggcaagttctacggccacaaggagaaggacaagggcctgcagaccacccagaatggccgcttctacgccatcagcgcccgcttcaagcccttcagcaacaagggcaagaccctggtgatccagtacacagtgaagcatgagcagaagatggactgtggcggcggctacatcaaggtgtttcctgctgacatcgaccagaagaacctgaatggcaagagccagtactacatcatgtttggaccagacatctgtggctttgacatcaagaaggtgcacgtgatcctgcacttcaagaacaagtaccacgagaacaagaagctgatccgctgcaaggtggatggcttcacccacctgtacaccctcatcctgcggccagacctgtcctatgatgtgaagattgatggccagagcattgaaagtggcagcattgaatatgactggaacctgaccagcctgaagaaggagaccagccctgctgagagcaaggactgggagcagaccaaggacaacaaggcccaggactgggagaagcacttcctggatgccagcaccagcaagcagagcgactggaatggagacctggatggagactggccagcccccatgctgcagaagccaccctaccaggacggcctgaagccagagggcatccacaaggatgtgtggctgcacaggaagatgaagaacacagactacctgacccagtatgacctgtctgaatttgaaaatattggagccatcggcctggagctgtggcaggtgcgcagcggcaccatctttgacaacttcctgatcacagatgatgaggagtatgctgacaactttgggaaggccacctggggcgagaccaagggccctgagcgggagatggatgccatccaggccaaggaggagatgaagaaggcccgggaggaggaggaggaggagctgctgagcggcaagatcaacagacatgagcactacttcaaccagttccacagaagaaatgagctgtag

SEQ ID NO: 146019 - DNA, 1191 bp, synthetic construct
  misc_feature 1..1191: note = Description of Artificial Sequence: Synthetic coding sequence
  source 1..1191: mol_type = other DNA
atgtctgccacagacaggatgggccccagggctgtgcccggcctgcggctggccctgctgctgctgctggtgctgggcacccccaagagcggcgtgcagggccaggagggcctggacttcccagaatatgatggagtggacagagtcatcaacgtgaatgccaagaactacaagaatgtgttcaagaagtatgaggtgctggccctgctgtaccacgagcccccagaagatgacaaggccagccagaggcagtttgagatggaggagctgatcctggagctggccgcccaggtgctggaggacaagggcgtgggcttcggcctggtggacagcgagaaggatgctgctgtggccaagaagctgggcctgacagaggtggacagcatgtatgtgttcaagggagatgaagtcatcgagtatgatggagagttctctgctgacaccatcgtggagttcctgctggatgtgctggaggaccctgtggagctgattgaaggagagcgggagctgcaggcctttgagaacattgaagatgagatcaagctgattggctacttcaagagcaaggacagcgagcactacaaggcctttgaagatgctgctgaggagttccacccctacatccccttctttgccacctttgacagcaaggtggccaagaagctgaccctgaagctgaatgaaattgacttctatgaggccttcatggaggagcctgtgaccatcccagacaagcccaacagcgaggaggagatcgtgaactttgtggaggagcaccggcgcagcaccctgaggaagctgaagccagagagcatgtatgagacctgggaggatgacatggatggcatccacatcgtggcctttgctgaggaggccgaccctgatggctttgagttcctggagaccctgaaggctgtggcccaggacaacacagagaacccagacctgagcatcatctggattgatcctgatgacttccccctgctggtgccctactgggagaagacctttgatattgacctgagcgccccccagatcggcgtggtgaatgtgacagatgctgacagcgtgtggatggagatggatgatgaggaggacctgcccagcgctgaggagctggaggactggctggaggatgtgctggagggggagatcaacacagaagatgatgatgatgatgatgatgactag

SEQ ID NO: 146020 - DNA, 1173 bp, synthetic construct
  misc_feature 1..1173: note = Description of Artificial Sequence: Synthetic coding sequence
  source 1..1173: mol_type = other DNA
atgggccccagggctgtgcccggcctgcggctggccctgctgctgctgctggtgctgggcacccccaagagcggcgtgcagggccaggagggcctggacttcccagaatatgatggagtggacagagtcatcaacgtgaatgccaagaactacaagaatgtgttcaagaagtatgaggtgctggccctgctgtaccacgagcccccagaagatgacaaggccagccagaggcagtttgagatggaggagctgatcctggagctggccgcccaggtgctggaggacaagggcgtgggcttcggcctggtggacagcgagaaggatgctgctgtggccaagaagctgggcctgacagaggtggacagcatgtatgtgttcaagggagatgaagtcatcgagtatgatggagagttctctgctgacaccatcgtggagttcctgctggatgtgctggaggaccctgtggagctgattgaaggagagcgggagctgcaggcctttgagaacattgaagatgagatcaagctgattggctacttcaagagcaaggacagcgagcactacaaggcctttgaagatgctgctgaggagttccacccctacatccccttctttgccacctttgacagcaaggtggccaagaagctgaccctgaagctgaatgaaattgacttctatgaggccttcatggaggagcctgtgaccatcccagacaagcccaacagcgaggaggagatcgtgaactttgtggaggagcaccggcgcagcaccctgaggaagctgaagccagagagcatgtatgagacctgggaggatgacatggatggcatccacatcgtggcctttgctgaggaggccgaccctgatggctttgagttcctggagaccctgaaggctgtggcccaggacaacacagagaacccagacctgagcatcatctggattgatcctgatgacttccccctgctggtgccctactgggagaagacctttgatattgacctgagcgccccccagatcggcgtggtgaatgtgacagatgctgacagcgtgtggatggagatggatgatgaggaggacctgcccagcgctgaggagctggaggactggctggaggatgtgctggagggggagatcaacacagaagatgatgatgatgatgatgatgactag

SEQ ID NO: 146021 - DNA, 936 bp, synthetic construct
  misc_feature 1..936: note = Description of Artificial Sequence: Synthetic coding sequence
  source 1..936: mol_type = other DNA
atgtccatgcagaggaccaccaggatgtgcagccgctccatgcgctgctggcacagcagcaccatgaacccccccaggatgacccggccccacaaggacaacagcctgggcctgacagaggtggacagcatgtatgtgttcaagggagatgaggtgattgaatatgatggagagttctctgctgacaccatcgtggagttcctgctggatgtgctggaggaccctgtggagctgattgaaggagagcgggagctgcaggcctttgaaaatattgaagatgagatcaagctgattggctacttcaagagcaaggacagcgagcactacaaggcctttgaagatgctgctgaggagttccacccctacatccccttctttgccacctttgacagcaaggtggccaagaagctgaccctgaagctgaatgaaattgacttctatgaggccttcatggaggagcctgtgaccatcccagacaagcccaacagcgaggaggagatcgtgaactttgtggaggagcacagaagaagcaccctgaggaagctgaagccagagagcatgtatgagacctgggaggatgacatggatggcatccacatcgtggcctttgctgaggaggccgaccctgatggctttgagttcctggagaccctgaaggctgtggcccaggacaacacagaaaatccagacctgagcatcatctggattgatcctgatgacttccccctgctggtgccctactgggagaagacctttgacatcgacctgagcgccccccagattggagtggtgaatgtgacagatgctgacagcgtgtggatggagatggatgatgaggaggacctgcccagcgctgaggagctggaggactggctggaggatgtgctggagggggagatcaacacagaagatgatgatgatgatgatgatgactag

SEQ ID NO: 146022 - DNA, 1200 bp, synthetic construct
  misc_feature 1..1200: note = Description of Artificial Sequence: Synthetic coding sequence
  source 1..1200: mol_type = other DNA
atgaagaggacccacctgttcatcgtgggcatctacttcctgagcagctgcagagctgaggagggcctgaacttccccacctatgatggcaaggacagagtggtgtccctgtctgagaagaacttcaagcaggtgctgaagaagtatgacctgctgtgcctgtactaccacgagcctgtgtccagtgacaaggtgacccagaagcagttccagctgaaggagatcgtgctggagctggtggcccaggtgctggagcacaaggccatcggctttgtgatggtggatgccaagaaggaggccaagctggccaagaagctgggctttgatgaggagggcagcctgtacatcctgaagggggacaggaccattgaatttgatggagaatttgctgctgatgtgctggtggagttcctgctggacctgattgaagatcctgtggagatcatcagcagcaagctggaggtgcaggcctttgaaagaattgaggactacatcaagctgattggcttcttcaagtctgaggacagcgagtactacaaggcctttgaggaggccgctgagcacttccagccctacatcaagttctttgccacctttgataaaggagtggccaagaagctgagcctgaagatgaatgaggtggacttctatgagcccttcatggatgagcccatcgccatccccaacaagccctacacagaggaggagctggtggagtttgtgaaggagcaccagaggcccaccctgcggcggctgcggcctgaggagatgtttgagacctgggaggatgacctgaatggcatccacatcgtggcctttgctgagaagagtgaccctgatggctatgagttcctggagatcctgaagcaggtggcccgggacaacacagacaacccagacctgagcatcctgtggattgatcctgatgacttccccctgctggtggcctactgggagaagaccttcaagattgacctcttccggccccagattggagtggtgaatgtgacagatgctgacagcgtgtggatggagatcccagatgatgatgacctgcccacagctgaggagctggaggactggattgaagatgtgctgagcggcaagatcaacacagaagatgatgatgaagatgatgatgatgatgacaacagtgatgaggaggacaatgatgacagtgatgatgatgatgatgaatag

SEQ ID NO: 146023 - DNA, 1062 bp, synthetic construct
  misc_feature 1..1062: note = Description of Artificial Sequence: Synthetic coding sequence
  source 1..1062: mol_type = other DNA
atgaagaggacccacctgttcatcgtgggcatctacttcctgagcagctgcagagctgaggagggcctgaacttccccacctatgatggcaaggacagagtggtgtccctgtctgagaagaacttcaagcaggtgctgaagaagtatgacctgctgtgcctgtactaccacgagcctgtgtccagtgacaaggtgacccagaagcagttccagctgaaggagatcgtgctggagctggtggcccaggtgctggagcacaaggccatcggctttgtgatggtggatgccaagaaggaggccaagctggccaagaagctgggctttgatgaggagggcagcctgtacatcctgaagggggacaggaccattgaatttgatggagaatttgctgctgatgtgctggtggagttcctgctggacctgattgaagatcctgtggagatcatcagcagcaagctggaggtgcaggcctttgaaagaattgaggactacatcaagctgattggcttcttcaagtctgaggacagcgagtactacaaggcctttgaggaggccgctgagcacttccagccctacatcaagttctttgccacctttgataaaggagtggccaagaagctgagcctgaagatgaatgaggtggacttctatgagcccttcatggatgagcccatcgccatccccaacaagccctacacagatggctatgagttcctggagatcctgaagcaggtggcccgggacaacacagacaacccagacctgagcatcctgtggattgatcctgatgacttccccctgctggtggcctactgggagaagaccttcaagattgacctcttccggccccagattggagtggtgaatgtgacagatgctgacagcgtgtggatggagatcccagatgatgatgacctgcccacagctgaggagctggaggactggattgaagatgtgctgagcggcaagatcaacacagaagatgatgatgaagatgatgatgatgatgacaacagtgatgaggaggacaatgatgacagtgatgatgatgatgatgaatag

SEQ ID NO: 146024 - DNA, 987 bp, synthetic construct
  misc_feature 1..987: note = Description of Artificial Sequence: Synthetic coding sequence
  source 1..987: mol_type = other DNA
atgaagaggacccacctgttcatcgtgggcatctacttcctgagcagctgcagagctgaggagggcctgaacttccccacctatgatggcaaggacagagtggtgtccctgtctgagaagaacttcaagcaggtgctgaagaagtatgacctgctgtgcctgtactaccacgagcctgtgtccagtgacaaggtgacccagaagcagttccagctgaaggagatcgtgctggagctggtggcccaggtgctggagcacaaggccatcggctttgtgatggtggatgccaagaaggaggccaagctggccaagaagctggactacaaggcctttgaggaggccgctgagcacttccagccctacatcaagttctttgccacctttgacaagggcgtggccaagaagctgagcctgaagatgaatgaggtggacttctatgagcccttcatggatgagcccatcgccatccccaacaagccctacacagaggaggagctggtggagtttgtgaaggagcaccagaggcccaccctgcggcggctgcggcctgaggagatgtttgagacctgggaggatgacctgaatggcatccacatcgtggcctttgctgagaagagtgaccctgatggctatgagttcctggagatcctgaagcaggtggcccgggacaacacagacaacccagacctgagcatcctgtggattgatcctgatgacttccccctgctggtggcctactgggagaagaccttcaagattgacctcttccggccccagatcggcgtggtgaatgtgacagatgctgacagcgtgtggatggagatcccagatgatgatgacctgcccacagctgaggagctggaggactggattgaagatgtgctgagcggcaagatcaacacagaagatgatgatgaagatgatgatgatgatgacaacagtgatgaagaagataatgatgacagtgatgatgatgatgatgaatag

SEQ ID NO: 146025 - DNA, 948 bp, synthetic construct
  misc_feature 1..948: note = Description of Artificial Sequence: Synthetic coding sequence
  source 1..948: mol_type = other DNA
atggacctgcggcagttcctgatgtgcctgagcctgtgcacagcctttgccctgagcaagcccacagagaagaaggacagagtgcaccacgagccccagctgagtgacaaggtgcacaatgatgcccagagctttgattatgaccatgatgccttcctgggcgctgaggaggccaagacctttgaccagctgaccccagaggagagcaaggagcggctgggcaagatcgtgtccaagattgatggagacaaggatggctttgtgacagtggatgagctgaaggactggatcaagtttgcccagaagcgctggatctatgaagatgtggagcggcagtggaagggccatgacctgaatgaagatggcctggtgtcctgggaggagtacaagaatgccacctacggctacgtgctggatgatcctgaccctgatgatggcttcaactacaagcagatgatggtgagagatgagcggcgcttcaagatggctgacaaggatggagacctgattgccaccaaggaggagttcaccgccttcctgcaccctgaggagtatgactacatgaaggacatcgtggtgcaggagaccatggaggacatcgacaagaatgctgatggcttcatcgacctggaggagtacatcggggacatgtacagccatgatggcaacacagatgagcctgagtgggtgaagacagagcgggagcagtttgtggagttccgggacaagaacagagatggcaagatggacaaggaggagaccaaggactggatcctgcccagcgactatgaccacgccgaggccgaggcccggcacctggtgtatgaaagtgaccagaacaaggatggcaagctgaccaaggaggagatcgtggacaagtatgacctgtttgtgggcagccaggccacagactttggagaggccctggtgagacatgatgagttctag

SEQ ID NO: 146026 - DNA, 465 bp, synthetic construct
  misc_feature 1..465: note = Description of Artificial Sequence: Synthetic coding sequence
  source 1..465: mol_type = other DNA
atggacctgcggcagttcctgatgtgcctgagcctgtgcacagcctttgccctgagcaagcccacagagaagaaggacagagtgcaccacgagccccagctgagtgacaaggtgcacaatgatgcccagagctttgattatgaccatgatgccttcctgggcgctgaggaggccaagacctttgaccagctgaccccagaggagagcaaggagcggctgggcaagatcgtgtccaagattgatggagacaaggatggctttgtgacagtggatgagctgaaggactggatcctgcccagcgactatgaccatgctgaggccgaggcccggcacctggtgtatgaaagtgaccagaacaaggatggcaagctgaccaaggaggagatcgtggacaagtatgacctgtttgtgggcagccaggccacagactttggagaggccctggtgagacatgatgagttctag

SEQ ID NO: 146027 - DNA, 948 bp, synthetic construct
  misc_feature 1..948: note = Description of Artificial Sequence: Synthetic coding sequence
  source 1..948: mol_type = other DNA
atggacctgcggcagttcctgatgtgcctgagcctgtgcacagcctttgccctgagcaagcccacagagaagaaggacagagtgcaccacgagccccagctgagtgacaaggtgcacaatgatgcccagagctttgattatgaccatgatgccttcctgggcgctgaggaggccaagacctttgaccagctgaccccagaggagagcaaggagcggctgggcatgattgtggacaagattgatgctgacaaggatggctttgtgacagaaggagagctgaagtcctggatcaagcacgcccagaagaagtacatctatgacaacgtggagaaccagtggcaggagtttgacatgaaccaggacggcctcatctcctgggatgagtacagaaatgtgacctacggcacctacctggatgatcctgaccctgatgatggcttcaactacaagcagatgatggtgagagatgagcggcgcttcaagatggctgacaaggatggagacctgattgccaccaaggaggagttcaccgccttcctgcaccctgaggagtatgactacatgaaggacatcgtggtgcaggagaccatggaggacatcgacaagaatgctgatggcttcatcgacctggaggagtacatcggggacatgtacagccatgatggcaacacagatgagcctgagtgggtgaagacagagcgggagcagtttgtggagttccgggacaagaacagagatggcaagatggacaaggaggagaccaaggactggatcctgcccagcgactatgaccacgccgaggccgaggcccggcacctggtgtatgaaagtgaccagaacaaggatggcaagctgaccaaggaggagatcgtggacaagtatgacctgtttgtgggcagccaggccacagactttggagaggccctggtgagacatgatgagttctag

SEQ ID NO: 146028 - DNA, 972 bp, synthetic construct
  misc_feature 1..972: note = Description of Artificial Sequence: Synthetic coding sequence
  source 1..972: mol_type = other DNA
atgaaggagacagacctgatcatcatggacctgcggcagttcctgatgtgcctgagcctgtgcacagcctttgccctgagcaagcccacagagaagaaggacagagtgcaccacgagccccagctgagtgacaaggtgcacaatgatgcccagagctttgattatgaccatgatgccttcctgggcgctgaggaggccaagacctttgaccagctgaccccagaggagagcaaggagcggctgggcaagatcgtgtccaagattgatggagacaaggatggctttgtgacagtggatgagctgaaggactggatcaagtttgcccagaagcgctggatctatgaagatgtggagcggcagtggaagggccatgacctgaatgaagatggcctggtgtcctgggaggagtacaagaatgccacctacggctacgtgctggatgatcctgaccctgatgatggcttcaactacaagcagatgatggtgagagatgagcggcgcttcaagatggctgacaaggatggagacctgattgccaccaaggaggagttcaccgccttcctgcaccctgaggagtatgactacatgaaggacatcgtggtgcaggagaccatggaggacatcgacaagaatgctgatggcttcatcgacctggaggagtacatcggggacatgtacagccatgatggcaacacagatgagcctgagtgggtgaagacagagcgggagcagtttgtggagttccgggacaagaacagagatggcaagatggacaaggaggagaccaaggactggatcctgcccagcgactatgaccacgccgaggccgaggcccggcacctggtgtatgaaagtgaccagaacaaggatggcaagctgaccaaggaggagatcgtggacaagtatgacctgtttgtgggcagccaggccacagactttggagaggccctggtgagacatgatgagttctag

SEQ ID NO: 146029 - DNA, 444 bp, synthetic construct
  misc_feature 1..444: note = Description of Artificial Sequence: Synthetic coding sequence
  source 1..444: mol_type = other DNA
tgaattgccaccaaggaggagttcaccgccttcctgcaccctgaggagtatgactacatgaaggacatcgtggtgcaggagaccatggaggacatcgacaagaatgctgatggcttcatcgacctggaggagtacatcggggacatgtacagccatgatggcaacacagatgagcctgagtgggtgaagacagagcgggagcagtttgtggagttccgggacaagaacagagatggcaagatggacaaggaggagaccaaggactggatcctgcccagcgactatgaccacgccgaggccgaggcccggcacctggtgtatgaaagtgaccagaacaaggatggcaagctgaccaaggaggagatcgtggacaagtatgacctgtttgtgggcagccaggccacagactttggagaggccctggtgagacatgatgagttctag

SEQ ID NO: 146030 - DNA, 675 bp, synthetic construct
  misc_feature 1..675: note = Description of Artificial Sequence: Synthetic coding sequence
  source 1..675: mol_type = other DNA
atggacctgcggcagttcctgatgtgcctgagcctgtgcacagcctttgccctgagcaagcccacagagaagaaggacagagtgcaccacgagccccagctgagtgacaaggtgcacaatgatgcccagagctttgattatgaccatgatgccttcctgggcgctgaggaggccaagacctttgaccagctgaccccagaggagagcaaggagcggctgggcaagatcgtgtccaagattgatggagacaaggatggctttgtgacagtggatgagctgaaggactggatcaagtttgcccagaagcgctggatctatgaagatgtggagcggcagtggaagggccatgacctgaatgaagatggcctggtgtcctgggaggagtacaagaatgccacctacggctacgtgctggatgatcctgaccctgatgatggcttcaactacaagcagatgatggtgagagatgagcggcgcttcaagatggctgacaaggatggagacctgattgccaccaaggaggagttcaccgccttcctgcaccctgaggagtatgactacatgaaggacatcgtggtgcaggagaccatggaggacatcgacaagaatgctgatggcttcatcgacctggaggagtacatcggctggcaggcctaccagggcggggacagatag

SEQ ID NO: 146031 - DNA, 444 bp, synthetic construct
  misc_feature 1..444: note = Description of Artificial Sequence: Synthetic coding sequence
  source 1..444: mol_type = other DNA
atgaaggagacagacctgatcatcatggacctgcggcagttcctgatgtgcctgagcctgtgcacagcctttgccctgagcaagcccacagagaagaaggacagagtgcaccacgagccccagctgagtgacaaggtgcacaatgatgcccagagctttgattatgaccatgatgccttcctgggcgctgaggaggccaagacctttgaccagctgaccccagaggagagcaaggagcggctgggcaagatcgtgtccaagattgatggagacaaggatggctttgtgacagtggatgagctgaaggactggatcaagtttgcccagaagcgctggatctatgaagatgtggagcggcagtggaagggccatgacctgaatgaagatggcctggtgtcctgggaggagtacaagaatgccacctacggctacgtgctggagtag

SEQ ID NO: 146032 - DNA, 513 bp, synthetic construct
  misc_feature 1..513: note = Description of Artificial Sequence: Synthetic coding sequence
  source 1..513: mol_type = other DNA
atggacctgcggcagttcctgatgtgcctgagcctgtgcacagcctttgccctgagcaagcccacagagaagaaggacagagtgcaccacgagccccagctgagtgacaaggtgcacaatgatgcccagagctttgattatgaccatgatgccttcctgggcgctgaggaggccaagacctttgaccagctgaccccagaggagagcaaggagcggctgggcatgattgtggacaagattgatgctgacaaggatggctttgtgacagaaggagagctgaagtcctggatcaagcacgcccagaagaagtacatctatgacaacgtggagaaccagtggcaggagtttgacatgaaccaggacggcctcatctcctgggatgagtacagaaatgtgacctacggcacctacctggatgatcctgaccctgatgatggcttcaactacaagcagatgatggtgagagatgagcggcgcttcaagatggctgaccgggcccgggctgtgtgctag

SEQ ID NO: 146033 - DNA, 606 bp, synthetic construct
  misc_feature 1..606: note = Description of Artificial Sequence: Synthetic coding sequence
  source 1..606: mol_type = other DNA
atggacctgcggcagttcctgatgtgcctgagcctgtgcacagcctttgccctgagcaagcccacagagaagaaggacagagtgcaccacgagccccagctgagtgacaaggtgcacaatgatgcccagagctttgattatgaccatgatgccttcctgggcgctgaggaggccaagacctttgaccagctgaccccagaggagagcaaggagcggctgggcatgattgtggacaagattgatgctgacaaggatggctttgtgacagaaggagagctgaagtcctggatcaagcacgcccagaagaagtacatctatgacaacgtggagaaccagtggcaggagtttgacatgaaccaggacggcctcatctcctgggatgagtacagaaatgtgacctacggcacctacctggatgatcctgaccctgatgatggcttcaactacaagcagatgatggtgagagatgagcggcgcttcaagatggctgacaaggatggagacctgattgccaccaaggaggagatcgtggacaagtatgacctgtttgtgggcagccaggccacagactttggagaggccctggtgagacatgatgagttctag

SEQ ID NO: 146034 - DNA, 798 bp, synthetic construct
  misc_feature 1..798: note = Description of Artificial Sequence: Synthetic coding sequence
  source 1..798: mol_type = other DNA
atggacctgcggcagttcctgatgtgcctgagcctgtgcacagcctttgccctgagcaagcccacagagaagaaggacagagtgcaccacgagccccagctgagtgacaaggtgcacaatgatgcccagagctttgattatgaccatgatgccttcctgggcgctgaggaggccaagacctttgaccagctgaccccagaggagagcaaggagcggctgggcaagatcgtgtccaagattgatggagacaaggatggctttgtgacagtggatgagctgaaggactggatcaagtttgcccagaagcgctggatctatgaagatgtggagcggcagtggaagggccatgacctgaatgaagatggcctggtgtcctgggaggagtacaagaatgccacctacggctacgtgctggatgatcctgaccctgatgatggcttcaactacaagcagatgatggtgagagatgagcggcgcttcaagatggctgacaaggatggagacctgattgccaccaaggaggagttcaccgccttcctgcaccctgaggagtatgactacatgaaggacatcgtggtgcaggagaccatggaggacatcgacaagaatgctgatggcttcatcgacctggaggagtacatcggggacatgtacagccatgatggcaacacagatgaaagtgaccagaacaaggatggcaagctgaccaaggaggagatcgtggacaagtatgacctgtttgtgggcagccaggccacagactttggagaggccctggtgagacatgatgagttctag

SEQ ID NO: 146035 - DNA, 495 bp, synthetic construct
  misc_feature 1..495: note = Description of Artificial Sequence: Synthetic coding sequence
  source 1..495: mol_type = other DNA
atgatggtgagagatgaaagacgcttcaagatggctgacaaggatggagacctgattgccaccaaggaggagttcaccgccttcctgcaccctgaggagtatgactacatgaaggacatcgtggtgcaggagaccatggaggacatcgacaagaatgctgatggcttcatcgacctggaggagtacatcggggacatgtacagccatgatggcaacacagatgagcctgagtgggtgaagacagagcgggagcagtttgtggagttccgggacaagaacagagatggcaagatggacaaggaggagaccaaggactggatcctgcccagcgactatgaccatgctgaggccgaggcccggcacctggtgtatgaaagtgaccagaacaaggatggcaagctgaccaaggaggagatcgtggacaagtatgacctgtttgtgggcagccaggccacagactttggagaggccctggtgagacatgatgagttctag

SEQ ID NO: 146036 - DNA, 972 bp, synthetic construct
  misc_feature 1..972: note = Description of Artificial Sequence: Synthetic coding sequence
  source 1..972: mol_type = other DNA
atgaaggagacagacctgatcatcatggacctgcggcagttcctgatgtgcctgagcctgtgcacagcctttgccctgagcaagcccacagagaagaaggacagagtgcaccacgagccccagctgagtgacaaggtgcacaatgatgcccagagctttgattatgaccatgatgccttcctgggcgctgaggaggccaagacctttgaccagctgaccccagaggagagcaaggagcggctgggcatgattgtggacaagattgatgctgacaaggatggctttgtgacagaaggagagctgaagtcctggatcaagcacgcccagaagaagtacatctatgacaacgtggagaaccagtggcaggagtttgacatgaaccaggacggcctcatctcctgggatgagtacagaaatgtgacctacggcacctacctggatgatcctgaccctgatgatggcttcaactacaagcagatgatggtgagagatgagcggcgcttcaagatggctgacaaggatggagacctgattgccaccaaggaggagttcaccgccttcctgcaccctgaggagtatgactacatgaaggacatcgtggtgcaggagaccatggaggacatcgacaagaatgctgatggcttcatcgacctggaggagtacatcggggacatgtacagccatgatggcaacacagatgagcctgagtgggtgaagacagagcgggagcagtttgtggagttccgggacaagaacagagatggcaagatggacaaggaggagaccaaggactggatcctgcccagcgactatgaccacgccgaggccgaggcccggcacctggtgtatgaaagtgaccagaacaaggatggcaagctgaccaaggaggagatcgtggacaagtatgacctgtttgtgggcagccaggccacagactttggagaggccctggtgagacatgatgagttctag

SEQ ID NO: 146037 - DNA, 1116 bp, synthetic construct
  misc_feature 1..1116: note = Description of Artificial Sequence: Synthetic coding sequence
  source 1..1116: mol_type = other DNA
atggagctggagctggatgctggggaccaggacctgctggccttcctgctggaggagagcggggacctgggcacagccccagatgaggccgtgcgggcccccctggactgggccctgcccctgtctgaggtgcccagcgactgggaggtggatgacctgctgtgcagcctgctgagccccccagccagcctgaacatcctgagcagcagcaacccctgcctggtgcaccacgaccacacctacagcctgccccgggagaccgtgtccatggacctggagagcgagagctgcaggaaggagggcacccagatgaccccccagcacatggaggagctggccgagcaggagatcgcccggctggtgctgacagatgaggagaagagcctgctggagaaggagggcctcatcctgcctgagaccctgcccctgaccaagacagaggagcagatcctgaagagggtgcggaggaagatccggaacaagaggtctgcccaggagagcaggaggaagaagaaggtgtatgtgggcggcctggagagccgggtgctgaagtacacagcccagaacatggagctgcagaacaaggtgcagctgctggaggagcagaacctgagcctgctggaccagctgaggaagctgcaggccatggtgattgagatcagcaacaagaccagcagcagcagcacctgcatcctggtgctgctggtgtccttctgcctgctgctggtgcctgccatgtacagcagtgacacccggggcagcctgcctgctgagcacggcgtgctgagccggcagctgcgggccctgcccagcgaggacccctaccagctggagctgcctgccctgcagagcgaggtgcccaaggacagcacccaccagtggctggatggcagtgactgtgtgctgcaggcccctggcaacaccagctgcctgctgcactacatgccccaggcccccagcgctgagccccccctggagtggcccttcccagacctcttcagcgagcccctgtgccggggccccatcctgcccctgcaggccaacctgaccaggaagggcggctggctgcccaccggcagccccagcgtcatcctgcaggaccgctacagcggctag

SEQ ID NO: 146038 - DNA, 1386 bp, synthetic construct
  misc_feature 1..1386: note = Description of Artificial Sequence: Synthetic coding sequence
  source 1..1386: mol_type = other DNA
atgaacacagacctggccgccggcaagatggccagcgctgcctgcagcatggaccccatcgacagctttgagctgctggacctgctgtttgaccggcaggacggcatcctgcggcacgtggagctgggggagggctggggccacgtgaaggaccagcaggtgctgcccaacccagacagtgatgacttcctgagcagcatcctgggcagcggggacagcctgcccagcagccccctgtggagccctgagggcagtgacagcggcatcagcgaggacctgcccagcgacccccaggacaccccacccaggagcggccctgccaccagccctgctggctgccacccagcccagcccgggaagggcccctgcctgagctaccaccctggcaacagctgcagcaccaccaccccaggccctgtgatccaggtgcctgaggcctctgtgaccatcgacctggagatgtggagccctgggggccgcatctgtgccgagaagccagctgaccctgtggacctgagcccccgctgcaacctgactgtgaaggacctgctgctgagcggcagcagcggggacctgcagcagcaccacctgggcgccagctacctgctgcggcctggagctggccactgccaggagctggtgctgacagaagatgagaagaagctgctggccaaggagggcatcaccctgcccacccagctgcccctgaccaagtatgaggagcgggtgctgaagaagatccggaggaagatccggaacaagcagagcgcccaggagagcaggaagaagaagaaggagtacattgatggcctggagaccaggatgtctgcctgcacagcccagaaccaggagctgcagaggaaggtgctgcacctggagaagcagaacctgagcctgctggagcagctgaagaagctgcaggccatcgtggtgcagagcaccagcaagagcgcccagacaggcacctgtgtggccgtgctgctgctgagctttgccctgatcatcctgcccagcatcagccccttcggccccaacaagacagagagccctggggactttgcccctgtgcgggtcttcagcaggaccctgcacaatgatgctgccagccgggtggccgcagatgctgtgcccggcagcgaggcccctggccccaggcctgaggccgacaccacccgggaggagagccctggcagccctggagctgactggggcttccaggacacagccaacctgaccaacagcacagaggagctggacaatgccaccctggtgctgagaaatgccacagagggcctgggccaggtggccctgctggactgggtggcccctggccccagcactggaagtggccgggccggcctggaggccgctggagatgagctgtag

SEQ ID NO: 146039 - DNA, 900 bp, synthetic construct
  misc_feature 1..900: note = Description of Artificial Sequence: Synthetic coding sequence
  source 1..900: mol_type = other DNA
atggccagcgctgcctgcagcatggaccccatcgacagctttgagctgctggacctgctgtttgaccggcaggacggcatcctgcggcacgtggagctgggggagggctggggccacgtgaaggaccaggtgctgcccaacccagacagtgatgacttcctgagcagcatcctgggcagcggggacagcctgcccagcagccccctgtggagccctgagggcagtgacagcggcatcagcgaggacctgcccagcgacccccaggacaccccacccaggagcggccctgccaccagccctgctggctgccacccagcccagcccgggaagggcccctgcctgagctaccaccctggcaacagctgcagcaccaccaccccaggccctgtgatccagcagcagcaccacctgggcgccagctacctgctgcggcctggagctggccactgccaggagctggtgctgacagaagatgagaagaagctgctggccaaggagggcatcaccctgcccacccagctgcccctgaccaagtatgaggagcgggtgctgaagaagatccggaggaagatccggaacaagcagagcgcccaggagagcaggaagaagaagaaggagtacattgatggcctggagaccaggagctgctgctgccccctgcccagcagcagcagcccccccagcgccctgctggcccccaccaagccccgggccctgggcaccctgcggctgtatgagtgcagccctgagctgtgcaccaccatgctgcccccagcctggctgctgatgctgtgccaggccccccggccccaggaccctgacccccggctgacccagcctgagaagagcctgcaggaggcccctggccagacaggagccagcaggacccccaggacatag

SEQ ID NO: 146040 - DNA, 1260 bp, synthetic construct
  misc_feature 1..1260: note = Description of Artificial Sequence: Synthetic coding sequence
  source 1..1260: mol_type = other DNA
atgaacacagacctggccgccggcaagatggccagcgctgcctgcagcatggaccccatcgacagctttgagctgctggacctgctgtttgaccggcaggacggcatcctgcggcacgtggagctgggggagggctggggccacgtgaaggaccagcaggtgctgcccaacccagacagtgatgacttcctgagcagcatcctgggcagcggggacagcctgcccagcagccccctgtggagccctgagggcagtgacagcggcatcagcgaggacctgcccagcgacccccaggacaccccacccaggagcggccctgccaccagccctgctggctgccacccagcccagcccgggaagggcccctgcctgagctaccaccctggcaacagctgcagcaccaccaccccaggccctgtgatccaggtgcctgaggcctctgtgaccatcgacctggagatgtggagccctgggggccgcatctgtgccgagaagccagctgaccctgtggacctgagcccccgctgcaacctgactgtgaaggacctgctgctgagcggcagcagcggggacctgcagcagcaccacctgggcgccagctacctgctgcggcctggagctggccactgccaggagctggtgctgacagaagatgagaagaagctgctggccaaggagggcatcaccctgcccacccagctgcccctgaccaagtatgaggagcgggtgctgaagaagatccggaggaagatccggaacaagcagagcgcccaggagagcaggaagaagaagaaggccatcgtggtgcagagcaccagcaagagcgcccagacaggcacctgtgtggccgtgctgctgctgagctttgccctgatcatcctgcccagcatcagccccttcggccccaacaagacagagagccctggggactttgcccctgtgcgggtcttcagcaggaccctgcacaatgatgctgccagccgggtggccgcagatgctgtgcccggcagcgaggcccctggccccaggcctgaggccgacaccacccgggaggagagccctggcagccctggagctgactggggcttccaggacacagccaacctgaccaacagcacagaggagctggacaatgccaccctggtgctgagaaatgccacagagggcctgggccaggtggccctgctggactgggtggcccctggccccagcactggaagtggccgggccggcctggaggccgctggagatgagctgtag

SEQ ID NO: 146041 - DNA, 1188 bp, synthetic construct
  misc_feature 1..1188: note = Description of Artificial Sequence: Synthetic coding sequence
  source 1..1188: mol_type = other DNA
atggacctgggcatcccagacctgctggatgcctggctggagcccccagaggacatcttcagcacaggctctgtgctggagctgggcctgcactgccccccacctgaggtgcctgtgacccggctgcaggagcagggcctgcagggctggaagagcggcggggaccggggctgcggcctgcaggagagcgagcctgaggacttcctgaagctgttcatcgaccccaatgaggtgtactgcagcgaggccagccctggcagtgacagcggcatcagcgaggacccctgccacccagacagccccccagccccccgggccaccagcagccccatgctgtatgaggtggtgtatgaagctggggccctggagaggatgcagggcgagaccggccccaacgtgggcctcatcagcatccagctggaccagtggagccctgccttcatggtgcctgacagctgcatggtgtctgagctgccctttgatgcccacgcccacatcctgccccgggccggcaccgtggcccctgtgccctgcaccaccctgctgccctgccagaccctcttcctgacagatgaggagaagaggctgctgggccaggagggcgtgtccctgcccagccacctgcccctgaccaaggccgaggagcgggtgctgaagaaggtgcggaggaagatccggaacaagcagagcgcccaggacagcagaagaaggaagaaggagtacattgatggcctggagagccgggtggccgcctgcagcgcccagaaccaggagctgcagaagaaggtgcaggagctggagcggcacaacatcagcctggtggcccagctgcggcagctgcagaccctcatcgcccagaccagcaacaaggccgcccagaccagcacctgtgtgctgatcctgctcttcagcctggccctgatcatcctgcccagcttcagccccttccagagcaggcctgaggccggcagcgaggactaccagccccacggcgtgaccagcaggaacatcctgacccacaaggatgtgacagagaacctggagacccaggtggtggagagccggctgcgggagcccccaggggccaaggatgccaacggcagcaccaggaccctgctggagaagatgggcggcaagccccggcccagcggccgcatccgctctgtgctgcacgcagatgagatgtag

SEQ ID NO: 146042 - DNA, 1128 bp, synthetic construct
  misc_feature 1..1128: note = Description of Artificial Sequence: Synthetic coding sequence
  source 1..1128: mol_type = other DNA
atggacctgggcatcccagacctgctggatgcctggctggagcccccagaggacatcttcagcacaggctctgtgctggagctgggcctgcactgccccccacctgaggtgcccggcctgcaggagagcgagcctgaggacttcctgaagctgttcatcgaccccaatgaggtgtactgcagcgaggccagccctggcagtgacagcggcatcagcgaggacccctgccacccagacagccccccagccccccgggccaccagcagccccatgctgtatgaggtggtgtatgaagctggggccctggagaggatgcagggcgagaccggccccaacgtgggcctcatcagcatccagctggaccagtggagccctgccttcatggtgcctgacagctgcatggtgtctgagctgccctttgatgcccacgcccacatcctgccccgggccggcaccgtggcccctgtgccctgcaccaccctgctgccctgccagaccctcttcctgacagatgaggagaagaggctgctgggccaggagggcgtgtccctgcccagccacctgcccctgaccaaggccgaggagcgggtgctgaagaaggtgcggaggaagatccggaacaagcagagcgcccaggacagcagaagaaggaagaaggagtacattgatggcctggagagccgggtggccgcctgcagcgcccagaaccaggagctgcagaagaaggtgcaggagctggagcggcacaacatcagcctggtggcccagctgcggcagctgcagaccctcatcgcccagaccagcaacaaggccgcccagaccagcacctgtgtgctgatcctgctcttcagcctggccctgatcatcctgcccagcttcagccccttccagagcaggcctgaggccggcagcgaggactaccagccccacggcgtgaccagcaggaacatcctgacccacaaggatgtgacagagaacctggagacccaggtggtggagagccggctgcgggagcccccaggggccaaggatgccaacggcagcaccaggaccctgctggagaagatgggcggcaagccccggcccagcggccgcatccgctctgtgctgcacgcagatgagatgtag

SEQ ID NO: 146043 - DNA, 654 bp, synthetic construct
  misc_feature 1..654: note = Description of Artificial Sequence: Synthetic coding sequence
  source 1..654: mol_type = other DNA
atggacctgggcatcccagacctgctggatgcctggctggagcccccagaggacatcttcagcacaggctctgtgctggagctgggcctgcactgccccccacctgaggtgcctgtgacccggctgcaggagcagggcctgcagggctggaagagcggcggggaccggggctgcggcctgcaggagagcgagcctgaggacttcctgaagctgttcatcgaccccaatgaggtgtactgcagcgaggccagccctggcagtgacagcggcatcagcgaggacccctgccacccagacagccccccagccccccgggccaccagcagccccatgctgtatgaggtggtgtatgaagctggggccctggagaggatgcagggcgagaccggccccaacgtgggcctcatcagcatccagctggaccagtggagccctgccttcatggtgcctgacagctgcatggtgtctgagctgccctttgatgcccacgcccacatcctgccccgggccggcaccgtggcccctgtgccctgcaccaccctgctgccctgccagaccctcttcctgacagatgaggagaagaggctgctgggccaggagggcgtgtccctgcccagccacctgcccctgaccaaggtgacctgcttcccctag

SEQ ID NO: 146044 - DNA, 1188 bp, synthetic construct; identical to SEQ ID NO: 146041
  misc_feature 1..1188: note = Description of Artificial Sequence: Synthetic coding sequence
  source 1..1188: mol_type = other DNA

SEQ ID NO: 146045 - DNA, 1188 bp, synthetic construct; identical to SEQ ID NO: 146041
  misc_feature 1..1188: note = Description of Artificial Sequence: Synthetic coding sequence
  source 1..1188: mol_type = other DNA

SEQ ID NO: 146046 - DNA, 747 bp, synthetic construct
  misc_feature 1..747: note = Description of Artificial Sequence: Synthetic coding sequence
  source 1..747: mol_type = other DNA
atggtgcctgacagctgcatggtgtctgagctgccctttgatgcccacgcccacatcctgcccagggctggcaccgtggcccctgtgccctgcaccaccctgctgccctgccagaccctcttcctgacagatgaggagaagaggctgctgggccaggagggcgtgtccctgcccagccacctgcccctgaccaaggccgaggagcgggtgctgaagaaggtgcggaggaagatccggaacaagcagagcgcccaggacagcagaagaaggaagaaggagtacattgatggcctggagagccgggtggccgcctgcagcgcccagaaccaggagctgcagaagaaggtgcaggagctggagcggcacaacatcagcctggtggcccagctgcggcagctgcagaccctgattgcccagaccagcaacaaggccgcccagaccagcacctgtgtgctgatcctgctcttcagcctggccctgatcatcctgcccagcttcagccccttccagagcaggcctgaggccggcagcgaggactaccagccccatggagtgaccagcaggaacatcctgacccacaaggatgtgacagagaacctggagacccaggtggtggagagccggctgcgggagcccccaggggccaaggatgccaacggcagcaccaggaccctgctggagaagatgggcggcaagccccggcccagcggccgcatccgctctgtgctgcatgctgatgagatgtag

SEQ ID NO: 146047 - DNA, 549 bp, synthetic construct
  misc_feature 1..549: note = Description of Artificial Sequence: Synthetic coding sequence
  source 1..549: mol_type = other DNA
atggacctgggcatcccagacctgctggatgcctggctggagcccccagaggacatcttcagcacaggctctgtgctggagctgggcctgcactgccccccacctgaggtgcctgtgacccggctgcaggagcagggcctgcagggctggaagagcggcggggaccggggctgcggcctgcaggagagcgagcctgaggacttcctgaagctgttcatcgaccccaatgaggtgtactgcagcgaggccagccctggcagtgacagcggcatcagcgaggacccctgccacccagacagccccccagccccccgggccaccagcagccccatgctgtatgaggtggtgtatgaagctggggccctggagaggatgcagggcgagaccggccccaacgtgggcctcatcagcatccagctggaccagtggagccctgccttcatggtgcctgacagctgcatggtgtctgagctgccctttgatgcccacgcccacatcctgccccgggccggcaccgtggcccctgtgccctgcaccaccctggtgtag

SEQ ID NO: 146048 - DNA, 687 bp, synthetic construct
  misc_feature 1..687: note = Description of Artificial Sequence: Synthetic coding sequence
  source 1..687: mol_type = other DNA
atggacctgggcatcccagacctgctggatgcctggctggagcccccagaggacatcttcagcacaggctctgtgctggagctgggcctgcactgccccccacctgaggtgcccggcctgcaggagagcgagcctgaggacttcctgaagctgttcatcgaccccaatgaggtgtactgcagcgaggccagccctggcagtgacagcggcatcagcgaggacccctgccacccagacagccccccagccccccgggccaccagcagccccatgctgtatgaggtggtgtatgaagctggggccctggagaggatgcagggcgagaccggccccaacgtgggcctcatcagcatccagctggaccagtggagccctgccttcatggtgcctgacagctgcatggtgtctgagctgccctttgatgcccacgcccacatcctgccccgggccggcaccgtggcccctgtgccctgcaccaccctgctgccctgccagaccctcttcctgacagatgaggagaagaggctgctgggccaggagggcgtgtccctgcccagccacctgcccctgaccaaggccgaggagcgggtgctgaagaaggtgcggaggaagatccggaacaagcagagcgcccaggacagcagaagaaggaagaaggagtacattgatggcctggagagcaggtag

SEQ ID NO: 146049 - DNA, 1047 bp, synthetic construct
  misc_feature 1..1047: note = Description of Artificial Sequence: Synthetic coding sequence
  source 1..1047: mol_type = other DNA
atgagcaaatgtgccaggaagaagtacatcaagaccaacccccggcagatgaccatggagaccgtggagagccagcatgatggcagcatcacagccagcctgacagagagcaagagcgcccacgtgcagacccagacaggccagaacagcatcccagccctggcccaggtgtctgtggccggcagcggcacccggcggggcagccctgctgtgaccctggtgcagctgcccagcggccagaccatccacgtgcagggcgtcatccagaccccccagccctgggtgatccagagcagcgagatccacacagtgcaggtggccgccatcgccgagacagatgaatctgctgagagcgagggcgtcatcgacagccacaagagaagagagatcctgagcagaagacccagctacaggaagatcctgaatgagctgagcagtgatgtgcctggggtgcccaagattgaggaggagaggtctgaggaggagggcaccccacccagcatcgccaccatggctgtgcccaccagcatctaccagaccagcacaggccagtacatcgccatcgcccagggcggcaccatccagatcagcaaccctggcagtgatggagtgcagggcctgcaggccctgaccatgaccaacagcggggcccctcctcctggggccaccatcgtgcagtatgctgcccagagcgcagatggcacccagcagttctttgtgcccggcagccaggtggtggtgcaggccgccactggagacatgcccacctaccagatccgggcccccacagctgccctgccccagggcgtggtgatggccgccagccctggcagcctgcacagcccccagcagctggccgaggaggccaccaggaagcgggagctgcggctgatgaagaaccgggaggccgcccgggagtgcaggaggaagaagaaggagtatgtgaagtgcctggagaacagagtggccgtgctggagaaccagaacaagaccctgattgaggagctgaaggccctgaaggacctgtactgccacaaggtggagtag

SEQ ID NO: 146050 - DNA, 900 bp, synthetic construct
  misc_feature 1..900: note = Description of Artificial Sequence: Synthetic coding sequence
  source 1..900: mol_type = other DNA
atgagcaaatgtgccaggaagaagtacatcaagaccaacccccggcagatgaccatggagaccgtggagagccagcatgatggcagcatcacagccagcctgacagagagcaagagcgcccacgtgcagacccagacaggccagaacagcatcccagccctggcccaggtggccgccatcgccgagacagatgagagcgctgagagcgagggcgtgattgacagccacaagaggcgggagatcctgagccggcggcccagctacaggaagatcctgaatgagctgagcagtgatgtgcctggggtgcccaagattgaggaggagaggtctgaggaggagggcaccccacccagcatcgccaccatggctgtgcccaccagcatctaccagaccagcacaggccagtacatcgccatcgcccagggcggcaccatccagatcagcaaccctggcagtgatggagtgcagggcctgcaggccctgaccatgaccaacagcggggcccctcctcctggggccaccatcgtgcagtatgctgcccagagcgcagatggcacccagcagttctttgtgcccggcagccaggtggtggtgcaggccgccaccggggacatgcccacctaccagatccgggcccccacagctgccctgccccagggcgtggtgatggccgccagccctggcagcctgcacagcccccagcagctggccgaggaggccaccaggaagcgggagctgcggctgatgaagaaccgggaggccgccagagaatgtagaaggaagaagaaggagtatgtgaagtgcctggagaacagagtggccgtgctggagaaccagaacaagaccctcatcgaggagctgaaggccctgaaggacctgtactgccacaaggtggagtag

SEQ ID NO: 146051 - DNA, 738 bp, synthetic construct
  misc_feature 1..738: note = Description of Artificial Sequence: Synthetic coding sequence
  source 1..738: mol_type = other DNA
atggtggccgccatcgccgagacagatgaatctgctgagagcgagggcgtcatcgacagccacaagagaagagagatcctgagcagaagacccagctacaggaagatcctgaatgagctgagcagtgatgtgcctggggtgcccaagattgaggaggagaggtctgaggaggagggcaccccacccagcatcgccaccatggctgtgcccaccagcatctaccagaccagcacaggccagtacatcgccatcgcccagggcggcaccatccagatcagcaaccctggcagtgatggagtgcagggcctgcaggccctgaccatgaccaacagcggggcccctcctcctggggccaccatcgtgcagtatgctgcccagagcgcagatggcacccagcagttctttgtgcccggcagccaggtggtggtgcaggccgccactggagacatgcccacctaccagatccgggcccccacagctgccctgccccagggcgtggtgatggccgccagccctggcagcctgcacagcccccagcagctggccgaggaggccaccaggaagcgggagctgcggctgatgaagaaccgggaggccgccaaggagtgcagaagaaggaagaaggagtatgtgaagtgcctggagagccgggtggccgtgctggaggtgcagaacaagaagctgattgaggagctggagaccctgaaggacatctgcagccccaagacagactactag

SEQ ID NO: 146052 - DNA, 288 bp, synthetic construct
  misc_feature 1..288: note = Description of Artificial Sequence: Synthetic coding sequence
  source 1..288: mol_type = other DNA
atgcccacctaccagatccgggcccccacagctgccctgccccagggcgtggtgatggccgccagccctggcagcctgcacagcccccagcagctggccgaggaggccaccaggaagcgggagctgcggctgatgaagaaccgggaggccgccagagaatgtagaaggaagaagaaggagtatgtgaagtgcctggagaacagagtggccgtgctggagaaccagaacaagaccctcatcgaggagctgaaggccctgaaggacctgtactgccacaaggtggagtag

SEQ ID NO: 146053 - DNA, 903 bp, synthetic construct
  misc_feature 1..903: note = Description of Artificial Sequence: Synthetic coding sequence
  source 1..903: mol_type = other DNA
atgagcaaatgtgccaggaagaagtacatcaagaccaacccccggcagatgaccatggagaccgtggagagccagcatgatggcagcatcacagccagcctgacagagagcaagagcgcccacgtgcagacccagacaggccagaacagcatcccagccctggcccaggtggccgccatcgccgagacagatgagagcgctgagagcgagggcgtgattgacagccacaagaggcgggagatcctgagccggcggcccagctacaggaagatcctgaatgagctgagcagtgatgtgcctggggtgcccaagattgaggaggagaggtctgaggaggagggcaccccacccagcatcgccaccatggctgtgcccaccagcatctaccagaccagcacaggccagtacatcgccatcgcccagggcggcaccatccagatcagcaaccctggcagtgatggagtgcagggcctgcaggccctgaccatgaccaacagcggggcccctcctcctggggccaccatcgtgcagtatgctgcccagagcgcagatggcacccagcagttctttgtgcccggcagccaggtggtggtgcaggccgccaccggggacatgcccacctaccagatccgggcccccacagctgccctgccccagggcgtggtgatggccgccagccctggcagcctgcacagcccccagcagctggccgaggaggccaccaggaagcgggagctgcggctgatgaagaaccgggaggccgccaaggaatgtagaagaaggaagaaggagtatgtgaagtgcctggagagccgggtggccgtgctggaggtgcagaacaagaagctgattgaggagctggagaccctgaaggacatctgcagccccaagacagactactag

SEQ ID NO: 146054 - DNA, 666 bp, synthetic construct
  misc_feature 1..666: note = Description of Artificial Sequence: Synthetic coding sequence
  source 1..666: mol_type = other DNA
atgaccatggagaccgtggagagccagcatgatggcagcatcacagccagcctgacagagagcaagagcgcccacgtgcagacccagacaggccagaacagcatcccagccctggcccaggtggccgccatcgccgagacagatgagagcgctgagagcgagggcgtgattgacagccacaagaggcgggagatcctgagccggcggcccagctacaggaagatcctgaatgagctgagcagtgatgtgcctggggtgcccaagattgaggaggagaggtctgaggaggagggcaccccacccagcatcgccaccatggctgtgcccaccagcatctaccagaccagcacaggccagtacacagccactggagacatgcccacctaccagatccgggcccccacagctgccctgccccagggcgtggtgatggccgccagccctggcagcctgcacagcccccagcagctggccgaggaggccaccaggaagcgggagctgcggctgatgaagaaccgggaggccgccaaggagtgcagaagaaggaagaaggagtatgtgaagtgcctggagagccgggtggccgtgctggaggtgcagaacaagaagctgattgaggagctggagaccctgaaggacatctgcagccccaagacagactactag

SEQ ID NO: 146055 - DNA, 747 bp, synthetic construct
  misc_feature 1..747: note = Description of Artificial Sequence: Synthetic coding sequence
  source 1..747: mol_type = other DNA
atgagcaaatgtgccaggaagaagtacatcaagaccaacccccggcagatgaccatggagaccgtggagagccagcatgatggcagcatcacagccagcctgacagagagcaagagcgcccacgtgcagacccagacaggccagaacagcatcccagccctggcccaggtggccgccatcgccgagacagatgagagcgctgagagcgagggcgtgattgacagccacaagaggcgggagatcctgagccggcggcccagctacaggaagatcctgaatgagctgagcagtgatgtgcctggggtgcccaagattgaggaggagaggtctgaggaggagggcaccccacccagcatcgccaccatggctgtgcccaccagcatctaccagaccagcacaggccagtacaatgaggagacagagctggcccccagccacatggctgctgccactggagacatgcccacctaccagatccgggcccccacagctgccctgccccagggcgtggtgatggccgccagccctggcagcctgcacagcccccagcagctggccgaggaggccaccaggaagcgggagctgcggctgatgaagaaccgggaggccgcccgggagtgcaggaggaagaagaaggagtatgtgaagtgcctggagaacagagtggccgtgctggagaaccagaacaagaccctgattgaggagctgaaggccctgaaggacctgtactgccacaaggtggagtag

SEQ ID NO: 146056 - DNA, 327 bp, synthetic construct
  misc_feature 1..327: note = Description of Artificial Sequence: Synthetic coding sequence
  source 1..327: mol_type = other DNA
atggctgtgactggagatgacacagctgccactggagacatgcccacctaccagatccgggcccccacagctgccctgccccagggcgtggtgatggccgccagccctggcagcctgcacagcccccagcagctggccgaggaggccaccaggaagcgggagctgcggctgatgaagaaccgggaggccgcccgggagtgcaggaggaagaagaaggagtatgtgaagtgcctggagaacagagtggccgtgctggagaaccagaacaagaccctgattgaggagctgaaggccctgaaggacctgtactgccacaaggtggagtag

SEQ ID NO: 146057 - DNA, 813 bp, synthetic construct
  misc_feature 1..813: note = Description of Artificial Sequence: Synthetic coding sequence
  source 1..813: mol_type = other DNA
atgtggtggcaccagcacaacctgtgcttcagaagacccatcgaggaggactacagcagtggagatgtggaggagaaggtggccgccatcgccgagacagatgagagcgctgagagcgagggcgtgattgacagccacaagaggcgggagatcctgagccggcggcccagctacaggaagatcctgaatgagctgagcagtgatgtgcctggggtgcccaagattgaggaggagaggtctgaggaggagggcaccccacccagcatcgccaccatggctgtgcccaccagcatctaccagaccagcacaggccagtacatcgccatcgcccagggcggcaccatccagatcagcaaccctggcagtgatggagtgcagggcctgcaggccctgaccatgaccaacagcggggcccctcctcctggggccaccatcgtgcagtatgctgcccagagcgcagatggcacccagcagttctttgtgcccggcagccaggtggtggtgcaggccgccaccggggacatgcccacctaccagatccgggcccccacagctgccctgccccagggcgtggtgatggccgccagccctggcagcctgcacagcccccagcagctggccgaggaggccaccaggaagcgggagctgcggctgatgaagaaccgggaggccgccaaggaatgtagaagaaggaagaaggagtatgtgaagtgcctggagagccgggtggccgtgctggaggtgcagaacaagaagctgattgaggagctggagaccctgaaggacatctgcagccccaagacagactactag

SEQ ID NO: 146058 - DNA, 999 bp, synthetic construct
  misc_feature 1..999: note = Description of Artificial Sequence: Synthetic coding sequence
  source 1..999: mol_type = other DNA
atgaccatggagaccgtggagagccagcatgatggcagcatcacagccagcctgacagagagcaagagcgcccacgtgcagacccagacaggccagaacagcatcccagccctggcccaggtgtctgtggccggcagcggcacccggcggggcagccctgctgtgaccctggtgcagctgcccagcggccagaccatccacgtgcagggcgtcatccagaccccccagccctgggtgatccagagcagcgagatccacacagtgcaggtggccgccatcgccgagacagatgaatctgctgagagcgagggcgtcatcgacagccacaagagaagagagatcctgagcagaagacccagctacaggaagatcctgaatgagctgagcagtgatgtgcctggggtgcccaagattgaggaggagaggtctgaggaggagggcaccccacccagcatcgccaccatggctgtgcccaccagcatctaccagaccagcacaggccagtacatcgccatcgcccagggcggcaccatccagatcagcaaccctggcagtgatggagtgcagggcctgcaggccctgaccatgaccaacagcggggcccctcctcctggggccaccatcgtgcagtatgctgcccagagcgcagatggcacccagcagttctttgtgcccggcagccaggtggtggtgcaggccgccactggagacatgcccacctaccagatccgggcccccacagctgccctgccccagggcgtggtgatggccgccagccctggcagcctgcacagcccccagcagctggccgaggaggccaccaggaagcgggagctgcggctgatgaagaaccgggaggccgcccgggagtgcaggaggaagaagaaggagtatgtgaagtgcctggagaacagagtggccgtgctggagaaccagaacaagaccctgattgaggagctgaaggccctgaaggacctgtactgccacaaggtggagtag

SEQ ID NO: 146059 - DNA, 1002 bp, synthetic construct
  misc_feature 1..1002: note = Description of Artificial Sequence: Synthetic coding sequence
  source 1..1002: mol_type = other DNA
atgaccatggagaccgtggagagccagcatgatggcagcatcacagccagcctgacagagagcaagagcgcccacgtgcagacccagacaggccagaacagcatcccagccctggcccaggtgtctgtggccggcagcggcacccggcggggcagccctgctgtgaccctggtgcagctgcccagcggccagaccatccacgtgcagggcgtcatccagaccccccagccctgggtgatccagagcagcgagatccacacagtgcaggtggccgccatcgccgagacagatgaatctgctgagagcgagggcgtcatcgacagccacaagagaagagagatcctgagcagaagacccagctacaggaagatcctgaatgagctgagcagtgatgtgcctggggtgcccaagattgaggaggagaggtctgaggaggagggcaccccacccagcatcgccaccatggctgtgcccaccagcatctaccagaccagcacaggccagtacatcgccatcgcccagggcggcaccatccagatcagcaaccctggcagtgatggagtgcagggcctgcaggccctgaccatgaccaacagcggggcccctcctcctggggccaccatcgtgcagtatgctgcccagagcgcagatggcacccagcagttctttgtgcccggcagccaggtggtggtgcaggccgccactggagacatgcccacctaccagatccgggcccccacagctgccctgccccagggcgtggtgatggccgccagccctggcagcctgcacagcccccagcagctggccgaggaggccaccaggaagcgggagctgcggctgatgaagaaccgggaggccgccaaggagtgcagaagaaggaagaaggagtatgtgaagtgcctggagagccgggtggccgtgctggaggtgcagaacaagaagctgattgaggagctggagaccctgaaggacatctgcagccccaagacagactactag

SEQ ID NO: 146060 - DNA, 414 bp, synthetic construct
  misc_feature 1..414: note = Description of Artificial Sequence: Synthetic coding sequence
  source 1..414: mol_type = other DNA
atgaccatggagaccgtggagagccagcatgatggcagcatcacagccagcctgacagagagcaagagcgcccacgtgcagacccagacaggccagaacagcatcccagccctggcccaggtggccgccatcgccgagacagatgagagcgctgagagcgagggcgtgattgacagccacaagaggcgggagatcctgagccggcggcccagctacaggaagatcctgaatgagctgagcagtgatgtgcctggggtgcccaagattgaggaggagaggtctgaggaggagggcaccccacccagcatcgccaccatggctgtgcccaccagcatctaccagaccagcacaggccagtacagcatgtatgctgccatccgctatgacacagtgctggccctgagcctgctgtag

SEQ ID NO: 146061 - DNA, 666 bp, synthetic construct; identical to SEQ ID NO: 146054
  misc_feature 1..666: note = Description of Artificial Sequence: Synthetic coding sequence
  source 1..666: mol_type = other DNA

SEQ ID NO: 146062 - DNA, 711 bp, synthetic construct
  misc_feature 1..711: note = Description of Artificial Sequence: Synthetic coding sequence
  source 1..711: mol_type = other DNA
atgagcaaatgtgccaggaagaagtacatcaagaccaacccccggcagatgaccatggagaccgtggagagccagcatgatggcagcatcacagccagcctgacagagagcaagagcgcccacgtgcagacccagacaggccagaacagcatcccagccctggcccaggtggccgccatcgccgagacagatgagagcgctgagagcgagggcgtgattgacagccacaagaggcgggagatcctgagccggcggcccagctacaggaagatcctgaatgagctgagcagtgatgtgcctggggtgcccaagattgaggaggagaggtctgaggaggagggcaccccacccagcatcgccaccatggctgtgcccaccagcatctaccagaccagcacaggccagtacacagccactggagacatgcccacctaccagatccgggcccccacagctgccctgccccagggcgtggtgatggccgccagccctggcagcctgcacagcccccagcagctggccgaggaggccaccaggaagcgggagctgcggctgatgaagaaccgggaggccgcccgggagtgcaggaggaagaagaaggagtatgtgaagtgcctggagaacagagtggccgtgctggagaaccagaacaagaccctgattgaggagctgaaggccctgaaggacctgtactgccacaaggtggagtag

SEQ ID NO: 146063 - DNA, 849 bp, synthetic construct
  misc_feature 1..849: note = Description of Artificial Sequence: Synthetic coding sequence
  source 1..849: mol_type = other DNA
atgtggtggcaccagcacaacctgtgcttcagaagacccatcgaggaggactacagcagtggagatgtggaggagaaggtggccgccatcgccgagacagatgagagcgctgagagcgagggcgtgattgacagccacaagaggcgggagatcctgagccggcggcccagctacaggaagatcctgaatgagctgagcagtgatgtgcctggggtgcccaagattgaggaggagaggtctgaggaggagggcaccccacccagcatcgccaccatggctgtgcccaccagcatctaccagaccagcacaggccagtacatcgccatcgcccagggcggcaccatccagatcagcaaccctggcagtgatggagtgcagggcctgcaggccctgaccatgaccaacagcggggcccctcctcctggggccaccatcgtgcagtatgctgcccagagcgcagatggcacccagcagttctttgtgcccggcagccaggtggtggtgcaggatgaggagacagagctggcccccagccacatggccgccgccaccggggacatgcccacctaccagatccgggcccccacagctgccctgccccagggcgtggtgatggccgccagccctggcagcctgcacagcccccagcagctggccgaggaggccaccaggaagcgggagctgcggctgatgaagaaccgggaggccgccaaggaatgtagaagaaggaagaaggagtatgtgaagtgcctggagagccgggtggccgtgctggaggtgcagaacaagaagctgattgaggagctggagaccctgaaggacatctgcagccccaagacagactactag

SEQ ID NO: 146064 - DNA, 1086 bp, synthetic construct
  misc_feature 1..1086: note = Description of Artificial Sequence: Synthetic coding sequence
  source 1..1086: mol_type = other DNA
atgagcaaatgtgccaggaagaagtacatcaagaccaacccccggcagatgaccatggagaccgtggagagccagcatgatggcagcatcacagccagcctgacagagagcaagagcgcccacgtgcagacccagacaggccagaacagcatcccagccctggcccaggtgtctgtggccggcagcggcacccggcggggcagccctgctgtgaccctggtgcagctgcccagcggccagaccatccacgtgcagggcgtcatccagaccccccagccctgggtgatccagagcagcgagatccacacagtgcaggtggccgccatcgccgagacagatgaatctgctgagagcgagggcgtcatcgacagccacaagagaagagagatcctgagcagaagacccagctacaggaagatcctgaatgagctgagcagtgatgtgcctggggtgcccaagattgaggaggagaggtctgaggaggagggcaccccacccagcatcgccaccatggctgtgcccaccagcatctaccagaccagcacaggccagtacatcgccatcgcccagggcggcaccatccagatcagcaaccctggcagtgatggagtgcagggcctgcaggccctgaccatgaccaacagcggggcccctcctcctggggccaccatcgtgcagtatgctgcccagagcgcagatggcacccagcagttctttgtgcccggcagccaggtggtggtgcaggatgaggagacagagctggcccccagccacatggctgctgccactggagacatgcccacctaccagatccgggcccccacagctgccctgccccagggcgtggtgatggccgccagccctggcagcctgcacagcccccagcagctggccgaggaggccaccaggaagcgggagctgcggctgatgaagaaccgggaggccgccaaggagtgcagaagaaggaagaaggagtatgtgaagtgcctggagagccgggtggccgtgctggaggtgcagaacaagaagctgattgaggagctggagaccctgaaggacatctgcagccccaagacagactactag

SEQ ID NO: 146065 - DNA, 474 bp, synthetic construct
  misc_feature 1..474: note = Description of Artificial Sequence: Synthetic coding sequence
  source 1..474: mol_type = other DNA
atgagcaaatgtgccaggaagaagtacatcaagaccaacccccggcagatgaccatggagaccgtggagagccagcatgatggcagcatcacagccagcctgacagagagcaagagcgcccacgtgcagacccagacaggccagaacagcatcccagccctggcccaggtggccgccatcgccgagacagatgagagcgctgagagcgagggcgtgattgacagccacaagaggcgggagatcctgagccggcggcccagctacaggaagatcctgaatgagctgagcagtgatgtgcctggggtgcccaagattgaggaggagaggtctgaggaggagggcaccccacccagcatcgccaccatggctgtgcccaccagcatctaccagaccagcacaggccagtacatcgccatcgcccagggcggcaccatccagatcagcaaccctggcagtgatggagtgcagggctag

SEQ ID NO: 146066 - DNA, 1038 bp, synthetic construct
  misc_feature 1..1038: note = Description of Artificial Sequence: Synthetic coding sequence
  source 1..1038: mol_type = other DNA
atgaccatggagaccgtggagagccagcatgatggcagcatcacagccagcctgacagagagcaagagcgcccacgtgcagacccagacaggccagaacagcatcccagccctggcccaggtgtctgtggccggcagcggcacccggcggggcagccctgctgtgaccctggtgcagctgcccagcggccagaccatccacgtgcagggcgtcatccagaccccccagccctgggtgatccagagcagcgagatccacacagtgcaggtggccgccatcgccgagacagatgaatctgctgagagcgagggcgtcatcgacagccacaagagaagagagatcctgagcagaagacccagctacaggaagatcctgaatgagctgagcagtgatgtgcctggggtgcccaagattgaggaggagaggtctgaggaggagggcaccccacccagcatcgccaccatggctgtgcccaccagcatctaccagaccagcacaggccagtacatcgccatcgcccagggcggcaccatccagatcagcaaccctggcagtgatggagtgcagggcctgcaggccctgaccatgaccaacagcggggcccctcctcctggggccaccatcgtgcagtatgctgcccagagcgcagatggcacccagcagttctttgtgcccggcagccaggtggtggtgcaggatgaggagacagagctggcccccagccacatggctgctgccactggagacatgcccacctaccagatccgggcccccacagctgccctgccccagggcgtggtgatggccgccagccctggcagcctgcacagcccccagcagctggccgaggaggccaccaggaagcgggagctgcggctgatgaagaaccgggaggccgccaaggagtgcagaagaaggaagaaggagtatgtgaagtgcctggagagccgggtggccgtgctggaggtgcagaacaagaagctgattgaggagctggagaccctgaaggacatctgcagccccaagacagactactag

SEQ ID NO: 146067 - DNA, 858 bp, synthetic construct
  misc_feature 1..858: note = Description of Artificial Sequence: Synthetic coding sequence
  source 1..858: mol_type = other DNA
atgagcaaatgtgccaggaagaagtacatcaagaccaacccccggcagatgaccatggagaccgtggagagccagcatgatggcagcatcacagccagcctgacagagagcaagagcgcccacgtgcagacccagacaggccagaacagcatcccagccctggcccaggtgtctgtggccggcagcggcacccggcggggcagccctgctgtgaccctggtgcagctgcccagcggccagaccatccacgtgcagggcgtcatccagaccccccagccctgggtgatccagagcagcgagatccacacagtgcaggtggccgccatcgccgagacagatgaatctgctgagagcgagggcgtcatcgacagccacaagagaagagagatcctgagcagaagacccagctacaggaagatcctgaatgagctgagcagtgatgtgcctggggtgcccaagattgaggaggagaggtctgaggaggagggcaccccacccagcatcgccaccatggctgtgcccaccagcatctaccagaccagcacaggccagtacacagccaccggggacatgcccacctaccagatccgggcccccacagctgccctgccccagggcgtggtgatggccgccagccctggcagcctgcacagcccccagcagctggccgaggaggccaccaggaagcgggagctgcggctgatgaagaaccgggaggccgccagagaatgtagaaggaagaagaaggagtatgtgaagtgcctggagaacagagtggccgtgctggagaaccagaacaagaccctcatcgaggagctgaaggccctgaaggacctgtactgccacaaggtggagtag

SEQ ID NO: 146068 - DNA, 288 bp, synthetic construct; identical to SEQ ID NO: 146052
  misc_feature 1..288: note = Description of Artificial Sequence: Synthetic coding sequence
  source 1..288: mol_type = other DNA

SEQ ID NO: 146069 - DNA, 810 bp, synthetic construct
  misc_feature 1..810: note = Description of Artificial Sequence: Synthetic coding sequence
  source 1..810: mol_type = other DNA
atgaccatggagaccgtggagagccagcatgatggcagcatcacagccagcctgacagagagcaagagcgcccacgtgcagacccagacaggccagaacagcatcccagccctggcccaggtgtctgtggccggcagcggcacccggcggggcagccctgctgtgaccctggtgcagctgcccagcggccagaccatccacgtgcagggcgtcatccagaccccccagccctgggtgatccagagcagcgagatccacacagtgcaggtggccgccatcgccgagacagatgaatctgctgagagcgagggcgtcatcgacagccacaagagaagagagatcctgagcagaagacccagctacaggaagatcctgaatgagctgagcagtgatgtgcctggggtgcccaagattgaggaggagaggtctgaggaggagggcaccccacccagcatcgccaccatggctgtgcccaccagcatctaccagaccagcacaggccagtacacagccaccggggacatgcccacctaccagatccgggcccccacagctgccctgccccagggcgtggtgatggccgccagccctggcagcctgcacagcccccagcagctggccgaggaggccaccaggaagcgggagctgcggctgatgaagaaccgggaggccgccagagaatgtagaaggaagaagaaggagtatgtgaagtgcctggagaacagagtggccgtgctggagaaccagaacaagaccctcatcgaggagctgaaggccctgaaggacctgtactgccacaaggtggagtag

SEQ ID NO: 146070 - DNA, 585 bp, synthetic construct
  misc_feature 1..585: note = Description of Artificial Sequence: Synthetic coding sequence
  source 1..585: mol_type = other DNA
atggtggccgccatcgccgagacagatgaatctgctgagagcgagggcgtcatcgacagccacaagagaagagagatcctgagcagaagacccagctacaggaagatcctgaatgagctgagcagtgatgtgcctggggtgcccaagattgaggaggagaggtctgaggaggagggcaccccacccagcatcgccaccatggctgtgcccaccagcatctaccagaccagcacaggccagtacaatgaggagacagagctggcccccagccacatggccgccgccaccggggacatgcccacctaccagatccgggcccccacagctgccctgccccagggcgtggtgatggccgccagccctggcagcctgcacagcccccagcagctggccgaggaggccaccaggaagcgggagctgcggctgatgaagaaccgggaggccgccaaggaatgtagaagaaggaagaaggagtatgtgaagtgcctggagagccgggtggccgtgctggaggtgcagaacaagaagctgattgaggagctggagaccctgaaggacatctgcagccccaagacagactactag

SEQ ID NO: 146071 - DNA, 363 bp, synthetic construct
  misc_feature 1..363: note = Description of Artificial Sequence: Synthetic coding sequence
  source 1..363: mol_type = other DNA
atggctgtgactggagatgacacagatgaggagacagagctggcccccagccacatggctgctgccactggagacatgcccacctaccagatccgggcccccacagctgccctgccccagggcgtggtgatggccgccagccctggcagcctgcacagcccccagcagctggccgaggaggccaccaggaagcgggagctgcggctgatgaagaaccgggaggccgcccgggagtgcaggaggaagaagaaggagtatgtgaagtgcctggagaacagagtggccgtgctggagaaccagaacaagaccctgattgaggagctgaaggccctgaaggacctgtactgccacaaggtggagtag

SEQ ID NO: 146072 - DNA, 291 bp, synthetic construct
  misc_feature 1..291: note = Description of Artificial Sequence: Synthetic coding sequence
  source 1..291: mol_type = other DNA
atgcccacctaccagatccgggcccccacagctgccctgccccagggcgtggtgatggccgccagccctggcagcctgcacagcccccagcagctggccgaggaggccaccaggaagcgggagctgcggctgatgaagaaccgggaggccgccaaggaatgtagaagaaggaagaaggagtatgtgaagtgcctggagagccgggtggccgtgctggaggtgcagaacaagaagctgattgaggagctggagaccctgaaggacatctgcagccccaagacagactactag

SEQ ID NO: 146073 - DNA, 339 bp, synthetic construct
  misc_feature 1..339: note = Description of Artificial Sequence: Synthetic coding sequence
  source 1..339: mol_type = other DNA
atgaacagaacccaggagctgagcggccagctgtctgctgccactggagacatgcccacctaccagatccgggcccccacagctgccctgccccagggcgtggtgatggccgccagccctggcagcctgcacagcccccagcagctggccgaggaggccaccaggaagcgggagctgcggctgatgaagaaccgggaggccgcccgggagtgcaggaggaagaagaaggagtatgtgaagtgcctggagaacagagtggccgtgctggagaaccagaacaagaccctgattgaggagctgaaggccctgaaggacctgtactgccacaaggtggagtag

SEQ ID NO: 146074 - DNA, 939 bp, synthetic construct
  misc_feature 1..939: note = Description of Artificial Sequence: Synthetic coding sequence
  source 1..939: mol_type = other DNA
atgagcaaatgtgccaggaagaagtacatcaagaccaacccccggcagatgaccatggagaccgtggagagccagcatgatggcagcatcacagccagcctgacagagagcaagagcgcccacgtgcagacccagacaggccagaacagcatcccagccctggcccaggtggccgccatcgccgagacagatgagagcgctgagagcgagggcgtgattgacagccacaagaggcgggagatcctgagccggcggcccagctacaggaagatcctgaatgagctgagcagtgatgtgcctggggtgcccaagattgaggaggagaggtctgaggaggagggcaccccacccagcatcgccaccatggctgtgcccaccagcatctaccagaccagcacaggccagtacatcgccatcgcccagggcggcaccatccagatcagcaaccctggcagtgatggagtgcagggcctgcaggccctgaccatgaccaacagcggggcccctcctcctggggccaccatcgtgcagtatgctgcccagagcgcagatggcacccagcagttctttgtgcccggcagccaggtggtggtgcaggatgaggagacagagctggcccccagccacatggccgccgccaccggggacatgcccacctaccagatccgggcccccacagctgccctgccccagggcgtggtgatggccgccagccctggcagcctgcacagcccccagcagctggccgaggaggccaccaggaagcgggagctgcggctgatgaagaaccgggaggccgccaaggaatgtagaagaaggaagaaggagtatgtgaagtgcctggagagccgggtggccgtgctggaggtgcagaacaagaagctgattgaggagctggagaccctgaaggacatctgcagccccaagacagactactag

SEQ ID NO: 146075 - DNA, 660 bp, synthetic construct
  misc_feature 1..660: note = Description of Artificial Sequence: Synthetic coding sequence
  source 1..660: mol_type = other DNA
atgtggtggcaccagcacaacctgtgcttcagaagacccatcgaggaggactacagcagtggagatgtggaggagaaggtggccgccatcgccgagacagatgagagcgctgagagcgagggcgtgattgacagccacaagaggcgggagatcctgagccggcggcccagctacaggaagatcctgaatgagctgagcagtgatgtgcctggggtgcccaagattgaggaggagaggtctgaggaggagggcaccccacccagcatcgccaccatggctgtgcccaccagcatctaccagaccagcacaggccagtacaatgaggagacagagctggcccccagccacatggctgctgccactggagacatgcccacctaccagatccgggcccccacagctgccctgccccagggcgtggtgatggccgccagccctggcagcctgcacagcccccagcagctggccgaggaggccaccaggaagcgggagctgcggctgatgaagaaccgggaggccgccaaggagtgcagaagaaggaagaaggagtatgtgaagtgcctggagagccgggtggccgtgctggaggtgcagaacaagaagctgattgaggagctggagaccctgaaggacatctgcagccccaagacagactactag

SEQ ID NO: 146076 - DNA, 366 bp, synthetic construct
  misc_feature 1..366: note = Description of Artificial Sequence: Synthetic coding sequence
  source 1..366: mol_type = other DNA
atggctgtgactggagatgacacagatgaggagacagagctggcccccagccacatggctgctgccactggagacatgcccacctaccagatccgggcccccacagctgccctgccccagggcgtggtgatggccgccagccctggcagcctgcacagcccccagcagctggccgaggaggccaccaggaagcgggagctgcggctgatgaagaaccgggaggccgccaaggagtgcagaagaaggaagaaggagtatgtgaagtgcctggagagccgggtggccgtgctggaggtgcagaacaagaagctgattgaggagctggagaccctgaaggacatctgcagccccaagacagactactag

SEQ ID NO: 146077 - DNA, 330 bp, synthetic construct
  misc_feature 1..330: note = Description of Artificial Sequence: Synthetic coding sequence
  source 1..330: mol_type = other DNA
atggctgtgactggagatgacacagctgccactggagacatgcccacctaccagatccgggcccccacagctgccctgccccagggcgtggtgatggccgccagccctggcagcctgcacagcccccagcagctggccgaggaggccaccaggaagcgggagctgcggctgatgaagaaccgggaggccgccaaggagtgcagaagaaggaagaaggagtatgtgaagtgcctggagagccgggtggccgtgctggaggtgcagaacaagaagctgattgaggagctggagaccctgaaggacatctgcagccccaagacagactactag

SEQ ID NO: 146078 - DNA, 309 bp, synthetic construct
  misc_feature 1..309: note = Description of Artificial Sequence: Synthetic coding sequence
  source 1..309: mol_type = other DNA
atggctgctgccactggagacatgcccacctaccagatccgggcccccacagctgccctgccccagggcgtggtgatggccgccagccctggcagcctgcacagcccccagcagctggccgaggaggccaccaggaagcgggagctgcggctgatgaagaaccgggaggccgcccgggagtgcaggaggaagaagaaggagtatgtgaagtgcctggagaacagagtggccgtgctggagaaccagaacaagaccctgattgaggagctgaaggccctgaaggacctgtactgccacaaggtggagtag

SEQ ID NO: 146079 - DNA, 414 bp, synthetic construct; identical to SEQ ID NO: 146060
  misc_feature 1..414: note = Description of Artificial Sequence: Synthetic coding sequence
  source 1..414: mol_type = other DNA

SEQ ID NO: 146080 - DNA, 618 bp, synthetic construct
  misc_feature 1..618: note = Description of Artificial Sequence: Synthetic coding sequence
  source 1..618: mol_type = other DNA
atgaccatggagaccgtggagagccagcatgatggcagcatcacagccagcctgacagagagcaagagcgcccacgtgcagacccagacaggccagaacagcatcccagccctggcccaggtggtggccatcgcccagggcggcaccatccagatcagcaaccctggcagtgatggagtgcagggcctgcaggccctgaccatgaccaacagcggggcccctcctcctggggccaccatcgtgcagtatgctgcccagagcgcagatggcacccagcagttctttgtgcccggcagccaggtggtggtgcaggccgccactggagacatgcccacctaccagatccgggcccccacagctgccctgccccagggcgtggtgatggccgccagccctggcagcctgcacagcccccagcagctggccgaggaggccaccaggaagcgggagctgcggctgatgaagaaccgggaggccgccaaggagtgcagaagaaggaagaaggagtatgtgaagtgcctggagagccgggtggccgtgctggaggtgcagaacaagaagctgattgaggagctggagaccctgaaggacatctgcagccccaagacagactactag

SEQ ID NO: 146081 - DNA, 813 bp, synthetic construct
  misc_feature 1..813: note = Description of Artificial Sequence: Synthetic coding sequence
  source 1..813: mol_type = other DNA
atgaccatggagaccgtggagagccagcatgatggcagcatcacagccagcctgacagagagcaagagcgcccacgtgcagacccagacaggccagaacagcatcccagccctggcccaggtgtctgtggccggcagcggcacccggcggggcagccctgctgtgaccctggtgcagctgcccagcggccagaccatccacgtgcagggcgtcatccagaccccccagccctgggtgatccagagcagcgagatccacacagtgcaggtggccgccatcgccgagacagatgaatctgctgagagcgagggcgtcatcgacagccacaagagaagagagatcctgagcagaagacccagctacaggaagatcctgaatgagctgagcagtgatgtgcctggggtgcccaagattgaggaggagaggtctgaggaggagggcaccccacccagcatcgccaccatggctgtgcccaccagcatctaccagaccagcacaggccagtacacagccaccggggacatgcccacctaccagatccgggcccccacagctgccctgccccagggcgtggtgatggccgccagccctggcagcctgcacagcccccagcagctggccgaggaggccaccaggaagcgggagctgcggctgatgaagaaccgggaggccgccaaggaatgtagaagaaggaagaaggagtatgtgaagtgcctggagagccgggtggccgtgctggaggtgcagaacaagaagctgattgaggagctggagaccctgaaggacatctgcagccccaagacagactactag

SEQ ID NO: 146082 - DNA, 342 bp, synthetic construct
  misc_feature 1..342: note = Description of Artificial Sequence: Synthetic coding sequence
  source 1..342: mol_type = other DNA
atgaacagaacccaggagctgagcggccagctgtctgctgccactggagacatgcccacctaccagatccgggcccccacagctgccctgccccagggcgtggtgatggccgccagccctggcagcctgcacagcccccagcagctggccgaggaggccaccaggaagcgggagctgcggctgatgaagaaccgggaggccgccaaggagtgcagaagaaggaagaaggagtatgtgaagtgcctggagagccgggtggccgtgctggaggtgcagaacaagaagctgattgaggagctggagaccctgaaggacatctgcagccccaagacagactactag

SEQ ID NO: 146083 - DNA, 465 bp, synthetic construct
  misc_feature 1..465: note = Description of Artificial Sequence: Synthetic coding sequence
  source 1..465: mol_type = other DNA
atgaccatggagaccgtggagagccagcatgatggcagcatcacagccagcctgacagagagcaagagcgcccacgtgcagacccagacaggccagaacagcatcccagccctggcccaggtggatgaggagacagagctggcccccagccacatggccgccgccaccggggacatgcccacctaccagatccgggcccccacagctgccctgccccagggcgtggtgatggccgccagccctggcagcctgcacagcccccagcagctggccgaggaggccaccaggaagcgggagctgcggctgatgaagaaccgggaggccgccaaggaatgtagaagaaggaagaaggagtatgtgaagtgcctggagagccgggtggccgtgctggaggtgcagaacaagaagctgattgaggagctggagaccctgaaggacatctgcagccccaagacagactactag

SEQ ID NO: 146084 - DNA, 339 bp, synthetic construct
  misc_feature 1..339: note = Description of Artificial Sequence: Synthetic coding sequence
  source 1..339: mol_type = other DNA
atgtctgctgaggtgcctgaggccgccagcgctgaggagcagaaggagatggaggacaaggtgaccagccctgagaaggccgaggaggccaagctgaaggcccgctacccccacctgggccagaagccaggcggcagtgacttcctgaggaagaggctgcagaagggccagaagtactttgacagcggggactacaacatggccaaggccaagatgaagaacaagcagctgcccacagctgccccagacaagacagaggtgactggagaccacatccccaccccccaggacctgccccagaggaagcccagcctggtggccagcaagctggccggctag

SEQ ID NO: 146085 - DNA, 1926 bp, synthetic construct
  misc_feature 1..1926: note = Description of Artificial Sequence: Synthetic coding sequence
  source 1..1926: mol_type = other DNA
atgacagagaagccagagttccagagccaggtgtacaactatgccaaggacaacaacatcaagcaggacagcttcaaggaggagaaccccatggagacctctgtgtctgccaacacagaccagctgggcaatgagtacttccggcagcccccacccaggagccccccactcatccactgcagcggggagatgctgaagttcacagagaagagcctggccaagagcatcgccaaggagagcgccctgaaccccagccagcccccatccttcctgtgcaagacagctgtgcccagcaaggagatccagaactacggggagatccctgagatgtctgtgtcctatgagaaggaggtgacagctgagggcgtggagaggcctgagatcgtgtccacctggagcagcgctggcatctcctggaggtctgaggcctgccgggagaactgtgagatgccagactgggagcagagcgctgagagcctgcagcctgtgcaggaggacatggccctgaatgaggtgctgcagaagctgaagcacaccaacaggaagcaggaggtgcgcatccaggagctgcagtgcagcaacctgtacctggagaagagggtgaaggagctgcagatgaagatcaccaagcagcaggtgttcattgatgtgatcaacaagctgaaggaaaatgtggaggagctgattgaggacaagtacaagatcatcctggagaagaatgacaccaagaagaccctgcagaacctggaggaggtgctggccaacacccagaagcacctgcaggagagcagaaatgacaaggagatgctgcagctgcagttcaagaagatcaaggccaactacgtgtgcctgcaggagcgctacatgacagagatgcagcagaagaacaagtctgtgtcccagtacctggagatggacaagaccctgagcaagaaggaggaggaggtggagcggctgcagcagctgaagaaggagctggagaaggccacagccagcgccctggacctgctgaagcgggagaaggaggcccaggagcaggagttcctgagcctgcaggaggagttccagaagctggagaaggagaacctggaggagcggcagaagctgaagagccggctggagaagctgctgacccaggtgaggaacctgcagttcatgtctgaaaatgaaagaaccaagaacatcaagctgcagcagcagatcaatgaggtgaagaatgaaaatgccaagctgaagcagcaggtggcccggtctgaggagcagaactacgtgcccaagtttgaaacagcccagctgaaggaccagctggaggaggtgctgaagagtgacatcaccaaggacaccaagaccacccacagcaacctgctgcctgactgcagcccctgtgaggagcggctgaacccagctgacatcaagagggccagccagctggccagcaagatgcacagcctgctggccctgatggtgggcctgctgacctgccaggacatcatcaacagtgatgctgagcacttcaaggagagcgagaaggtgtctgacatcatgctgcagaagctgaagagcctgcacctgaagaagaagaccctggacaaggaggtgattgactgtgacagtgatgaggccaagagcatcagagatgtgcccaccctgctgggcgccaagctggacaagtaccacagcctgaatgaggagctggacttcctggtgaccagctatgaggagatcattgaatgtgccgaccagaggctggccatcagccacagccagatcgcccacctggaggagaggaacaagcacctggaggacctgatcaggaagccccgggagaaggccaggaagcccaggagcaagagcctggagaaccaccccaagtccatgaccatgatgcctgccctcttcaaggaaaatagaaatgacctggactag

SEQ ID NO: 146086 - DNA, 2475 bp, synthetic construct
  misc_feature 1..2475: note = Description of Artificial Sequence: Synthetic coding sequence
  source 1..2475: mol_type = other DNA
atgaacaaggactaccagaagttctggagcagccccagcgaccctgtgcactttgaggtggacaccagccatgagaaggtggagagcatgtctgagagtgacaccatgaatgtgagcaacctgagccagggcgtgatgctgagccacagccccatctgcatggagaccaccggcaccacctgtgacctgccccagaatgagatcaagaactttgagcgggagaatgaatatgagagcaccctgtgtgaagatgcctacggcaccctggacaacctgctgaatgacaacaacatcgagaactacagcaccaatgccctgatccagcctgtggacaccatcagcatcagcagcctgcggcagtttgaaacagtgtgcaagttccactgggtggaggcctttgatgatgagatgacagagaagccagagttccagagccaggtgtacaactatgccaaggacaacaacatcaagcaggacagcttcaaggaggagaaccccatggagacctctgtgtctgccaacacagaccagctgggcaatgagtacttccggcagcccccacccaggagccccccactcatccactgcagcggggagatgctgaagttcacagagaagagcctggccaagagcatcgccaaggagagcgccctgaaccccagccagcccccatccttcctgtgcaagacagctgtgcccagcaaggagatccagaactacggggagatccctgagatgtctgtgtcctatgagaaggaggtgacagctgagggcgtggagaggcctgagatcgtgtccacctggagcagcgctggcatctcctggaggtctgaggcctgccgggagaactgtgagatgccagactgggagcagagcgctgagagcctgcagcctgtgcaggaggacatggccctgaatgaggtgctgcagaagctgaagcacaccaacaggaagcaggaggtgcgcatccaggagctgcagtgcagcaacctgtacctggagaagagggtgaaggagctgcagatgaagatcaccaagcagcaggtgttcattgatgtgatcaacaagctgaaggaaaatgtggaggagctgattgaggacaagtacaagatcatcctggagaagaatgacaccaagaagaccctgcagaacctggaggaggtgctggccaacacccagaagcacctgcaggagagcagaaatgacaaggagatgctgcagctgcagttcaagaagatcaaggccaactacgtgtgcctgcaggagcgctacatgacagagatgcagcagaagaacaagtctgtgtcccagtacctggagatggacaagaccctgagcaagaaggaggaggaggtggagcggctgcagcagctgaagaaggagctggagaaggccacagccagcgccctggacctgctgaagcgggagaaggaggcccaggagcaggagttcctgagcctgcaggaggagttccagaagctggagaaggagaacctggaggagcggcagaagctgaagagccggctggagaagctgctgacccaggtgaggaacctgcagttcatgtctgaaaatgaaagaaccaagaacatcaagctgcagcagcagatcaatgaggtgaagaatgaaaatgccaagctgaagcagcaggtggcccggtctgaggagcagaactacgtgcccaagtttgaaacagcccagctgaaggaccagctggaggaggtgctgaagagtgacatcaccaaggacaccaagaccacccacagcaacctgctgcctgactgcagcccctgtgaggagcggctgaacccagctgacatcaagagggccagccagctggccagcaagatgcacagcctgctggccctgatggtgggcctgctgacctgccaggacatcatcaacagtgatgctgagcacttcaaggagagcgagaaggtgtctgacatcatgctgcagaagctgaagagcctgcacctgaagaagaagaccctggacaaggagctgctgaagcacaaggaccgcatcaccaccttccgggagctgattgccaaggagaaggccttccaggaccacgccatcaaggtgattgactgtgacagtgatgaggccaagagcatcagagatgtgcccaccctgctgggcgccaagctggacaagtaccacagcctgaatgaggagctggacttcctggtgaccagctatgaggagatcattgaatgtgccgaccagaggctggccatcagccacagccagatcgcccacctggaggagaggaacaagcacctggaggacctgatcaggaagccccgggagaaggccaggaagcccaggagcaagagcctggagaaccaccccaagtccatgaccatgctggcctacaacctgtacatcttcatcggctaccgcctgggcgctgtggctgatgcctgcaaccccagcaccctgggcggccggggcggctggatcacctag

SEQ ID NO: 146087 - DNA, 2334 bp, synthetic construct
  misc_feature 1..2334: note = Description of Artificial Sequence: Synthetic coding sequence
  source 1..2334: mol_type = other DNA
atgaacaaggactaccagaagttctggagcagccccagcgaccctgtgcactttgaggtggacaccagccatgagaaggtggagagcatgtctgagagtgacaccatgaatgtgagcaacctgagccagggcgtgatgctgagccacagccccatctgcatggagaccaccggcaccacctgtgacctgccccagaatgagatcaagaactttgagcgggagaatgaatatgagagcaccctgtgtgaagatgcctacggcaccctggacaacctgctgaatgacaacaacatcgagaactacagcaccaatgccctgatccagcctgtggacaccatcagcatcagcagcctgcggcagtttgaaacagtgtgcaagttccactgggtggaggcctttgatgatgagatgacagagaagccagagttccagagccaggtgtacaactatgccaaggacaacaacatcaagcaggacagcttcaaggaggagaaccccatggagacctctgtgtctgccaacacagaccagctgggcaatgagtacttccggcagcccccacccaggagccccccactcatccactgcagcggggagatgctgaagttcacagagaagagcctggccaagagcatcgccaaggagagcgccctgaaccccagccagcccccatccttcctgtgcaagacagctgtgcccagcaaggagatccagaactacggggagatccctgagatgtctgtgtcctatgagaaggaggtgacagctgagggcgtggagaggcctgagatcgtgtccacctggagcagcgctggcatctcctggaggtctgaggcctgccgggagaactgtgagatgccagactgggagcagagcgctgagagcctgcagcctgtgcaggaggacatggccctgaatgaggtgctgcagaagctgaagcacaccaacaggaagcaggaggtgcgcatccaggagctgcagtgcagcaacctgtacctggagaagagggtgaaggagctgcagatgaagatcaccaagcagcaggtgttcattgatgtgatcaacaagctgaaggaaaatgtggaggagctgattgaggacaagtacaagatcatcctggagaagaatgacaccaagaagaccctgcagaacctggaggaggtgctggccaacacccagaagcacctgcaggagagcagaaatgacaaggagatgctgcagctgcagttcaagaagatcaaggccaactacgtgtgcctgcaggagcgctacatgacagagatgcagcagaagaacaagtctgtgtcccagtacctggagatggacaagaccctgagcaagaaggaggaggaggtggagcggctgcagcagctgaagaaggagctggagaaggccacagccagcgccctggacctgctgaagcgggagaaggaggcccaggagcaggagttcctgagcctgcaggaggagttccagaagctggagaaggagaacctggaggagcggcagaagctgaagagccggctggagaagctgctgacccaggtgaggaacctgcagttcatgtctgaaaatgaaagaaccaagaacatcaagctgcagcagcagatcaatgaggtgaagaatgaaaatgccaagctgaagcagcaggtggcccggtctgaggagcagaactacgtgcccaagtttgaaacagcccagctgaaggaccagctggaggaggtgctgaagagtgacatcaccaaggacaccaagaccacccacagcaacctgctgcctgactgcagcccctgtgaggagcggctgaacccagctgacatcaagagggccagccagctggccagcaagatgcacagcctgctggccctgatggtgggcctgctgacctgccaggacatcatcaacagtgatgctgagcacttcaaggagagcgagaaggtgtctgacatcatgctgcagaagctgaagagcctgcacctgaagaagaagaccctggacaaggaggtgattgactgtgacagtgatgaggccaagagcatcagagatgtgcccaccctgctgggcgccaagctggacaagtaccacagcctgaatgaggagctggacttcctggtgaccagctatgaggagatcattgaatgtgccgaccagaggctggccatcagccacagccagatcgcccacctggaggagaggaacaagcacctggaggacctgatcaggaagccccgggagaaggccaggaagcccaggagcaagagcctggagaaccaccccaagtccatgaccatgatgcctgccctcttcaaggaaaatagaaatgacctggactag

SEQ ID NO: 146088 - DNA, 2103 bp, synthetic construct
  misc_feature 1..2103: note = Description of Artificial Sequence: Synthetic coding sequence
  source 1..2103: mol_type = other DNA
atgaacaaggactaccagaagttctggagcagccccagcgaccctgtgcactttgaggtggacaccagccatgagaaggtggagagcatgtctgagagtgacaccatgaatgtgagcaacctgagccagggcgtgatgctgagccacagccccatctgcatggagaccaccggcaccacctgtgacctgccccagaatgagatcaagaactttgagcgggagaatgaatatgagagcaccctgtgtgaagatgcctacggcaccctggacaacctgctgaatgacaacaacatcgagaactacagcaccaatgccctgatccagcctgtggacaccatcagcatcagcagcctgcggcagtttgaaacagtgtgcaagttccactgggtggaggcctttgatgatgagatgacagagaagccagagttccagagccaggtgtacaactatgccaaggacaacaacatcaagcaggacagcttcaaggaggagaaccccatggagacctctgtgtctgccaacacagaccagctgggcaatgagtacttccggcagcccccacccaggagccccccactcatccactgcagcggggagatgctgaagttcacagagaagagcctggccaagagcatcgccaaggagagcgccctgaaccccagccagcccccatccttcctgtgcaagacagctgtgcccagcaaggagatccagaactacggggagatccctgagatgtctgtgtcctatgagaaggaggtgacagctgagggcgtggagaggcctgagatcgtgtccacctggagcagcgctggcatctcctggaggtctgaggcctgccgggagaactgtgagatgccagactgggagcagagcgctgagagcctgcagcctgtgcaggaggacatggccctgaatgaggtgctgcagaagctgaagcacaccaacaggaagcaggaggtgcgcatccaggagctgcagtgcagcaacctgtacctggagaagagggtgaaggagctgcagatgaagatcaccaagcagcaggtgttcattgatgtgatcaacaagctgaaggaaaatgtggaggagctgattgaggacaagtacaagatcatcctggagaagaatgacaccaagaagaccctgcagaacctggaggaggtgctggccaacacccagaagcacctgcaggagagcagaaatgacaaggagatgctgcagctgcagttcaagaagatcaaggccaactacgtgtgcctgcaggagcgctacatgacagagatgcagcagaagaacaagtctgtgtcccagtacctggagatggacaagaccctgagcaagaaggaggaggaggtggagcggctgcagcagctgaagaaggagctggagaaggccacagccagcgccctggacctgctgaagcgggagaaggaggcccaggagcaggagttcctgagcctgcaggaggagttccagaagctggagaaggagaacctggaggagcggcagaagctgaagagccggctggagaagctgctgacccaggtgaggaacctgcagttcatgtctgaaaatgaaagaaccaagaacatcaagctgcagcagcagatcaatgaggtgaagaatgaaaatgccaagctgaagcagcaggtggcccggtctgaggagcagaactacgtgcccaagtttgaaacagcccagctgaaggaccagctggaggaggtgctgaagagtgacatcaccaaggacaccaagaccacccacagcaacctgctgcctgactgcagcccctgtgaggagcggctgaacccagctgacatcaagagggccagccagctggccagcaagatgcacagcctgctggccctgatggtgggcctgctgacctgccaggacatcatcaacagtgatgctgagcacttcaaggagagcgagaaggtgtctgacatcatgctgcagaagctgaagagcctgcacctgaagaagaagaccctggacaaggagctgctgaagcacaaggaccgcatcaccaccttccgggagctgattgccaaggagaaggccttccaggaccacgccatcaaggtgttccagggcgtgtag

SEQ ID NO: 146089 - DNA, 2520 bp, synthetic construct
  misc_feature 1..2520: note = Description of Artificial Sequence: Synthetic coding sequence
  source 1..2520: mol_type = other DNA
atgaacaaggactaccagaagttctggagcagccccagcgaccctgtgcactttgaggtggacaccagccatgagaaggtggagagcatgtctgagagtgacaccatgaatgtgagcaacctgagccagggcgtgatgctgagccacagccccatctgcatggagaccaccggcaccacctgtgacctgccccagaatgagatcaagaactttgagcgggagaatgaatatgagagcaccctgtgtgaagatgcctacggcaccctggacaacctgctgaatgacaacaacatcgagaactacagcaccaatgccctgatccagcctgtggacaccatcagcatcagcagcctgcggcagtttgaaacagtgtgcaagttccactgggtggaggcctttgatgatgagatgacagagaagccagagttccagagccaggtgtacaactatgccaaggacaacaacatcaagcaggacagcttcaaggaggagaaccccatggagacctctgtgtctgccaacacagaccagctgggcaatgagtacttccggcagcccccacccaggagccccccactcatccactgcagcggggagatgctgaagttcacagagaagagcctggccaagagcatcgccaaggagagcgccctgaaccccagccagcccccatccttcctgtgcaagacagctgtgcccagcaaggagatccagaactacggggagatccctgagatgtctgtgtcctatgagaaggaggtgacagctgagggcgtggagaggcctgagatcgtgtccacctggagcagcgctggcatctcctggaggtctgaggcctgccgggagaactgtgagatgccagactgggagcagagcgctgagagcctgcagcctgtgcaggaggacatggccctgaatgaggtgctgcagaagctgaagcacaccaacaggaagcaggaggtgcgcatccaggagctgcagtgcagcaacctgtacctggagaagagggtgaaggagctgcagatgaagatcaccaagcagcaggtgttcattgatgtgatcaacaagctgaaggaaaatgtggaggagctgattgaggacaagtacaagatcatcctggagaagaatgacaccaagaagaccctgcagaacctggaggaggtgctggccaacacccagaagcacctgcaggagagcagaaatgacaaggagatgctgcagctgcagttcaagaagatcaaggccaactacgtgtgcctgcaggagcgctacatgacagagatgcagcagaagaacaagtctgtgtcccagtacctggagatggacaagaccctgagcaagaaggaggaggaggtggagcggctgcagcagctgaagaaggagctggagaaggccacagccagcgccctggacctgctgaagcgggagaaggaggcccaggagcaggagttcctgagcctgcaggaggagttccagaagctggagaaggagaacctggaggagcggcagaagctgaagagccggctggagaagctgctgacccaggtgaggaacctgcagttcatgtctgaaaatgaaagaaccaagaacatcaagctgcagcagcagatcaatgaggtgaagaatgaaaatgccaagctgaagcagcaggtggcccggtctgaggagcagaactacgtgcccaagtttgaaacagcccagctgaaggaccagctggaggaggtgctgaagagtgacatcaccaaggacaccaagaccacccacagcaacctgctgcctgactgcagcccctgtgaggagcggctgaacccagctgacatcaagagggccagccagctggccagcaagatgcacagcctgctggccctgatggtgggcctgctgacctgccaggacatcatcaacagtgatgctgagcacttcaaggagagcgagaaggtgtctgacatcatgctgcagaagctgaagagcctgcacctgaagaagaagaccctggacaaggagctgctgaagcacaaggaccgcatcaccaccttccgggagctgattgccaaggagaaggccttccaggaccacgccatcaaggtgattgactgtgacagtgatgaggccaagagcatcagagatgtgcccaccctgctgggcgccaagctggacaagtaccacagcctgaatgaggagctggacttcctgatcaccaagctgggccacctgctggagagcaaagaaaaccactgcaacagactcatcgaggagaatgacaagtaccagaggcacctgggcaacctgatcaagaaggtgaccagctatgaggagatcattgaatgtgccgaccagaggctggccatcagccacagccagatcgcccacctggaggagaggaacaagcacctggaggacctgatcaggaagccccgggagaaggccaggaagcccaggagcaagagcctggagaaccaccccaagtccatgaccatgatgcctgccctcttcaaggaaaatagaaatgacctggactag

SEQ ID NO: 146090 - DNA, 2112 bp, synthetic construct
  misc_feature 1..2112: note = Description of Artificial Sequence: Synthetic coding sequence
  source 1..2112: mol_type = other DNA
atggctgacagaagacggcagagggccagccaggacacagaagatgaggagagcggggccagcggcagtgacagcggcggcagccccctgcggggcggcggcagctgcagcggcagcgctgggggcggcggcagcggcagcctgcccagccagagaggaggccgcactggagccctgcacctgcggcgggtggagagcggcggggccaagtctgctgaggagagtgaatgtgagagtgaagatggcattgaaggagatgctgtgctgagtgactatgagagcgctgaggacagcgagggggaggagggggagtacagcgaggaggagaacagcaaggtggagctgaagtctgaggccaatgatgctgtgaacagcagcaccaaggaggagaagggggaggagaagccagacaccaagagcacagtgactggagagcggcagagcggagatggccaggagagcacagagcctgtggagaacaaggtgggcaagaagggccccaagcacctggatgatgatgaggacaggaagaacccagcctacatccccaggaagggcctcttctttgaacatgacctgcggggccagacccaggaggaggaggtgcggcccaagggccggcagaggaagctgtggaaggatgagggccgctgggagcatgacaagttcagagaagatgagcaggcccccaagagccggcaggagctgattgccctgtatggctatgacatccgcagcgcccacaacccagatgacatcaagccccggcgcatcaggaagcccaggtatggcagccccccccagagggaccccaactggaatggagagcggctgaacaagagccaccgccaccagggcctgggcggcaccctgccccccaggaccttcatcaacagaaatgctgctggcaccggccgcatgtctgcccccaggaactacagccgcagcggcggcttcaaggagggccgggccggcttccggcctgtggaggccggcggccagcacggcggccgctctggagagaccgtgaagcatgagatctcctaccgcagccggcggctggagcagacctctgtgcgggaccccagccctgaggctgatgcccctgtgctgggcagccctgagaaggaggaggccgccagcgagcccccagctgctgccccagatgctgcccctcctcctccagaccggcccatcgagaagaagagctacagccgggcccggaggaccaggaccaaggtgggagatgctgtgaagctggccgaggaggtgcccccacctcctgagggcctcatcccagcccctcctgtgcctgagaccacccccaccccacccaccaagacaggcacctgggaggcccctgtggacagcagcaccagcggcctggagcaggatgtggcccagctgaacattgctgagcagaactggagccctggccagcccagcttcctgcagccccgggagctgcggggcatgcccaaccacatccacatgggcgccggccccccaccccagttcaacaggatggaggagatgggcgtgcagggcggccgggccaagcgctacagcagccagaggcagaggcctgtgcctgagcccccagcccctcctgtgcacatcagcatcatggagggccactactatgaccccctgcagttccagggccccatctacacccacggggacagccctgcccccctgcccccccagggcatgctggtgcagcccggcatgaacctgccccaccctggcctgcacccccaccagaccccagcccccctgcccaaccctggcctgtacccacctcctgtgtccatgagccctggccagcccccaccccagcagctgctggcccccacctacttcagcgcccctggggtgatgaactttggaaaccccagctacccctatgcccctggggccctgcccccacctcctccaccccacctgtaccccaacacccaggcccccagccaggtgtatggaggagtgacctactacaacccagcccagcagcaggtgcagcccaagcccagcccccccaggaggaccccccagcctgtgaccatcaagcccccacctcctgaggtggtgtcccggggcagcagctag

SEQ ID NO: 146091 - DNA, 2112 bp, synthetic construct; identical to SEQ ID NO: 146090
  misc_feature 1..2112: note = Description of Artificial Sequence: Synthetic coding sequence
  source 1..2112: mol_type = other DNA

SEQ ID NO: 146092 - DNA, 1926 bp, synthetic construct
  misc_feature 1..1926: note = Description of Artificial Sequence: Synthetic coding sequence
  source 1..1926: mol_type = other DNA
atggctgacagaagacggcagagggccagccaggacacagaagatgaggagagcggggccagcggcagtgacagcggcggcagccccctgcggggcggcggcagctgcagcggcagcgctgggggcggcggcagcggcagcctgcccagccagagaggaggccgcactggagccctgcacctgcggcgggtggagagcggcggggccaagtctgctgaggagagtgaatgtgagagtgaagatggcattgaaggagatgctgtgctgagtgactatgagagcgctgaggacagcgagggggaggagggggagtacagcgaggaggagaacagcaaggtggagctgaagtctgaggccaatgatgctgtgaacagcagcaccaaggaggagaagggggaggagaagccagacaccaagagcacagtgactggagagcggcagagcggagatggccaggagagcacagagcctgtggagaacaaggtgggcaagaagggccccaagcacctggatgatgatgaggacaggaagaacccagcctacatccccaggaagggcctcttctttgaacatgacctgcggggccagacccaggaggaggaggtgcggcccaagggccggcagaggaagctgtggaaggatgagggccgctgggagcatgacaagttcagagaagatgagcaggcccccaagagccggcaggagctgattgccctgtatggctatgacatccgcagcgcccacaacccagatgacatcaagccccggcgcatcaggaagcccaggtatggcagccccccccagagggaccccaactggaatggagagcggctgaacaagagccaccgccaccagggcctgggcggcaccctgccccccaggaccttcatcaacagaaatgctgctggcaccggccgcatgtctgcccccaggaactacagccgcagcggcggcttcaaggagggccgggccggcttccggcctgtggaggccggcggccagcacggcggccgctctggagagaccgtgaagcatgagatctcctaccgcagccggcggctggagcagacctctgtgcgggaccccagccctgaggctgatgcccctgtgctgggcagccctgagaaggaggaggccgccagcgagcccccagctgctgccccagatgctgcccctcctcctccagaccggcccatcgagaagaagagctacagccgggcccggaggaccaggaccaaggtgggagatgctgtgaagctggccgaggaggtgcccccacctcctgagggcctcatcccagcccctcctgtgcctgagaccacccccaccccacccaccaagacaggcacctgggaggcccctgtggacagcagcaccagcggcctggagcaggatgtggcccagctgaacattgctgagcagaactggagccctggccagcccagcttcctgcagccccgggagctgcggggcatgcccaaccacatccacatgggcgccggccccccaccccagttcaacaggatggaggagatgggcgtgcagggcggccgggccaagcgctacagcagccagaggcagaggcctgtgcctgagcccccagcccctcctgtgcacatcagcatcatggagggccactactatgaccccctgcagttccagggccccatctacacccacggggacagccctgcccccctgcccccccagggcatgctggtgcagcccggcatgaacctgccccaccctggcctgcacccccaccagaccccagcctgcccagacagccagaccctgcggcactgtgagagctgcctgtgctggagcaccgtcttcagctgcaaggacttctccatgtgtggcggcgtcttctgctactgcttcaagggctgcccctttgtgatcagcatcgtgacctggaggtag

SEQ ID NO: 146093 - DNA, 543 bp, synthetic construct
  misc_feature 1..543: note = Description of Artificial Sequence: Synthetic coding sequence
  source 1..543: mol_type = other DNA
atgcaggccgagggccggggcaccggcggcagcactggagatgctgatggccctgggggccctggcatcccagatggccctggaggaaatgccggcggccctggagaggccggggccaccggcggccggggccccaggggggccggggccgcccgggccagcggccctgggggcggggccccccggggcccccatggaggagctgccagcggcctgaatggctgctgccgctgtggggcccggggccctgagagccggctgctggagttctacctggccatgccctttgccacccccatggaggccgagctggcccggcgcagcctggcccaggatgccccacccctgcctgtgcctggggtgctgctgaaggagttcaccgtgtctggcaacatcctgaccatccggctgacagctgctgaccaccggcagctgcagctgagcatcagcagctgcctgcagcagctgagcctgctgatgtggatcacccagtgcttcctgcccgtcttcctggcccagccccccagcggccagaggaggtag

SEQ ID NO: 146094 - DNA, 570 bp, synthetic construct
  misc_feature 1..570: note = Description of Artificial Sequence: Synthetic coding sequence
  source 1..570: mol_type = other DNA
atgacagacaagacagagaaggtggccgtggaccctgagaccgtcttcaagaggcccagagaatgtgacagccccagctaccagaagaggcagaggatggccctgctggccaggaagcagggcgctggggacagcctgattgctggcagcgccatgagcaaggccaagaagctgatgacaggccacgccatcccccccagccagctggacagccagattgatgacttcaccggcttcagcaaggacaggatgatgcagaagccaggcagcaatgcccctgtgggcggcaatgtgaccagcagcttctctggagatgacctggagtgccgggagacagccagcagccccaagagccagcgggagatcaatgctgacatcaagaggaagctggtgaaggagctgcgctgtgtgggccagaagtatgagaagatctttgagatgctggagggcgtgcagggccccacagctgtgaggaagcgcttctttgagagcatcatcaaggaggccgcccgctgcatgaggcgggactttgtgaagcacctgaagaagaagctgaagaggatgatctag

SEQ ID NO: 146095 - DNA, 570 bp, synthetic construct
  misc_feature 1..570: note = Description of Artificial Sequence: Synthetic coding sequence
  source 1..570: mol_type = other DNA
atgacagacaagacagagaaggtggccgtggaccctgagaccgtcttcaagaggcccagagaatgtgacagccccagctaccagaagaggcagaggatggccctgctggccaggaagcagggcgctggggacagcctgattgctggcagcgccatgagcaaggagaagaagctgatgacaggccacgccatcccccccagccagctggacagccagattgatgacttcaccggcttcagcaaggacaggatgatgcagaagccaggcagcaatgcccctgtgggcggcaatgtgaccagcagcttctctggagatgacctggagtgccgggagacagccagcagccccaagagccagcaggagatcaatgctgacatcaagaggaagctggtgaaggagctgcgctgtgtgggccagaagtatgagaagatctttgagatgctggagggcgtgcagggccccacagctgtgaggaagcgcttctttgagagcatcatcaaggaggccgcccgctgcatgaggcgggactttgtgaagcacctgaagaagaagctgaagaggatgatctag

SEQ ID NO: 146096 - DNA, 570 bp, synthetic construct; identical to SEQ ID NO: 146095
  misc_feature 1..570: note = Description of Artificial Sequence: Synthetic coding sequence
  source 1..570: mol_type = other DNA

SEQ ID NO: 146097 - DNA, 570 bp, synthetic construct
  misc_feature 1..570: note = Description of Artificial Sequence: Synthetic coding sequence
  source 1..570: mol_type = other DNA
atgacagacaagacagagaaggtggccgtggaccctgagaccgtcttcaagaggcccagagaatgtgacagccccagctaccagaagaggcagaggatggccctgctggccaggaagcagggcgctggggacagcctgattgctggcagcgccatgagcaaggagaagaagctgatgacaggccacgccatcccccccagccagctggacagccagattgatgacttcaccggcttcagcaaggacaggatgatgcagaagccaggcagcaatgcccctgtgggcggcaatgtgaccagcagcttctctggagatgacctggagtgccgggagacagccagcagccccaagagccagcgggagatcaatgctgacatcaagaggaagctggtgaaggagctgcgctgtgtgggccagaagtatgagaagatctttgagatgctggagggcgtgcagggccccacagctgtgaggaagcgcttctttgagagcatcatcaaggaggccgcccgctgcatgaggcgggactttgtgaagcacctgaagaagaagctgaagaggatgatctag

SEQ ID NO: 146098 - DNA, 570 bp, synthetic construct; identical to SEQ ID NO: 146097
  misc_feature 1..570: note = Description of Artificial Sequence: Synthetic coding sequence
  source 1..570: mol_type = other DNA

SEQ ID NO: 146099 - DNA, 570 bp, synthetic construct; identical to SEQ ID NO: 146095
  misc_feature 1..570: note = Description of Artificial Sequence: Synthetic coding sequence
  source 1..570: mol_type = other DNA

SEQ ID NO: 146100 - DNA, 570 bp, synthetic construct
  misc_feature 1..570: note = Description of Artificial Sequence: Synthetic coding sequence
  source 1..570: mol_type = other DNA
atgacagacaagacagagaaggtggccgtggaccctgagaccgtcttcaagaggcccagagaatgtgacagccccagctaccagaagaggcagaggatggccctgctggccaggaagcagggcgctggggacagcctgattgctggcagcgccatgagcaaggccaagaagctgatgacaggccacgccatcccccccagccagctggacagccagattgatgacttcaccggcttcagcaaggacaggatgatgcagaagccaggcagcaatgcccctgtgggcggcaatgtgaccagcagcttctctggagatgacctggagtgccgggagacagccagcagccccaagagccagcaggagatcaatgctgacatcaagaggaagctggtgaaggagctgcgctgtgtgggccagaagtatgagaagatctttgagatgctggagggcgtgcagggccccacagctgtgaggaagcgcttctttgagagcatcatcaaggaggccgcccgctgcatgaggcgggactttgtgaagcacctgaagaagaagctgaagaggatgatctag

SEQ ID NO: 146101 - DNA, 570 bp, synthetic construct; identical to SEQ ID NO: 146100
  misc_feature 1..570: note = Description of Artificial Sequence: Synthetic coding sequence
  source 1..570: mol_type = other DNA

SEQ ID NO: 146102 - DNA, 570 bp, synthetic construct
  misc_feature 1..570: note = Description of Artificial Sequence: Synthetic coding sequence
  source 1..570: mol_type = other DNA
atgacagacaagacagagaaggtggccgtggaccctgagaccgtcttcaagaggcccagagaatgtgacagccccagctaccagaagaggcagaggatggccctgctggccaggaagcagggcgctggggacagcctgattgctggcagcgccatgagcaaggagaagaagctgatgacaggccacgccatcccccccagccagctggacagccagattgatgacttcaccggcttcagcaaggatggcatgatgcagaagccaggcagcaatgcccctgtgggcggcaatgtgaccagcaacttctctggagatgacctggagtgccggggcatcgccagcagccccaagagccagcaggagatcaatgctgacatcaagtgccaggtggtgaaggagatccgctgcctgggcaggaaatatgagaagatctttgagatgctggagggcgtgcagggccccacagctgtgaggaagcgcttctttgagagcatcatcaaggaggccgcccgctgcatgaggcgggactttgtgaagcacctgaagaagaagctgaagaggatgatctag

SEQ ID NO: 146103 - DNA, 570 bp, synthetic construct; identical to SEQ ID NO: 146102
  misc_feature 1..570: note = Description of Artificial Sequence: Synthetic coding sequence
  source 1..570: mol_type = other DNA

SEQ ID NO: 146104 - DNA, 570 bp, synthetic construct; identical to SEQ ID NO: 146100
  misc_feature 1..570: note = Description of Artificial Sequence: Synthetic coding sequence
  source 1..570: mol_type = other DNA

SEQ ID NO: 146105 - DNA, 570 bp, synthetic construct; identical to SEQ ID NO: 146100
  misc_feature 1..570: note = Description of Artificial Sequence: Synthetic coding sequence
  source 1..570: mol_type = other DNA

SEQ ID NO: 146106 - DNA, 867 bp, synthetic construct
  misc_feature 1..867: note = Description of Artificial Sequence: Synthetic coding sequence
  source 1..867: mol_type = other DNA
atgtctgccaccggggacagacaccccacccagggcgaccaggaggcccctgtgtcccaggagggcgcccaggccgaggccgccggggccggcaaccaggagggcggggacagcggccctgacagcagtgatgtggtgcctgctgctgaggtggtgggcgtggccggccctgtggagggcctgggggaggaggagggggagcaggccgccggcctggccgctgtgccccggggcggcagcgcagaagaagattctgacatcggccctgccacagaggaggaggaggaggaggagggcaatgaggccgccaactttgacctggccgtggtggcccggcgctacccagccagcggcatccactttgtgctgctggacatggtgcacagcctgctgcaccggctgagccacaatgaccacatcctgattgaaaatcggcagctgagccggctgatggtgggcccccacgccgccgccaggaacctgtggggcaacctgccccccctgctgctgccccagaggctgggcgctggagctgctgcccgggccggggagggcctgggcctcatccaggaggccgcctctgtgcctgagcctgctgtgcctgctgacctggccgagatggcccgggagcctgctgaggaggccgctgaggagaagctgtctgaggaggccacagaggagccagatgctgaggagcccgccacagaggagcccacagcccaggaggccacagcccctgaggaggtgaccaagagccagcctgagaagtgggatgaggaggcccaggatgctgctggggaggaggagaaggagcaggagaaggagaaggatgctgagaacaaggtgaagaacagcaagggcacctag

SEQ ID NO: 146107 - DNA, 867 bp, synthetic construct; identical to SEQ ID NO: 146106
  misc_feature 1..867: note = Description of Artificial Sequence: Synthetic coding sequence
  source 1..867: mol_type = other DNA

SEQ ID NO: 146108 - DNA, 867 bp, synthetic construct; identical to SEQ ID NO: 146106
  misc_feature 1..867: note = Description of Artificial Sequence: Synthetic coding sequence
  source 1..867: mol_type = other DNA

SEQ ID NO: 146109 - DNA, 867 bp, synthetic construct; identical to SEQ ID NO: 146106
  misc_feature 1..867: note = Description of Artificial Sequence: Synthetic coding sequence
  source 1..867: mol_type = other DNA

SEQ ID NO: 146110 - DNA, 867 bp, synthetic construct; identical to SEQ ID NO: 146106
  misc_feature 1..867: note = Description of Artificial Sequence: Synthetic coding sequence
  source 1..867: mol_type = other DNA

SEQ ID NO: 146111 - DNA, 867 bp, synthetic construct; identical to SEQ ID NO: 146106
  misc_feature 1..867: note = Description of Artificial Sequence: Synthetic coding sequence
  source 1..867: mol_type = other DNA

SEQ ID NO: 146112 - DNA, 867 bp, synthetic construct; identical to SEQ ID NO: 146106
  misc_feature 1..867: note = Description of Artificial Sequence: Synthetic coding sequence
  source 1..867: mol_type = other DNA

SEQ ID NO: 146113 - DNA, 867 bp, synthetic construct; identical to SEQ ID NO: 146106
  misc_feature 1..867: note = Description of Artificial Sequence: Synthetic coding sequence
  source 1..867: mol_type = other DNA

SEQ ID NO: 146114 - DNA, 867 bp, synthetic construct; identical to SEQ ID NO: 146106
  misc_feature 1..867: note = Description of Artificial Sequence: Synthetic coding sequence
  source 1..867: mol_type = other DNA

SEQ ID NO: 146115 - DNA, 867 bp, synthetic construct; identical to SEQ ID NO: 146106
  misc_feature 1..867: note = Description of Artificial Sequence: Synthetic coding sequence
  source 1..867: mol_type = other DNA

SEQ ID NO: 146116 - DNA, 867 bp, synthetic construct; identical to SEQ ID NO: 146106
  misc_feature 1..867: note = Description of Artificial Sequence: Synthetic coding sequence
  source 1..867: mol_type = other DNA

SEQ ID NO: 146117 - DNA, 867 bp, synthetic construct; identical to SEQ ID NO: 146106
  misc_feature 1..867: note = Description of Artificial Sequence: Synthetic coding sequence
  source 1..867: mol_type = other DNA

SEQ ID NO: 146118 - DNA, 867 bp, synthetic construct; identical to SEQ ID NO: 146106
  misc_feature 1..867: note = Description of Artificial Sequence: Synthetic coding sequence
  source 1..867: mol_type = other DNA

SEQ ID NO: 146119 - DNA, 867 bp, synthetic construct; identical to SEQ ID NO: 146106
  misc_feature 1..867: note = Description of Artificial Sequence: Synthetic coding sequence
  source 1..867: mol_type = other DNA

SEQ ID NO: 146120 - DNA, 900 bp, synthetic construct
  misc_feature 1..900: note = Description of Artificial Sequence: Synthetic coding sequence
  source 1..900: mol_type = other DNA
atgtctgccaccggggacagacaccccacccagggcgaccaggaggcccctgtgtcccaggagggcgcccaggccgaggccgccggggccggcaaccaggagggcggggacagcggccctgacagcagtgacatggtgcctgctgctgaggtggtgggcgtggccggccctgtggagggcctgggggaggaggagggggagcaggccgccggcctggccgctgtgccccagggcggcagcgcagaagaagattctgacatcggccctgccacagaggaggaggaggaggaggaggagggcaatgaagctgccaactttgacctggccgtggccacccggcgctacccagctgctggcatcggctttgtgttcctgtacctggtgcacagcctgctgcggcggctgtaccacaatgaccacatccagatcgccaacagacacctgagccggctgatggtgggcccccatgctgctgtgcccaacctgtgggacaacccccccctgctgctgctgagccagaggctgggcgctggggccgccgcccctgagggggagggcctgggcctcatccaggaggccgcctctgtgcaggaggccgcctctgtgcctgagcctgctgtgcctgctgacctggccgagatggcccgggagcctgctgaggaggccgcagatgagaagcccccagaggaggccgctgaggagaagctgacagaggaggccacagaggagcctgctgctgaggagcccaccagcgaggaggccgtggcccctgaggaggtgaccaagagccagcctgagaagtgggatgaggaggcccaggatgctgctggggaggaggagaaggagcaggagaaggagaaggatgtggagaacaaggtgaagaacagcaagggcacctag

SEQ ID NO: 146121 - DNA, 1419 bp, synthetic construct
  misc_feature 1..1419: note = Description of Artificial Sequence: Synthetic coding sequence
  source 1..1419: mol_type = other DNA
atgaagagcatcctggatggcctggccgacaccaccttccgcaccatcaccacagacctgctgtatgtgggcagcaatgacatccagtatgaggacatcaagggggacatggccagcaagctgggctacttcccccagaagttccccctgaccagcttccggggcagccccttccaggagaagatgacagctggggacaacccccagctggtgcctgctgaccaggtgaacatcacagagttctacaacaagagcctgagcagcttcaaggaaaatgaggagaacatccagtgtggggagaacttcatggacatcgagtgcttcatggtgctgaaccccagccagcagctggccatcgctgtgctgagcctgaccctgggcaccttcaccgtgctggagaacctgctggtgctgtgtgtgatcctgcacagccgcagcctgcgctgccggcccagctaccacttcatcggcagcctggccgtggccgacctgctgggcagcgtcatctttgtgtacagcttcatcgacttccacgtgttccacaggaaggacagcagaaatgtgttcctgttcaagctgggcggcgtgacagccagcttcaccgcctctgtgggcagcctcttcctgacagccatcgaccgctacatcagcatccaccggcccctggcctacaagagaattgtgacccggcccaaggctgtggtggccttctgcctgatgtggaccatcgccatcgtgattgctgtgctgcccctgctgggctggaactgtgagaagctgcagagcgtgtgcagcgacatcttcccccacattgatgagacctacctgatgttctggattggagtgacctctgtgctgctgctcttcatcgtgtatgcctacatgtacatcctgtggaaggcccacagccatgctgtgaggatgatccagaggggcacccagaagagcatcatcatccacaccagtgaagatggcaaggtgcaggtgaccaggccagaccaggccaggatggacatccggctggccaagaccctggtgctgatcctggtggtgctgatcatctgctggggccccctgctggccatcatggtgtatgatgtgtttgggaagatgaacaagctgatcaagacagtgtttgccttctgcagcatgctgtgcctgctgaacagcacagtgaaccccatcatctatgccctgcggagcaaggacctgcggcatgccttccgctccatgttccccagctgtgagggcacagcccagcccctggacaacagcatgggagacagcgactgcctgcacaagcacgccaacaatgctgcctctgtgcacagagctgctgagagctgcatcaagagcacagtgaagatcgccaaggtgaccatgtctgtgtccacagacaccagcgctgaggccctgtag

SEQ ID NO: 146122 - DNA, 1419 bp, synthetic construct; identical to SEQ ID NO: 146121
  misc_feature 1..1419: note = Description of Artificial Sequence: Synthetic coding sequence
  source 1..1419: mol_type = other DNA

SEQ ID NO: 146123 - DNA, 1419 bp, synthetic construct; identical to SEQ ID NO: 146121
  misc_feature 1..1419: note = Description of Artificial Sequence: Synthetic coding sequence
  source 1..1419: mol_type = other DNA

SEQ ID NO: 146124 - DNA, 1320 bp, synthetic construct
  misc_feature 1..1320: note = Description of Artificial Sequence: Synthetic coding sequence
  source 1..1320: mol_type = other DNA
atgaagagcatcctggatggcctggccgacaccaccttccgcaccatcaccacagacctgctgggcagccccttccaggagaagatgacagctggggacaacccccagctggtgcctgctgaccaggtgaacatcacagagttctacaacaagagcctgagcagcttcaaggaaaatgaggagaacatccagtgtggggagaacttcatggacatcgagtgcttcatggtgctgaaccccagccagcagctggccatcgctgtgctgagcctgaccctgggcaccttcaccgtgctggagaacctgctggtgctgtgtgtgatcctgcacagccgcagcctgcgctgccggcccagctaccacttcatcggcagcctggccgtggccgacctgctgggcagcgtcatctttgtgtacagcttcatcgacttccacgtgttccacaggaaggacagcagaaatgtgttcctgttcaagctgggcggcgtgacagccagcttcaccgcctctgtgggcagcctcttcctgacagccatcgaccgctacatcagcatccaccggcccctggcctacaagagaattgtgacccggcccaaggctgtggtggccttctgcctgatgtggaccatcgccatcgtgattgctgtgctgcccctgctgggctggaactgtgagaagctgcagagcgtgtgcagcgacatcttcccccacattgatgagacctacctgatgttctggattggagtgacctctgtgctgctgctcttcatcgtgtatgcctacatgtacatcctgtggaaggcccacagccatgctgtgaggatgatccagaggggcacccagaagagcatcatcatccacaccagtgaagatggcaaggtgcaggtgaccaggccagaccaggccaggatggacatccggctggccaagaccctggtgctgatcctggtggtgctgatcatctgctggggccccctgctggccatcatggtgtatgatgtgtttgggaagatgaacaagctgatcaagacagtgtttgccttctgcagcatgctgtgcctgctgaacagcacagtgaaccccatcatctatgccctgcggagcaaggacctgcggcatgccttccgctccatgttccccagctgtgagggcacagcccagcccctggacaacagcatgggagacagcgactgcctgcacaagcacgccaacaatgctgcctctgtgcacagagctgctgagagctgcatcaagagcacagtgaagatcgccaaggtgaccatgtctgtgtccacagacaccagcgctgaggccctgtag

SEQ ID NO: 146125 - DNA, 1419 bp, synthetic construct; identical to SEQ ID NO: 146121
  misc_feature 1..1419: note = Description of Artificial Sequence: Synthetic coding sequence
  source 1..1419: mol_type = other DNA

SEQ ID NO: 146126 - DNA, 1419 bp, synthetic construct; identical to SEQ ID NO: 146121
  misc_feature 1..1419: note = Description of Artificial Sequence: Synthetic coding sequence
  source 1..1419: mol_type = other DNA

SEQ ID NO: 146127 - DNA, 1236 bp, synthetic construct
  misc_feature 1..1236: note = Description of Artificial Sequence: Synthetic coding sequence
  source 1..1236: mol_type = other DNA
atggccctgcagatcccccccagcgcccccagccccctgaccagctgcacctgggcccagatgaccttcagcaccaagaccagcaaagaaaatgaggagaacatccagtgtggggagaacttcatggacatcgagtgcttcatggtgctgaaccccagccagcagctggccatcgctgtgctgagcctgaccctgggcaccttcaccgtgctggagaacctgctggtgctgtgtgtgatcctgcacagccgcagcctgcgctgccggcccagctaccacttcatcggcagcctggccgtggccgacctgctgggcagcgtcatctttgtgtacagcttcatcgacttccacgtgttccacaggaaggacagcagaaatgtgttcctgttcaagctgggcggcgtgacagccagcttcaccgcctctgtgggcagcctcttcctgacagccatcgaccgctacatcagcatccaccggcccctggcctacaagagaattgtgacccggcccaaggctgtggtggccttctgcctgatgtggaccatcgccatcgtgattgctgtgctgcccctgctgggctggaactgtgagaagctgcagagcgtgtgcagcgacatcttcccccacattgatgagacctacctgatgttctggattggagtgacctctgtgctgctgctcttcatcgtgtatgcctacatgtacatcctgtggaaggcccacagccatgctgtgaggatgatccagaggggcacccagaagagcatcatcatccacaccagtgaagatggcaaggtgcaggtgaccaggccagaccaggccaggatggacatccggctggccaagaccctggtgctgatcctggtggtgctgatcatctgctggggccccctgctggccatcatggtgtatgatgtgtttgggaagatgaacaagctgatcaagacagtgtttgccttctgcagcatgctgtgcctgctgaacagcacagtgaaccccatcatctatgccctgcggagcaaggacctgcggcatgccttccgctccatgttccccagctgtgagggcacagcccagcccctggacaacagcatgggagacagcgactgcctgcacaagcacgccaacaatgctgcctctgtgcacagagctgctgagagctgcatcaagagcacagtgaagatcgccaaggtgaccatgtctgtgtccacagacaccagcgctgaggccctgtag

SEQ ID NO: 146128 - DNA, 1419 bp, synthetic construct; identical to SEQ ID NO: 146121
  misc_feature 1..1419: note = Description of Artificial Sequence: Synthetic coding sequence
  source 1..1419: mol_type = other DNA

SEQ ID NO: 146129 - DNA, 237 bp, synthetic construct
  misc_feature 1..237: note = Description of Artificial Sequence: Synthetic coding sequence
  source 1..237: mol_type = other DNA
atgaagagcatcctggatggcctggccgacaccaccttccgcaccatcaccacagacctgctgtatgtgggcagcaatgacatccagtatgaggacatcaagggggacatggccagcaagctgggctacttcccccagaagttccccctgaccagcttccggggcagccccttccaggagaagatgacagctggggacaacccccagctggtgcctgctgaccaggtgaacatctag

SEQ ID NO: 146130 - DNA, 1083 bp, synthetic construct
  misc_feature 1..1083: note = Description of Artificial Sequence: Synthetic coding sequence
  source 1..1083: mol_type = other DNA
atggaggagtgctgggtgacagaaattgccaacggcagcaaggatggcctggacagcaaccccatgaaggactacatgatcctgagcggcccccagaagacagctgtggccgtgctgtgcaccctgctgggcctgctgagcgccctggagaatgtggccgtgctgtacctgatcctgagcagccaccagctgcggaggaagcccagctacctgttcatcggcagcctggccggggctgacttcctggcctctgtggtgtttgcctgcagctttgtgaacttccacgtgttccacggcgtggacagcaaggctgtgttcctgctgaagattggctctgtgaccatgaccttcaccgcctctgtgggcagcctgctgctgacagccatcgaccgctacctgtgcctgcgctacccacccagctacaaggccctgctgacccggggccgggccctggtgaccctgggcatcatgtgggtgctgagcgccctggtgtcctacctgcccctgatgggctggacctgctgcccccggccctgcagcgagctgttccccctcatccccaatgactacctgctgtcctggctgctcttcatcgccttcctgttcagcggcatcatctacacctacggccacgtgctgtggaaggcccaccagcacgtggccagcctgagcggccaccaggaccggcaggtgcccggcatggccaggatgaggctggatgtgcggctggccaagaccctgggcctggtgctggccgtgctgctgatctgctggttccctgtgctggccctgatggcccacagcctggccaccaccctgagtgaccaggtgaagaaggcctttgccttctgcagcatgctgtgcctgatcaacagcatggtgaaccctgtgatctatgccctgcggtctggagagatccgcagcagcgcccaccactgcctggcccactggaagaagtgtgtgcggggcctgggcagcgaggccaaggaggaggcccccaggagctctgtgacagaaacagaagcagatggcaagatcaccccctggccagacagccgggacctggacctgagtgactgctag

SEQ ID NO: 146131 - DNA, 1083 bp, synthetic construct; identical to SEQ ID NO: 146130
  misc_feature 1..1083: note = Description of Artificial Sequence: Synthetic coding sequence
  source 1..1083: mol_type = other DNA

SEQ ID NO: 146132 - DNA, 837 bp, synthetic construct
  misc_feature 1..837: note = Description of Artificial Sequence: Synthetic coding sequence
  source 1..837: mol_type = other DNA
atggacagcatgcctgagcccgccagccgctgcctgctgctgctgcccctgctgctgctgctgctgctgctgctgcctgcccctgagctgggccccagccaggccggggctgaagaaaatgactgggtgcggctgcccagcaaatgtgaggtgtgcaagtatgtggccgtggagctgaagagcgcctttgaggagaccgggaagaccaaggaggtgattggaacaggctacggcatcctggaccagaaggccagcggcgtgaagtacaccaagagtgacctgcggctgattgaggtgacagagaccatctgcaagaggctgctggactacagcctgcacaaggagaggacaggcagcaacagatttgccaagggcatgtctgagacctttgagaccctgcacaacctggtgcacaagggcgtgaaggtggtgatggacatcccctatgagctgtggaatgagaccagcgctgaggtggccgacctgaagaagcagtgtgatgtgctggtggaggagtttgaggaggtgattgaggactggtacagaaaccaccaggaggaggacctgacagagttcctgtgtgccaaccacgtgctgaagggcaaggacaccagctgcctggccgagcagtggagcggcaagaagggggacacagctgccctgggcggcaagaagagcaagaagaagagcagccgggccaaggccgccggcggccgcagcagcagcagcaagcagaggaaggagctgggcggcctggagggggaccccagccctgaggaggatgagggcatccagaaggccagccccctgacccacagccccccagatgagctgtag

SEQ ID NO: 146133 - DNA, 165 bp, synthetic construct
  misc_feature 1..165: note = Description of Artificial Sequence: Synthetic coding sequence
  source 1..165: mol_type = other DNA
atggacagcatgcctgagcccgccagccgctgcctgctgctgctgcccctgctgctgctgctgctgctgctgctgcctgcccctgagctgggccccagccaggccggggctgaagaaaatgactgggtgcggctgcccagcaaatgtgagggcacctgtggctag

SEQ ID NO: 146134 - DNA, 747 bp, synthetic construct
  misc_feature 1..747: note = Description of Artificial Sequence: Synthetic coding sequence
  source 1..747: mol_type = other DNA
atgggccctgtgcggctgggcatcctgctcttcctgttcctggccgtgcatgaggcctgggccggcatgctgaaggaggaggatgatgacacagagcggctgcccagcaaatgtgaggtgtgcaagctgctgagcacagagctgcaggccgagctgagcaggacaggccgcagccgggaggtgctggagctgggccaggtgctggacaccgggaagaggaagagacatgtgccctacagcgtgtctgagacccggctggaggaggccctggagaacctgtgtgagcgcatcctggactacagcgtgcacgccgagaggaagggcagcctgcgctatgccaagggccagagccagaccatggccaccctgaagggcctggtgcagaagggcgtgaaggtggacctgggcatccccctggagctgtgggatgagcccagcgtggaggtgacctacctgaagaagcagtgtgagaccatgctggaggagtttgaggacatcgtgggggactggtacttccaccaccaggagcagcccctgcagaacttcctgtgtgagggccacgtgctgcctgctgctgagacagcctgcctgcaggagacctggacaggcaaggagatcacagatggagaggagaagacagaaggagaggaggagcaggaggaggaggaggaggaggaggaggaggagggcggggacaagatgaccaagacaggcagccaccccaagctggaccgggaggacctgtag

SEQ ID NO: 146135 - DNA, 798 bp, synthetic construct
  misc_feature 1..798: note = Description of Artificial Sequence: Synthetic coding sequence
  source 1..798: mol_type = other DNA
atgagggaggagatgagcctgggctgccaggaggcctttgagatcttcaagagggaccatgctgacagcgtgaccattgatgacaacaagcagatcctgaagcagcgcttcagcgaggccaaggccctgggggagagcatcaatgaggcccggagcaagattggccacctgaaggaggagatcacccagaggcacatccagcaggtggccctgggcatcagcgagaacatggctgtgcccctgatgccagaccagcaggaggagaagctgcggagccagctggaggaggagaagaggcgctacaagaccatgttcacccggctgaaggccctgaaggtggagattgagcacctgcagctgctgatggacaaggccaaggtgaagctgcagaaggagtttgaggtgtggtgggccgaggaggccaccaacctgcaggtgaacagccctgctgtgaacagcctggaccacaccaagcccttcctgcagaccagtgacagccagcacgagtggagccagctgctgagcaacaagagcagcggcggctgggaggtgcaggaccagggcaccggccgctttgatgtgtgtgatgtgaatgccaggaagatcctgcccagcccctgccccagcccccacagccagaagcagagcagcaccagcacccccctggaggacagcatccccaagaggcctgtgagcagcatccccctgactggagacagccagacagacagcgacatcatcgccttcatcaaggcccggcagagcatcctgcagaagcagtgcctgggcagcaactag

SEQ ID NO: 146136 - DNA, 1185 bp, synthetic construct
  misc_feature 1..1185: note = Description of Artificial Sequence: Synthetic coding sequence
  source 1..1185: mol_type = other DNA
atggccaacatgcagggcctggtggagcggctggagagagctgtgtcccggctggagagcctgtctgctgagagccaccggcccccaggcaactgtggggaggtgaatggagtgattgctggggtggcccccagcgtggaggcctttgacaagctgatggacagcatggtggccgagttcctgaagaacagccgcatcctggccggagatgtggagacccatgctgagatggtgcacagcgccttccaggcccagagggccttcctgctgatggccagccagtaccagcagccccatgaaaatgatgtggccgccctgctgaagcccatcagcgagaagatccaggagatccagaccttccgggagaggaacagaggcagcaacatgttcaaccacctgtctgctgtgtctgagagcatcccagccctgggctggattgctgtgagccccaagcccccacccctgcccccacctggccccccacccctgtttgaaaatgaaggcaagaaggaggagagcagccccagccgcagcgccctgtttgcccagctgaaccagggcgaggccatcaccaagggcctgcggcacgtgacagatgaccagaagacctacaagaaccccagcctgcgggcccagggcggccagacccagagccccaccaagagccacacccccagccccaccagccccaagagctaccccagccagaagcacgcccctgtgctggagctggagggcaagaagtggagggtggagtaccaggaggacagaaatgacctggtgatcagcgagacagagctgaagcaggtggcctacatcttcaagtgtgagaagagcaccatccagatcaagggcaaggtgaacagcatcatcatcgacaactgcaagaagctgggcctggtgtttgacaacgtggtgggcatcgtggaggtgatcaacagccaggacatccagatccaggtgatgggccgggtgcccaccatcagcatcaacaagacagagggctgccacatctacctgtctgaagatgccctggactgtgaaattgtgtctgccaagagcagcgagatgaacatcctgatcccccaggatggagactaccgggagttccccatccctgagcagttcaagacagcctgggatggcagcaagctgatcacagagcctgctgagatcatggcctag

SEQ ID NO: 146137 - DNA, 597 bp, synthetic construct
  misc_feature 1..597: note = Description of Artificial Sequence: Synthetic coding sequence
  source 1..597: mol_type = other DNA
atgaagctgtacagcctgtctgtgctgtacaagggggaggccaaggtggtgctgctgaaggccgcctatgatgtgtcctccttctccttcttccagaggagctctgtgcaggagttcatgaccttcaccagccagctgattgtggagaggagcagcaagggcacccgggcctctgtgaaggagcaggactacctgtgccacgtgtatgtgagaaatgacagcctggccggcgtggtgattgctgacaatgagtaccccagccgggtggccttcaccctgctggagaaggtgctggatgagttcagcaagcaggtggacagaattgactggcctgtgggcagccctgccaccatccactacccagccctggatggccacctgagccgctaccagaacccccgggaggccgaccccatgaccaaggtgcaggccgagctggatgagaccaagatcatcctgcacaacaccatggagagcctgctggagcggggggagaagctggatgacctggtgtccaagtctgaggtgctgggcacccagagcaaggccttctacaagacagccaggaagcagaacagctgctgtgccatcatgtag

SEQ ID NO: 146138 - DNA, 3036 bp, synthetic construct
  misc_feature 1..3036: note = Description of Artificial Sequence: Synthetic coding sequence
  source 1..3036: mol_type = other DNA
atgcagaagcccagcggcctgaagcccccaggccggggcggcaagcacagcagccccatgggccgcaccagcactggaagtgccagcagcagcgctgctgtggccgccagcagcaaggagggcagccccctgcacaagcagagcagcggccccagcagcagccctgctgctgctgctgcccctgagaagccaggccccaaggctgctgaggtgggagatgacttcctgggggactttgtggtgggggagcgggtgtgggtgaatggagtgaagccaggagtggtgcagtacctgggggagacccagtttgcccctggccagtgggccggcgtggtgctggatgatcctgtgggcaagaatgatggagctgtgggcggcgtgcgctactttgaatgtcctgccctgcagggcatcttcacccggcccagcaagctgacccggcagcccacagctgagggcagcggcagtgatgcccacagcgtggagagcctgacagcccagaacctgagcctgcacagcggcacagccaccccacccctgaccagcagggtcatccccctgcgggagagcgtgctgaacagctctgtgaagacaggaaatgaaagtggcagcaacctgagtgacagcggctctgtgaagagaggagagaaggacctgcggctgggggacagagtgctggtgggcggcaccaagacaggagtggtgcgctacgtgggggagacagactttgccaagggggagtggtgtggggtggagctggatgagcccctgggcaagaatgatggagctgtggccggcacccgctacttccagtgcccccccaagtttggcctgtttgcccccatccacaaggtgatccgcatcggcttccccagcaccagccctgccaaggccaagaagaccaagaggatggccatgggcgtgtctgccctgacccacagccccagcagcagcagcatcagctctgtgtcctctgtggccagctctgtgggcggccggcccagccgcagcggcctgctgacagagaccagcagccgctatgccaggaagatcagcggcaccacagccctgcaggaggccctgaaggagaagcagcagcacatcgagcagctgctggccgagcgggacctggagcgggcagaggtggccaaggccaccagccacatctgtgaggtggagaaggagatcgccctgctgaaggcccagcacgagcagtatgtggccgaggccgaggagaagctgcagagggcccggctgctggtggagagcgtgaggaaggagaaggtggacctgagcaaccagctggaggaggagaggaggaaggtggaggacctgcagttccgggtggaggaggagagcatcaccaagggggacctggagctgaccaccgtggccgagaagagccgggtgctgcagctggaggaggagctgaccctgcggcggggggagattgaggagctgcagcagtgcctgctgcacagcggccccccacctccagaccacccagatgctgctgagatcctgcggctgcgggagcggctgctgagcgccagcaaggagcaccagcgggagagcggcgtgctgcgggacaagtatgagaaggccctgaaggcctaccaggccgaggtggacaagctgcgggccgccaatgagaagtatgcccaggaggtggccggcctgaaggacaaggtgcagcaggccaccagcgagaacatgggcctgatggacaactggaagagcaagctggacagcctggccagtgaccaccagaagagcctggaggacctgaaggccaccctgaacagcggccctggggcccagcagaaggagattggagagctgaaggctgtgatggagggcatcaagatggagcaccagctggagctgggcaacctgcaggccaagcatgacctggagacagccatgcacgtgaaggagaaggaggccctgcgggagaagctgcaggaggcccaggaggagctggccggcctgcagaggcactggagggcccagctggaggtgcaggccagccagcaccggctggagctgcaggaggcccaggaccagaggagagatgctgagctgcgggtgcatgagctggagaagctggatgtggagtaccggggccaggcccaggccatcgagttcctgaaggagcagatcagcctggccgagaagaagatgctggactatgagcggctgcagagagctgaggcccagggcaagcaggaggtggagagcctgcgggagaagctgctggtggccgagaaccggctgcaggccgtggaggccctgtgcagcagccagcacacccacatgattgagagcaatgacatcagcgaggagaccatccgcaccaaggagaccgtggagggcctgcaggacaagctgaacaagagggacaaggaggtgacagccctgaccagccagacagagatgctgcgggcccaggtgtctgccctggagagcaagtgcaagtctggagagaagaaggtggatgccctgctgaaggagaagaggcggctggaggccgagctggagaccgtgtccaggaagacccatgatgccagcggccagctggtgctgatcagccaggagctgctgaggaaggagaggagcctgaatgagctgcgggtgctgctgctggaggccaacagacacagccctggccctgagcgggacctgagccgggaggtgcacaaggccgagtggaggatcaaggagcagaagctgaaggatgacatccggggcctgcgggagaagctgaccggcctggacaaggagaagagcctgagtgaccagaggcgctacagcctgattgacaggagcagcgcccctgagctgctgcggctgcagcaccagctgatgagcacagaagatgccctgagagatgccctggaccaggcccagcaggtggagaagctgatggaggccatgaggagctgcccagacaaggcccagaccatcggcaacagcggcagcgccaacggcatccaccagcaggacaaggcccagaagcaggaggacaagcactag

SEQ ID NO: 146139 - DNA, 3141 bp, synthetic construct
  misc_feature 1..3141: note = Description of Artificial Sequence: Synthetic coding sequence
  source 1..3141: mol_type = other DNA
atgcagaagcccagcggcctgaagcccccaggccggggcggcaagcacagcagccccatgggccgcaccagcactggaagtgccagcagcagcgctgctgtggccgccagcagcaaggagggcagccccctgcacaagcagagcagcggccccagcagcagccctgctgctgctgctgcccctgagaagccaggccccaaggctgctgaggtgggagatgacttcctgggggactttgtggtgggggagcgggtgtgggtgaatggagtgaagccaggagtggtgcagtacctgggggagacccagtttgcccctggccagtgggccggcgtggtgctggatgatcctgtgggcaagaatgatggagctgtgggcggcgtgcgctactttgaatgtcctgccctgcagggcatcttcacccggcccagcaagctgacccggcagcccacagctgagggcagcggcagtgatgcccacagcgtggagagcctgacagcccagaacctgagcctgcacagcggcacagccaccccacccctgaccagcagggtcatccccctgcgggagagcgtgctgaacagctctgtgaagacaggaaatgaaagtggcagcaacctgagtgacagcggctctgtgaagagaggagagaaggacctgcggctgggggacagagtgctggtgggcggcaccaagacaggagtggtgcgctacgtgggggagacagactttgccaagggggagtggtgtggggtggagctggatgagcccctgggcaagaatgatggagctgtggccggcacccgctacttccagtgcccccccaagtttggcctgtttgcccccatccacaaggtgatccgcatcggcttccccagcaccagccctgccaaggccaagaagaccaagaggatggccatgggcgtgtctgccctgacccacagccccagcagcagcagcatcagctctgtgtcctctgtggccagctctgtgggcggccggcccagccgcagcggcctgctgacagagaccagcagccgctatgccaggaagatcagcggcaccacagccctgcaggaggccctgaaggagaagcagcagcacatcgagcagctgctggccgagcgggacctggagcgggcagaggtggccaaggccaccagccacatctgtgaggtggagaaggagatcgccctgctgaaggcccagcacgagcagtatgtggccgaggccgaggagaagctgcagagggcccggctgctggtggagagcgtgaggaaggagaaggtggacctgagcaaccagctggaggaggagaggaggaaggtggaggacctgcagttccgggtggaggaggagagcatcaccaagggggacctggagacccagacccagctggagcacgcccgcatcggggagctggagcagagcctgctgctggagaaggcccaggccgagcggctgctgcgggagctggccgacaaccggctgaccaccgtggccgagaagagccgggtgctgcagctggaggaggagctgaccctgcggcggggggagattgaggagctgcagcagtgcctgctgcacagcggccccccacctccagaccacccagatgctgctgagatcctgcggctgcgggagcggctgctgagcgccagcaaggagcaccagcgggagagcggcgtgctgcgggacaagtatgagaaggccctgaaggcctaccaggccgaggtggacaagctgcgggccgccaatgagaagtatgcccaggaggtggccggcctgaaggacaaggtgcagcaggccaccagcgagaacatgggcctgatggacaactggaagagcaagctggacagcctggccagtgaccaccagaagagcctggaggacctgaaggccaccctgaacagcggccctggggcccagcagaaggagatcggggagctgaaggctgtgatggagggcatcaagatggagcaccagctggagctgggcaacctgcaggccaagcatgacctggagacagccatgcacgtgaaggagaaggaggccctgcgggagaagctgcaggaggcccaggaggagctggccggcctgcagaggcactggagggcccagctggaggtgcaggccagccagcaccggctggagctgcaggaggcccaggaccagaggagagatgctgagctgcgggtgcatgagctggagaagctggatgtggagtaccggggccaggcccaggccatcgagttcctgaaggagcagatcagcctggccgagaagaagatgctggactatgaaaggctgcagagagctgaggcccagggcaagcaggaggtggagagcctgcgggagaagctgctggtggctgaaaatcggctgcaggccgtggaggccctgtgcagcagccagcacacccacatgattgagagcaatgacatcagcgaggagaccatccgcaccaaggagaccgtggagggcctgcaggacaagctgaacaagagggacaaggaggtgacagccctgaccagccagacagagatgctgcgggcccaggtgtctgccctggagagcaagtgcaagagcggggagaagaaggtggatgccctgctgaaggagaagaggcggctggaggccgagctggagaccgtgtccaggaagacccatgatgccagcggccagctggtgctgatcagccaggagctgctgaggaaggagaggagcctgaatgagctgcgggtgctgctgctggaggccaacagacacagccctggccctgagcgggacctgagccgggaggtgcacaaggccgagtggaggatcaaggagcagaagctgaaggatgacatccggggcctgcgggagaagctgaccggcctggacaaggagaagagcctgagtgaccagaggcgctacagcctgattgacaggagcagcgcccctgagctgctgcggctgcagcaccagctgatgagcacagaagatgccctgagagatgccctggaccaggcccagcaggtggagaagctgatggaggccatgaggagctgcccagacaaggcccagaccatcggcaacagcggcagcgccaacggcatccaccagcaggacaaggcccagaagcaggaggacaagcactag

SEQ ID NO: 146140 - DNA, 153 bp, synthetic construct
  misc_feature 1..153: note = Description of Artificial Sequence: Synthetic coding sequence
  source 1..153: mol_type = other DNA
ctggaggaggagaggaggaaggtggaggacctgcagttccgggtggaggaggagagcatcaccaagggggacctggaggccgaggaccacctgagccctgagcccagcatgctgaccaccgtggccgagaagagccgggtgctgcagctgtag

SEQ ID NO: 146141 - DNA, 3141 bp, synthetic construct
  misc_feature 1..3141: note = Description of Artificial Sequence: Synthetic coding sequence
  source 1..3141: mol_type = other DNA
atgcagaagcccagcggcctgaagcccccaggccggggcggcaagcacagcagccccatgggccgcaccagcactggaagtgccagcagcagcgctgctgtggccgccagcagcaaggagggcagccccctgcacaagcagagcagcggccccagcagcagccctgctgctgctgctgcccctgagaagccaggccccaaggctgctgaggtgggagatgacttcctgggggactttgtggtgggggagcgggtgtgggtgaatggagtgaagccaggagtggtgcagtacctgggggagacccagtttgcccctggccagtgggccggcgtggtgctggatgatcctgtgggcaagaatgatggagctgtgggcggcgtgcgctactttgaatgtcctgccctgcagggcatcttcacccggcccagcaagctgacccggcagcccacagctgagggcagcggcagtgatgcccacagcgtggagagcctgacagcccagaacctgagcctgcacagcggcacagccaccccacccctgaccagcagggtcatccccctgcgggagagcgtgctgaacagctctgtgaagacaggaaatgaaagtggcagcaacctgagtgacagcggctctgtgaagagaggagagaaggacctgcggctgggggacagagtgctggtgggcggcaccaagacaggagtggtgcgctacgtgggggagacagactttgccaagggggagtggtgtggggtggagctggatgagcccctgggcaagaatgatggagctgtggccggcacccgctacttccagtgcccccccaagtttggcctgtttgcccccatccacaaggtgatccgcatcggcttccccagcaccagccctgccaaggccaagaagaccaagaggatggccatgggcgtgtctgccctgacccacagccccagcagcagcagcatcagctctgtgtcctctgtggccagctctgtgggcggccggcccagccgcagcggcctgctgacagagaccagcagccgctatgccaggaagatcagcggcaccacagccctgcaggaggccctgaaggagaagcagcagcacatcgagcagctgctggccgagcgggacctggagcgggcagaggtggccaaggccaccagccacatctgtgaggtggagaaggagatcgccctgctgaaggcccagcacgagcagtatgtggccgaggccgaggagaagctgcagagggcccggctgctggtggagagcgtgaggaaggagaaggtggacctgagcaaccagctggaggaggagaggaggaaggtggaggacctgcagttccgggtggaggaggagagcatcaccaagggggacctggagacccagacccagctggagcacgcccgcatcggggagctggagcagagcctgctgctggagaaggcccaggccgagcggctgctgcgggagctggccgacaaccggctgaccaccgtggccgagaagagccgggtgctgcagctggaggaggagctgaccctgcggcggggggagattgaggagctgcagcagtgcctgctgcacagcggccccccacctccagaccacccagatgctgctgagatcctgcggctgcgggagcggctgctgagcgccagcaaggagcaccagcgggagagcggcgtgctgcgggacaagtatgagaaggccctgaaggcctaccaggccgaggtggacaagctgcgggccgccaatgagaagtatgcccaggaggtggccggcctgaaggacaaggtgcagcaggccaccagcgagaacatgggcctgatggacaactggaagagcaagctggacagcctggccagtgaccaccagaagagcctggaggacctgaaggccaccctgaacagcggccctggggcccagcagaaggagatcggggagctgaaggctgtgatggagggcatcaagatggagcaccagctggagctgggcaacctgcaggccaagcatgacctggagacagccatgcacgtgaaggagaaggaggccctgcgggagaagctgcaggaggcccaggaggagctggccggcctgcagaggcactggagggcccagctggaggtgcaggccagccagcaccggctggagctgcaggaggcccaggaccagaggagagatgctgagctgcgggtgcatgagctggagaagctggatgtggagtaccggggccaggcccaggccatcgagttcctgaaggagcagatcagcctggccgagaagaagatgctggactatgaaaggctgcagagagctgaggcccagggcaagcaggaggtggagagcctgcgggagaagctgctggtggctgaaaatcggctgcaggccgtggaggccctgtgcagcagccagcacacccacatgattgagagcaatgacatcagcgaggagaccatccgcaccaaggagaccgtggagggcctgcaggacaagctgaacaagagggacaaggaggtgacagccctgaccagccagacagagatgctgcgggcccaggtgtctgccctggagagcaagtgcaagagcggggagaagaaggtggatgccctgctgaaggagaagaggcggctggaggccgagctggagaccgtgtccaggaagacccatgatgccagcggccagctggtgctgatcagccaggagctgctgaggaaggagaggagcctgaatgagctgcgggtgctgctgctggaggccaacagacacagccctggccctgagcgggacctgagccgggaggtgcacaaggccgagtggaggatcaaggagcagaagctgaaggatgacatccggggcctgcgggagaagctgaccggcctggacaaggagaagagcctgagtgaccagaggcgctacagcctgattgacaggagcagcgcccctgagctgctgcggctgcagcaccagctgatgagcacagaagatgccctgagagatgccctggaccaggcccagcaggtggagaagctgatggaggccatgaggagctgcccagacaaggcccagaccatcggcaacagcggcagcgccaacggcatccaccagcaggacaaggcccagaagcaggagaacacccactag

SEQ ID NO: 146142 - DNA, 4827 bp, synthetic construct
  misc_feature 1..4827: note = Description of Artificial Sequence: Synthetic coding sequence
  source 1..4827: mol_type = other DNA
atgtacagcgcccaccggcccctgatgcctgccagcagcgctgccagccggggcctgggcatgtttgtgtggaccaacgtggagcccaggtctgtggccgtgttcccctggcacagcctggtgcccttcctggcccccagccagcctgaccccagcgtgcagcccagcgaggcccagcagcctgccagccaccctgtggccagcaaccagagcaaggagcctgctgagagcgctgctgtggcccacgagaggcctcctgggggcactggatctgctgaccctgagaggcctcctggggccacctgcccagagagccctggccctggccccccccaccccctgggcgtggtggagagcgggaaaggacctccacccaccacagaggaggaggccagcggccccccaggagagccccggctggacagcgagacagaaagtgaccatgatgatgccttcctgagcatcatgagccctgagatccagctgcccctgcccccaggcaagaggaggacccagagcctgagcgccctgcccaaggagcgggacagcagcagcgagaaggatggccgcagccccaacaagcgggagaaggaccacatcagaagacccatgaatgccttcatgatcttcagcaagaggcaccgggccctggtgcaccagaggcaccccaaccaggacaacagaacagtgtccaagatcctgggggagtggtggtacgccctgggccccaaggagaagcagaagtaccatgacctggccttccaggtgaaggaggcccacttcaaggcccacccagactggaagtggtgcaacaaggacaggaagaagagcagcagcgaggccaagcccaccagcctgggcctggccggcggccacaaggagacccgggagaggtccatgtctgaaacaggaacagctgctgcccctggggtgtcctctgagctgctgtctgtggccgcccagaccctgctgagcagtgacaccaaggcccctggcagcagcagctgtggggctgagcggctgcacacagtgggcggccctggcagcgcccggccccgggccttcagccacagcggcgtgcacagcctggatggaggagaggtggacagccaggccctgcaggagctgacccagatggtgtctggccctgccagctacagcggccccaagcccagcacccagtatggagcccctggcccctttgctgcccctggagagggcggggccctggccgccaccggccggccccccctgctgcccacccgggccagccgcagccagagagctgccagcgaggacatgaccagtgatgaggagaggatggtgatctgtgaggaggagggagatgatgatgtgattgctgatgatggcttcggcaccacagacatcgacctgaagtgcaaggagcgggtgacagacagcgagagcggggacagcagcggggaggaccctgagggcaacaagggcttcggcaggaaggtgttcagccctgtgatccgcagcagcttcacccactgccggccccccctggaccctgagcccccaggccccccagacccccctgtggccttcggcaagggctacggcagcgcccccagcagcagcgccagcagccctgccagcagcagcgccagcgctgccaccagcttcagcctgggcagcggcaccttcaaggcccaggagagcggccagggcagcacagctggccccctgcggcccccacctcctggggccggcggccctgccacccccagcaaggccacccgcttcctgcccatggaccctgccaccttccggaggaagaggcctgagagcgtgggcggcctggagcccccaggccccagcgtgattgctgccccacccagcggcggcggcaacatcctgcagaccctggtgctgccccccaacaaggaggagcaggagggcggcggggcccgggtgcccagcgccccagcccccagcctggcctatggagccccagctgcccccctgagcaggcctgctgccaccatggtgaccaacgtggtgcggcctgtgagcagcacccctgtgcccatcgccagcaagcccttccccaccagcggccgggcagaggccagccccaatgacacagctggggccaggacagagatgggcaccggcagccgggtgcctgggggcagccccctgggcgtgtccctggtgtacagcgacaagaagtctgctgctgccaccagccctgccccccacctggtggccggccccctgctgggcaccgtgggcaaggccccagccaccgtgaccaacctgctggtgggcaccccaggctacggggccccagcccctcctgctgtgcagttcatcgcccagggcgcccctgggggcggcaccacagctggcagcggggccggggccggcagcggccccaatggacctgtgcccctgggcatcctgcagcccggggccctgggcaaggccggcggcatcacccaggtgcagtacatcctgcccaccctgccccagcagctgcaggtggccccagccccagccccagcccctggcaccaaggctgctgcccccagcggccctgcccccaccaccagcatccgcttcaccctgcccccaggcaccagcaccaacgggaaggtgctggccgccacagcccccaccccaggcatccccatcctgcagagcgtgcccagcgcccccccacccaaggcccagagcgtgtcccctgtgcaggcccctcctcctgggggcagcgcccagctgctgcccgggaaggtgctggtgcccctggccgcccccagcatgtctgtgcggggcggcggggccggccagcccctgcccctggtgtccccacccttctctgtgcctgtgcagaatggagcccagccccccagcaagatcatccagctgacccctgtgcctgtgtccaccccatctggcctggtgccccccctgagccctgccaccctgcccggccccaccagccagccccagaaggtgctgctgcccagcagcacccgcatcacctacgtgcagagcgctgggggccacgccctgcccctgggcaccagccctgccagcagccaggccggcaccgtgaccagctatggccccaccagctctgtggccctgggcttcaccagcctgggccccagcggccctgcctttgtgcagcccctgctgtctgctggccaggcccccctgctggcccctggccaggtgggcgtgtcccctgtgcccagcccccagctgcccccagcctgtgccgcccctgggggccctgtgatcacagccttctacagcggcagccctgcccccaccagcagcgcccccctggcccagcccagccaggccccacccagcctggtgtacacagtggccaccagcaccaccccacctgctgccaccatcctgcccaagggccccccagccccagccacagccaccccagcccccaccagccccttccccagcgccacagctggctccatgacctacagcctggtggcccccaaggcccagaggcccagccccaaggccccccagaaggtgaaggccgccatcgccagcatccctgtgggcagctttgaggccggggccagcggccggcccggccctgccccccggcagcccctggagcccggccctgtgcgggagcccacagcccctgagagcgagctggagggccagcccaccccaccagcccccccacccctgcctgagacctggacccccacagcccggagcagcccccccctgcccccacctgctgaggagaggaccagcgccaagggccctgagaccatggccagcaagttccccagcagcagcagtgactggagggtgcccggccagggcctggagaacagaggagagccccccaccccacccagccctgccccagccccagctgtggcccctgggggcagcagcgagagcagcagcggccgggctgctggggacaccccagagaggaaggaggccgccggcaccgggaagaaggtgaaggtgcggcccccacccctgaagaagacctttgacagcgtggacaacagagtgctgtctgaggtggactttgaggagagatttgctgagctgcctgagttccggcctgaggaggtgctgcccagccccaccctgcagagcctggccaccagcccccgggccatcctgggcagctacaggaagaagaggaagaacagcacagacctggacagcgcccctgaggaccccaccagccccaagaggaagatgagaagaagaagcagctgcagcagcgagcccaacacccccaagagcgccaagtgtgagggggacatcttcacctttgacagaactggaacagaagcagaagatgtgctgggggagctggagtatgacaaggtgccctacagcagcctgcggaggaccctggaccagaggcgggccctggtgatgcagctgttccaggaccacggcttcttccccagcgcccaggccacagctgccttccaggcccgctatgctgacatcttccccagcaaggtgtgcctgcagctgaagatccgggaggtgcggcagaagatcatgcaggccgccacccccacagagcagcccccaggagctgaggcccccctgcctgtgcccccacccactggaacagctgctgccccagcccccacccccagccctgctgggggccctgaccccaccagccccagcagtgacagcggcacagcccaggccgccccacccctgcccccacctcctgagagcggccctggccagcccggctgggagggcgccccccagcccagccccccacctcctggccccagcacagctgccaccggccgctag

SEQ ID NO: 146143 - DNA, 1002 bp, synthetic construct
  misc_feature 1..1002: note = Description of Artificial Sequence: Synthetic coding sequence
  source 1..1002: mol_type = other DNA
atgtacacagccatcccccagagcggcagccccttccctggctctgtgcaggaccccggcctgcacgtgtggagggtggagaagctgaagcctgtgcctgtggcccaggagaaccagggcgtcttcttcagcggggacagctacctggtgctgcacaatggacctgaggaggtgagccacctgcacctgtggattggccagcagagcagcagagatgagcagggcgcctgtgctgtgctggccgtgcacctgaacaccctgctgggggagaggcctgtgcagcaccgggaggtgcagggcaatgaaagtgacctcttcatgagctacttcccccggggcctgaagtaccaggagggcggcgtggagagcgccttccacaagaccagcactggagccccagctgccatcaagaagctgtaccaggtgaagggcaagaagaacatccgggccacagagcgggccctgaactgggacagcttcaacacaggagactgcttcatcctggacctgggccagaacatctttgcctggtgtggcggcaagagcaacatcctggagaggaacaaggcccgggacctggccctggccatccgggacagcgagcggcagggcaaggcccaggtgctgggccccaagccagccctgaaggagggcaaccctgaggaggacctgacagctgacaaggccaatgcccaggccgccgccctgtacaaggtgtctgatgccaccggccagatgaacctgaccaaggtggccgacagcagcccctttgccctggagctgctgatcagtgatgactgctttgtgctggacaatggcctgtgtgggaagatctacatctggaagggcaggaaggccaatgagaaggagcggcaggccgccctgcaggtggccgagggcttcatcagcaggatgcagtatgcccccaacacccaggtggagatcctgccccagggccacgagagccccatcttcaagcagttcttcaaggactggaagtag

SEQ ID NO: 146144 - DNA, 861 bp, synthetic construct
  misc_feature 1..861: note = Description of Artificial Sequence: Synthetic coding sequence
  source 1..861: mol_type = other DNA
atggctgactttgatgacagagtgtctgatgaggagaaggtgagaattgctgccaagttcatcacccacgcccctcctggagagttcaatgaggtgttcaatgatgtgcggctgctgctgaacaatgacaacctgctgcgggagggcgccgcccacgcctttgcccagtacaacatggaccagttcacccctgtgaagattgagggctatgaggaccaggtgctgatcacagaacatggagacctgggcaacagccgcttcctggaccccaggaacaagatctccttcaagtttgaccacctgaggaaggaggccagtgacccccagcctgaggaggctgatggcggcctgaagtcctggagggagagctgtgacagcgccctgcgggcctacgtgaaggaccactacagcaatggcttctgcaccgtgtatgccaagaccattgatggccagcagaccatcatcgcctgcatcgagagccaccagttccagcccaagaacttctggaatggccgctggaggtctgagtggaagttcaccatcaccccacccacagcccaggtggtgggcgtgctgaagatccaggtgcactactatgaagatggaaatgtgcagctggtgagccacaaggatgtgcaggacagcctgactgtgtccaatgaggcccagacagccaaggagttcatcaagatcattgaaaatgcagaaaatgagtaccagacagccatcagcgagaactaccagaccatgtctgacaccaccttcaaggccctgcggcggcagctgcctgtgaccaggaccaagattgactggaacaagatcctgagctacaagattggcaaggagatgcagaatgcctag

SEQ ID NO: 146145 - DNA, 861 bp, synthetic construct
  misc_feature 1..861: note = Description of Artificial Sequence: Synthetic coding sequence
  source 1..861: mol_type = other DNA
atggctgacctggaggagcagctgagtgatgaggagaaggtgagaattgctgccaagttcatcatccacgcccctcctggagagttcaatgaggtgttcaatgatgtgcggctgctgctgaacaatgacaacctgctgcgggagggcgccgcccacgcctttgcccagtacaacctggaccagttcacccctgtgaagattgagggctatgaggaccaggtgctgatcacagaacatggagacctgggcaatggcaagttcctggaccccaagaaccgcatctgcttcaagtttgaccacctgaggaaggaggccacagacccccggccctgtgaggtggagaatgctgtggagagctggaggacctctgtggagacagccctgcgggcctacgtgaaggagcactaccccaacggggtgtgcaccgtgtatggcaagaagattgatggccagcagaccatcatcgcctgcatcgagagccaccagttccaggccaagaacttctggaatggccgctggaggtctgagtggaagttcaccatcacccccagcaccacccaggtggtgggcatcctgaagatccaggtgcactactatgaagatggaaatgtgcagctggtgagccacaaggacatccaggacagcctgactgtgtccaatgaggtgcagacagccaaggagttcatcaagatcgtggaggccgcagaaaatgagtaccagacagccatcagcgagaactaccagaccatgtctgacaccaccttcaaggccctgcggcggcagctgcctgtgaccaggaccaagattgactggaacaagatcctgagctacaagattggcaaggagatgcagaatgcctag

SEQ ID NO: 146146 - DNA, 519 bp, synthetic construct
  misc_feature 1..519: note = Description of Artificial Sequence: Synthetic coding sequence
  source 1..519: mol_type = other DNA
atggctgacctggaggagcagctgagtgatgaggagaaggtgagaattgctgccaagttcatcatccacgcccctcctggagagttcaatgaggtgttcaatgatgtgcggctgctgctgaacaatgacaacctgctgcgggagggcgccgcccacgcctttgcccagtacaacctggaccagttcacccctgtgaagattgagggctatgaggaccaggtgctgatcacagaacatggagacctgggcaatggcaagttcctggaccccaagaaccgcatctgcttcaagtttgaccacctgaggaaggaggccacagacccccggccctgtgaggtggagaatgctgtggagagctggaggacctctgtggagacagccctgcgggcctacgtgaaggagcactaccccaacggggtgtgcacagagtggagcctggaggtgaggatggaggtgtacaaccacagcttcaaccacagcagcggctggcacctggagaacagcggcagcctgctgtag

SEQ ID NO: 146147 - DNA, 900 bp, synthetic construct
  misc_feature 1..900: note = Description of Artificial Sequence: Synthetic coding sequence
  source 1..900: mol_type = other DNA
atgaccctgtctgtgctgagcaggaaggacaaggagagggtcatccggcggctgctgctgcaggcccctcctggagaatttgtgaatgcctttgatgacctgtgcctgctgatcagagatgagaagctgatgcaccaccagggagaatgtgccggccaccagcactgccagaagtacagcgtgcccctgtgcattgatggcaaccctgtgctgctgagccaccacaacgtgatgggagactaccgcttctttgaccaccagagcaagctgtccttcaagtatgacctgctgcagaaccagctgaaggacatccagagccacggcatcatccagaatgaggccgagtacctgcgggtggtgctgctgtgtgccctgaagctgtatgtgaatgaccactaccccaagggcaactgcaacatgctgaggaagacagtgaagagcaaggagtacctgattgcctgcatcgaggaccacaactatgagaccggggagtgctggaatggcctgtggaagagcaagtggatcttccaggtgaaccccttcctgacccaggtgacaggccgcatctttgtgcaggcccacttcttccgctgtgtgaacctgcacatcgagatcagcaaggacctgaaggagagcctggagatcgtgaaccaggcccagctggccctgagctttgcccggctggtggaggagcaggagaacaagttccaggccgctgtgctggaggagctgcaggagctgagcaatgaggccctgaggaagatcctgcggcgggacctgcctgtgaccaggaccctgattgactggcaccgcatcctgagtgacctgaacctggtgatgtaccccaagctgggctacgtgatctacagccgctctgtgctgtgcaactggatcatctag

SEQ ID NO: 146148 - DNA, 834 bp, synthetic construct
  misc_feature 1..834: note = Description of Artificial Sequence: Synthetic coding sequence
  source 1..834: mol_type = other DNA
atgtctgaccagcagctggactgtgccctggacctgatgaggcggctgcccccccagcagatcgagaagaacctgagtgacctgattgacctggtgcccagcctgtgtgaggacctgctgagctctgtggaccagcccctgaagatcgcccgggacaaggtggtgggcaaggactacctgctgtgtgactacaacagagatggagacagctaccgcagcccctggagcaacaagtatgacccccccctggaggatggagccatgcccagcgcccggctgaggaagctggaggtggaggccaacaatgcctttgaccagtacagagacctgtactttgagggcggcgtgtcctctgtgtacctgtgggacctggaccacggctttgctggggtcatcctgatcaagaaggctggagatggcagcaagaagatcaagggctgctgggacagcatccacgtggtggaggtgcaggagaagagcagcggccgcacagcccactacaagctgaccagcacagtgatgctgtggctgcagaccaacaagagcggcagcggcaccatgaacctgggcggcagcctgacccggcagatggagaaggatgagaccgtgtctgactgcagcccccacatcgccaacatcggccgcctggtggaggacatggagaacaagatccgcagcaccctgaatgagatctactttgggaagaccaaggacatcgtgaatggcctgcggagcattgatgccatcccagacaaccagaagttcaagcagctgcagcgggagctgagccaggtgctgacccagaggcagatctacatccagcctgacaactag

SEQ ID NO: 146149 - DNA, 783 bp, synthetic construct
  misc_feature 1..783: note = Description of Artificial Sequence: Synthetic coding sequence
  source 1..783: mol_type = other DNA
atgccccggcagttccaggacaccggcttcagcaggcctggcctgggccagccccggcgctgtgaccctgagcccaggaagagtgaccagcagctggactgtgccctggacctgatgaggcggctgcccccccagcagatcgagaagaacctgagtgacctgattgacctggtgcccagcctgtgtgaggacctgctgagctctgtggaccagcccctgaagatcgcccgggacaaggtggtgggcaaggactacctgctgtgtgactacaacagagatggagacagctaccgcagcccctggagcaacaagtatgacccccccctggaggatggagccatgcccagcgcccggctgaggaagctggaggtggaggccaacaatgcctttgaccagtacagagacctgtactttgagggcggcgtgtcctctgtgtacctgtgggacctggaccacggctttgctggggtcatcctgatcaagaaggctggagatggcagcaagaagatcaagggctgctgggacagcatccacgtggtggaggtgcaggagaagagcagcggccgcacagcccactacaagctgaccagcacagtgatgctgtggctgcagaccaacaagagcggcagcggcaccatgaacctgggcggcagcctgacccggcagatggagaaggatgagaccgtgtctgactgcagcccccacatcgccaacatcggccgcctggtggaggtgtgtgccgacttctgccggcagatcaagaccaggagcagcgaggagtag

SEQ ID NO: 146150 - DNA, 834 bp, synthetic construct; identical to SEQ ID NO: 146148
  misc_feature 1..834: note = Description of Artificial Sequence: Synthetic coding sequence
  source 1..834: mol_type = other DNA

SEQ ID NO: 146151 - DNA, 783 bp, synthetic construct
  misc_feature 1..783: note = Description of Artificial Sequence: Synthetic coding sequence
  source 1..783: mol_type = other DNA
atgaggcggctgcccccccagcagatcgagaagaacctgagtgacctgattgacctggtgcccagcctgtgtgaggacctgctgagctctgtggaccagcccctgaagatcgcccgggacaaggtggtgggcaaggactacctgctgtgtgactacaacagagatggagacagctaccgcagcccctggagcaacaagtatgacccccccctggaggatggagccatgcccagcgcccggctgaggaagctggaggtggaggccaacaatgcctttgaccagtacagagacctgtactttgagggcggcgtgtcctctgtgtacctgtgggacctggaccacggctttgctggggtcatcctgatcaagaaggctggagatggcagcaagaagatcaagggctgctgggacagcatccacgtggtggaggtgcaggagaagagcagcggccgcacagcccactacaagctgaccagcacagtgatgctgtggctgcagaccaacaagagcggcagcggcaccatgaacctgggcggcagcctgacccggcagatggagaaggatgagaccgtgtctgactgcagcccccacatcgccaacatcggccgcctggtggaggacatggagaacaagatccgcagcaccctgaatgagatctactttgggaagaccaaggacatcgtgaatggcctgcggtctgtgcagacctttgctgacaagagcaagcaggaggccctgaagaatgacctggtggaggccctgaagaggaagcagcagtgctag

SEQ ID NO: 146152 - DNA, 1005 bp, synthetic construct
  misc_feature 1..1005: note = Description of Artificial Sequence: Synthetic coding sequence
  source 1..1005: mol_type = other DNA
atgggcggcccccaggacaaggatgagaggaccatcgccctggtgcggccctggccctggggccaccaggccctggaccctgcctacggcctggacaccatgcaccccagccgccgcagcctgcccttccccctgaactgccagctggcccgggtgggcacagctgactatggcagccccagcgaccagagcgaccagcagctggactgtgccctggacctgatgaggcggctgcccccccagcagatcgagaagaacctgagtgacctgattgacctggtgcccagcctgtgtgaggacctgctgagctctgtggaccagcccctgaagatcgcccgggacaaggtggtgggcaaggactacctgctgtgtgactacaacagagatggagacagctaccgcagcccctggagcaacaagtatgacccccccctggaggatggagccatgcccagcgcccggctgaggaagctggaggtggaggccaacaatgcctttgaccagtacagagacctgtactttgagggcggcgtgtcctctgtgtacctgtgggacctggaccacggctttgctggggtcatcctgatcaagaaggctggagatggcagcaagaagatcaagggctgctgggacagcatccacgtggtggaggtgcaggagaagagcagcggccgcacagcccactacaagctgaccagcacagtgatgctgtggctgcagaccaacaagagcggcagcggcaccatgaacctgggcggcagcctgacccggcagatggagaaggatgagaccgtgtctgactgcagcccccacatcgccaacatcggccgcctggtggaggacatggagaacaagatccgcagcaccctgaatgagatctactttgggaagaccaaggacatcgtgaatggcctgcggtctgtgcagacctttgctgacaagagcaagcaggaggccctgaagaatgacctggtggaggccctgaagaggaagcagcagtgctag

SEQ ID NO: 146153 - DNA, 819 bp, synthetic construct
  misc_feature 1..819: note = Description of Artificial Sequence: Synthetic coding sequence
  source 1..819: mol_type = other DNA
atgtctgaccagcagctggactgtgccctggacctgatgaggcggctgcccccccagcagatcgagaagaacctgagtgacctgattgacctggtgcccagcctgtgtgaggacctgctgagctctgtggaccagcccctgaagatcgcccgggacaaggtggtgggcaaggactacctgctgtgtgactacaacagagatggagacagctaccgcagcccctggagcaacaagtatgacccccccctggaggatggagccatgcccagcgcccggctgaggaagctggaggtggaggccaacaatgcctttgaccagtacagagacctgtactttgagggcggcgtgtcctctgtgtacctgtgggacctggaccacggctttgctggggtcatcctgatcaagaaggctggagatggcagcaagaagatcaagggctgctgggacagcatccacgtggtggaggtgcaggagaagagcagcggccgcacagcccactacaagctgaccagcacagtgatgctgtggctgcagaccaacaagagcggcagcggcaccatgaacctgggcggcagcctgacccggcagatggagaaggatgagaccgtgtctgactgcagcccccacatcgccaacatcggccgcctggtggaggacatggagaacaagatccgcagcaccctgaatgagatctactttgggaagaccaaggacatcgtgaatggcctgcggtctgtgcagacctttgctgacaagagcaagcaggaggccctgaagaatgacctggtggaggccctgaagaggaagcagcagtgctag

SEQ ID NO: 146154 - DNA, 621 bp, synthetic construct
  misc_feature 1..621: note = Description of Artificial Sequence: Synthetic coding sequence
  source 1..621: mol_type = other DNA
atgaggcggctgcccccccagcagatcgagaagaacctgagtgacctgattgacctggtgcccagcctgtgtgaggacctgctgagctctgtggaccagcccctgaagatcgcccgggacaaggtggtgggcaaggactacctgctgtgtgactacaacagagatggagacagctaccgcagcccctggagcaacaagtatgacccccccctggaggatggagccatgcccagcgcccggctgaggaagctggaggtggaggccaacaatgcctttgaccagtacagagacctgtactttgagggcggcgtgtcctctgtgtacctgtgggacctggaccacggctttgctggggtcatcctgatcaagaaggctggagatggcagcaagaagatcaagggctgctgggacagcatccacgtggtggaggtgcaggagaagagcagcggccgcacagcccactacaagctgaccagcacagtgatgctgtggctgcagaccaacaagagcggcagcggcaccatgaacctgggcggcagcctgacccggcagatggagaaggatgagaccgtgtctgactgcagcccccacatcgccaacatcggccgcctggtggagtag

SEQ ID NO: 146155 - DNA, 906 bp, synthetic construct
  misc_feature 1..906: note = Description of Artificial Sequence: Synthetic coding sequence
  source 1..906: mol_type = other DNA
atgcaccccagcagaagaagcctgcccttccccctgaactgccagctggcccgggtgggcacagctgactatggcagccccagcgaccagagcgaccagcagctggactgtgccctggacctgatgaggcggctgcccccccagcagatcgagaagaacctgagtgacctgattgacctggtgcccagcctgtgtgaggacctgctgagctctgtggaccagcccctgaagatcgcccgggacaaggtggtgggcaaggactacctgctgtgtgactacaacagagatggagacagctaccgcagcccctggagcaacaagtatgacccccccctggaggatggagccatgcccagcgcccggctgaggaagctggaggtggaggccaacaatgcctttgaccagtacagagacctgtactttgaaggaggagtgtcctctgtgtacctgtgggacctggaccacggctttgctggggtcatcctgatcaagaaggctggagatggcagcaagaagatcaagggctgctgggacagcatccacgtggtggaggtgcaggagaagagcagcggccgcacagcccactacaagctgaccagcacagtgatgctgtggctgcagaccaacaagagcggcagcggcaccatgaacctgggcggcagcctgacccggcagatggagaaggatgaaacagtgtctgactgcagcccccacatcgccaacatcggccgcctggtggaggacatggagaacaagatccgcagcaccctgaatgagatctactttgggaagaccaaggacatcgtgaatggcctgcggtctgtgcagacctttgctgacaagagcaagcaggaggccctgaagaatgacctggtggaggccctgaagaggaagcagcagtgctag

SEQ ID NO: 146156 - DNA, 366 bp, synthetic construct
  misc_feature 1..366: note = Description of Artificial Sequence: Synthetic coding sequence
  source 1..366: mol_type = other DNA
atgctgaaggtgcccagcctgtgtgaggacctgctgagctctgtggaccagcccctgaagatcgcccgggacaaggtggtgggcaaggactacctgctgtgtgactacaacagagatggagacagctaccgcagcccctggagcaacaagtatgacccccccctggaggatggagccatgcccagcgcccggctgaggaagctggaggtggaggccaacaatgcctttgaccagtacagagacctgtactttgagggcggcgtgtcctctgtgtacctgtgggacctggaccacggctttgctggggtcatcctgatcaagaaggctggagatggcagcaagaagatcaagggctgctgggactag

SEQ ID NO: 146157 - DNA, 1047 bp, synthetic construct
  misc_feature 1..1047: note = Description of Artificial Sequence: Synthetic coding sequence
  source 1..1047: mol_type = other DNA
atgtacacagccatcccccagagcggcagccccttccctggctctgtgcaggaccccggcctgcacgtgtggagggtggagaagctgaagcctgtgcctgtggcccaggagaaccagggcgtcttcttcagcggggacagctacctggtgctgcacaatggacctgaggaggtgagccacctgcacctgtggattggccagcagagcagcagagatgagcagggcgcctgtgctgtgctggccgtgcacctgaacaccctgctgggggagaggcctgtgcagcaccgggaggtgcagggcaatgaaagtgacctcttcatgagctacttcccccggggcctgaagtaccaggagggcggcgtggagagcgccttccacaagaccagcactggagccccagctgccatcaagaagctgtaccaggtgaagggcaagaagaacatccgggccacagagcgggccctgaactgggacagcttcaacacaggagactgcttcatcctggacctgggccagaacatctttgcctggtgtggcggcaagagcaacatcctggagaggaacaaggcccgggacctggccctggccatccgggacagcgagcggcagggcaaggcccaggtggagatcgtgacagatggagaggagcctgctgagatgatccaggtgctgggccccaagccagccctgaaggagggcaaccctgaggaggacctgacagctgacaaggccaatgcccaggccgccgccctgtacaaggtgtctgatgccaccggccagatgaacctgaccaaggtggccgacagcagcccctttgccctggagctgctgatcagtgatgactgctttgtgctggacaatggcctgtgtgggaagatctacatctggaagggcaggaaggccaatgagaaggagcggcaggccgccctgcaggtggccgagggcttcatcagcaggatgcagtatgcccccaacacccaggtggagatcctgccccagggccacgagagccccatcttcaagcagttcttcaaggactggaagtag

SEQ ID NO: 146158 - DNA, 657 bp, synthetic construct
  misc_feature 1..657: note = Description of Artificial Sequence: Synthetic coding sequence
  source 1..657: mol_type = other DNA
atgtacacagccatcccccagagcggcagccccttccctggctctgtgcaggaccccggcctgcacgtgtggagggtggagaagctgaagcctgtgcctgtggcccaggagaaccagggcgtcttcttcagcggggacagctacctggtgctgcacaatggacctgaggaggtgagccacctgcacctgtggattggccagcagagcagcagagatgagcagggcgcctgtgctgtgctggccgtgcacctgaacaccctgctgggggagaggcctgtgcagcaccgggaggtgcagggcaatgaaagtgacctcttcatgagctacttcccccggggcctgaagtaccaggagggcggcgtggagagcgccttccacaagaccagcactggagccccagctgccatcaagaagctgtaccaggtgaagggcaagaagaacatccgggccacagagcgggccctgaactgggacagcttcaacacaggagactgcttcatcctggacctgggccagaacatctttgcctggtgtggcggcaagagcaacatcctggagaggaacaaggcccgggacctggccctggccatccgggacagcgagcggcagggcaaggcccaggtggagatcgtgacagatggagaggagcccgcctag

SEQ ID NO: 146159 - DNA, 1047 bp, synthetic construct; identical to SEQ ID NO: 146157
  misc_feature 1..1047: note = Description of Artificial Sequence: Synthetic coding sequence
  source 1..1047: mol_type = other DNA

SEQ ID NO: 146160 - DNA, 1047 bp, synthetic construct; identical to SEQ ID NO: 146157
  misc_feature 1..1047: note = Description of Artificial Sequence: Synthetic coding sequence
  source 1..1047: mol_type = other DNA

SEQ ID NO: 146161 - DNA, 762 bp, synthetic construct
  misc_feature 1..762: note = Description of Artificial Sequence: Synthetic coding sequence
  source 1..762: mol_type = other DNA
atgtacacagccatcccccagagcggcagccccttccctggctctgtgcaggaccccggcctgcacgtgtggagggtggagaagctgaagcctgtgcctgtggcccaggagaaccagggcgtcttcttcagcggggacagctacctggtgctgcacaatggacctgaggaggtgagccacctgcacctgtggattggccagcagagcagcagagatgagcagggcgcctgtgctgtgctggccgtgcacctgaacaccctgctgggggagaggcctgtgcagcaccgggaggtgcagggcaatgaaagtgacctcttcatgagctacttcccccggggcctgaagtaccaggagggcggcgtggagagcgccttccacaagaccagcactggagccccagctgccatcaagaagctgtaccaggtgaagggcaagaagaacatccgggccacagagcgggccctgaactgggacagcttcaacacaggagactgcttcatcctggacctgggccagaacatctttgcctggtgtggcggcaagagcaacatcctggagaggaacaaggcccgggacctggccctggccatccgggacagcgagcggcagggcaaggcccaggtggagatcgtgacagatggagaggagcctgctgagatgatccaggtgctgggccccaagccagccctgaaggagggcaaccctgaggaggacctgacagctgacaaggccaatgcccaggccgccgccctgtacaagtag

SEQ ID NO: 146162 - DNA, 762 bp, synthetic construct; identical to SEQ ID NO: 146161
  misc_feature 1..762: note = Description of Artificial Sequence: Synthetic coding sequence
  source 1..762: mol_type = other DNA

SEQ ID NO: 146163 - DNA, 762 bp, synthetic construct; identical to SEQ ID NO: 146161
  misc_feature 1..762: note = Description of Artificial Sequence: Synthetic coding sequence
  source 1..762: mol_type = other DNA

SEQ ID NO: 146164 - DNA, 984 bp, synthetic construct
  misc_feature 1..984: note = Description of Artificial Sequence: Synthetic coding sequence
  source 1..984: mol_type = other DNA
atgtacacagccatcccccagagcggcagccccttccctggctctgtgcaggaccccggcctgcacgtgtggagggtggagaagctgaagcctgtgcctgtggcccaggagaaccagggcgtcttcttcagcggggacagctacctggtgctgcacaatggacctgaggaggtgagccacctgcacctgaacaccctgctgggggagaggcctgtgcagcaccgggaggtgcagggcaatgaaagtgacctcttcatgagctacttcccccggggcctgaagtaccaggagggcggcgtggagagcgccttccacaagaccagcactggagccccagctgccatcaagaagctgtaccaggtgaagggcaagaagaacatccgggccacagagcgggccctgaactgggacagcttcaacacaggagactgcttcatcctggacctgggccagaacatctttgcctggtgtggcggcaagagcaacatcctggagaggaacaaggcccgggacctggccctggccatccgggacagcgagcggcagggcaaggcccaggtggagatcgtgacagatggagaggagcctgctgagatgatccaggtgctgggccccaagccagccctgaaggagggcaaccctgaggaggacctgacagctgacaaggccaatgcccaggccgccgccctgtacaaggtgtctgatgccaccggccagatgaacctgaccaaggtggccgacagcagcccctttgccctggagctgctgatcagtgatgactgctttgtgctggacaatggcctgtgtgggaagatctacatctggaagggcaggaaggccaatgagaaggagcggcaggccgccctgcaggtggccgagggcttcatcagcaggatgcagtatgcccccaacacccaggtggagatcctgccccagggccacgagagccccatcttcaagcagttcttcaaggactggaagtag

SEQ ID NO: 146165 - DNA, 654 bp, synthetic construct
  misc_feature 1..654: note = Description of Artificial Sequence: Synthetic coding sequence
  source 1..654: mol_type = other DNA
atggagggcagcttcagtgatggaggagccctgcctgagggcctggccgaggaggccgagccccagggcgccgcctggagcggggacagcggcaccgtgtcccagagccacagcagcgccagcggcccctgggaggatgagggcgcagaagatggagcccctggccgggacctgcccctgctgcggcgggctgctgctggctatgctgcctgcctgctgcccggggccggggcccggcctgaggtggaggccctggatgccagcctggaggacctgctgaccagggtggatgaatttgtgggcatgctggacatgctgcggggggacagcagccacgtggtgtctgaaggagtgccccgcatccacgccaaggctgctgagatgaggcgcatctacagcagaattgaccggctggaggcctttgtgaggatggtgggcggccgggtggccaggatggaggagcaggtgaccaaggccgaggccgagctgggcaccttcccccgggccttcaagaagctgctgcacaccatgaatgtgcccagcctcttcagcaagagcgcccccagccggccccagcaggccggctatgaggcccctgtgctcttcagaacagaggactacttcccctgctgcagcgagcggccccagctgtag

SEQ ID NO: 146166 - DNA, 6678 bp, synthetic construct
  misc_feature 1..6678: note = Description of Artificial Sequence: Synthetic coding sequence
  source 1..6678: mol_type = other DNA
atggccgccctggtgctggaggatggctctgtgctgcggggccagccctttggagctgctgtgtccacagctggggaggtggtgttccagacaggcatggtgggctacccagaggccctgacagaccccagctacaaggcccagatcctggtgctgacctaccccctgattggcaactacggcatccccccagatgagatggatgaatttggcctgtgcaagtggtttgagagcagcggcatccacgtggccgccctggtggtgggggagtgctgccccacccccagccactggagcgccaccaggaccctgcacgagtggctgcagcagcacggcatccctggcctgcagggcgtggacacccgggagctgaccaagaagctgcgggagcagggcagcctgctgggcaagctggtgcagaatggaacagagcccagcagcctgcccttcctggaccccaatgcccggcccctggtgcctgaggtgtccatcaagacccccagggtcttcaacacaggaggagccccccgcatcctggccctggactgtggcctgaagtacaaccagatccgctgcctgtgccagagaggagctgaggtgacagtggtgccctgggaccacgccctggacagccaggagtatgagggcctcttcctgagcaatggacctggggaccctgccagctaccccagcgtggtgtccaccctgagccgggtgctgtctgagcccaaccccaggcctgtgtttggcatctgcctgggccaccagctgctggccctggccatcggggccaagacctacaagatgagatatggcaacagaggccacaaccagccctgcctgctggtgggcagcggccgctgcttcctgaccagccagaaccacggctttgctgtggagacagacagcctgcctgctgactgggcccccctcttcaccaatgccaatgatggcagcaatgaaggaattgtgcacaacagcctgcccttcttctctgtgcagttccaccctgagcaccaggccggccccagcgacatggagctgctgtttgacatcttcctggagaccgtgaaggaggccacagctggcaaccctgggggccagacagtgcgggagcggctgacagagcggctgtgccccccaggcatccccaccccaggcagcggcctgcccccacccaggaaggtgctgatcctgggcagcggcggcctgagcatcggccaggccggggagtttgactacagcggcagccaggccatcaaggccctgaaggaggagaacatccagaccctgctgatcaaccccaacatcgccaccgtgcagaccagccagggcctggccgacaaggtgtacttcctgcccatcaccccccactacgtgacccaggtgatcagaaatgaaagaccagatggagtgctgctgaccttcggcggccagacagccctgaactgtggggtggagctgaccaaggccggcgtgctggcccgctatggagtgcgggtgctgggcacccctgtggagaccatcgagctgacagaagatagaagagcctttgctgccaggatggccgagattggagagcacgtggcccccagcgaggccgccaacagcctggagcaggcccaggccgctgctgagcggctgggctaccctgtgctggtgcgggccgcctttgccctgggcggcctgggcagcggctttgccagcaaccgggaggagctgagcgccctggtggccccagcctttgcccacaccagccaggtgctggtggacaagagcctgaagggctggaaggagattgaatatgaggtggtgagagatgcctacggcaactgtgtgacagtgtgcaacatggagaacctggaccccctgggcatccacactggagagagcatcgtggtggcccccagccagaccctgaatgaccgggagtaccagctgctgcggcagacagccatcaaggtgacccagcacctgggcatcgtgggggagtgcaatgtgcagtatgccctgaaccctgagagcgagcagtactacatcatcgaggtgaatgcccggctgagccgcagcagcgccctggccagcaaggccaccggctaccccctggcctacgtggccgccaagctggccctgggcatccccctgcctgagctgagaaattctgtgactggaggaacagctgcctttgagcccagcgtggactactgtgtggtgaagatcccccgctgggacctgagcaagttcctgcgggtgtccaccaagattggcagctgcatgaagtctgtgggggaggtgatgggcatcggccgcagctttgaggaggccttccagaaggccctgaggatggtggatgagaactgtgtgggctttgaccacacagtgaagcctgtgtctgacatggagctggagacccccacagacaagaggatctttgtggtggccgccgccctgtgggccggctacagcgtggaccggctgtatgagctgaccagaattgaccgctggttcctgcacaggatgaagaggatcatcgcccacgcccagctgctggagcagcaccggggccagcccctgcccccagacctgctgcagcaggccaagtgcctgggcttcagtgacaagcagatcgccctggccgtgctgagcacagagctggccgtgaggaagctgcggcaggagctgggcatctgcccagctgtgaagcagattgacacagtggccgctgagtggccagcccagaccaactacctgtacctgacctactggggcaccacccatgacctgaccttccgcaccccccacgtgctggtgctgggcagcggcgtgtacagaattggcagctctgtggagtttgactggtgtgctgtgggctgcatccagcagctgaggaagatgggctacaagaccatcatggtgaactacaaccctgagaccgtgtccacagattatgacatgtgtgaccggctgtactttgatgagatcagctttgaggtggtgatggacatctatgagctggagaaccctgagggcgtcatcctgtccatgggcggccagctgcccaacaacatggccatggccctgcaccggcagcagtgccgggtgctgggcaccagccctgaggccatcgacagcgctgagaaccgcttcaagttcagccggctgctggacaccatcggcatcagccagccccagtggagggagctgagtgacctggagagcgcccggcagttctgccagacagtgggctacccctgtgtggtgcggcccagctatgtgctgagcggggccgccatgaatgtggcctacacagatggagacctggagcgcttcctgagcagcgctgctgctgtgtccaaggagcaccctgtggtgatcagcaagttcatccaggaggccaaggagattgatgtggatgctgtggccagtgatggagtggtggccgccatcgccatcagcgagcacgtggagaatgctggggtgcacagcggagatgccaccctggtgaccccaccccaggacatcacagccaagaccctggagcgcatcaaggccatcgtgcatgctgtgggccaggagctgcaggtgacaggccccttcaacctgcagctgattgccaaggatgaccagctgaaggtgattgagtgcaatgtgcgggtgagccgctccttcccctttgtgtccaagaccctgggcgtggacctggtggccctggccaccagggtcatcatgggagaggaggtggagcctgtgggcctgatgacaggcagcggcgtggtgggcgtgaaggtgccccagttctccttcagccggctggccggggctgatgtggtgctgggcgtggagatgaccagcactggagaggtggccggctttggagagagccgctgtgaggcctacctgaaggccatgctgagcacaggcttcaagatccccaagaagaacatcctgctgaccatcggcagctacaagaacaagtctgagctgctgcccaccgtgcggctgctggagagcctgggctacagcctgtatgccagcctgggcacagctgacttctacacagaacatggagtgaaggtgacagctgtggactggcactttgaggaggccgtggatggagaatgtcctccccagaggagcatcctggagcagctggccgagaagaactttgagctggtgatcaacctgtccatgagaggagctgggggccgccgcctgagcagctttgtgaccaagggctaccgcacccggcggctggccgctgacttctctgtgcccctcatcatcgacatcaagtgcaccaagctgtttgtggaggccctgggccagatcggccctgccccacccctgaaggtgcacgtggactgcatgaccagccagaagctggtgcggctgcccggcctgattgatgtgcacgtgcacctgcgggagcccggcggcacccacaaggaggactttgccagcggcacagctgctgccctggccggcggcatcaccatggtgtgtgccatgcccaacacccggccccccatcattgatgccccagccctggccctggcccagaagctggccgaggccggggcccgctgtgactttgccctcttcctgggcgccagcagtgaaaatgccggcaccctgggcaccgtggccggcagcgctgctggcctgaagctgtacctgaatgagaccttcagcgagctgcggctggacagcgtggtgcagtggatggagcactttgagacctggcccagccacctgcccatcgtggcccatgctgagcagcagacagtggccgctgtgctgatggtggcccagctgacccagaggtctgtgcacatctgccacgtggccaggaaggaggagatcctgctgatcaaggccgccaaggcccggggcctgcctgtgacctgtgaggtggccccccaccacctgttcctgagccatgatgacctggagcggctgggccctggaaaaggagaggtgcggcctgagctgggcagccggcaggatgtggaggccctgtgggagaacatggccgtcatcgactgctttgccagtgaccacgccccccacaccctggaggagaagtgtggcagccggcccccacctggcttccctggcctggagaccatgctgcccctgctgctgacagctgtgtctgagggccgcctgagcctggatgacctgctgcagaggctgcaccacaacccccggcgcatcttccacctgcccccccaggaggacacctacgtggaggtggacctggagcacgagtggaccatccccagccacatgcccttcagcaaggcccactggaccccatttgagggccagaaggtgaagggcaccgtgcggcgggtggtgctgcggggggaggtggcctacattgatggccaggtgctggtgcccccaggctacggccaggatgtgaggaagtggccccagggcgctgtgccccagctgcccccatctgccccagccaccagcgagatgaccaccaccccagagcggccccggcggggcatccctggcctgcctgatggccgcttccacctgcccccacgcatccaccgggccagtgaccccggcctgcctgctgaggagcccaaggagaagagcagcaggaaggtggccgagcctgagctgatgggcaccccagatggcacctgctacccacctcctcctgtgccccggcaggccagcccccagaacctgggcaccccaggcctgctgcacccccagaccagccccctgctgcacagcctggtgggccagcacatcctgtctgtgcagcagttcaccaaggaccagatgagccacctgttcaacgtggcccacaccctgaggatgatggtgcagaaggagaggagcctggacatcctgaagggcaaggtgatggcctccatgttttatgaggtgtccaccaggaccagcagcagctttgctgctgccatggcccggctgggcggcgctgtgctgtccttcagcgaggccaccagctctgtgcagaagggggagagcctggccgacagcgtgcagaccatgagctgctacgcagatgtggtggtgctgcggcacccccagcccggggctgtggagctggccgccaagcactgcagaagacctgtgatcaatgctggagatggagtgggggagcaccccacccaggccctgctggacatcttcaccatccgggaggagctgggcaccgtgaatggcatgaccatcaccatggtgggggacctgaagcacggccgcacagtgcacagcctggcctgcctgctgacccagtacagagtgtccctgcgctacgtggccccacccagcctgaggatgccacccaccgtgcgggcctttgtggccagccggggcaccaagcaggaggagtttgagagcattgaggaggccctgcctgacacagatgtgctgtacatgacccgcatccagaaggagcgcttcggcagcacccaggagtatgaggcctgcttcggccagttcatcctgaccccccacatcatgacccgggccaagaagaagatggtggtgatgcaccccatgccccgggtgaatgagatctctgtggaggtggacagcgaccccagggctgcctacttccggcaggccgagaatggcatgtacatccgcatggccctgctggccaccgtgctgggccgcttctag

SEQ ID NO: 146167 - DNA, 1440 bp, synthetic construct
  misc_feature 1..1440: note = Description of Artificial Sequence: Synthetic coding sequence
  source 1..1440: mol_type = other DNA
atggagaagggcctgaccctgccccaggactgccgggactttgtgcacagcctgaagatgaggagcaaatatgccctcttcctggtgtttgtggtgattgtgtttgtgttcatcgagaaggagaacaagatcatcagccgggtgtctgacaagctgaagcagatcccccaggccctggctgatgccaacagcacagatcctgccctgatcctggctgaaaatgccagcctgctgagcctgtctgagctggacagcgccttcagccagctgcagagccggctgaggaacctgagcctgcagctgggcgtggagcccgccatggaggccgccggggaggaggaggaggagcagaggaaggaggaggagccccccaggcctgctgtggccggcccccggcggcacgtgctgctgatggccaccaccaggacaggcagcagctttgtgggggagttcttcaaccagcagggcaacatcttctacctgtttgagcccctgtggcacatcgagaggacagtgtcctttgagcccggcggggccaatgctgctggcagcgccctggtgtacagagatgtgctgaagcagctgttcctgtgtgacctgtatgtgctggagcacttcatcacccccctgcctgaggaccacctgacccagttcatgttcagaagaggcagcagccgcagcctgtgtgaggaccctgtgtgcaccccatttgtgaagaaggtgtttgagaagtaccactgcaagaacagaagatgtggccccctgaatgtgaccctggccgctgaggcctgcaggaggaaggagcacatggccctgaaggctgtgcgcatccggcagctggagttcctgcagcccctggccgaggacccccggctggacctgcgggtcatccagctggtgcgggaccccagggctgtgctggccagcaggatggtggcctttgctgggaagtacaagacctggaagaagtggctggatgatgagggccaggacggcctgcgggaggaggaggtgcagaggctgcggggcaactgtgagagcatccggctgtctgctgagctgggcctgcggcagcctgcctggctgcggggccgctacatgctggtgcgctatgaagatgtggcccggggccccctgcagaaggcccgggagatgtacagatttgctggcatccccctgaccccccaggtggaggactggatccagaagaacacccaggccgcccatgatggcagcggcatctacagcacccagaagaacagcagcgagcagtttgagaagtggaggttctccatgcccttcaagctggcccaggtggtgcaggccgcctgtggccctgccatgaggctgtttggctacaagctggccagagatgctgctgccctgaccaacagatctgtgtccctgctggaggagcggggcaccttctgggtgacctag

SEQ ID NO: 146168 - DNA, 1236 bp, synthetic construct
  misc_feature 1..1236: note = Description of Artificial Sequence: Synthetic coding sequence
  source 1..1236: mol_type = other DNA
atgcagtgctcctggaaggctgtgctgctgctggccctggccagcatcgccatccagtacacagccatccgcaccttcaccgccaagagcttccacacctgccccggcctggccgaggccggcctggccgagcggctgtgtgaggagagccccacctttgcctacaacctgagcaggaagacccacatcctgatcctggccaccaccaggagcggcagcagctttgtgggccagctgttcaaccagcacctggatgtgttctacctgtttgagcccctgtaccacgtgcagaacaccctcatcccccgcttcacccagggcaagagccctgctgacagaagagtgatgctgggcgccagccgggacctgctgcggagcctgtatgactgtgacctgtacttcctggagaactacatcaagcccccacctgtgaaccacaccacagaccgcatcttcagaagaggagccagccgggtgctgtgcagcaggcctgtgtgtgaccccccaggccctgctgacctggtgctggaggagggggactgtgtgaggaaatgtggcctgctgaacctgactgtggccgctgaggcctgccgggagaggagccacgtggccatcaagacagtgcgggtgcctgaggtgaatgacctgcgggccctggtggaggacccccggctgaacctgaaggtgatccagctggtgcgggacccccggggcatcctggccagccgctctgagaccttccgggacacctaccgcctgtggaggctgtggtacggcaccggcaggaagccctacaacctggatgtgacccagctgaccaccgtgtgtgaggacttcagcaacagcgtgtccacaggcctgatgaggcctccctggctgaagggcaagtacatgctggtgcgctatgaggacctggccaggaaccccatgaagaagacagaggagatctacggcttcctgggcatccccctggacagccacgtggcccgctggatccagaacaacaccaggggggaccccaccctgggcaagcacaagtatggaacagtgagaaattctgctgccacagctgagaagtggaggttccggctgtcctatgacatcgtggcctttgcccagaatgcctgccagcaggtgctggcccagctgggctacaagattgctgccagcgaggaggagctgaagaaccccagcgtgtccctggtggaggagcgggacttccggcccttctcctag

SEQ ID NO: 146169 - DNA, 1131 bp, synthetic construct
  misc_feature 1..1131: note = Description of Artificial Sequence: Synthetic coding sequence
  source 1..1131: mol_type = other DNA
atgttcccccggcccctgacccccctggccgccccaaatggagctgagcccctgggccgggccctgcggcgggcccccctgggccgggcccgggccggcctgggcggcccccccctgctgctgcccagcatgctgatgtttgctgtgattgtggccagcagcggcctgctgctgatgattgaaagaggcatcctggccgagatgaagcccctgcccctgcaccccccaggccgggagggcacagcctggaggggcaaggcccccaagccaggcggcctgagcctgcgggctggagatgctgacctgcaggtgcggcaggatgtgaggaacagaaccctgcgggctgtgtgtggccagcccggcatgccccgggacccctgggacctgcctgtgggccagaggaggaccctgctgcggcacatcctggtgtctgaccgctaccgcttcctgtactgctacgtgcccaaggtggcctgcagcaactggaagagggtgatgaaggtgctggccggcgtgctggacagcgtggatgtgcggctgaagatggaccacagaagtgacctggtgttcctggccgacctgcggcctgaggagatccgctaccgcctgcagcactacttcaagttcctgtttgtgcgggagcccctggagcggctgctgagcgcctacagaaacaagtttggagagatccgggagtaccagcagagatatggagctgagatcgtgcggcgctacagagctggagctggccccagccctgctggagatgatgtgaccttccctgagttcctgcgctacctggtggatgaggaccctgagaggatgaatgagcactggatgcctgtgtaccacctgtgccagccctgtgctgtgcactatgactttgtgggcagctatgagcggctggaggctgatgccaaccaggtgctggagtgggtgcgggccccaccccacgtgcgcttccctgcccggcaggcctggtacagacctgccagccctgagagcctgcactaccacctgtgcagcgccccccgggccctgctgcaggatgtgctgcccaagtacatcctggacttcagcctgtttgcctaccccctgcccaacgtgaccaaggaggcctgccagcagtag

SEQ ID NO: 146170 - DNA, 1275 bp, synthetic construct
  misc_feature 1..1275: note = Description of Artificial Sequence: Synthetic coding sequence
  source 1..1275: mol_type = other DNA
atgaccctgcggcccggcaccatgaggctggcctgcatgttcagcagcatcctgctgtttggagctgctggcctgctgctcttcatcagcctgcaggaccccacagagctggccccccagcaggtgcccggcatcaagttcaacatccggccccggcagccccaccacgacctgcccccaggcggcagccaggatggagacctgaaggagcccacagagcgggtgacccgggacctgagcagcggggccccccggggcaggaacctgcctgccccagaccagccccagccccccctgcagaggggcacccggctgcggctgcggcagaggagaagaaggctgctgatcaagaagatgcctgctgctgccaccatcccagccaacagcagtgatgcccccttcatccggcccggccctggcaccctggatggccgctgggtgtccctgcacaggagccagcaggagaggaagagggtgatgcaggaggcctgtgccaagtaccgggccagcagcagcagaagagctgtgacccccaggcatgtgagccgcatctttgtggaggacagacaccgggtgctgtactgtgaggtgcccaaggccggctgcagcaactggaagagggtgctgatggtgctggccggcctggccagcagcacagctgacatccagcacaacacagtgcactacggcagcgccctgaagaggctggacacctttgaccggcagggcatcctgcaccggctgagcacctacaccaagatgctgtttgtgcgggagccctttgagcggctggtgtctgccttccgggacaagtttgagcaccccaacagctactaccaccctgtgtttgggaaggccatcctggcccgctaccgggccaatgccagccgggaggccctgaggacaggcagcggcgtgcgcttccctgagtttgtgcagtacctgctggatgtgcacaggcctgtgggcatggacatccactgggaccacgtgtcccggctgtgcagcccctgcctgattgattatgactttgtgggcaagtttgagagcatggaggatgatgccaacttcttcctgagcctcatccgggcccccaggaacctgaccttcccccgcttcaaggacagacacagccaggaggcccggaccacagccagaattgcccaccagtactttgcccagctgagcgccctgcagaggcagaggacctatgacttctactacatggactacctgatgttcaactacagcaagccctttgctgacctgtactag

SEQ ID NO: 146171 - DNA, 1275 bp, synthetic construct; identical to SEQ ID NO: 146170
  misc_feature 1..1275: note = Description of Artificial Sequence: Synthetic coding sequence
  source 1..1275: mol_type = other DNA

SEQ ID NO: 146172 - DNA, 1275 bp, synthetic construct; identical to SEQ ID NO: 146170
  misc_feature 1..1275: note = Description of Artificial Sequence: Synthetic coding sequence
  source 1..1275: mol_type = other DNA

SEQ ID NO: 146173 - DNA, 1686 bp, synthetic construct
  misc_feature 1..1686: note = Description of Artificial Sequence: Synthetic coding sequence
  source 1..1686: mol_type = other DNA
atgaggcactgcatcaactgctgcatccagctgctgcctgatggagcccacaagcagcaggtgaactgccagggcggcccccaccacggccaccaggcctgccccacctgcaagggggagaacaagatcctcttccgggtggacagcaagcagatgaacctgctggccgtgctggaggtgaggacagagggcaatgaaaactggggcggcttcctgcgcttcaagaagggcaagcgctgcagcctggtgtttggcctcatcatcatgaccctggtgatggccagctacatcctgagcggggcccaccaggagctgctgatcagcagccccttccactatggaggcttccccagcaaccccagcctgatggattctgagaaccccagcgacaccaaggagcaccaccaccagagctctgtgaacaacatctcctacatgaaggactaccccagcatcaagctgatcatcaacagcatcaccaccagaattgagttcaccacccggcagctgcctgacctggaggacctgaagaagcaggagctgcacatgttttctgtcatccccaacaagttcctgcccaacagcaagagcccctgctggtatgaggagttcagcggccagaacaccacagacccctacctgaccaacagctatgtgctgtacagcaagcgcttccgcagcacctttgatgccctgaggaaggccttctggggccacctggcccacgcccacggcaagcacttccggctgcgctgcctgccccacttctacatcatcggccagcccaagtgtggcaccacagacctgtatgaccggctgcggctgcaccctgaggtgaagttcagcgccatcaaggagccccactggtggaccaggaagagatttggaattgtgcggctgagagatggcctgcgggaccgctaccctgtggaggactacctggacctgtttgacctggccgcccaccagatccaccagggcctgcaggccagcagcgccaaggagcagagcaagatgaacaccatcatcatcggggaggccagcgccagcaccatgtgggacaacaatgcctggaccttcttctatgacaacagcacagatggagagccccccttcctgacccaggacttcatccacgccttccagcccaatgcccggctcatcgtgatgctgcgggaccctgtggagcggctgtacagcgactacctgtactttgccagcagcaacaagtctgcagatgacttccacgagaaggtgacagaggccctgcagctgtttgagaactgcatgctggactacagcctgcgggcctgtgtgtacaacaacaccctgaacaatgccatgcctgtgcggctgcaggtgggcctgtatgctgtgtacctgctggactggctgtctgtgtttgacaagcagcagttcctgatcctgcggctggaggaccacgccagcaatgtgaagtacaccatgcacaaggtgttccagttcctgaacctgggccccctgtctgagaagcaggaggccctgatgaccaagagccctgccagcaatgcccggcggccagaagatagaaacctgggccccatgtggcccatcacccagaagatcctgcgggacttctaccggcccttcaatgcccggctggcccaggtgctggctgatgaggcctttgcctggaagaccacctag

SEQ ID NO: 146174 - DNA, 1521 bp, synthetic construct
  misc_feature 1..1521: note = Description of Artificial Sequence: Synthetic coding sequence
  source 1..1521: mol_type = other DNA
atgaggcactgcatcaactgctgcatccagctgctgcctgatggagcccacaagcagcaggtgaactgccagggcggcccccaccacggccaccaggcctgccccacctgcaagggggagaacaagatcctcttccgggtggacagcaagcagatgaacctgctggccgtgctggaggtgaggacagagggcaatgaaaactggggcggcttcctgcgcttcaagaagggcaagcgctgcagcctggtgtttggcctcatcatcatgaccctggtgatggccagctacatcctgagcggggcccaccaggagctgctgatcagcagccccttccactatggaggcttccccagcaaccccagcctgatggattctgagaaccccagcgacaccaaggagcaccaccaccagagctctgtgaacaacatctcctacatgaaggactaccccagcatcaagctgatcatcaacagcatcaccaccagaattgagttcaccacccggcagctgcctgacctggaggacctgaagaagcaggagctgcacatgttttctgtcatccccaacaagttcctgcccaacagcaagagcccctgctggtatgaggagttcagcggccagaacaccacagacccctacctgaccaacagctatgtgctgtacagcaagcgcttccgcagcacctttgatgccctgaggaaggccttctggggccacctggcccacgcccacggcaagcacttccggctgcgctgcctgccccacttctacatcatcggccagcccaagtgtggcaccacagacctgtatgaccggctgcggctgcaccctgaggtgaagttcagcgccatcaaggagccccactggtggaccaggaagagatttggaattgtgcggctgagagatggcctgcgggaccgctaccctgtggaggactacctggacctgtttgacctggccgcccaccagatccaccagggcctgcaggccagcagcgccaaggagcagagcaagatgaacaccatcatcatcggggaggccagcgccagcaccatgtgggacaacaatgcctggaccttcttctatgacaacagcacagatggagagccccccttcctgacccaggacttcatccacgccttccagcccaatgcccggctcatcgtgatgctgcgggaccctgtggagcggctgtacagcgactacctgtactttgccagcagcaacaagtctgcagatgacttccacgagaaggtgacagaggccctgcagctgtttgagaactgcatgctggactacagcctgcgggcctgtgtgtacaacaacaccctgaacaatgccatgcctgtgtgcaccccaccacccaggaccccccgggccggcccctggcagaaggagctggtgtgctgctactatgccagcggcatcgtgggcctgcgcttcagcattggaacagagaggtctgtgctgatgtgcaagtgctgcagccccctcttcatggatgtgaaggcagaaaattag

SEQ ID NO: 146175 - DNA, 624 bp, synthetic construct
  misc_feature 1..624: note = Description of Artificial Sequence: Synthetic coding sequence
  source 1..624: mol_type = other DNA
atgaggcactgcatcaactgctgcatccagctgctgcctgatggagcccacaagcagcaggtgaactgccagggcggcccccaccacggccaccaggcctgccccacctgcaagggggagaacaagatcctcttccgggtggacagcaagcagatgaacctgctggccgtgctggaggtgaggacagagggcaatgaaaactggggcggcttcctgcgcttcaagaagggcaagcgctgcagcctggtgtttggcctcatcatcatgaccctggtgatggccagctacatcctgagcggggcccaccaggagctgctgatcagcagccccttccactatggaggcttccccagcaaccccagcctgatggattctgagaaccccagcgacaccaaggagcaccaccaccagagctctgtgaacaacatctcctacatgaaggactaccccagcatcaagctgatcatcaacagcatcaccaccagaattgagttcaccacccggcagctgcctgacctggaggacctgaagaagcaggagctgcacatgttttctgtcatccccaacaagttcctgcccaagcacaatgcccaggccgagctgggcctgaatgtggcctgctag

SEQ ID NO: 146176 - DNA, 1686 bp, synthetic construct; identical to SEQ ID NO: 146173
  misc_feature 1..1686: note = Description of Artificial Sequence: Synthetic coding sequence
  source 1..1686: mol_type = other DNA

SEQ ID NO: 146177 - DNA, 1449 bp, synthetic construct
  misc_feature 1..1449: note = Description of Artificial Sequence: Synthetic coding sequence
  source 1..1449: mol_type = other DNA
atgaggcactgcatcaactgctgcatccagctgctgcctgatggagcccacaagcagcaggtgaactgccagggcggcccccaccacggccaccaggcctgccccacctgcaagggggagaacaagatcctcttccgggtggacagcaagcagatgaacctgctggccgtgctggaggtgaggacagagggcaatgaaaactggggcggcttcctgcgcttcaagaagggcaagcgctgcagcctggtgtttggcctcatcatcatgaccctggtgatggccagctacatcctgagcggggcccaccaggagctgctgatcagcagccccttccactatggaggcttccccagcaaccccagcctgatggattctgagaaccccagcgacaccaaggagcaccaccaccagagctctgtgaacaacatctcctacatgaaggactaccccagcatcaagctgatcatcaacagcatcaccaccagaattgagttcaccacccggcagctgcctgacctggaggacctgaagaagcaggagctgcacatgttttctgtcatccccaacaagttcctgcccaacagcaagagcccctgctggtatgaggagttcagcggccagaacaccacagacccctacctgaccaacagctatgtgctgtacagcaagcgcttccgcagcacctttgatgccctgaggaaggccttctggggccacctggcccacgcccacggcaagcacttccggctgcgctgcctgccccacttctacatcatcggccagcccaagtgtggcaccacagacctgtatgaccggctgcggctgcaccctgaggtgaagttcagcgccatcaaggagccccactggtggaccaggaagagatttggaattgtgcggctgagagatggcctgcgggaccgctaccctgtggaggactacctggacctgtttgacctggccgcccaccagatccaccagggcctgcaggccagcagcgccaaggagcagagcaagatgaacaccatcatcatcggggaggccagcgccagcaccatgtgggacaacaatgcctggaccttcttctatgacaacagcacagatggagagccccccttcctgacccaggacttcatccacgccttccagcccaatgcccggctcatcgtgatgctgcgggaccctgtggagcggctgtacagcgactacctgtactttgccagcagcaacaagtctgcagatgacttccacgagaaggtgacagaggccctgcagctgtttgagaactgcatgctggactacagcctgcgggcctgtgtgtacaacaacaccctgaacaatgccatgcctgtgtgcaccccacctcctgtgcccccagagctggcccctggccgccgctcctggtttgtggtgatcatgcaggccgccctgtgggtgtgtgtgtctgcctag

SEQ ID NO: 146178 - DNA, 1236 bp, synthetic construct
  misc_feature 1..1236: note = Description of Artificial Sequence: Synthetic coding sequence
  source 1..1236: mol_type = other DNA
atgggcatgagggcccgggtgcccaaggtggcccacagcaccaggaggcctcctgctgccaggatgtggctgccccgcttcagcagcaagacagtgacagtgctgctgctggcccagaccacctgcctgctgctcttcatcatcagcaggcctggccccagcagccctgctggaggagaggacagagtgcacgtgctggtgctgagctcctggaggagcggcagcagcttcctgggccagctgttcagccagcacccagatgtgttctacctgatggagcccgcctggcacgtgtggaccaccctgagccagggcagcgctgccaccctgcacatggctgtgcgggacctgatgaggagcatcttcctgtgtgacatggatgtgtttgatgcctacatgccccagagcaggaacctgagcgccttcttcaactgggccaccagccgggccctgtgcagccccccagcctgcagcgccttcccccggggcaccatcagcaagcaggatgtgtgcaagaccctgtgcacccggcagcccttcagcctggcccgggaggcctgccgcagctacagccacgtggtgctgaaggaggtgcgcttcttcaacctgcaggtgctgtaccccctgctgagtgaccctgccctgaacctgagaattgtgcacctggtgcgggaccccagggctgtgctgcggagccgggaggccgccggccccatcctggcccgggacaatggcatcgtgctgggcaccaacgggaagtgggtggaggccgacccccacctgcggctcatccgggaggtgtgccgcagccacgtgagaattgctgaggccgccaccctgaagcccccacccttcctgcggggccgctaccgcctggtgcgctttgaggacctggcccgggagcccctggccgagatccgggccctgtatgccttcaccggcctgaccctgaccccccagctggaggcctggatccacaacatcacccacggcagcggcatcggcaagcccatcgaggccttccacaccagcagcagaaatgccagaaatgtgtcccaggcctggaggcatgccctgcccttcaccaagatcctgcgggtgcaggaggtgtgtgccggggccctgcagctgctgggctacagacctgtgtacagcgctgaccagcagagggacctgaccctggacctggtgctgccccggggccctgaccacttctcctgggccagcccagactag

SEQ ID NO: 146179 - DNA, 1254 bp, synthetic construct
  misc_feature 1..1254: note = Description of Artificial Sequence: Synthetic coding sequence
  source 1..1254: mol_type = other DNA
atgagccgccacctgccctggatctgtgaccagcgctgcagcagccccagcagccctggccgctggcccccagctgccaggatgtggctgccccgcttcagcagcaagacagtgacagtgctgctgctggcccagaccacctgcctgctgctcttcatcatcagcaggcctggccccagcagccctgctggaggagaggacagagtgcacgtgctggtgctgagctcctggaggagcggcagcagcttcctgggccagctgttcagccagcacccagatgtgttctacctgatggagcccgcctggcacgtgtggaccaccctgagccagggcagcgctgccaccctgcacatggctgtgcgggacctgatgaggagcatcttcctgtgtgacatggatgtgtttgatgcctacatgccccagagcaggaacctgagcgccttcttcaactgggccaccagccgggccctgtgcagccccccagcctgcagcgccttcccccggggcaccatcagcaagcaggatgtgtgcaagaccctgtgcacccggcagcccttcagcctggcccgggaggcctgccgcagctacagccacgtggtgctgaaggaggtgcgcttcttcaacctgcaggtgctgtaccccctgctgagtgaccctgccctgaacctgagaattgtgcacctggtgcgggaccccagggctgtgctgcggagccgggaggccgccggccccatcctggcccgggacaatggcatcgtgctgggcaccaacgggaagtgggtggaggccgacccccacctgcggctcatccgggaggtgtgccgcagccacgtgagaattgctgaggccgccaccctgaagcccccacccttcctgcggggccgctaccgcctggtgcgctttgaggacctggcccgggagcccctggccgagatccgggccctgtatgccttcaccggcctgaccctgaccccccagctggaggcctggatccacaacatcacccacggcagcggcatcggcaagcccatcgaggccttccacaccagcagcagaaatgccagaaatgtgtcccaggcctggaggcatgccctgcccttcaccaagatcctgcgggtgcaggaggtgtgtgccggggccctgcagctgctgggctacagacctgtgtacagcgctgaccagcagagggacctgaccctggacctggtgctgccccggggccctgaccacttctcctgggccagcccagactag

SEQ ID NO: 146180 - DNA, 1188 bp, synthetic construct
  misc_feature 1..1188: note = Description of Artificial Sequence: Synthetic coding sequence
  source 1..1188: mol_type = other DNA
atgtggctgccccgggtgagcagcacagctgtgacagccctgctgctggcccagaccttcctgctgctcttcctggtgtccaggcctggccccagcagccctgctggaggagaggcccgggtgcacgtgctggtgctgagctcctggaggagcggcagcagctttgtgggccagctgttcaaccagcacccagatgtgttctacctgatggagcccgcctggcacgtgtggaccaccctgagccagggcagcgctgccaccctgcacatggctgtgcgggacctggtgcgcagcgtcttcctgtgtgacatggatgtgtttgatgcctacctgccctggaggaggaacctgagtgacctcttccagtgggccgtgtcccgggccctgtgcagccccccagcctgcagcgccttccccaggggggccatcagcagcgaggccgtgtgcaagcccctgtgtgcccggcagagcttcaccctggcccgggaggcctgccgcagctacagccacgtggtgctgaaggaggtgcgcttcttcaacctgcaggtgctgtaccccctgctgagtgaccctgccctgaacctgagaattgtgcacctggtgcgggaccccagggctgtgctgcggagccgggagcagacagccaaggccctggcccgggacaatggcatcgtgctgggcaccaacggcacctgggtggaggccgaccccggcctgcgggtggtgcgggaggtgtgccgcagccacgtgagaattgctgaggccgccaccctgaagcccccacccttcctgcggggccgctaccgcctggtgcgctttgaggacctggcccgggagcccctggccgagatccgggccctgtatgccttcaccggcctgagcctgaccccccagctggaggcctggatccacaacatcacccacggcagcggccctggggcccggcgggaggccttcaagaccagcagcagaaatgccctgaatgtgtcccaggcctggaggcatgccctgccctttgccaagatcagaagagtgcaggagctgtgtgccggggccctgcagctgctgggctacagacctgtgtacagtgaagatgagcagaggaacctggccctggacctggtgctgccccggggcctgaatggcttcacctgggccagcagcacagccagccaccccaggaactag

SEQ ID NO: 146181 - DNA, 1188 bp, synthetic construct; identical to SEQ ID NO: 146180
  misc_feature 1..1188: note = Description of Artificial Sequence: Synthetic coding sequence
  source 1..1188: mol_type = other DNA

SEQ ID NO: 146182 - DNA, 1461 bp, synthetic construct
  misc_feature 1..1461: note = Description of Artificial Sequence: Synthetic coding sequence
  source 1..1461: mol_type = other DNA
atgaagggcagaagaagaagaagaagagagtactgcaagtttgccctgctgctggtgctgtacaccctggtgctgctgctggtgcccagcgtgctggatggcggcagagatggagacaagggagctgagcactgccccggcctgcagaggagcctgggcgtgtggagcctggaggccgctgctgctggggagcgggagcagggcgctgaggcccgggctgctgaggagggcggggccaaccagagcccccgcttccccagcaacctgagcggggctgtgggggaggccgtgtcccgggagaagcagcacatctacgtgcacgccacctggaggacaggcagcagcttcctgggggagctgttcaaccagcacccagatgtgttctacctgtatgagcccatgtggcacctgtggcaggccctgtacccaggagatgctgagagcctgcagggcgccctgcgggacatgctgcggagcctcttccgctgtgacttctctgtgctgcggctgtatgcccctcctggggaccctgctgcccgggccccagacacagccaacctgaccacagctgccctcttccgctggaggaccaacaaggtgatctgcagcccccccctgtgccctggggccccccgggcccgggcagaggtgggcctggtggaggacacagcctgtgagaggagctgcccccctgtggccatccgggccctggaggccgagtgcaggaagtaccctgtggtggtgatcaaggatgtgcggctgctggacctgggcgtgctggtgcccctgctgcgggaccccggcctgaacctgaaggtggtgcagctgttccgggaccccagggctgtgcacaacagccggctgaagagccggcagggcctgctgcgggagagcatccaggtgctgcggacccggcagagaggagaccgcttccaccgggtgctgctggcccacggcgtgggcgcccggcctgggggccagagccgggccctgcctgctgcccccagggctgacttcttcctgaccggggccctggaggtgatctgtgaggcctggctgcgggacctgctgtttgcccggggggccccagcctggctgcggcggcgctacctgcggctgcgctatgaggacctggtgcggcagccccgggcccagctgcggcggctgctgcgcttcagcggcctgcgggccctggccgccctggatgcctttgccctgaacatgaccaggggggccgcctacggggctgaccggcccttccacctgagcgccagagatgcccgggaggccgtgcacgcctggagggagcggctgagccgggagcaggtgcggcaggtggaggccgcctgtgccccagccatgaggctgctggcctaccccaggtctggagaggagggagatgctgagcagccccgggagggggagacccccctggagatggatgctgatggagccacctag

SEQ ID NO: 146183 - DNA, 1593 bp, synthetic construct
  misc_feature 1..1593: note = Description of Artificial Sequence: Synthetic coding sequence
  source 1..1593: mol_type = other DNA
atgagccgcagcccccagagggccctgcccccaggggccctgccccggctgctgcaggccgccccagctgctgccccccgggccctgctgccccagtggcccaggaggcctggaagacgctggccagccagccccctgggcatgaaggtgttccggaggaaggccctggtgctgtgtgccggctacgccctgctgctggtgctgaccatgctgaacctgctggactacaagtggcacaaggagcccctgcagcagtgcaacccagatggccccctgggcgctgctgctggagctgctgggggctcctggggccggcccggccccccacctgctggccccccccgggcccacgcccggctggacctgcggaccccctaccggcccccagctgctgctgtgggcgccgccccagctgctgctgctggcatggccggcgtggccgcccctcctggaaatggcacccggggcactggaggagtgggggacaagaggcagctggtgtatgtgttcaccacctggaggagcggcagcagcttcttcggggagctgttcaaccagaaccctgaggtgttcttcctgtatgagcctgtgtggcacgtgtggcagaagctgtacccaggagatgctgtgtccctgcagggcgccgcccgggacatgctgagcgccctgtaccgctgtgacctgtctgtgttccagctgtacagccctgctggcagcggcggcaggaacctgaccaccctgggcatctttggagctgccaccaacaaggtggtgtgcagcagccccctgtgcccagcctacaggaaggaggtggtgggcctggtggatgacagagtgtgcaagaagtgccccccccagaggctggccaggtttgaggaggagtgcaggaagtaccgcaccctggtgatcaagggcgtgcgggtgtttgatgtggccgtgctggcccccctgctgcgggaccctgccctggacctgaaggtgatccacctggtgcgggaccccagggctgtggccagcagccgcatccgcagccgccacggcctcatccgggagagcctgcaggtggtgcgcagccgggacccccgggcccacaggatgcccttcctggaggccgccggccacaagctgggcgccaagaaggagggcgtgggcggccctgctgactaccacgccctgggcgccatggaggtgatctgcaacagcatggccaagaccctgcagacagccctgcagcccccagactggctgcagggccactacctggtggtgcgctatgaggacctggtgggggaccctgtgaagaccctgcggcgggtgtatgactttgtgggcctgctggtgtccccagagatggagcagtttgccctgaacatgaccagcggcagcggcagcagcagcaagccctttgtggtgtctgccagaaatgccacccaggccgccaatgcctggaggacagccctgaccttccagcagatcaagcaggtggaggagttctgctaccagcccatggctgtgctgggctatgaaagagtgaacagccctgaggaggtgaaggacctgagcaagaccctgctgaggaagccccggctgtag

SEQ ID NO: 146184 - DNA, 1071 bp, synthetic construct
  misc_feature 1..1071: note = Description of Artificial Sequence: Synthetic coding sequence
  source 1..1071: mol_type = other DNA
atgcaccaccagtggctgctgctggccgcctgcttctgggtgatcttcatgttcatggtggccagcaagttcatcaccctgaccttcaaggaccctgatgtgtacagcgccaagcaggagttcctgttcctgaccaccatgcctgaggtgaggaagctgcctgaggagaagcacatccctgaggagctgaagcccaccgggaaggagctgcctgacagccagctggtgcagcccctggtgtacatggagcggctggagctgatcagaaatgtgtgcagagatgatgccctgaagaacctgagccacacccctgtgtccaagtttgtgctggaccgcatctttgtgtgtgacaagcacaagatcctcttctgccagacccccaaggtgggcaacacccagtggaagaaggtgctgattgtgctgaatggagccttcagcagcattgaggagatcccagaaaatgtggtgcatgaccacgagaagaatggcctgccccggctgagcagcttcagtgatgctgagatccagaagaggctgaagacctacttcaagttcttcatcgtgcgggacccctttgagcggctcatcagcgccttcaaggacaagtttgtgcacaaccccaggtttgagccctggtacagacatgaaattgcccctggcatcatcaggaagtacagaagaaacagaacagagacccggggcatccagtttgaggactttgtgcgctacctgggggaccccaaccaccgctggctggacctgcagtttggagaccacatcatccactgggtgacctacgtggagctgtgtgccccctgtgagatcatgtacagcgtcatcggccaccacgagaccctggaggatgatgccccctacatcctgaaggaggccggcatcgaccacctggtgtcctaccccaccatccccccaggcatcaccgtgtacaacagaaccaaggtggagcactacttcctgggcatcagcaagagggacatccggcggctgtatgccaggtttgaaggagacttcaagctgtttggctaccagaagccagacttcctgctgaactag

SEQ ID NO: 146185 - DNA, 426 bp, synthetic construct
  misc_feature 1..426: note = Description of Artificial Sequence: Synthetic coding sequence
  source 1..426: mol_type = other DNA
atgcaccaccagtggctgctgctggccgcctgcttctgggtgatcttcatgttcatggtggccagcaagttcatcaccctgaccttcaaggaccctgatgtgtacagcgccaagcaggagttcctgttcctgaccaccatgcctgaggtgaggaagctgcctgaggagaagcacatccctgaggagctgaagcccaccgggaaggagctgcctgacagccagctggtgcagcccctggtgtacatggagcggctggagctgatcagaaatgtgtgcagagatgatgccctgaagaacctgagccacacccctgtgtccaagtttgtgctggaccgcatctttgtgtgtgacaagcacaagatcctcttctgccagacccccaaggtgggcaacacccagtggaagaaggtgctgattgtgctgtag

SEQ ID NO: 146186 - DNA, 1071 bp, synthetic construct; identical to SEQ ID NO: 146184
  misc_feature 1..1071: note = Description of Artificial Sequence: Synthetic coding sequence
  source 1..1071: mol_type = other DNA

SEQ ID NO: 146187 - DNA, 195 bp, synthetic construct
  misc_feature 1..195: note = Description of Artificial Sequence: Synthetic coding sequence
  source 1..195: mol_type = other DNA
atgcaccaccagtggctgctgctggccgcctgcttctgggtgatcttcatgttcatggtggccagcaagttcatcaccctgaccttcaaggaccctgatgtgtacagcgccaagcaggagttcctgttcctgaccaccatgcctgaggtgaggaagctgcctgaggagaagcacatccctgaggagctgaagtag

SEQ ID NO: 146188 - DNA, 402 bp, synthetic construct
  misc_feature 1..402: note = Description of Artificial Sequence: Synthetic coding sequence
  source 1..402: mol_type = other DNA
atgcaccaccagtggctgctgctggccgcctgcttctgggtgatcttcatgttcatggtggccagcaagttcatcaccctgaccttcaaggaccctgatgtgtacagcgccaagcaggagttcctgttcctgaccaccatgcctgaggtgaggaagctgcctgaggagaagcacatccctgaggagctgaagcccaccgggaaggagctgcctgacagccagctggtgcagcccctggtgtacatggagcggctggagctgatcagaaatgtgtgcagagatgatgccctgaagaacctgagccacacccctgtgtccaagtttgtgctggaccgcatctttgtgtgtgacaagcacaagatcctcttctgccagacccccaaggtgggcaacacccagtag

SEQ ID NO: 146189 - DNA, 258 bp, synthetic construct
  misc_feature 1..258: note = Description of Artificial Sequence: Synthetic coding sequence
  source 1..258: mol_type = other DNA
atgcaccaccagtggctgctgctggccgcctgcttctgggtgatcttcatgttcatggtggccagcaagttcatcaccctgaccttcaaggaccctgatgtgtacagcgccaagcaggagttcctgttcctgaccaccatgcctgaggtgaggaagctgcctgaggagaagcacatccctgaggagctgaagcccaccgggaaggagctgcctgacagccagctggtgcagcccctggtgtacatggagcggctgtag

SEQ ID NO: 146190 - DNA, 102 bp, synthetic construct
  misc_feature 1..102: note = Description of Artificial Sequence: Synthetic coding sequence
  source 1..102: mol_type = other DNA
atgcaccaccagtggctgctgctggccgcctgcttctgggtgatcttcatgttcatggtggccagcaagttcatcaccctgaccttcaaggaccctgactag

SEQ ID NO: 146191 - DNA, 1215 bp, synthetic construct
  misc_feature 1..1215: note = Description of Artificial Sequence: Synthetic coding sequence
  source 1..1215: mol_type = other DNA
atgcagaggaaggccggcaagaaggagcacgtgcagctgcgggacaagaggaaccaggagccccagttccggggcaacacagccaggaaatgtgagccccaggccgctgagggccgggtgtctgagtggctgcgctgtgacaacatgcaccaccagtggctgctgctggccgcctgcttctgggtgatcttcatgttcatggtggccagcaagttcatcaccctgaccttcaaggaccctgatgtgtacagcgccaagcaggagttcctgttcctgaccaccatgcctgaggtgaggaagctgcctgaggagaagcacatccctgaggagctgaagcccaccgggaaggagctgcctgacagccagctggtgcagcccctggtgtacatggagcggctggagctgatcagaaatgtgtgcagagatgatgccctgaagaacctgagccacacccctgtgtccaagtttgtgctggaccgcatctttgtgtgtgacaagcacaagatcctcttctgccagacccccaaggtgggcaacacccagtggaagaaggtgctgattgtgctgaatggagccttcagcagcattgaggagatcccagaaaatgtggtgcatgaccacgagaagaatggcctgccccggctgagcagcttcagtgatgctgagatccagaagaggctgaagacctacttcaagttcttcatcgtgcgggacccctttgagcggctcatcagcgccttcaaggacaagtttgtgcacaaccccaggtttgagccctggtacagacatgaaattgcccctggcatcatcaggaagtacagaagaaacagaacagagacccggggcatccagtttgaggactttgtgcgctacctgggggaccccaaccaccgctggctggacctgcagtttggagaccacatcatccactgggtgacctacgtggagctgtgtgccccctgtgagatcatgtacagcgtcatcggccaccacgagaccctggaggatgatgccccctacatcctgaaggaggccggcatcgaccacctggtgtcctaccccaccatccccccaggcatcaccgtgtacaacagaaccaaggtggagcactacttcctgggcatcagcaagagggacatccggcggctgtatgccaggtttgaaggagacttcaagctgtttggctaccagaagccagacttcctgctgaactag

SEQ ID NO: 146192 - DNA, 786 bp, synthetic construct
  misc_feature 1..786: note = Description of Artificial Sequence: Synthetic coding sequence
  source 1..786: mol_type = other DNA
atggccagcccagactggggctatgatgacaagaatggacctgagcagtggagcaagctgtaccccatcgccaatggaaacaaccagagccctgtggacatcaagaccagcgagaccaagcatgacaccagcctgaagcccatctctgtgtcctacaacccagccacagccaaggagatcatcaacgtgggccacagcttccacgtgaactttgaggacaatgacaacagatctgtgctgaagggcggccccttcagtgacagctaccgcctcttccagttccacttccactggggcagcaccaatgagcacggcagcgagcacacagtggatggagtgaagtacagcgctgagctgcacgtggcccactggaacagcgccaagtacagcagcctggccgaggccgccagcaaggcagatggcctggccgtgattggagtgctgatgaaggtgggggaggccaaccccaagctgcagaaggtgctggatgccctgcaggccatcaagaccaagggcaagagggcccccttcaccaactttgaccccagcaccctgctgcccagcagcctggacttctggacctacccaggcagcctgacccacccccccctgtatgaatctgtgacctggatcatctgcaaggagagcatctctgtgtcctctgagcagctggcccagttccgcagcctgctgagcaatgtggagggggacaatgctgtgcccatgcagcacaacaaccggcccacccagcccctgaagggccgcacagtgcgggccagcttctag

SEQ ID NO: 146193 - DNA, 786 bp, synthetic construct; identical to SEQ ID NO: 146192
  misc_feature 1..786: note = Description of Artificial Sequence: Synthetic coding sequence
  source 1..786: mol_type = other DNA

SEQ ID NO: 146194 - DNA, 786 bp, synthetic construct; identical to SEQ ID NO: 146192
  misc_feature 1..786: note = Description of Artificial Sequence: Synthetic coding sequence
  source 1..786: mol_type = other DNA

SEQ ID NO: 146195 - DNA, 531 bp, synthetic construct
  misc_feature 1..531: note = Description of Artificial Sequence: Synthetic coding sequence
  source 1..531: mol_type = other DNA
atggccagcccagactggggctatgatgacaagaatggacctgagcagtggagcaagctgtaccccatcgccaatggaaacaaccagagccctgtggacatcaagaccagcgagaccaagcatgacaccagcctgaagcccatctctgtgtcctacaacccagccacagccaaggagatcatcaacgtgggccacagcttccacgtgaactttgaggacaatgacaacagatctgtgctgaagggcggccccttcagtgacagctaccgcctcttccagttccacttccactggggcagcaccaatgagcacggcagcgagcacacagtggatggagtgaagtacagcgctgagctgcacgtggcccactggaacagcgccaagtacagcagcctggccgaggccgccagcaaggcagatggcctggccgtgattggagtgctgatgaaggtgggggaggccaaccccaagctgcagaaggtgctggatgccctgcaggccatcaagaccaagggcaagagggccccctag

SEQ ID NO: 146196 - DNA, 756 bp, synthetic construct
  misc_feature 1..756: note = Description of Artificial Sequence: Synthetic coding sequence
  source 1..756: mol_type = other DNA
atggccagcccagactggggctatgatgacaagaatggacctgagcagtggagcaagctgtaccccatcgccaatggaaacaaccagagccctgtggacatcaagaccagcgagaccaagcatgacaccagcctgaagcccatctctgtgtcctacaacccagccacagccaaggagatcatcaacgtgggccacagcttccacgtgaactttgaggacaatgacaacagatctgtgctgaagggcggccccttcagtgacagctaccgcctcttccagttccacttccactggggcagcaccaatgagcacggcagcgagcacacagtggatggagtgaagtacagcgctgagctgcacgtggcccactggaacagcgccaagtacagcagcctggccgaggccgccagcaaggcagatggcctggccgtgattggagtgctgatgaaggtgggggaggccaaccccaagctgcagaaggtgctggatgccctgcaggccatcaagaccaagggcaagagggcccccttcaccaactttgaccccagcaccctgctgcccagcagcctggacttctggacctacccaggcagcctgacccacccccccctgtatgaatctgtgacctggatcatctgcaaggagagcatctctgtgtcctctgagcagctggcccagttccgcagcctgctgagcaatgtggagggggacaatgctgtgcccatgcagcacaacaaccggcccacccagccctag

SEQ ID NO: 146197 - DNA, 69 bp, synthetic construct
  misc_feature 1..69: note = Description of Artificial Sequence: Synthetic coding sequence
  source 1..69: mol_type = other DNA
atggccagcccagactggggctatgatgacaagaatggacctgagcagtggagcaagctgtacccctag

SEQ ID NO: 146198 - DNA, 450 bp, synthetic construct
  misc_feature 1..450: note = Description of Artificial Sequence: Synthetic coding sequence
  source 1..450: mol_type = other DNA
atggccagcccagactggggctatgatgacaagaatggacctgagcagtggagcaagctgtaccccatcgccaatggaaacaaccagagccctgtggacatcaagaccagcgagaccaagcatgacaccagcctgaagcccatctctgtgtcctacaacccagccacagccaaggagatcatcaacgtgggccacagcttccacgtgaactttgaggacaatgacaacagatctgtgctgaagggcggccccttcagtgacagctaccgcctcttccagttccacttccactggggcagcaccaatgagcacggcagcgagcacacagtggatggagtgaagtacagcgctgagctgcacgtggcccactggaacagcgccaagtacagcagcctggccgaggccgccagcaaggcagatggcctggccgtgattggagtgctgatgtag

SEQ ID NO: 146199 - DNA, 450 bp, synthetic construct; identical to SEQ ID NO: 146198
  misc_feature 1..450: note = Description of Artificial Sequence: Synthetic coding sequence
  source 1..450: mol_type = other DNA

SEQ ID NO: 146200 - DNA, 357 bp, synthetic construct
  misc_feature 1..357: note = Description of Artificial Sequence: Synthetic coding sequence
  source 1..357: mol_type = other DNA
atggccagcccagactggggctatgatgacaagaatggacctgagcagtggagcaagctgtaccccatcgccaatggaaacaaccagagccctgtggacatcaagaccagcgagaccaagcatgacaccagcctgaagcccatctctgtgtcctacaacccagccacagccaaggagatcatcaacgtgggccacagcttccacgtgaactttgaggacaatgacaacagatctgtgctgaagggcggccccttcagtgacagctaccgcctcttccagttccacttccactggggcagcaccaatgagcacggcagcgagcacacagtggatggagtgaagtacagcgctgagtag

SEQ ID NO: 146201 - DNA, 447 bp, synthetic construct
  misc_feature 1..447: note = Description of Artificial Sequence: Synthetic coding sequence
  source 1..447: mol_type = other DNA
atggccagcccagactggggctatgatgacaagaatggacctgagcagtggagcaagctgtaccccatcgccaatggaaacaaccagagccctgtggacatcaagaccagcgagaccaagcatgacaccagcctgaagcccatctctgtgtcctacaacccagccacagccaaggagatcatcaacgtgggccacagcttccacgtgaactttgaggacaatgacaacagatctgtgctgaagggcggccccttcagtgacagctaccgcctcttccagttccacttccactggggcagcaccaatgagcacggcagcgagcacacagtggatggagtgaagtacagcgctgagctgcacgtggcccactggaacagcgccaagtacagcagcctggccgaggccgccagcaaggcagatggcctggccgtgattggagtgctgtag

SEQ ID NO: 146202 - DNA, 786 bp, synthetic construct; identical to SEQ ID NO: 146192
  misc_feature 1..786: note = Description of Artificial Sequence: Synthetic coding sequence
  source 1..786: mol_type = other DNA

SEQ ID NO: 146203 - DNA, 300 bp, synthetic construct
  misc_feature 1..300: note = Description of Artificial Sequence: Synthetic coding sequence
  source 1..300: mol_type = other DNA
atggccagcccagactggggctatgatgacaagaatggacctgagcagtggagcaagctgtaccccatcgccaatggaaacaaccagagccctgtggacatcaagaccagcgagaccaagcatgacaccagcctgaagcccatctctgtgtcctacaacccagccacagccaaggagatcatcaacgtgggccacagcttccacgtgaactttgaggacaatgacaacagatctgtgctgaagggcggccccttcagtgacagctaccgcctcttccagttccacttccactggggctag

SEQ ID NO: 146204 - DNA, 786 bp, synthetic construct; identical to SEQ ID NO: 146192
  misc_feature 1..786: note = Description of Artificial Sequence: Synthetic coding sequence
  source 1..786: mol_type = other DNA

SEQ ID NO: 146205 - DNA, 786 bp, synthetic construct; identical to SEQ ID NO: 146192
  misc_feature 1..786: note = Description of Artificial Sequence: Synthetic coding sequence
  source 1..786: mol_type = other DNA

SEQ ID NO: 146206 - DNA, 783 bp, synthetic construct
  misc_feature 1..783: note = Description of Artificial Sequence: Synthetic coding sequence
  source 1..783: mol_type = other DNA
atgagccaccactggggctacggcaagcacaatggacctgagcactggcacaaggacttccccatcgccaagggggagcggcagagccctgtggacatcgacacccacacagccaagtatgaccccagcctgaagcccctgtctgtgtcctatgaccaggccaccagcctgcgcatcctgaacaacggccacgccttcaacgtggagtttgatgacagccaggacaaggctgtgctgaagggcggccccctggatggcacctaccgcctcatccagttccacttccactggggcagcctggatggccagggcagcgagcacacagtggacaagaagaagtatgctgctgagctgcacctggtgcactggaacaccaagtatggagactttgggaaggctgtgcagcagccagatggcctggccgtgctgggcatcttcctgaaggtgggcagcgccaagccaggcctgcagaaggtggtggatgtgctggacagcatcaagaccaagggcaagtctgctgacttcaccaactttgacccccggggcctgctgcctgagagcctggactactggacctacccaggcagcctgaccaccccacccctgctggagtgtgtgacctggatcgtgctgaaggagcccatctctgtgtcctctgagcaggtgctgaagttcaggaagctgaacttcaatggagagggggagcctgaggagctgatggtggacaactggaggcctgcccagcccctgaagaaccggcagatcaaggccagcttcaagtag

SEQ ID NO: 146207 - DNA, 783 bp, synthetic construct
  misc_feature 1..783: note = Description of Artificial Sequence: Synthetic coding sequence
  source 1..783: mol_type = other DNA
atggccaaggagtggggctacgccagccacaatggaccagaccactggcatgagctgttccccaatgccaagggggagaaccagagccctgtggagctgcacaccaaggacatcagacatgaccccagcctgcagccctggagcgtgtcctatgatggcggcagcgccaagaccatcctgaacaacgggaagacctgccgggtggtgtttgatgacacctatgaccgctccatgctgcggggcggccccctgcccggcccctaccgcctgcggcagttccacctgcactggggcagcagtgatgaccacggcagcgagcacacagtggatggagtgaagtatgctgctgagctgcacctggtgcactggaaccccaagtacaacaccttcaaggaggccctgaagcagagagatggcattgctgtgattggcatcttcctgaagattggacatgaaaatggagagttccagatcttcctggatgccctggacaagatcaagaccaagggcaaggaggcccccttcaccaagtttgaccccagctgcctcttccctgcctgccgggactactggacctaccagggcagcttcaccaccccaccctgtgaggagtgcatcgtgtggctgctgctgaaggagcccatgacagtgtccagtgaccagatggccaagctgcggagcctgctgagcagcgcagaaaatgagccccctgtgcccctggtgagcaactggaggcctccccagcccatcaacaacagagtggtgcgggccagcttcaagtag

SEQ ID NO: 146208 - DNA, 735 bp, synthetic construct
  misc_feature 1..735: note = Description of Artificial Sequence: Synthetic coding sequence
  source 1..735: mol_type = other DNA
atggccaaggagtggggctacgccagccacaatggaccagaccactggcatgagctgttccccaatgccaagggggagaaccagagcccctggagcgtgtcctatgatggcggcagcgccaagaccatcctgaacaacgggaagacctgccgggtggtgtttgatgacacctatgaccgctccatgctgcggggcggccccctgcccggcccctaccgcctgcggcagttccacctgcactggggcagcagtgatgaccacggcagcgagcacacagtggatggagtgaagtatgctgctgagctgcacctggtgcactggaaccccaagtacaacaccttcaaggaggccctgaagcagagagatggcattgctgtgattggcatcttcctgaagattggacatgaaaatggagagttccagatcttcctggatgccctggacaagatcaagaccaagggcaaggaggcccccttcaccaagtttgaccccagctgcctcttccctgcctgccgggactactggacctaccagggcagcttcaccaccccaccctgtgaggagtgcatcgtgtggctgctgctgaaggagcccatgacagtgtccagtgaccagatggccaagctgcggagcctgctgagcagcgcagaaaatgagccccctgtgcccctggtgagcaactggaggcctccccagcccatcaacaacagagtggtgcgggccagcttcaagtag

SEQ ID NO: 146209 - DNA, 954 bp, synthetic construct
  misc_feature 1..954: note = Description of Artificial Sequence: Synthetic coding sequence
  source 1..954: mol_type = other DNA
atggtggtgatgaacagcctgcgggtcatcctgcaggccagccctgggaagctgctgtggaggaagttccagatcccccgcttcatgcctgcccggccctgcagcctgtacacctgcacctacaagaccaggaacagagccctgcaccccctgtgggagagcgtggacctggtgcctggaggagaccggcagagccccatcaacatccgctggagggacagcgtgtatgaccccggcctgaagcccctgaccatctcctatgaccctgccacctgcctgcacgtgtggaacaacggctacagcttcctggtggagtttgaggacagcacagacaagagcgtcatcaagggcggccccctggagcacaactaccgcctgaagcagttccacttccactggggcgccattgatgcctggggcagcgagcacacagtggacagcaagtgcttccctgctgagctgcacctggtgcactggaatgctgtgcgctttgaaaattttgaagatgctgccctggaggagaatggcctggccgtcatcggggtcttcctgaagctgggcaagcaccacaaggagctgcagaagctggtggacaccctgcccagcatcaagcacaaggatgccctggtggagtttggcagctttgaccccagctgcctgatgcccacctgcccagactactggacctacagcggcagcctgaccaccccacccctgtctgagagcgtgacctggatcatcaagaagcagcctgtggaggtggaccatgaccagctggagcagttccgcaccctgctcttcaccagcgagggggagaaggagaagaggatggtggacaacttccggcccctgcagcccctgatgaacagaacagtgcgcagcagcttcagacatgactatgtgctgaatgtgcaggccaagcccaagccagccaccagccaggccaccccctag

SEQ ID NO: 146210 - DNA, 954 bp, synthetic construct; identical to SEQ ID NO: 146209
  misc_feature 1..954: note = Description of Artificial Sequence: Synthetic coding sequence
  source 1..954: mol_type = other DNA

SEQ ID NO: 146211 - DNA, 411 bp, synthetic construct
  misc_feature 1..411: note = Description of Artificial Sequence: Synthetic coding sequence
  source 1..411: mol_type = other DNA
atggtggtgatgaacagcctgcgggtcatcctgcaggccagccctgggaagctgctgtggaggaagttccagatcccccgcttcatgcctgcccggccctgcagcctgtacacctgcacctacaagaccaggaacagagccctgcaccccctgtgggagagcgtggacctggtgcctggaggagaccggcagagccccatcaacatccgctggagggacagcgtgtatgaccccggcctgaagcccctgaccatctcctatgaccctgccacctgcctgcacgtgtggaacaacggctacagcttcctggtggagtttgaggacagcacagacaagagcgtcatcaagggcggccccctggagcacaactaccgcctgaagcagttccacttccactggggcgccatctag

SEQ ID NO: 146212 - DNA, 231 bp, synthetic construct
  misc_feature 1..231: note = Description of Artificial Sequence: Synthetic coding sequence
  source 1..231: mol_type = other DNA
atggtggtgatgaacagcctgcgggtcatcctgcaggccagccctgggaagctgctgtggaggaagttccagatcccccgcttcatgcctgcccggccctgcagcctgtacacctgcacctacaagaccaggaacagagccctgcaccccctgtgggagagcgtggacctggtgcctggaggagaccggcagagccccatcaacatccgctggagggacagcgtgtactag

SEQ ID NO: 146213 - DNA, 540 bp, synthetic construct
  misc_feature 1..540: note = Description of Artificial Sequence: Synthetic coding sequence
  source 1..540: mol_type = other DNA
atgagggccctggtgctgctgctgagcctcttcctgctgggcggccaggcccagcacgtgtctgactggacctacagcgagggcgccctggatgaggcccactggccccagcactacccagcctgtggcggccagaggcagagccccatcaacctgcagaggaccaaggtgcgctacaaccccagcctgaagggcctgaacatgacaggctatgagacccaggccggggagttccccatggtgaacaacggccacacagactggcaggccgagctgttcctgcccagcctgagcagcccctgtggggagggcgccaagcacaagggccagaggcagtggctgtgcagccccagcctggacagctggtgggaggccatcattgatggcggcagcctgtgggccaccctggccgagtgtggcctgcgggcagagggccctgaggagggccgccacatggaggagaagagccctgccagccagggcgcctgcagcggcagccggctgcccatcagccggggcccctgcaccttcttcctgtag

SEQ ID NO: 146214 - DNA, 942 bp, synthetic construct
  misc_feature 1..942: note = Description of Artificial Sequence: Synthetic coding sequence
  source 1..942: mol_type = other DNA
atgagggccctggtgctgctgctgagcctcttcctgctgggcggccaggcccagcacgtgtctgactggacctacagcgagggcgccctggatgaggcccactggccccagcactacccagcctgtggcggccagaggcagagccccatcaacctgcagaggaccaaggtgcgctacaaccccagcctgaagggcctgaacatgacaggctatgagacccaggccggggagttccccatggtgaacaacggccacacagtgcagatcagcctgcccagcaccatgaggatgacagtggctgatggcaccgtgtacatcgcccagcagatgcacttccactggggcggggccagcagcgagatcagcggcagcgagcacacagtggatggcatcagacatgtgattgagatccacatcgtgcactacaacagcaagtacaagagctatgacatcgcccaggatgccccagatggcctggccgtgctggccgcctttgtggaggtgaagaactacccagagaacacctactacagcaacttcatcagccacctggccaacatcaagtacccaggccagaggaccaccctgaccggcctggatgtgcaggacatgctgcccaggaacctgcagcactactacacctaccacggcagcctgaccaccccaccctgcacagaaaatgtgcactggtttgtgctggccgactttgtgaagctgagcaggacccaggtgtggaagctggagaacagcctgctggaccacaggaacaagaccatccacaatgactacagaaggacccagcccctgaaccaccgggtggtggagagcaacttccccaaccagggcaaaggacatggaggccaccggggccgcagccagaacccccgggtgcagcccaccagcaccaggcaccccctggccctgggcagcctggaggcctag

SEQ ID NO: 146215 - DNA, 927 bp, synthetic construct
  misc_feature 1..927: note = Description of Artificial Sequence: Synthetic coding sequence
  source 1..927: mol_type = other DNA
atgagggccctggtgctgctgctgagcctcttcctgctgggcggccaggcccagcacgtgtctgactggacctacagcgagggcgccctggatgaggcccactggccccagcactacccagcctgtggcggccagaggcagagccccatcaacctgcagaggaccaaggtgcgctacaaccccagcctgaagggcctgaacatgacaggctatgagacccaggccggggagttccccatggtgaacaacggccacacagtgcagatcagcctgcccagcaccatgaggatgacagtggctgatggcaccgtgtacatcgcccagcagatgcacttccactggggcggggccagcagcgagatcagcggcagcgagcacacagtggatggcatcagacatgtgattgagatccacatcgtgcactacaacagcaagtacaagagctatgacatcgcccaggatgccccagatggcctggccgtgctggccgcctttgtggaggtgaagaactacccagagaacacctactacagcaacttcatcagccacctggccaacatcaagtacccaggccagaggaccaccctgaccggcctggatgtgcaggacatgctgcccaggaacctgcagcactactacacctaccacggcagcctgaccaccccaccctgcacagaaaatgtgcactggtttgtgctggccgactttgtgaagctgagcaggacccaggtgtggaagctggagaacagcctgctggaccacaggaacaagaccatccacaatgactacagaaggacccagcccctgaaccaccgggtggtggagagcaacttccccaaccaggagtacaccctgggcagcgagttccagttctacctgcacaagattgaggagatcctggactacctgcggcgggccctgaactag

SEQ ID NO: 146216 - DNA, 795 bp, synthetic construct
  misc_feature 1..795: note = Description of Artificial Sequence: Synthetic coding sequence
  source 1..795: mol_type = other DNA
atgacaggccaccacggctggggctacggccaggatgatggccccagccactggcacaagctgtaccccatcgcccagggcgaccggcagagccccatcaacatcatcagcagccaggccgtgtacagccccagcctgcagcccctggagctgtcctatgaggcctgcatgagcctgagcatcaccaacaacggccacagcgtgcaggtggacttcaatgacagtgatgacagaacagtggtgactggaggccccctggagggcccctaccgcctgaagcagttccacttccactggggcaagaagcatgatgtgggcagcgagcacacagtggatggcaagagcttccccagcgagctgcacctggtgcactggaatgccaagaagtacagcacctttggagaggccgccagcgccccagatggcctggccgtggtgggcgtcttcctggagactggagatgagcaccccagcatgaaccggctgacagatgccctgtacatggtgcgcttcaagggcaccaaggcccagttcagctgcttcaaccccaagtgcctgctgcctgccagccgccactactggacctacccaggcagcctgaccaccccacccctgtctgagagcgtgacctggatcgtgctgcgggagcccatctgcatcagcgagcggcagatgggcaagttccgcagcctgctcttcaccagtgaagatgatgagcgcatccacatggtgaacaacttccggcccccccagcccctgaagggccgggtggtgaaggccagcttccgggcctag

SEQ ID NO: 146217 - DNA, 627 bp, synthetic construct
  misc_feature 1..627: note = Description of Artificial Sequence: Synthetic coding sequence
  source 1..627: mol_type = other DNA
atgagcctgagcatcaccaacaacggccacagcgtgcaggtggacttcaatgacagtgatgacagaacagtggtgactggaggccccctggagggcccctaccgcctgaagcagttccacttccactggggcaagaagcatgatgtgggcagcgagcacacagtggatggcaagagcttccccagcgagctgcacctggtgcactggaatgccaagaagtacagcacctttggagaggccgccagcgccccagatggcctggccgtggtgggcgtcttcctggagactggagatgagcaccccagcatgaaccggctgacagatgccctgtacatggtgcgcttcaagggcaccaaggcccagttcagctgcttcaaccccaagtgcctgctgcctgccagccgccactactggacctacccaggcagcctgaccaccccacccctgtctgagagcgtgacctggatcgtgctgcgggagcccatctgcatcagcgagcggcagatgggcaagttccgcagcctgctcttcaccagtgaagatgatgagcgcatccacatggtgaacaacttccggcccccccagcccctgaagggccgggtggtgaaggccagcttccgggcctag

SEQ ID NO: 146218 - DNA, 873 bp, synthetic construct
  misc_feature 1..873: note = Description of Artificial Sequence: Synthetic coding sequence
  source 1..873: mol_type = other DNA
atggctgacctgtccttcatcgaggacacagtggccttccctgagaaggaggaggatgaggaggaggaggaggagggcgtggagtggggctatgaggagggcgtggagtggggcctggtgtttcctgatgccaatggagagtaccagagccccatcaacctgaacagccgggaggcccgctatgaccccagcctgctggatgtgcggctgagccccaactacgtggtgtgccgggactgtgaggtgaccaatgatggccacaccatccaggtgatcctgaagagcaagtctgtgctgagcggcggccccctgccccagggccacgagtttgagctgtatgaggtgcgcttccactggggccgggagaaccagaggggcagcgagcacacagtgaacttcaaggccttccccatggagctgcacctgatccactggaacagcaccctgtttggcagcattgatgaggccgtgggcaagccccatggaattgccatcatcgccctgtttgtgcagatcggcaaggagcacgtgggcctgaaggctgtgacagagatcctgcaggacatccagtacaagggcaagagcaagaccatcccctgcttcaaccccaacaccctgctgcctgaccccctgctgcgggactactgggtgtatgagggcagcctgaccatccccccctgcagcgagggcgtgacctggatcctcttccgctaccccctgaccatcagccagctgcagatcgaggagttccggcggctgcggacccacgtgaagggagctgagctggtggagggctgtgatggcatcctgggggacaacttccggcccacccagcccctgagtgacagagtcatccgggccgccttccagtag

SEQ ID NO: 146219 - DNA, 987 bp, synthetic construct
  misc_feature 1..987: note = Description of Artificial Sequence: Synthetic coding sequence
  source 1..987: mol_type = other DNA
atggagatcgtgtgggaggtgctcttcctgctgcaggccaacttcatcgtgtgcatcagcgcccagcagaacagccccaagatccacgagggctggtgggcctacaaggaggtggtgcagggcagctttgtgcctgtgcccagcttctggggcctggtgaacagcgcctggaacctgtgcagcgtgggcaagaggcagagccctgtgaacatcgagaccagccacatgatctttgaccccttcctgacccccctgcgcatcaacacaggaggcaggaaggtgtctggcaccatgtacaacacaggccgccacgtgtccctgcggctggacaaggagcacctggtgaacatcagcggcggccccatgacctacagccaccggctggaggagatccggctgcactttggaagtgaggacagccagggcagcgagcacctgctgaatggccaggccttctctggagaggtgcagctgatccactacaaccacgagctgtacaccaacgtgacagaggccgccaagagccccaacggcctggtggtggtgtccatcttcatcaaggtgtctgacagcagcaaccccttcctgaacaggatgctgaacagagacaccatcacccgcatcacctacaagaatgatgcctacctgctgcagggcctgaacatcgaggagctgtacccagagaccagcagcttcatcacctatgatggctccatgaccatccccccctgctatgaaacagcctcctggatcatcatgaacaagcctgtgtacatcaccaggatgcagatgcacagcctgcggctgctgagccagaaccagcccagccagatcttcctgtccatgtctgacaacttccggcctgtgcagcccctgaacaaccgctgcatccgcaccaacatcaacttcagcctgcagggcaaggactgccccaacaacagagcccagaagctgcagtacagagtgaatgagtggctgctgaagtag

SEQ ID NO: 146220 - DNA, 1005 bp, synthetic construct
  misc_feature 1..1005: note = Description of Artificial Sequence: Synthetic coding sequence
  source 1..1005: mol_type = other DNA
atggccagcatccgcagccgcagcggctgcggcttcacagagccagatgagctgtgcatggtgggcgtgagagaaaatgcccagcagaacagccccaagatccacgagggctggtgggcctacaaggaggtggtgcagggcagctttgtgcctgtgcccagcttctggggcctggtgaacagcgcctggaacctgtgcagcgtgggcaagaggcagagccctgtgaacatcgagaccagccacatgatctttgaccccttcctgacccccctgcgcatcaacacaggaggcaggaaggtgtctggcaccatgtacaacacaggccgccacgtgtccctgcggctggacaaggagcacctggtgaacatcagcggcggccccatgacctacagccaccggctggaggagatccggctgcactttggaagtgaggacagccagggcagcgagcacctgctgaatggccaggccttctctggagaggtgcagctgatccactacaaccacgagctgtacaccaacgtgacagaggccgccaagagccccaacggcctggtggtggtgtccatcttcatcaaggtgtctgacagcagcaaccccttcctgaacaggatgctgaacagagacaccatcacccgcatcacctacaagaatgatgcctacctgctgcagggcctgaacatcgaggagctgtacccagagaccagcagcttcatcacctatgatggctccatgaccatccccccctgctatgaaacagcctcctggatcatcatgaacaagcctgtgtacatcaccaggatgcagatgcacagcctgcggctgctgagccagaaccagcccagccagatcttcctgtccatgtctgacaacttccggcctgtgcagcccctgaacaaccgctgcatccgcaccaacatcaacttcagcctgcagggcaaggactgccccaacaacagagcccagaagctgcagtacagagtgaatgagtggctgctgaagtag

SEQ ID NO: 146221 - DNA, 987 bp, synthetic construct; identical to SEQ ID NO: 146219
  misc_feature 1..987: note = Description of Artificial Sequence: Synthetic coding sequence
  source 1..987: mol_type = other DNA

SEQ ID NO: 146222 - DNA, 987 bp, synthetic construct; identical to SEQ ID NO: 146219
  misc_feature 1..987: note = Description of Artificial Sequence: Synthetic coding sequence
  source 1..987: mol_type = other DNA

SEQ ID NO: 146223 - DNA, 987 bp, synthetic construct
  misc_feature 1..987: note = Description of Artificial Sequence: Synthetic coding sequence
  source 1..987: mol_type = other DNA
atgggcgccgccgcccggctgagcgccccccgggccctggtgctgtgggccgccctgggcgccgccgcccacatcggccctgccccagaccctgaggactggtggagctacaaggacaacctgcagggcaactttgtgcccggcccccccttctggggcctggtgaatgctgcctggagcctgtgtgctgtgggcaagaggcagagccctgtggatgtggagctgaagagggtgctgtatgaccccttcctgccccccctgcggctgagcactggaggagagaagctgcggggcaccctgtacaacacaggccgccacgtgtccttcctgcctgcccccaggcctgtggtgaatgtgtctgggggccccctgctgtacagccaccggctgtctgagctgcggctgctgtttggagccagagatggagctggcagcgagcaccagatcaaccaccagggcttctctgctgaggtgcagctgatccacttcaaccaggagctgtatggcaacttctctgctgccagccggggccccaacggcctggccatcctgagcctgtttgtgaatgtggccagcaccagcaaccccttcctgagccggctgctgaacagagacaccatcacccgcatctcctacaagaatgatgcctacttcctgcaggacctgagcctggagctgctcttccctgagagctttggcttcatcacctaccagggcagcctgagcaccccaccctgcagcgagaccgtgacctggatcctgattgaccgggccctgaacatcaccagcctgcagatgcacagcctgcggctgctgagccagaacccccccagccagatcttccagagcctgagcggcaacagccggcccctgcagcccctggcccaccgggccctgcggggcaacagagaccccaggcaccctgagcggcgctgccggggccccaactaccgcctgcacgtggatggagtgccccacggccgctag

SEQ ID NO: 146224 - DNA, 1065 bp, synthetic construct
  misc_feature 1..1065: note = Description of Artificial Sequence: Synthetic coding sequence
  source 1..1065: mol_type = other DNA
atgcccaggaggagcctgcacgccgctgctgtgctgctgctggtgatcctgaaggagcagcccagcagccctgcccctgtgaatggcagcaagtggacctactttggaccagatggagagaacagctggagcaagaagtaccccagctgtggcggcctgctgcagagccccatcgacctgcacagcgacatcctgcagtatgatgccagcctgacccccctggagttccagggctacaacctgagcgccaacaagcagttcctgctgaccaacaacggccacagcgtgaagctgaacctgcccagcgacatgcacatccagggcctgcagagccgctacagcgccacccagctgcacctgcactggggcaaccccaatgacccccacggcagcgagcacacagtgtctggccagcactttgctgctgagctgcacatcgtgcactacaacagcgacctgtacccagatgccagcacagccagcaacaagtctgagggcctggccgtgctggccgtgctgattgagatgggcagcttcaaccccagctatgacaagatcttcagccacctgcagcacgtgaagtacaagggccaggaggcctttgtgcccggcttcaacatcgaggagctgctgcctgagaggacagctgagtactaccgctaccggggcagcctgaccaccccaccctgcaaccccaccgtgctgtggacagtgttcaggaaccctgtgcagatcagccaggagcagctgctggccctggagacagccctgtactgcacccacatggatgaccccagcccccgggagatgatcaacaacttccggcaggtgcagaagtttgatgagcggctggtgtacaccagcttcagccaggtgcaggtgtgcacagctgctggcctgagcctgggcatcatcctgagcctggccctggccggcatcctgggcatctgcatcgtggtggtggtgtccatctggctgttccggaggaagagcatcaagaagggggacaacaagggcgtcatctacaagccagccaccaagatggagacagaggcccacgcctag

SEQ ID NO: 146225 - DNA, 1032 bp, synthetic construct
  misc_feature 1..1032: note = Description of Artificial Sequence: Synthetic coding sequence
  source 1..1032: mol_type = other DNA
atgcccaggaggagcctgcacgccgctgctgtgctgctgctggtgatcctgaaggagcagcccagcagccctgcccctgtgaatggcagcaagtggacctactttggaccagatggagagaacagctggagcaagaagtaccccagctgtggcggcctgctgcagagccccatcgacctgcacagcgacatcctgcagtatgatgccagcctgacccccctggagttccagggctacaacctgagcgccaacaagcagttcctgctgaccaacaacggccacagcgtgaagctgaacctgcccagcgacatgcacatccagggcctgcagagccgctacagcgccacccagctgcacctgcactggggcaaccccaatgacccccacggcagcgagcacacagtgtctggccagcactttgctgctgagctgcacatcgtgcactacaacagcgacctgtacccagatgccagcacagccagcaacaagtctgagggcctggccgtgctggccgtgctgattgagatgggcagcttcaaccccagctatgacaagatcttcagccacctgcagcacgtgaagtacaagggccaggaggcctttgtgcccggcttcaacatcgaggagctgctgcctgagaggacagctgagtactaccgctaccggggcagcctgaccaccccaccctgcaaccccaccgtgctgtggacagtgttcaggaaccctgtgcagatcagccaggagcagctgctggccctggagacagccctgtactgcacccacatggatgaccccagcccccgggagatgatcaacaacttccggcaggtgcagaagtttgatgagcggctggtgtacaccagcttcagccagggcatcatcctgagcctggccctggccggcatcctgggcatctgcatcgtggtggtggtgtccatctggctgttccggaggaagagcatcaagaagggggacaacaagggcgtcatctacaagccagccaccaagatggagacagaggcccacgcctag

SEQ ID NO: 146226 - DNA, 852 bp, synthetic construct
  misc_feature 1..852: note = Description of Artificial Sequence: Synthetic coding sequence
  source 1..852: mol_type = other DNA
atgcccaggaggagcctgcacgccgctgctgtgctgctgctggtgatcctgaaggagcagcccagcagccctgcccctgtgaatggcagcaagtggacctactttgtgaagctgaacctgcccagcgacatgcacatccagggcctgcagagccgctacagcgccacccagctgcacctgcactggggcaaccccaatgacccccacggcagcgagcacacagtgtctggccagcactttgctgctgagctgcacatcgtgcactacaacagcgacctgtacccagatgccagcacagccagcaacaagtctgagggcctggccgtgctggccgtgctgattgagatgggcagcttcaaccccagctatgacaagatcttcagccacctgcagcacgtgaagtacaagggccaggaggcctttgtgcccggcttcaacatcgaggagctgctgcctgagaggacagctgagtactaccgctaccggggcagcctgaccaccccaccctgcaaccccaccgtgctgtggacagtgttcaggaaccctgtgcagatcagccaggagcagctgctggccctggagacagccctgtactgcacccacatggatgaccccagcccccgggagatgatcaacaacttccggcaggtgcagaagtttgatgagcggctggtgtacaccagcttcagccagggcatcatcctgagcctggccctggccggcatcctgggcatctgcatcgtggtggtggtgtccatctggctgttccggaggaagagcatcaagaagggggacaacaagggcgtcatctacaagccagccaccaagatggagacagaggcccacgcctag

SEQ ID NO: 146227 - DNA, 1014 bp, synthetic construct
  misc_feature 1..1014: note = Description of Artificial Sequence: Synthetic coding sequence
  source 1..1014: mol_type = other DNA
atgctgttcagcgccctgctgctggaggtgatctggatcctggccgcagatggcggccagcactggacctatgagggcccccacggccaggaccactggccagccagctacccagaatgtggcaacaatgcccagagccccatcgacatccagacagacagcgtgacctttgatcctgacctgcctgccctgcagccccacggctatgaccagcccggcacagagcccctggacctgcacaacaacggccacacagtgcagctgagcctgcccagcaccctgtacctgggcggcctgcccaggaaatatgtggccgcccagctgcacctgcactggggccagaagggcagccctgggggcagcgagcaccagatcaacagcgaggccacctttgctgagctgcacatcgtgcactatgacagcgacagctatgacagcctgtctgaggccgctgagcggccccagggcctggccgtgctgggcatcctgattgaggtgggggagaccaagaacatcgcctatgagcacatcctgagccacctgcacgaggtgcgccacaaggaccagaagacctctgtgccccccttcaacctgcgggagctgctgcccaagcagctgggccagtacttccgctacaacggcagcctgaccaccccaccctgctaccagagcgtgctgtggacagtgttctaccgccgcagccagatctccatggagcagctggagaagctgcagggcaccctcttcagcacagaggaggagcccagcaagctgctggtgcagaactaccgggccctgcagcccctgaaccagaggatggtgtttgccagcttcatccaggccggcagcagctacaccactggagagatgctgagcctgggcgtgggcatcctggtgggctgcctgtgcctgctgctggccgtgtacttcatcgccaggaagatcaggaagaagaggctggagaacaggaagtctgtggtgttcaccagcgcccaggccaccacagaggcctag

SEQ ID NO: 146228 - DNA, 834 bp, synthetic construct
  misc_feature 1..834: note = Description of Artificial Sequence: Synthetic coding sequence
  source 1..834: mol_type = other DNA
atgagcagcggcatccacgtggccctggtgactggaggcaacaagggcatcggcctggccatcgtgcgggacctgtgccgcctcttctctggagatgtggtgctgacagccagagatgtgacccggggccaggccgctgtgcagcagctgcaggccgagggcctgagcccccgcttccaccagctggacattgatgacctgcagagcatccgggccctgcgggacttcctgaggaaggagtatggaggcctggatgtgctggtgaacaatgccggcatcgccttcaaggtggccgaccccacccccttccacatccaggccgaggtgaccatgaagaccaacttcttcggcaccagagatgtgtgcacagagctgctgcccctcatcaagccccagggccgggtggtgaatgtgagcagcatcatgtctgtgcgggccctgaagagctgcagccctgagctgcagcagaagttccgctctgagaccatcacagaggaggagctggtgggcctgatgaacaagtttgtggaggacaccaagaagggcgtgcaccagaaggagggctggcccagcagcgcctacggcgtgaccaagattggagtgacagtgctgagccgcatccacgccaggaagctgtctgagcagaggaaaggagacaagatcctgctgaatgcctgctgccccggctgggtgaggacagacatggccggccccaaggccaccaagagccctgaggagggcgctgagacccctgtgtacctggccctgctgcccccagatgctgagggcccccacggccagtttgtgtctgagaagagggtggagcagtggtag

SEQ ID NO: 146229 - DNA, 834 bp, synthetic construct
  misc_feature 1..834: note = Description of Artificial Sequence: Synthetic coding sequence
  source 1..834: mol_type = other DNA
atgagcagctgcagccgggtggccctggtgactggagccaacagaggaattggcctggccatcgcccgggagctgtgccggcagttctctggagatgtggtgctgacagccagagatgtggcccggggccaggccgctgtgcagcagctgcaggccgagggcctgagcccccgcttccaccagctggacattgatgacctgcagagcatccgggccctgcgggacttcctgaggaaggagtatggaggcctgaatgtgctggtgaacaatgctgctgtggccttcaagagtgatgaccccatgccctttgacatcaaggccgagatgaccctgaagaccaacttctttgccaccaggaacatgtgcaatgagctgctgcccatcatgaagccccacggccgggtggtgaacatcagcagcctgcagtgcctgcgggcctttgagaactgcagcgaggacctgcaggagcgcttccacagcgagaccctgacagaaggagacctggtggacctgatgaagaagtttgtggaggacaccaagaatgaggtgcatgagcgggagggctggcccaacagcccctacggcgtgtccaagctgggcgtgacagtgctgagccgcatcctggcccggcggctggatgagaagaggaaggctgaccgcatcctggtgaatgcctgctgccccggccctgtgaagacagacatggatggcaaggacagcatcagaacagtggaggagggcgctgagacccctgtgtacctggccctgctgcccccagatgccacagagccccagggccagctggtgcatgacaaggtggtgcagaactggtag

SEQ ID NO: 146230 - DNA, 2169 bp, synthetic construct
  misc_feature 1..2169: note = Description of Artificial Sequence: Synthetic coding sequence
  source 1..2169: mol_type = other DNA
atgctgaccatgggccgcctgcagctggtggtgctgggcctgacctgctgctgggccgtggccagcgctgccaagctgggcgctgtgtacacagaaggaggctttgtggagggcgtgaacaagaagctgggcctgctgggggacagcgtggacatcttcaagggcatcccctttgctgcccccaccaaggccctggagaacccccagccccaccctggctggcagggcaccctgaaggccaagaacttcaagaagcgctgcctgcaggccaccatcacccaggacagcacctatggagatgaggactgcctgtacctgaacatctgggtgccccagggcaggaagcaggtgtcccgggacctgcctgtgatgatctggatctacggcggggccttcctgatgggcagcggccacggggccaacttcctgaacaactacctgtatgatggagaggagatcgccaccagaggaaatgtcatcgtggtgaccttcaactacagagtgggccccctgggcttcctgagcactggagatgccaacctgcccggcaactacggcctgcgggaccagcacatggccatcgcctgggtgaagagaaatattgctgccttcggcggggaccccaacaacatcaccctgtttggagagagcgctgggggcgcctctgtgtccctgcagaccctgagcccctacaacaagggcctcatcagaagagccatcagccagagcggcgtggccctgagcccctgggtgatccagaagaaccccctcttctgggccaagaaggtggccgagaaggtgggctgccctgtgggagatgctgccaggatggcccagtgcctgaaggtgacagacccccgggccctgaccctggcctacaaggtgcccctggccggcctggagtaccccatgctgcactacgtgggctttgtgcctgtgattgatggagacttcatcccagctgaccccatcaacctgtatgccaatgctgctgacatcgactacatcgccggcaccaacaacatggatggccacatctttgccagcattgacatgcctgccatcaacaagggcaacaagaaggtgacagaggacttctacaagctggtgtctgagttcaccatcaccaagggcctgcggggggccaagaccacctttgatgtgtacacagagagctgggcccaggaccccagccaggagaacaagaagaagacagtggtggactttgaaacagatgtgctcttcctggtgcccacagaaattgccctggcccagcaccgggccaatgccaagagcgccaagacctacgcctacctgttcagccaccccagcaggatgcctgtgtaccccaagtgggtgggcgctgaccacgcagatgacatccagtatgtgtttgggaagccctttgccacccccaccggctaccggccccaggacagaacagtgtccaaggccatgattgcctactggaccaactttgccaagacaggagaccccaacatgggagacagcgctgtgcccacccactgggagccctacaccacagagaacagcggctacctggagatcaccaagaagatgggcagcagctccatgaagaggagcctgcggaccaacttcctgcgctactggaccctgacctacctggccctgcccaccgtgacagaccaggaggccacccctgtgcccccaactggagacagcgaggccacccctgtgccccccaccggggacagcgagacagcccctgtgcccccaactggagacagcggggcccctcctgtgccccccaccggggacagcggggcccctcctgtgcccccaactggagacagcggggcccctcctgtgccccccaccggggacagcggggcccctcctgtgcccccaactggagacagcggggcccctcctgtgcccccaactggagatgctggccccccacctgtgcccccaactggagacagcggggcccctcctgtgccccccaccggggacagcggggcccctcctgtgacccccactggagacagcgagacagcccctgtgccccccaccggggacagcggggcccctcctgtgcccccaactggagacagcgaggccgcccctgtgcccccaacagatgacagcaaggaggcccagatgcctgctgtgatccgcttctag

SEQ ID NO: 146231 - DNA, 2064 bp, synthetic construct
  misc_feature 1..2064: note = Description of Artificial Sequence: Synthetic coding sequence
  source 1..2064: mol_type = other DNA
atgggccgcctgcagctggtggtgctgggcctgacctgctgctgggccgtggccagcgctgccaagctgggcgctgtgtacacagagggcggctttgtggagggcgtgaacaagaagctgggcctgctgggggacagcgtggacatcttcaagggcatcccctttgctgcccccaccaaggccctggagaacccccagccccaccctggctggcagggcaccctgaaggccaagaacttcaagaagcgctgcctgcaggccaccatcacccaggacagcacctatggagatgaggactgcctgtacctgaacatctgggtgccccagggcaggaagcaggtgtcccgggacctgcctgtgatgatctggatctatggaggagccttcctgatgggcagcggccatggagccaacttcctgaacaactacctgtatgatggagaggagatcgccaccagaggaaatgtgattgtggtgaccttcaactacagagtgggccccctgggcttcctgagcactggagatgccaacctgcccggcaactacggcctgcgggaccagcacatggccatcgcctgggtgaagaggaacattgctgcctttggaggagaccccaacaacatcaccctgtttggagagagcgctggaggagcctctgtgtccctgcagaccctgagcccctacaacaagggcctcatccggcgggccatcagccagagcggcgtggccctgagcccctgggtgatccagaagaaccccctcttctgggccaagaaggtggccgagaaggtgggctgccctgtgggagatgctgccaggatggcccagtgcctgaaggtgacagacccccgggccctgaccctggcctacaaggtgcccctggccggcctggagtaccccatgctgcactacgtgggctttgtgcctgtgattgatggagacttcatcccagctgaccccatcaacctgtatgccaatgctgctgacatcgactacatcgccggcaccaacaacatggatggccacatctttgccagcattgacatgcctgccatcaacaagggcaacaagaaggtgacagaggaggacttctacaagctggtgtctgagttcaccatcaccaagggcctgcggggggccaagaccacctttgatgtgtacacagagagctgggcccaggaccccagccaggagaacaagaagaagacagtggtggactttgaaacagatgtgctcttcctggtgcccacagaaattgccctggcccagcaccgggccaatgccaaggaccccaacatgggagacagcgctgtgcccacccactgggagccctacaccacagagaacagcggctacctggagatcaccaagaagatgggcagcagctccatgaagaggagcctgcggaccaacttcctgcgctactggaccctgacctacctggccctgcccaccgtgacagaccaggaggccacccctgtgcccccaactggagacagcgaggccacccctgtgccccccaccggggacagcgagacagcccctgtgcccccaactggagacagcggggcccctcctgtgccccccaccggggacagcggggcccctcctgtgcccccaactggagacagcggggcccctcctgtgccccccaccggggacagcggggcccctcctgtgcccccaactggagacagcggggcccctcctgtgccccccaccggggacagcggggcccctcctgtgcccccaactggagacagcggggcccctcctgtgccccccaccggggacagcggggcccctcctgtgcccccaactggagatgctggccccccacctgtgccccccaccggggacagcggggcccctcctgtgcccccaactggagacagcggggcccctcctgtgacccccaccggggacagcgagacagcccctgtgcccccaactggagacagcggggcccctcctgtgccccccaccggggacagcgaggccgcccctgtgcccccaacagatgacagcaaggaggcccagatgcctgctgtgatccgcttctag

SEQ ID NO: 146232 - DNA, 2271 bp, synthetic construct
  misc_feature 1..2271: note = Description of Artificial Sequence: Synthetic coding sequence
  source 1..2271: mol_type = other DNA
atgctgaccatgggccgcctgcagctggtggtgctgggcctgacctgctgctgggccgtggccagcgctgccaagctgggcgctgtgtacacagaaggaggctttgtggagggcgtgaacaagaagctgggcctgctgggggacagcgtggacatcttcaagggcatcccctttgctgcccccaccaaggccctggagaacccccagccccaccctggctggcagggcaccctgaaggccaagaacttcaagaagcgctgcctgcaggccaccatcacccaggacagcacctatggagatgaggactgcctgtacctgaacatctgggtgccccagggcaggaagcaggtgtcccgggacctgcctgtgatgatctggatctacggcggggccttcctgatgggcagcggccacggggccaacttcctgaacaactacctgtatgatggagaggagatcgccaccagaggaaatgtcatcgtggtgaccttcaactacagagtgggccccctgggcttcctgagcactggagatgccaacctgcccggcaactacggcctgcgggaccagcacatggccatcgcctgggtgaagagaaatattgctgccttcggcggggaccccaacaacatcaccctgtttggagagagcgctgggggcgcctctgtgtccctgcagaccctgagcccctacaacaagggcctcatcagaagagccatcagccagagcggcgtggccctgagcccctgggtgatccagaagaaccccctcttctgggccaagaaggtggccgagaaggtgggctgccctgtgggagatgctgccaggatggcccagtgcctgaaggtgacagacccccgggccctgaccctggcctacaaggtgcccctggccggcctggagtaccccatgctgcactacgtgggctttgtgcctgtgattgatggagacttcatcccagctgaccccatcaacctgtatgccaatgctgctgacatcgactacatcgccggcaccaacaacatggatggccacatctttgccagcattgacatgcctgccatcaacaagggcaacaagaaggtgacagaggaggacttctacaagctggtgtctgagttcaccatcaccaagggcctgcggggggccaagaccacctttgatgtgtacacagagagctgggcccaggaccccagccaggagaacaagaagaagacagtggtggactttgaaacagatgtgctcttcctggtgcccacagagatcgccctggcccagcaccgggccaatgccaagagcgccaagacctacgcctacctgttcagccaccccagcaggatgcctgtgtaccccaagtgggtgggcgctgaccatgctgatgacatccagtatgtgtttgggaagccctttgccacccccaccggctaccggccccaggacagaacagtgtccaaggccatgattgcctactggaccaactttgccaagacaggagaccccaacatgggagacagcgctgtgcccacccactgggagccctacaccacagaaaattctggctacctggagatcaccaagaagatgggcagcagctccatgaagaggagcctgcggaccaacttcctgcgctactggaccctgacctacctggccctgcccaccgtgacagaccaggaggccacccctgtgccccccaccggggacagcgaggccacccctgtgcccccaactggagacagcgagacagcccctgtgccccccaccggggacagcggggcccctcctgtgcccccaactggagacagcggggcccctcctgtgccccccaccggggacagcggggcccctcctgtgcccccaactggagacagcggggcccctcctgtgccccccaccggggacagcggggcccctcctgtgcccccaactggagacagcggggcccctcctgtgccccccaccggggacagcggggcccctcctgtgcccccaactggagacagcggggcccctcctgtgcccccaactggagatgctggccccccacctgtgcccccaactggagacagcggggcccctcctgtgccccccaccggggacagcggggcccctcctgtgacccccactggagacagcgagacagcccctgtgccccccaccggggacagcggggcccctcctgtgcccccaactggagacagcgaggccgcccctgtgcccccaacagatgacagcaaggaggcccagatgcctgctgtgatccgcttctag

SEQ ID NO: 146233 - DNA, 1707 bp, synthetic construct
  misc_feature 1..1707: note = Description of Artificial Sequence: Synthetic coding sequence
  source 1..1707: mol_type = other DNA
atgtggctgcgggccttcatcctggccaccctgagcgccagcgctgcctgggccggccaccccagcagcccccctgtggtggacacagtgcacggcaaggtgctgggcaagtttgtgtccctggagggctttgcccagcctgtggccatcttcctgggcatcccctttgccaagccacccctgggccccctgcgcttcaccccaccccagcctgctgagccctggagctttgtgaagaatgccaccagctacccacccatgtgcacccaggaccccaaggccggccagctgctgtctgagctgttcaccaacagaaaagaaaacatccccctgaagctgtctgaggactgcctgtacctgaacatctacaccccagctgacctgaccaagaagaaccggctgcctgtgatggtgtggattcatggaggcggcctgatggtgggcgccgccagcacctatgatggcctggccctggccgcccatgaaaatgtggtggtggtgaccatccagtaccgcctgggcatctggggcttcttcagcactggagatgagcacagccggggcaactggggccacctggaccaggtggccgccctgcgctgggtgcaggacaacatcgccagctttggaggcaaccctggctctgtgaccatctttggagagagcgctggaggagagagcgtgtctgtgctggtgctgagccccctggccaagaacctcttccaccgggccatcagcgagagcggcgtggccctgacctctgtgctggtgaagaagggagatgtgaagcccctggccgagcagatcgccatcacagctggctgcaagaccaccaccagcgctgtgatggtgcactgcctgcggcagaagacagaggaggagctgctggagaccaccctgaagatgaagttcctgagcctggacctgcagggcgacccccgggagagccagcccctgctgggcaccgtgattgatggcatgctgctgctgaagaccccagaggagctgcaggccgagaggaacttccacacagtgccctacatggtgggcatcaacaagcaggagtttggctggctgatccccatgcagctgatgagctaccccctgtctgagggccagctggaccagaagacagccatgagcctgctgtggaagagctaccccctggtgtgcatcgccaaggagctgatccctgaggccacagagaagtacctgggcggcacagatgacacagtgaagaagaaggacctcttcctggacctgattgctgatgtgatgtttggagtgcccagcgtgattgtggccaggaaccacagagatgctggggcccccacctacatgtatgagttccagtaccggcccagcttcagcagtgacatgaagcccaagacagtcatcggggaccatggagatgagctgttctctgtgtttggagcccccttcctgaaggagggcgccagcgaggaggagatccggctgagcaagatggtgatgaagttctgggccaactttgccagaaatggaaaccccaatggagagggcctgccccactggccagagtacaaccagaaggagggctacctgcagatcggggccaacacccaggccgcccagaagctgaaggacaaggaggtggccttctggaccaacctgtttgccaagaaggctgtggagaagccaccccagacagagcacatcgagctgtag

SEQ ID NO: 146234 - DNA, 1704 bp, synthetic construct
  misc_feature 1..1704: note = Description of Artificial Sequence: Synthetic coding sequence
  source 1..1704: mol_type = other DNA
atgtggctgcgggccttcatcctggccaccctgagcgccagcgctgcctggggccaccccagcagcccccctgtggtggacacagtgcacggcaaggtgctgggcaagtttgtgtccctggagggctttgcccagcctgtggccatcttcctgggcatcccctttgccaagccacccctgggccccctgcgcttcaccccaccccagcctgctgagccctggagctttgtgaagaatgccaccagctacccacccatgtgcacccaggaccccaaggccggccagctgctgtctgagctgttcaccaacaggaaggagaacatccccctgaagctgtctgaggactgcctgtacctgaacatctacaccccagctgacctgaccaagaagaaccggctgcctgtgatggtgtggatccacggcggcggcctgatggtgggcgccgccagcacctatgatggcctggccctggccgcccatgaaaatgtggtggtggtgaccatccagtaccgcctgggcatctggggcttcttcagcactggagatgagcacagccggggcaactggggccacctggaccaggtggccgccctgcgctgggtgcaggacaacatcgccagctttggaggcaaccctggctctgtgaccatctttggagagagcgctggaggagagagcgtgtctgtgctggtgctgagccccctggccaagaacctcttccaccgggccatcagcgagagcggcgtggccctgacctctgtgctggtgaagaagggagatgtgaagcccctggccgagcagatcgccatcacagctggctgcaagaccaccaccagcgctgtgatggtgcactgcctgcggcagaagacagaggaggagctgctggagaccaccctgaagatgaagttcctgagcctggacctgcagggcgacccccgggagagccagcccctgctgggcaccgtgattgatggcatgctgctgctgaagaccccagaggagctgcaggccgagaggaacttccacacagtgccctacatggtgggcatcaacaagcaggagtttggctggctgatccccatgcagctgatgagctaccccctgtctgagggccagctggaccagaagacagccatgagcctgctgtggaagagctaccccctggtgtgcatcgccaaggagctgatccctgaggccacagagaagtacctgggcggcacagatgacacagtgaagaagaaggacctcttcctggacctgattgctgatgtgatgtttggagtgcccagcgtcatcgtggccaggaaccacagagatgctggggcccccacctacatgtatgagttccagtaccggcccagcttcagcagtgacatgaagcccaagacagtgattggagaccatggagatgagctgttctctgtgtttggagcccccttcctgaaggagggcgccagcgaggaggagatccggctgagcaagatggtgatgaagttctgggccaactttgccagaaatggaaaccccaacggggagggcctgccccactggccagagtacaaccagaaggagggctacctgcagattggagccaacacccaggccgcccagaagctgaaggacaaggaggtggccttctggaccaacctgtttgccaagaaggctgtggagaagccaccccagacagagcacatcgagctgtag

SEQ ID NO: 146235 - DNA, 1701 bp, synthetic construct
  misc_feature 1..1701: note = Description of Artificial Sequence: Synthetic coding sequence
  source 1..1701: mol_type = other DNA
atgtggctgcgggccttcatcctggccaccctgagcgccagcgctgcctggggccaccccagcagcccccctgtggtggacacagtgcacggcaaggtgctgggcaagtttgtgtccctggagggctttgcccagcctgtggccatcttcctgggcatcccctttgccaagccacccctgggccccctgcgcttcaccccaccccagcctgctgagccctggagctttgtgaagaatgccaccagctacccacccatgtgcacccaggaccccaaggccggccagctgctgtctgagctgttcaccaacaggaaggagaacatccccctgaagctgtctgaggactgcctgtacctgaacatctacaccccagctgacctgaccaagaagaaccggctgcctgtgatggtgtggatccacggcggcggcctgatggtgggcgccgccagcacctatgatggcctggccctggccgcccatgaaaatgtggtggtggtgaccatccagtaccgcctgggcatctggggcttcttcagcactggagatgagcacagccggggcaactggggccacctggaccaggtggccgccctgcgctgggtgcaggacaacatcgccagctttggaggcaaccctggctctgtgaccatctttggagagagcgctggaggagagagcgtgtctgtgctggtgctgagccccctggccaagaacctcttccaccgggccatcagcgagagcggcgtggccctgacctctgtgctggtgaagaagggagatgtgaagcccctggccgagcagatcgccatcacagctggctgcaagaccaccaccagcgctgtgatggtgcactgcctgcggcagaagacagaggaggagctgctggagaccaccctgaagatgaagttcctgagcctggacctgcagggcgacccccgggagagccagcccctgctgggcaccgtgattgatggcatgctgctgctgaagaccccagaggagctgcaggccgagaggaacttccacacagtgccctacatggtgggcatcaacaagcaggagtttggctggctgatccccatgctgatgagctaccccctgtctgagggccagctggaccagaagacagccatgagcctgctgtggaagagctaccccctggtgtgcatcgccaaggagctgatccctgaggccacagagaagtacctgggcggcacagatgacacagtgaagaagaaggacctcttcctggacctgattgctgatgtgatgtttggagtgcccagcgtgattgtggccaggaaccacagagatgctggggcccccacctacatgtatgagttccagtaccggcccagcttcagcagtgacatgaagcccaagacagtcatcggggaccatggagatgagctgttctctgtgtttggagcccccttcctgaaggagggcgccagcgaggaggagatccggctgagcaagatggtgatgaagttctgggccaactttgccagaaatggaaaccccaatggagagggcctgccccactggccagagtacaaccagaaggagggctacctgcagatcggggccaacacccaggccgcccagaagctgaaggacaaggaggtggccttctggaccaacctgtttgccaagaaggctgtggagaagccaccccagacagagcacatcgagctgtag

SEQ ID NO: 146236 - DNA, 1299 bp, synthetic construct
  misc_feature 1..1299: note = Description of Artificial Sequence: Synthetic coding sequence
  source 1..1299: mol_type = other DNA
atggtgtggattcatggaggcggcctgatggtgggcgccgccagcacctatgatggcctggccctggccgcccatgaaaatgtggtggtggtgaccatccagtaccgcctgggcatctggggcttcttcagcactggagatgagcacagccggggcaactggggccacctggaccaggtggccgccctgcgctgggtgcaggacaacatcgccagctttggaggcaaccctggctctgtgaccatctttggagagagcgctggaggagagagcgtgtctgtgctggtgctgagccccctggccaagaacctcttccaccgggccatcagcgagagcggcgtggccctgacctctgtgctggtgaagaagggagatgtgaagcccctggccgagcagatcgccatcacagctggctgcaagaccaccaccagcgctgtgatggtgcactgcctgcggcagaagacagaggaggagctgctggagaccaccctgaagatgaagttcctgagcctggacctgcagggcgacccccgggagagccagcccctgctgggcaccgtgattgatggcatgctgctgctgaagaccccagaggagctgcaggccgagaggaacttccacacagtgccctacatggtgggcatcaacaagcaggagtttggctggctgatccccatgcagctgatgagctaccccctgtctgagggccagctggaccagaagacagccatgagcctgctgtggaagagctaccccctggtgtgcatcgccaaggagctgatccctgaggccacagagaagtacctgggcggcacagatgacacagtgaagaagaaggacctcttcctggacctgattgctgatgtgatgtttggagtgcccagcgtgattgtggccaggaaccacagagatgctggggcccccacctacatgtatgagttccagtaccggcccagcttcagcagtgacatgaagcccaagacagtcatcggggaccatggagatgagctgttctctgtgtttggagcccccttcctgaaggagggcgccagcgaggaggagatccggctgagcaagatggtgatgaagttctgggccaactttgccagaaatggaaaccccaatggagagggcctgccccactggccagagtacaaccagaaggagggctacctgcagatcggggccaacacccaggccgcccagaagctgaaggacaaggaggtggccttctggaccaacctgtttgccaagaaggctgtggagaagccaccccagacagagcacatcgagctgtag

SEQ ID NO: 146237 - DNA, 1716 bp, synthetic construct
  misc_feature 1..1716: note = Description of Artificial Sequence: Synthetic coding sequence
  source 1..1716: mol_type = other DNA
atggagagagctgtgcgggtggagagcggcgtgctggtgggcgtggtgtgcctgctgctggcctgcccagccacagccactggacctgaggtggcccagcctgaggtggacaccaccctgggccgggtgcggggccggcaggtgggcgtgaagggcacagaccggctggtgaatgtgttcctgggcatcccctttgcccagccccccctgggccctgaccgcttcagcgccccccacccagcccagccctgggagggcgtgagagatgccagcacagccccacccatgtgcctgcaggatgtggagagcatgaacagcagcagatttgtgctgaatggcaagcagcagatcttctctgtgtctgaggactgcctggtgctgaatgtgtacagccctgctgaggtgcctgctggcagcggccggcctgtgatggtgtgggtgcacggcggggccctgatcaccggggccgccaccagctatgatggcagcgccctggccgcctatggagatgtggtggtggtgacagtgcagtaccgcctgggcgtgctgggcttcttcagcactggagatgagcacgcccctggcaaccagggcttcctggatgtggtggccgccctgcgctgggtgcaggagaacatcgccccctttggaggagacctgaactgtgtgacagtgtttggaggcagcgctgggggcagcatcatcagcggcctggtgctgagccctgtggccgccggcctcttccaccgggccatcacccagagcggggtcatcaccaccccaggcatcatcgacagccacccctggcccctggcccagaagatcgccaacaccctggcctgcagcagcagcagccctgctgagatggtgcagtgcctgcagcagaaggagggggaggagctggtgctgagcaagaagctgaagaacaccatctaccccctgactgtggatggcaccgtcttccccaagagccccaaggagctgctgaaggagaagcccttccacagcgtgcccttcctgatgggcgtgaacaaccacgagttctcctggctgatcccccggggctggggcctgctggacaccatggagcagatgagccgggaggacatgctggccatcagcacccctgtgctgaccagcctggatgtgcccccagagatgatgcccaccgtgattgatgagtacctgggcagcaacagtgatgcccaggccaagtgccaggccttccaggagttcatgggagatgtgttcatcaacgtgcccaccgtgtccttcagccgctacctgcgggacagcggcagccctgtgttcttctatgagttccagcaccggcccagcagctttgccaagatcaagccagcctgggtgaaggctgaccacggggctgagggcgcctttgtgtttggaggccccttcctgatggatgagagcagccggctggccttccctgaggccacagaggaggagaagcagctgagcctgaccatgatggcccagtggacccactttgccaggactggagaccccaacagcaaggccctgcccccctggccccagttcaaccaggccgagcagtacctggagatcaaccctgtgcccagggctggccagaagttccgggaggcctggatgcagttctggagcgagaccctgcccagcaagatccagcagtggcaccagaagcagaagaacaggaaggcccaggaggacctgtag

SEQ ID NO: 146238 - DNA, 633 bp, synthetic construct
  misc_feature 1..633: note = Description of Artificial Sequence: Synthetic coding sequence
  source 1..633: mol_type = other DNA
atggagcagatgagccgggaggacatgctggccatcagcacccctgtgctgaccagcctggatgtgcccccagagatgatgcccaccgtgattgatgagtacctgggcagcaacagtgatgcccaggccaagtgccaggccttccaggagttcatgggagatgtgttcatcaacgtgcccaccgtgtccttcagccgctacctgcgggacagcggcagccctgtgttcttctatgagttccagcaccggcccagcagctttgccaagatcaagccagcctgggtgaaggctgaccatggagctgagggcgcctttgtgtttggaggccccttcctgatggatgagagcagccggctggccttccctgaggccacagaggaggagaagcagctgagcctgaccatgatggcccagtggacccactttgccaggactggagaccccaacagcaaggccctgcccccctggccccagttcaaccaggccgagcagtacctggagatcaaccctgtgccccgggccggccagaagttccgggaggcctggatgcagttctggagcgagaccctgcccagcaagatccagcagtggcaccagaagcagaagaacaggaaggcccaggaggacctgtag

SEQ ID NO: 146239 - DNA, 1707 bp, synthetic construct
  misc_feature 1..1707: note = Description of Artificial Sequence: Synthetic coding sequence
  source 1..1707: mol_type = other DNA
atggagagagctgtgcgggtggagagcggcgtgctggtgggcgtggtgtgcctgctgctggcctgcccagccacagccactggacctgaggtggcccagcctgaggtggacaccaccctgggccgggtgcggggccggcaggtgggcgtgaagggcacagaccggctggtgaatgtgttcctgggcatcccctttgcccagccccccctgggccctgaccgcttcagcgccccccacccagcccagccctgggagggcgtgagagatgccagcacagccccacccatgtgcctgcaggatgtggagagcatgaacagcagcagatttgtgctgaatggcaagcagcagatcttctctgtgtctgaggactgcctggtgctgaatgtgtacagccctgctgaggtgcctgctggcagcggccggcctgtgatggtgtgggtgcacggcggggccctgatcaccggggccgccaccagctatgatggcagcgccctggccgcctatggagatgtggtggtggtgacagtgcagtaccgcctgggcgtgctgggcttcttcagcactggagatgagcacgcccctggcaaccagggcttcctggatgtggtggccgccctgcgctgggtgcaggagaacatcgccccctttggaggagacctgaactgtgtgacagtgtttggaggcagcgctgggggcagcatcatcagcggcctggtgctgagccctgtggccgccggcctcttccaccgggccatcacccagagcggggtcatcaccaccccaggcatcatcgacagccacccctggcccctggcccagaagatcgccaacaccctggcctgcagcagcagcagccctgctgagatggtgcagtgcctgcagcagaaggagggggaggagctggtgctgagcaagaagctgaagaacaccatctaccccctgactgtggatggcaccgtcttccccaagagccccaaggagctgctgaaggagaagcccttccacagcgtgcccttcctgatgggcgtgaacaaccacgagttctcctggctgatcccccggggctggggcctgctggacaccatggagcagatgagccgggaggacatgctggccatcagcacccctgtgctgaccagcctggatgtgcccccagagatgatgcccaccgtgattgatgagtacctgggcagcaacagtgatgcccaggccaagtgccaggccttccaggagttcatgggagatgtgttcatcaacgtgcccaccgtgtccttcagccgctacctgcgggacagcggcagccctgtgttcttctatgagttccagcaccggcccagcagctttgccaagatcaagccagcctgggtgaaggctgaccacggggctgagggcgcctttgtgtttggaggccccttcctgatggatgagagcagccggctggaggccacagaggaggagaagcagctgagcctgaccatgatggcccagtggacccactttgccaggactggagaccccaacagcaaggccctgcccccctggccccagttcaaccaggccgagcagtacctggagatcaaccctgtgccccgggccggccagaagttccgggaggcctggatgcagttctggagcgagaccctgcccagcaagatccagcagtggcaccagaagcagaagaacaggaaggcccaggaggacctgtag

SEQ ID NO: 146240 - DNA, 738 bp, synthetic construct
  misc_feature 1..738: note = Description of Artificial Sequence: Synthetic coding sequence
  source 1..738: mol_type = other DNA
atggccaatgaggcctacccctgcccctgtgacatcggccaccggctggagtatggaggcctgggccgggaggtgcaggtggagcacatcaaggcctacgtgaccaagagccctgtggatgctgggaaggccgtcatcgtcatccaggacatcttcggctggcagctgcccaacacccgctacatcgctgacatgatctctggaaatggctacaccaccatcgtgcctgacttctttgtgggccaggagccctgggaccccagcggggactggagcatcttccctgagtggctgaagaccagaaatgcccagaagattgaccgggagatcagcgccatcctgaagtacctgaagcagcagtgccacgcccagaagattggcatcgtgggcttctgctggggcggcacagctgtgcaccacctgatgatgaagtacagcgagttccgggccggcgtgtctgtgtatggaattgtgaaggacagcgaggacatctacaacctgaagaaccccaccctcttcatctttgctgaaaatgatgtggtgatccccctgaaggatgtgtccctgctgacccagaagctgaaggagcactgcaaggtggagtaccagatcaagaccttcagcggccagacccacggctttgtgcacaggaagcgggaggactgcagccctgctgacaagccctacattgatgaggcccggaggaacctgattgagtggctgaacaagtacatgtag

SEQ ID NO: 146241 - DNA, 1260 bp, synthetic construct
  misc_feature 1..1260: note = Description of Artificial Sequence: Synthetic coding sequence
  source 1..1260: mol_type = other DNA
atgaggggcctgctggtgctgtctgtgctgctgggcgctgtgtttgggaaggaggactttgtgggccaccaggtgctgcgcatctctgtggctgatgaggcccaggtgcagaaggtgaaggagctggaggacctggagcacctgcagctggacttctggaggggccctgcccaccctggcagccccattgatgtgcgggtgcccttccccagcatccaggccgtgaagatcttcctggagagccacggcatctcctatgagaccatgattgaagatgtgcagagcctgctggatgaggagcaggagcagatgtttgccttccgcagccgggcccggagcacagacaccttcaactatgccacctaccacaccctggaggagatctatgacttcctggacctgctggtggccgagaacccccacctggtgtccaagatccagatcggcaacacctatgagggccggcccatctacgtgctgaagttcagcactggaggcagcaagaggcctgccatctggattgacaccggcatccacagccgggagtgggtgacccaggccagcggcgtgtggtttgccaagaagatcacccaggactatggccaggatgctgccttcaccgccatcctggacaccctggacatcttcctggagatcgtgaccaacccagatggctttgccttcacccacagcaccaacaggatgtggaggaagaccaggagccacacagctggcagcctgtgcattggagtggaccccaacagaaactgggatgctggcttcggcctgagcggggccagcagcaacccctgcagcgagacctaccacggcaagtttgccaacagcgaggtggaggtgaagagcatcgtggactttgtgaaggaccacggcaacatcaaggccttcatcagcatccacagctacagccagctgctgatgtacccctacggctacaagacagagcctgtgcctgaccaggatgagctggaccagctgagcaaggctgctgtgacagccctggccagcctgtatggcaccaagttcaactacggcagcatcatcaaggccatctaccaggccagcggcagcaccatcgactggacctacagccagggcatcaagtacagcttcacctttgagctgcgggacaccggccgctatggcttcctgctgcctgccagccagatcatccccacagccaaggagacctggctggccctgctgaccatcatggagcacaccctgaaccacccctactag

SEQ ID NO: 146242 - DNA, 1098 bp, synthetic construct
  misc_feature 1..1098: note = Description of Artificial Sequence: Synthetic coding sequence
  source 1..1098: mol_type = other DNA
atggaccgggccgccctgctgggcctggcccggctgtgtgccctgtgggccgccctgctggtgctcttcccctatggagcccagggcaactggatgtggctgggcatcgccagctttggagtgcctgagaagctgggctgtgccaacctgcccctgaacagccggcagaaggagctgtgcaagaggaagccctacctgctgcccagcatccgggagggcgcccggctgggcatccaggagtgtggcagccagttcagacatgagcgctggaactgcatgatcacagctgctgccaccacagcccccatgggcgccagccccctgtttggctatgagctgagcagcggcaccaaggagacagccttcatctatgctgtgatggctgctggcctggtgcacagcgtgaccaggagctgcagcgctggcaacatgacagagtgcagctgtgacaccaccctgcagaatggaggcagcgccagcgagggctggcactggggcggctgcagtgatgatgtgcagtatggcatgtggttcagcaggaagttcctggacttccccatcggcaacaccaccgggaaggagaacaaggtgctgctggccatgaacctgcacaacaatgaggccggccggcaggccgtggccaagctgatgtctgtggactgccgctgccacggcgtgtctggcagctgtgctgtgaagacctgctggaagaccatgagcagctttgagaagattggccacctgctgaaggacaagtatgagaacagcatccagatcagtgacaagaccaagaggaagatgagaagaagagagaaggaccagaggaagatccccatccacaaggatgacctgctgtatgtgaacaagagccccaactactgtgtggaggacaagaagctgggcatccctggcacccagggccgggagtgcaacagaaccagcgagggcgcagatggctgcaacctgctgtgctgcggccggggctacaacacccacgtggtgcgccacgtggagcgctgtgagtgcaagttcatctggtgctgctacgtgcgctgcagaagatgtgagagcatgacagatgtgcacacctgcaagtag

SEQ ID NO: 146243 - DNA, 1254 bp, synthetic construct
  misc_feature 1..1254: note = Description of Artificial Sequence: Synthetic coding sequence
  source 1..1254: mol_type = other DNA
atgaggctcatcctgcctgtgggcctcatcgccaccaccctggccatcgcccctgtgcgctttgaccgggagaaggtgttccgggtgaagccccaggatgagaagcaggccgacatcatcaaggacctggccaagaccaatgagctggacttctggtacccaggggccacccaccacgtggccgccaacatgatggtggacttccgggtgtctgagaaggagagccaggccatccagagcgccctggaccagaacaagatgcactatgagatcctgattcatgacctgcaggaggagattgagaagcagtttgatgtgaaggaggacatccctggccgccacagctatgccaagtacaacaactgggagaagatcgtggcctggacagagaagatgatggacaagtacccagagatggtgagccgcatcaagattggcagcacagtggaggacaaccccctgtatgtgctgaagattggagagaagaatgaaagaaggaaggccatcttcacagactgtggcatccacgcccgggagtgggtgtccccagccttctgccagtggtttgtgtaccaggccaccaagacctatggaagaaacaagatcatgaccaagctgctggacaggatgaacttctacatcctgcccgtcttcaacgtggatggctacatctggagctggaccaagaacaggatgtggaggaagaacagaagcaagaaccagaacagcaagtgcatcggcacagacctgaacagaaacttcaatgcctcctggaacagcatccccaacaccaatgacccctgtgccgacaactaccggggcagcgcccctgagagcgagaaggagaccaaggctgtgaccaacttcatccgcagccacctgaatgagatcaaggtgtacatcaccttccacagctacagccagatgctgctcttcccctacggctacaccagcaagctgccccccaaccacgaggacctggccaaggtggccaagattggaacagatgtgctgagcaccaggtatgagacccgctacatctacggccccatcgagagcaccatctaccccatcagcggcagcagcctggactgggcctatgacctgggcatcaagcacacctttgcctttgagctgcgggacaagggcaagtttggcttcctgctgcctgagagccgcatcaagcccacctgccgggagaccatgctggccgtgaagttcatcgccaagtacatcctgaagcacaccagctag

SEQ ID NO: 146244 - DNA, 1260 bp, synthetic construct
  misc_feature 1..1260: note = Description of Artificial Sequence: Synthetic coding sequence
  source 1..1260: mol_type = other DNA
atggccatgaggctcatcctcttctttggagccctgtttggccacatctactgcctggagacctttgtgggggaccaggtgctggagatcgtgcccagcaatgaggagcagatcaagaacctgctgcagctggaggcccaggagcacctgcagctggacttctggaagagccccaccaccccaggagaaacagcccacgtgcgggtgccctttgtgaatgtgcaggccgtgaaggtgttcctggagagccagggcatcgcctacagcatcatgattgaagatgtgcaggtgctgctggacaaggaaaatgaggagatgctgttcaacagaagaagagagaggagcggcaacttcaactttggagcctaccacaccctggaggagatcagccaggagatggacaacctggtggccgagcaccctggcctggtgtccaaggtgaacatcggcagcagctttgagaaccggcccatgaatgtgctgaagttcagcactggaggagacaagccagccatctggctggatgctggcatccacgcccgggagtgggtgacccaggccacagccctgtggacagccaacaagatcgtgtctgactatggcaaggaccccagcatcaccagcatcctggatgccctggacatcttcctgctgcctgtgaccaacccagatggctacgtgttcagccagaccaagaacaggatgtggaggaagaccaggagcaaggtgtctggcagcctgtgtgtgggcgtggaccccaacagaaactgggatgctggctttggaggccctggggccagcagcaacccctgcagcgacagctaccacggccccagcgccaacagcgaggtggaggtgaagagcatcgtggacttcatcaagagccacggcaaggtgaaggccttcatcaccctgcacagctacagccagctgctgatgttcccctacggctacaagtgcaccaagctggatgactttgatgagctgtctgaggtggcccagaaggccgcccagagcctgcggagcctgcacggcaccaagtacaaggtgggccccatctgcagcgtcatctaccaggccagcggcggcagcattgactggagctatgactatggcatcaagtacagctttgcctttgagctgcgggacaccggccgctatggcttcctgctgcctgcccggcagatcctgcccacagctgaggagacctggctgggcctgaaggccatcatggagcacgtgcgggaccacccctactag

SEQ ID NO: 146245 - DNA, 1167 bp, synthetic construct
  misc_feature 1..1167: note = Description of Artificial Sequence: Synthetic coding sequence
  source 1..1167: mol_type = other DNA
atgcgctggatcctcttcatcggggccctgattggcagcagcatctgtggccaggagaagttcttcggggaccaggtgctgcgcatcaacgtgagaaatggagatgagatcagcaagctgagccagctggtgaacagcaacaacctgaagctgaacttctggaagagccccagcagcttcaacagacctgtggatgtgctggtgcccagcgtgtccctgcaggccttcaagagcttcctgcggagccagggcctggagtatgctgtgaccatcgaggacctgcagatctaccacgagatggacaacattgctgctgacttcccagacctggcccggcgggtgaagattggccacagctttgaaaatcggcccatgtatgtgctgaagttcagcacaggcaagggcgtgagaagacctgctgtgtggctgaatgccggcatccacagccgggagtggatcagccaggccacagccatctggacagccaggaagatcgtgtctgactaccagagggaccctgccatcaccagcatcctggagaagatggacatcttcctgctgcctgtggccaacccagatggctacgtgtacacccagacccagaaccggctgtggaggaagaccaggagcagaaatcctggcagcagctgcatcggggctgaccccaacagaaactggaatgccagctttgctggaaaaggagccagtgacaacccctgcagcgaggtgtaccacggcccccacgccaacagcgaggtggaggtgaagtctgtggtggacttcatccagaagcacggcaacttcaagggcttcatcgacctgcacagctacagccagctgctgatgtacccctacggctacagcgtgaagaaggccccagatgctgaggagctggacaaggtggcccggctggccgccaaggccctggcctctgtgtctggaacagagtaccaggtgggccccacctgcaccaccgtgtacccagccagcggcagcagcattgactgggcctatgacaatggcatcaagtttgccttcacctttgagctgcgggacaccggcacctacggcttcctgctgcctgccaaccagatcatccccacagctgaggagacctggctgggcctgaagaccatcatggagcacgtgcgggacaacctgtactag

SEQ ID NO: 146246 - DNA, 681 bp, synthetic construct
  misc_feature 1..681: note = Description of Artificial Sequence: Synthetic coding sequence
  source 1..681: mol_type = other DNA
atgaagatcgtgtctgactaccagagggaccctgccatcaccagcatcctggagaagatggacatcttcctgctgcctgtggccaacccagatggctacgtgtacacccagacccagaaccggctgtggaggaagaccaggagcagaaatcctggcagcagctgcatcggggctgaccccaacagaaactggaatgccagctttgctggaaaaggagccagtgacaacccctgcagcgaggtgtaccacggcccccacgccaacagcgaggtggaggtgaagtctgtggtggacttcatccagaagcacggcaacttcaagggcttcatcgacctgcacagctacagccagctgctgatgtacccctacggctacagcgtgaagaaggccccagatgctgaggagctggacaaggtggcccggctggccgccaaggccctggcctctgtgtctggaacagagtaccaggtgggccccacctgcaccaccgtgtacccagccagcggcagcagcattgactgggcctatgacaatggcatcaagtttgccttcacctttgagctgcgggacaccggcacctacggcttcctgctgcctgccaaccagatcatccccacagctgaggagacctggctgggcctgaagaccatcatggagcacgtgcgggacaacctgtactag

SEQ ID NO: 146247 - DNA, 582 bp, synthetic construct
  misc_feature 1..582: note = Description of Artificial Sequence: Synthetic coding sequence
  source 1..582: mol_type = other DNA
atgcaccacctgaacaagacccacagcggcctcatccacatgttcagcatcggccgctcctatgagggccgcagcctcttcatcctgaagctgggcagaagaagccggctgaagagagctgtgtggattgactgtggcatccacgcccgggagtggattggccctgccttctgccagtggtttgtgaaggaggccctgctgacctacaagagtgaccctgccatgaggaagatgctgaaccacctgtacttctacatcatgcctgtgttcaacgtggatggctaccacttctcctggaccaatgaccgcttctggaggaagaccaggagcaggaacagccgcttccgctgccggggcgtggatgccaacagaaactggaaggtgaagtggtgtgatgtgagcagcggcagctccatggactgggcctacaagaatggcatcccctatgcctttgcctttgagctgcgggacaccggctacttcggcttcctgctgcctgagatgctgatcaagcccacctgcacagagaccatgctggccgtgaagaacatcaccatgcacctgctgaagaagtgcccctag

SEQ ID NO: 146248 - DNA, 1314 bp, synthetic construct
  misc_feature 1..1314: note = Description of Artificial Sequence: Synthetic coding sequence
  source 1..1314: mol_type = other DNA
atgaagtgcctgggcaagagaagaggccaggccgccgccttcctgcccctgtgctggctgttcctgaagatcctgcagcccggccacagccacctgtacaacaacagatatgctggggacaaggtgatccgcttcatccccaagacagaggaggaggcctatgccctgaagaagatctcctaccagctgaaggtggacctgtggcagcccagcagcatctcctatgtgtctgagggcaccgtgacagatgtgcacatcccccagaatggcagccgggccctgctggccttcctgcaggaggccaacatccagtacaaggtgctgattgaggacctgcagaagaccctggagaagggcagcagcctgcacacccagaggaacagaagaagcctgagcggctacaactatgaggtgtaccacagcctggaggagatccagaactggatgcaccacctgaacaagacccacagcggcctcatccacatgttcagcatcggccgctcctatgagggccgcagcctcttcatcctgaagctgggcagaagaagccggctgaagagagctgtgtggattgactgtggcatccacgcccgggagtggattggccctgccttctgccagtggtttgtgaaggaggccctgctgacctacaagagtgaccctgccatgaggaagatgctgaaccacctgtacttctacatcatgcctgtgttcaacgtggatggctaccacttctcctggaccaatgaccgcttctggaggaagaccaggagcaggaacagccgcttccgctgccggggcgtggatgccaacagaaactggaaggtgaagtggtgtgatgagggcgcctccatgcacccctgtgatgacacctactgcggccccttccctgagagcgagcctgaggtgaaggctgtggccaacttcctgaggaagcacaggaagcacatccgggcctacctgtccttccacgcctatgcccagatgctgctgtacccctacagctacaagtatgccaccatccccaacttccgctgtgtggagagcgctgcctacaaggctgtgaatgccctgcagagcgtgtatggagtgcgctaccgctatggccctgccagcaccaccctgtatgtgagcagcggcagctccatggactgggcctacaagaatggcatcccctatgcctttgcctttgagctgcgggacaccggctacttcggcttcctgctgcctgagatgctgatcaagcccacctgcacagagaccatgctggccgtgaagaacatcaccatgcacctgctgaagaagtgcccctag

SEQ ID NO: 146249 - DNA, 948 bp, synthetic construct
  misc_feature 1..948: note = Description of Artificial Sequence: Synthetic coding sequence
  source 1..948: mol_type = other DNA
atgaagtgcctgggcaagagaagaggccaggccgccgccttcctgcccctgtgctggctgttcctgaagatcctgcagcccggccacagccacctgtacaacaacagatatgctggggacaaggtgatccgcttcatccccaagacagaggaggaggcctatgccctgaagaagatctcctaccagctgaaggtggacctgtggcagcccagcagcatctcctatgtgtctgagggcaccgtgacagatgtgcacatcccccagaatggcagccgggccctgctggccttcctgcaggaggccaacatccagtacaaggtgctgattgaggacctgcagaagaccctggagaagggcagcagcctgcacacccagaggaacagaagaagcctgagcggctacaactatgaggtgtaccacagcctggaggagatccagaactggatgcaccacctgaacaagacccacagcggcctcatccacatgttcagcatcggccgctcctatgagggccgcagcctcttcatcctgaagctgggcagaagaagccggctgaagagagctgtgtggattgactgtggcatccacgcccgggagtggattggccctgccttctgccagtggtttgtgaaggaggccctgctgacctacaagagtgaccctgccatgaggaagatgctgaaccacctgtacttctacatcatgcctgtgttcaacgtggatggctaccacttctcctggaccaatgaccgcttctggaggaagaccaggagcaggaacagccgcttccgctgccggggcgtggatgccaacagaaactggaaggtgaagtggtgtgggaagtttggcaccaactgggaccctgaccccaaggtgtctgctggcttcaccctgcagaacatgagccctgaggacagccacggccgcctgatgttcttctgcatgtag

SEQ ID NO: 146250 - DNA, 1272 bp, synthetic construct
  misc_feature 1..1272: note = Description of Artificial Sequence: Synthetic coding sequence
  source 1..1272: mol_type = other DNA
atgaagctgtgcagcctggccgtgctggtgcccatcgtgctcttctgtgagcagcacgtgtttgccttccagagcggccaggtgctggccgccctgcccaggaccagccggcaggtgcaggtgctgcagaacctgaccaccacctatgaaattgtgctgtggcagcctgtgacagctgacctgattgtgaagaagaagcaggtgcacttctttgtgaatgccagtgatgtggacaacgtgaaggcccacctgaatgtgtctggcatcccctgcagcgtgctgctggctgatgtggaggacctgatccagcagcagatcagcaatgacacagtgagcccccgggccagcgccagctactatgagcagtaccacagcctgaatgagatctacagctggattgagttcatcacagagcggcacccagacatgctgaccaagatccacatcggcagcagctttgagaagtaccccctgtatgtgctgaaggtgtctgggaaggagcaggccgccaagaatgccatctggattgactgtggcatccacgcccgggagtggatcagccctgccttctgcctgtggttcatcggccacatcacccagttctacggcatcatcggccagtacaccaacctgctgcggctggtggacttctacgtgatgcctgtggtgaatgtggatggctatgactacagctggaagaagaacaggatgtggaggaagaacagaagcttctacgccaacaaccactgcattggaacagacctgaacagaaactttgccagcaagcactggtgtgaggagggcgccagcagcagcagctgcagcgagacctactgcggcctgtacccagagagcgagcctgaggtgaaggctgtggccagcttcctgcggaggaacatcaaccagatcaaggcctacatctccatgcacagctacagccagcacatcgtgttcccctacagctacaccaggagcaagagcaaggaccacgaggagctgagcctggtggccagcgaggccgtgcgggccatcgagaagatcagcaagaacacccgctacacccacggccacggcagcgagaccctgtacctggcccctggaggaggagatgactggatctatgacctgggcatcaagtacagcttcaccatcgagctgcgggacaccggcacctacggcttcctgctgcctgagcgctacatcaagcccacctgccgggaggcctttgctgctgtgtccaagatcgcctggcacgtgatcagaaatgtgtag

SEQ ID NO: 146251 - DNA, 1083 bp, synthetic construct
  misc_feature 1..1083: note = Description of Artificial Sequence: Synthetic coding sequence
  source 1..1083: mol_type = other DNA
atgaagctgtgcagcctggccgtgctggtgcccatcgtgctcttctgtgagcagcacgtgtttgccttccagagcggccaggtgctggccgccctgcccaggaccagccggcaggtgcaggtgctgcagaacctgaccaccacctatgaaattgtgctgtggcagcctgtgacagctgacctgattgtgaagaagaagcaggtgcacttctttgtgaatgccagtgatgtggacaacgtgaaggcccacctgaatgtgtctggcatcccctgcagcgtgctgctggctgatgtggaggacctgatccagcagcagatcagcaatgacacagtgagcccccgggccagcgccagctactatgagcagtaccacagcctgaatgagatctacagctggattgagttcatcacagagcggcacccagacatgctgaccaagatccacatcggcagcagctttgagaagtaccccctgtatgtgctgaaggtgtctgggaaggagcaggccgccaagaatgccatctggattgactgtggcatccacgcccgggagtggatcagccctgccttctgcctgtggttcatcggccacaacaggatgtggaggaagaacagaagcttctacgccaacaaccactgcatcggcacagacctgaacagaaactttgccagcaagcactggtgtgaggagggcgccagcagcagcagctgcagcgagacctactgcggcctgtacccagagagcgagcctgaggtgaaggctgtggccagcttcctgcggaggaacatcaaccagatcaaggcctacatctccatgcacagctacagccagcacatcgtgttcccctacagctacaccaggagcaagagcaaggaccacgaggagctgagcctggtggccagcgaggccgtgcgggccatcgagaagatcagcaagaacacccgctacacccacggccacggcagcgagaccctgtacctggcccctggaggaggagatgactggatctatgacctgggcatcaagtacagcgtgaccagcaacccccctgtggagaagctgctgcccctgagcctgaagtag

SEQ ID NO: 146252 - DNA, 849 bp, synthetic construct
  misc_feature 1..849: note = Description of Artificial Sequence: Synthetic coding sequence
  source 1..849: mol_type = other DNA
atgctgcccctgctgcgctgtgtgccccgggtgctgggcagctctgtggccggcctgcgggccgccgccccagccagccccttccggcagctgctgcagcctgccccccggctgtgcacccggcccttcggcctgctgtctgtgcgggccggcagcgagcggcggcccggcctgctgcggccccggggcccctgtgcctgtggctgcggctgcggcagcctgcacacagatggagacaaggcctttgtggacttcctgagtgatgagatcaaggaggagaggaagatccagaagcacaagaccctgcccaagatgtctgggggctgggagctggagctgaatggaacagaggccaagctggtgaggaaggtggccggggagaagatcaccgtgaccttcaacatcaacaacagcatcccccccacctttgatggagaggaggagcccagccagggccagaaggtggaggagcaggagcctgagctgaccagcacccccaactttgtggtggaggtgatcaagaatgatgatggcaagaaggccctggtgctggactgccactacccagaagatgaggtgggccaggaggatgaagctgagagtgacatcttcagcatccgggaggtgtccttccagagcactggagagagcgagtggaaggacaccaactacaccctgaacacagacagcctggactgggccctgtatgaccacctgatggacttcctggccgacagaggagtggacaacacctttgctgatgagctggtggagctgagcacagccctggagcaccaggagtacatcaccttcctggaggacctgaagagctttgtgaagagccagtag

SEQ ID NO: 146253 - DNA, 3402 bp, synthetic construct
  misc_feature 1..3402: note = Description of Artificial Sequence: Synthetic coding sequence
  source 1..3402: mol_type = other DNA
atgagatttgtgctgagcggcaacctgcacggcggctctgtggtggccagctacccctttgatgacagccctgagcacaaggccaccggcatctacagcaagaccagtgatgatgaggtgttcaagtacctggccaaggcctatgccagcaaccaccccatcatgaagacaggagagccccactgccctggagatgaagatgagaccttcaaggatggcatcaccaacggggcccactggtatgatgtggagggcggcatgcaggactacaactacgtgtgggccaactgctttgagatcaccctggagctgagctgctgcaagtaccccccagccagccagctgcggcaggagtgggagaacaaccgggagagcctcatcaccctcatcgagaaggtgcacatcggcgtgaagggctttgtgaaggacagcatcaccggcagcggcctggagaatgccaccatctctgtggccggcatcaaccacaacatcaccaccggccgctttggagacttctaccgcctgctggtgcccggcacctacaacctgactgtggtgctgaccggctacatgcccctgactgtgaccaacgtggtggtgaaggagggccctgccacagaggtggacttcagcctgcggcccaccgtgaccagcgtcatcccagacaccacagaggccgtgtccacagccagcacagtggccatccccaacatcctgagcggcaccagcagcagctaccagcccatccagcccaaggacttccaccaccaccacttcccagacatggagatcttcctgcggagatttgccaatgagtaccccaacatcacccggctgtacagcctgggcaagtctgtggagagccgggagctgtatgtgatggagatcagtgacaaccctggggtgcatgagcctggagagcctgagttcaagtacatcggcaacatgcatggaaatgaggtggtgggccgggagctgctgctgaacctgattgagtacctgtgcaagaactttggaacagatcctgaggtgacagacctggtgcacaacacccgcatccacctgatgcccagcatgaacccagatggctatgagaagagccaggagggggacagcatcagcgtcatcggcaggaacaacagcaacaactttgacctgaacagaaacttcccagaccagtttgtgcagatcacagaccccacccagcctgagaccatcgctgtgatgtcctggatgaagagctacccctttgtgctgagcgccaacctgcacggcggcagcctggtggtgaactacccctttgatgatgatgagcagggcctggccacctacagcaagagcccagatgatgctgtgttccagcagatcgccctgagctacagcaaagaaaacagccagatgttccagggccggccctgcaagaacatgtacccaaatgagtacttcccccacggcatcaccaacggggcctcctggtacaacgtgcctgggggcatgcaggactggaactacctgcagaccaactgctttgaggtgaccatcgagctgggctgtgtgaagtaccccctggagaaggagctgcccaacttctgggagcagaacagaagaagcctcatccagttcatgaagcaggtgcaccagggcgtgcggggctttgtgctggatgccacagatggccggggcatcctgaatgccaccatctctgtggccgagatcaaccaccctgtgaccacctacaagacaggagactactggaggctgctggtgcccggcacctacaagatcacagccagcgcccggggctacaaccctgtgaccaagaatgtgacagtgaagtctgagggcgccatccaggtgaacttcaccctggtgcgcagcagcacagacagcaacaatgaaagcaagaagggcaagggggccagcagcagcaccaatgatgccagtgaccccaccaccaaggagtttgagaccctcatcaaggacctgtctgcagaaaatggcctggagagcctgatgctgcggagcagcagcaacctggccctggccctgtaccgctaccacagctacaaggacctgtctgagttcctgcggggcctggtgatgaactacccccacatcaccaacctgaccaacctgggccagagcacagagtaccgccacatctggagcctggagatcagcaacaagcccaacgtgtctgagcctgaggagcccaagatccgctttgtggccggcatccatggaaatgcccctgtgggcacagagctgctgctggccctggccgagttcctgtgcctgaactacaagaagaacccagctgtgacccagctggtggacaggaccagaattgtgattgtgcccagcctgaacccagatggccgggagcgggcccaggagaaggactgcaccagcaagattggccagaccaatgcccggggcaaggacctggacacagacttcaccaacaatgccagccagcctgagaccaaggccatcatcgagaacctgatccagaagcaggacttcagcctgtctgtggccctggatggcggctccatgctggtgacctacccctatgacaagcctgtgcagacagtggagaacaaggagaccctgaagcacctggccagcctgtatgccaacaaccaccccagcatgcacatgggccagcccagctgccccaacaagagtgatgagaacatccctgggggcgtgatgagaggagctgagtggcacagccacctgggctccatgaaggactacagcgtgacctacggccactgcccagagatcaccgtgtacaccagctgctgctacttccccagcgctgcccggctgcccagcctgtgggccgacaacaagaggagcctgctgtccatgctggtggaggtgcacaagggcgtgcacggctttgtgaaggacaagacaggcaagcccatcagcaaggctgtgattgtgctgaatgaaggcatcaaggtgcagaccaaggagggcggctacttccacgtgctgctggcccctggggtgcacaacatcatcgccatcgcagatggctaccagcagcagcacagccaggtgtttgtgcaccatgatgctgccagctctgtggtgattgtgtttgacacagacaaccgcatcttcggcctgccccgggagctggtggtgacagtgtctggggccaccatgtctgccctgatcctgacagcctgcatcatctggtgcatctgcagcatcaagagcaacagacacaaggatggcttccaccggctgcggcagcaccatgatgaatatgaagatgagatccgcatgatgagcacaggcagcaagaagagcctgctgagccatgagttccaggatgaaacagacacagaggaggagaccctgtacagcagcaagcactag

SEQ ID NO: 146254 - DNA, 1149 bp, synthetic construct
  misc_feature 1..1149: note = Description of Artificial Sequence: Synthetic coding sequence
  source 1..1149: mol_type = other DNA
atgagaagaagaagaaggctgcagcaggaggatggcatcagctttgagtaccaccgctacccagagctgcgggaggccctggtgtctgtgtggctgcagtgcacagccatcagccgcatctacacagtgggccgcagctttgagggccgggagctgctggtgattgagctgagtgacaaccctggggtgcatgagcccggggagcctgagttcaagtacatcggcaacatgcacggcaatgaggccgtgggccgggagctgctgatcttcctggcccagtacctgtgcaatgagtaccagaagggaaatgagaccatcgtgaacctgatccacagcacccgcatccacatcatgcccagcctgaacccagatggctttgagaaggccgccagccagcctggagagctgaaggactggtttgtgggccgcagcaatgcccagggcatcgacctgaacagaaacttcccagacctggacagaattgtgtatgtgaatgagaaggagggcggccccaacaaccacctgctgaagaacatgaagaagatcgtggaccagaacaccaagctggcccctgagaccaaggctgtgatccactggatcatggacatcccctttgtgctgagcgccaacctgcacggcggggacctggtggccaactacccctatgatgagaccaggagcggcagcgcccacgagtacagcagcagcccagatgatgccatcttccagagcctggcccgggcctacagcagcttcaacccagccatgtctgaccccaaccggcccccctgcaggaagaatgatgatgacagcagctttgtggatggcaccaccaatggaggagcctggtacagcgtgcctgggggcatgcaggacttcaactacctgagcagcaactgctttgagatcaccgtggagctgagctgtgagaagtttcctcctgaggagaccctgaagacctactgggaggacaacaagaacagcctcatctcctacctggagcagatccacagaggagtgaagggctttgtgcgggacctgcagggcaaccccatcgccaatgccaccatctctgtggagggcatcgaccatgatgtgaccagcgccaaggatggagactactggaggctgctgacctggaagctgtag

SEQ ID NO: 146255 - DNA, 1431 bp, synthetic construct
  misc_feature 1..1431: note = Description of Artificial Sequence: Synthetic coding sequence
  source 1..1431: mol_type = other DNA
atggccggccggggcggcagcgccctgctggccctgtgtggggccctggccgcctgtggctggctgctgggcgctgaggcccaggagcccggggccccagctgctggcatgagaagaagaagaaggctgcagcaggaggatggcatcagctttgagtaccaccgctacccagagctgcgggaggccctggtgtctgtgtggctgcagtgcacagccatcagccgcatctacacagtgggccgcagctttgagggccgggagctgctggtgattgagctgagtgacaaccctggggtgcatgagcccggggagcctgagttcaagtacatcggcaacatgcacggcaatgaggccgtgggccgggagctgctgatcttcctggcccagtacctgtgcaatgagtaccagaagggaaatgagaccatcgtgaacctgatccacagcacccgcatccacatcatgcccagcctgaacccagatggctttgagaaggccgccagccagcctggagagctgaaggactggtttgtgggccgcagcaatgcccagggcatcgacctgaacagaaacttcccagacctggacagaattgtgtatgtgaatgagaaggagggcggccccaacaaccacctgctgaagaacatgaagaagatcgtggaccagaacaccaagctggcccctgagaccaaggctgtgatccactggatcatggacatcccctttgtgctgagcgccaacctgcacggcggggacctggtggccaactacccctatgatgagaccaggagcggcagcgcccacgagtacagcagcagcccagatgatgccatcttccagagcctggcccgggcctacagcagcttcaacccagccatgtctgaccccaaccggcccccctgcaggaagaatgatgatgacagcagctttgtggatggcaccaccaatggaggagcctggtacagcgtgcctgggggcatgcaggacttcaactacctgagcagcaactgctttgagatcaccgtggagctgagctgtgagaagtttcctcctgaggagaccctgaagacctactgggaggacaacaagaacagcctcatctcctacctggagcagatccacagaggagtgaagggctttgtgcgggacctgcagggcaaccccatcgccaatgccaccatctctgtggagggcatcgaccatgatgtgaccagcgccaaggatggagactactggaggctgctgatccctggcaactacaagctgacagccagcgcccctggctacctggccatcaccaagaaggtggccgtgccctacagccctgctgctggggtggactttgagctggagagcttcagcgagaggaaggaggaggagaaggaggagctgatggagtggtggaagatgatgtctgagaccctgaacttctag

SEQ ID NO: 146256 - DNA, 1332 bp, synthetic construct
  misc_feature 1..1332: note = Description of Artificial Sequence: Synthetic coding sequence
  source 1..1332: mol_type = other DNA
atggacttcccctgcctgtggctgggcctgctgctgcccctggtggccgccctggacttcaactaccaccggcaggagggcatggaggccttcctgaagacagtggcccagaactacagctctgtgacccacctgcacagcatcggcaagtctgtgaagggcaggaacctgtgggtgctggtggtgggccgcttccccaaggagcacagaattggcatccctgagttcaagtatgtggccaacatgcatggagatgaaacagtgggccgggagctgctgctgcacctgattgactacctggtgaccagtgatggcaaggaccctgagatcaccaacctgatcaacagcacccgcatccacatcatgcccagcatgaacccagatggctttgaggccgtgaagaagccagactgctactacagcatcggccgggagaactacaaccagtatgacctgaacagaaacttcccagatgcctttgagtacaacaacgtgtcccggcagcctgagaccgtggccgtgatgaagtggctgaagacagagacctttgtgctgagcgccaacctgcacggcggggccctggtggccagctacccctttgacaacggggtgcaggccactggagccctgtacagccgcagcctgaccccagatgatgatgtgttccagtacctggcccacacctacgccagcaggaaccccaacatgaagaagggagatgagtgcaagaacaagatgaacttccccaacggggtgaccaacggctacagctggtaccccctgcagggcggcatgcaggactacaactacatctgggcccagtgctttgagatcaccctggagctgagctgctgcaagtacccccgggaggagaagctgcccagcttctggaacaacaacaaggccagcctgattgagtacatcaagcaggtgcacctgggcgtgaagggccaggtgtttgaccagaatggaaaccccctgcccaacgtgattgtggaggtgcaggacaggaagcacatctgcccctaccgcaccaacaagtacggggagtactacctgctgctgctgcccggcagctacatcatcaacgtgacagtgcccggccatgacccccacatcaccaaggtgatcatccctgagaagagccagaacttcagcgccctgaagaaggacatcctgctgcccttccagggccagctggacagcatccctgtgagcaaccccagctgccccatgatccccctgtacagaaacctgcctgaccacagcgctgccaccaagcccagcctcttcctgttcctggtgtccctgctgcacatcttcttcaagtag

SEQ ID NO: 146257 - DNA, 1332 bp, synthetic construct; identical to SEQ ID NO: 146256
  misc_feature 1..1332: note = Description of Artificial Sequence: Synthetic coding sequence
  source 1..1332: mol_type = other DNA

SEQ ID NO: 146258 - DNA, 1332 bp, synthetic construct; identical to SEQ ID NO: 146256
  misc_feature 1..1332: note = Description of Artificial Sequence: Synthetic coding sequence
  source 1..1332: mol_type = other DNA

SEQ ID NO: 146259 - DNA, 411 bp, synthetic construct
  misc_feature 1..411: note = Description of Artificial Sequence: Synthetic coding sequence
  source 1..411: mol_type = other DNA
atggacttcccctgcctgtggctgggcctgctgctgcccctggtggccgccctggacttcaactaccaccggcaggagggcatggaggccttcctgaagacagtggcccagaactacagctctgtgacccacctgcacagcatcggcaagtctgtgaagggcaggaacctgtgggtgctggtggtgggccgcttccccaaggagcacagaattggcatccctgagttcaagtatgtggccaacatgcatggagatgaaacagtgggccgggagctgctgctgcacctgattgactacctggtgaccagtgatggcaaggaccctgagatcaccaacctgatcaacagcacccgcatccacatcatgcccagcatgaacccagatggctttgaggccgtgaagaagccctag

SEQ ID NO: 146260 - DNA, 750 bp, synthetic construct
  misc_feature 1..750: note = Description of Artificial Sequence: Synthetic coding sequence
  source 1..750: mol_type = other DNA
atggacttcccctgcctgtggctgggcctgctgctgcccctggtggccgccctggacttcaactaccaccggcaggagggcatggaggccttcctgaagacagtggcccagaactacagctctgtgacccacctgcacagcatcggcaagtctgtgaagggcaggaacctgtgggtgctggtggtgggccgcttccccaaggagcacagaattggcatccctgagttcaagtatgtggccaacatgcatggagatgaaacagtgggccgggagctgctgctgcacctgattgactacctggtgaccagtgatggcaaggaccctgagatcaccaacctgatcaacagcacccgcatccacatcatgcccagcatgaacccagatggctttgaggccgtgaagaagccagactgctactacagcatcggccgggagaactacaaccagtatgacctgaacagaaacttcccagatgcctttgagtacaacaacgtgtcccggcagcctgagaccgtggccgtgatgaagtggctgaagacagagacctttgtgctgagcgccaacctgcacggcggggccctggtggccagctacccctttgacaacggggtgcaggccactggagccctgtacagccgcagcctgaccccagatgatgatgtgttccagtacctggcccacacctacgccagcaggaaccccaacatgaagaagggagatgagtgcaagaacaagatgaacttcccctag

SEQ ID NO: 146261 - DNA, 1332 bp, synthetic construct; identical to SEQ ID NO: 146256
  misc_feature 1..1332: note = Description of Artificial Sequence: Synthetic coding sequence
  source 1..1332: mol_type = other DNA

SEQ ID NO: 146262 - DNA, 1377 bp, synthetic construct
  misc_feature 1..1377: note = Description of Artificial Sequence: Synthetic coding sequence
  source 1..1377: mol_type = other DNA
atgtctgacctgctgagcgtcttcctgcacctgctgctgctcttcaagctggtggcccctgtgaccttccgccaccacagatatgatgacctggtgaggaccctgtacaaggtgcagaatgaatgtcctggcatcaccagggtgtacagcatcggccgctctgtggagggccgccacctgtatgtgctggagttcagtgaccaccctggcatccacgagcccctggagcctgaggtgaagtatgtgggcaacatgcacggcaatgaggccctgggccgggagctgatgctgcagctgtctgagttcctgtgtgaggagttcaggaacagaaaccagagaattgtgcagctgatccaggacacccgcatccacatcctgcccagcatgaacccagatggctatgaggtggccgccgcccagggccccaacaagccaggctacctggtgggcagaaataatgccaatggagtggacctgaacagaaacttcccagacctgaacacctacatctactacaatgagaagtatggaggccccaaccaccacctgcccctgcctgacaactggaagagccaggtggagcctgagaccagggctgtgatccgctggatgcacagcttcaactttgtgctgagcgccaacctgcacggcggcgctgtggtggccaactacccctatgacaagagctttgagcaccgggtgcggggcgtgcggaggacagccagcacccccaccccagatgacaagctgttccagaagctggccaaggtgtacagctatgcccacggctggatgttccagggctggaactgtggggactacttcccagatggcatcaccaatggagcctcctggtacagcctgagcaagggcatgcaggacttcaactacctgcacaccaactgctttgagatcaccctggagctgagctgtgacaagtttcctcctgaggaggagctgcagcgggagtggctgggcaaccgggaggccctgatccagttcctggagcaggtgcaccagggcatcaagggcatggtgctggatgagaactacaacaacctggccaatgctgtgatctctgtgtctggcatcaaccatgatgtgaccagcggggaccatggagactacttccggctgctgctgcccggcatctacacagtgtctgccacagcccctggctatgaccctgagaccgtgacagtgacagtgggccctgctgagcccaccctggtgaacttccacctgaagaggagcatcccccaggtgtcccctgtgcggcgggcccccagcagaagacatggagtgcgggccaaggtgcagccccaggccaggaagaaggagatggagatgaggcagctgcagaggggccctgcctag

SEQ ID NO: 146263 - DNA, 615 bp, synthetic construct
  misc_feature 1..615: note = Description of Artificial Sequence: Synthetic coding sequence
  source 1..615: mol_type = other DNA
atgcacagcttcaactttgtgctgagcgccaacctgcatggaggagctgtggtggccaactacccctatgacaagagctttgagcaccgggtgcggggcgtgagaagaacagccagcacccccaccccagatgacaagctgttccagaagctggccaaggtgtacagctatgcccacggctggatgttccagggctggaactgtggggactacttcccagatggcatcaccaacggggcctcctggtacagcctgagcaagggcatgcaggacttcaactacctgcacaccaactgctttgagatcaccctggagctgagctgtgacaagttccccccagaggaggagctgcagcgggagtggctgggcaaccgggaggccctgatccagttcctggagcaggtgcaccagggcatcaagggcatggtgctggatgagaactacaacaacctggccaatgctgtgatctctgtgtctggcatcaaccatgatgtgaccagcggggaccacggggactacttccggctgctgctgcccggcatctacacagtgtctgccacagcccctggctatgaccctgagaccgtgacagtgacagtgggccctgctgagtag

SEQ ID NO: 146264 - DNA, 1638 bp, synthetic construct
  misc_feature 1..1638: note = Description of Artificial Sequence: Synthetic coding sequence
  source 1..1638: mol_type = other DNA
atgctgcccggggcctggctgctgtggaccagcctgctgctgctggcccggcctgcccagccctgccccatgggctgtgactgctttgtgcaggaggtgttctgcagtgatgaggagctggccaccgtgcccctggacatccccccctacaccaagaacatcatctttgtggagaccagcttcaccaccctggagacccgggccttcggcagcaaccccaacctgaccaaggtggtgttcctgaacacccagctgtgccagttccggccagatgcctttggaggcctgccccggctggaggacctggaggtgacaggcagcagcttcctgaacctgagcaccaacatcttcagcaacctgaccagcctgggcaagctgaccctgaacttcaacatgctggaggccctgcctgagggcctcttccagcacctggccgccctggagagcctgcacctgcagggcaaccagctgcaggccctgccccggcggctcttccagcccctgacccacctgaagaccctgaacctggcccagaacctgctggcccagctgcctgaggagctgttccaccccctgaccagcctgcagaccctgaagctgagcaacaatgccctgagcggcctgccccagggcgtgtttgggaagctgggcagcctgcaggagctgttcctggacagcaacaacatcagcgagctgcccccccaggtgttcagccagctgttctgcctggagcggctgtggctgcagagaaatgccatcacccacctgcccctgagcatctttgccagcctgggcaacctgaccttcctgagcctgcagtggaacatgctgcgggtgctgcctgctggcctgtttgcccacaccccctgcctggtgggcctgagcctgacccacaaccagctggagaccgtggccgagggcacctttgcccacctgagcaacctgcggagcctgatgctgagctacaatgccatcacccacctgcctgctggcatcttccgggacctggaggagctggtgaagctgtacctgggcagcaacaacctgacagccctgcacccagccctcttccagaacctgagcaagctggagctgctgagcctgagcaagaaccagctgaccaccctgcctgagggcatctttgacaccaactacaacctcttcaacctggccctgcacggcaacccctggcagtgtgactgccacctggcctacctgttcaactggctgcagcagtacacagaccggctgctgaacatccagacctactgtgccggccctgcctacctgaagggccaggtggtgcctgccctgaatgagaagcagctggtgtgccctgtgacccgggaccacctgggcttccaggtgacctggccagatgagagcaaggccggcggctcctgggacctggccgtgcaggagcgggccgcccggagccagtgcacctacagcaaccctgagggcaccgtggtgctggcctgtgaccaggcccagtgccgctggctgaatgtgcagctgagcccccagcagggcagcctgggcctgcagtacaatgccagccaggagtgggacctgcggagcagctgtggcagcctgcggctgactgtgtccattgaggcccgggctgctggcccctag

SEQ ID NO: 146265 - DNA, 1638 bp, synthetic construct; identical to SEQ ID NO: 146264
  misc_feature 1..1638: note = Description of Artificial Sequence: Synthetic coding sequence
  source 1..1638: mol_type = other DNA

SEQ ID NO: 146266 - DNA, 1431 bp, synthetic construct
  misc_feature 1..1431: note = Description of Artificial Sequence: Synthetic coding sequence
  source 1..1431: mol_type = other DNA
atggtgggcgccatgtggaaggtgattgtgtccctggtgctgctgatgcctggcccctgtgatggcctcttccgcagcctgtacagatctgtgtccatgccacccaagggggacagcggccagcccctcttcctgaccccctacattgaagctgggaagatccagaagggccgggagctgagcctggtgggccccttccctggcctgaacatgaagagctatgccggcttcctgactgtgaacaagacctacaacagcaacctcttcttctggttcttccctgcccagatccagccagaagatgcccctgtggtgctgtggctgcagggcggccctgggggcagctccatgtttggcctgtttgtggagcacggcccctacgtggtgaccagcaacatgaccctgcgggaccgggacttcccctggaccaccaccctgtccatgctgtacatcgacaaccctgtgggcaccggcttctccttcacagatgacacccacggctatgctgtgaatgaagatgatgtggcccgggacctgtacagcgccctgatccagttcttccagatcttccctgagtacaagaacaatgacttctacgtgactggagagagctatgctgggaagtatgtgcctgccatcgcccacctgatccacagcctgaaccctgtgcgggaggtgaagatcaacctgaatggaattgccatcggagatggctacagcgaccctgagagcatcatcggcggctacgccgagttcctgtaccagatcggcctgctggatgagaagcagaagaagtacttccagaagcagtgccatgaatgtattgagcacatcaggaagcagaactggtttgaggcctttgagatcctggacaagctgctggatggagacctgaccagtgaccccagctacttccagaatgtgacaggctgcagcaactactacaacttcctgcgctgcacagagcctgaggaccagctgtactacgtgaagttcctgagcctgcctgaggtgcggcaggccatccacgtgggcaaccagaccttcaatgatggcaccatcgtggagaagtacctgagagaagatactgtgcagagcgtgaagccctggctgacagagatcatgaacaactacaaggtgctgatctacaacggccagctggacatcatcgtggccgccgccctgacagagaggagcctgatgggcatggactggaagggcagccaggagtacaagaaggccgagaagaaggtgtggaagatcttcaagagtgacagcgaggtggccggctacatccggcaggccggggacttccaccaggtgatcatccggggcggcggccacatcctgccctatgaccagcccctgcgggcctttgacatgatcaaccgcttcatctacggcaagggctgggacccctacgtgggctag

SEQ ID NO: 146267 - DNA, 1431 bp, synthetic construct; identical to SEQ ID NO: 146266
  misc_feature 1..1431: note = Description of Artificial Sequence: Synthetic coding sequence
  source 1..1431: mol_type = other DNA

SEQ ID NO: 146268 - DNA, 1431 bp, synthetic construct; identical to SEQ ID NO: 146266
  misc_feature 1..1431: note = Description of Artificial Sequence: Synthetic coding sequence
  source 1..1431: mol_type = other DNA

SEQ ID NO: 146269 - DNA, 21 bp, synthetic construct
  misc_feature 1..21: note = Description of Artificial Sequence: Synthetic coding sequence
  source 1..21: mol_type = other DNA
atggtgggcgccatgtggtag

SEQ ID NO: 146270 - DNA, 159 bp, synthetic construct
  misc_feature 1..159: note = Description of Artificial Sequence: Synthetic coding sequence
  source 1..159: mol_type = other DNA
atggtgggcgccatgtggaaggtgattgtgtccctggtgctgctgatgcctggcccctgtgatggcctcttccgcagcctgtacagatctgtgtccatgccacccaagggggacagcggccagcccctcttcctgaccccctacattgaagctggatag

SEQ ID NO: 146271 - DNA, 132 bp, synthetic construct
  misc_feature 1..132: note = Description of Artificial Sequence: Synthetic coding sequence
  source 1..132: mol_type = other DNA
atggtgggcgccatgtggaaggtgattgtgtccctggtgctgctgatgcctggcccctgtgatggcctcttccgcagcctgtacagatctgtgtccatgccacccaagggggacagcggccagcccctgtag

SEQ ID NO: 146272 - DNA, 699 bp, synthetic construct
  misc_feature 1..699: note = Description of Artificial Sequence: Synthetic coding sequence
  source 1..699: mol_type = other DNA
atgtttggcctgtttgtggagcacggcccctacgtggtgaccagcaacatgaccctgcgggaccgggacttcccctggaccaccaccctgtccatgctgtacatcgacaaccctgtgggcaccggcttctccttcacagatgacacccacggctatgctgtgaatgaagatgatgtggcccgggacctgtacagcgccctgatccagttcttccagatcttccctgagtacaagaacaatgacttctacgtgactggagagagctatgctgggaagtatgtgcctgccatcgcccacctgatccacagcctgaaccctgtgcgggaggtgaagatcaacctgaatggaattgccatcggagatggctacagcgaccctgagagcatcatcggcggctacgccgagttcctgtaccagatcggcctgctggatgagaagcagaagaagtacttccagaagcagtgccatgaatgtattgagcacatcaggaagcagaactggtttgaggcctttgagatcctggacaagctgctggatggagacctgaccagtgaccccagctacttccagaatgtgacaggctgcagcaactactacaacttcctgcgctgcacagagcctgaggaccagctgtactacgtgaagttcctgagcctgcctgaggtgcggcaggcccccagaggagagagtgacttctag

SEQ ID NO: 146273 - DNA, 1581 bp, synthetic construct
  misc_feature 1..1581: note = Description of Artificial Sequence: Synthetic coding sequence
  source 1..1581: mol_type = other DNA
atgggccacctgagcgcccccctgcaccgggtgcgggtgccctggcagggcctgctgctgacagccagcctgctgaccttctggaacccccccaccacagcccagctgaccacagagagcatgcccttcaacgtggccgagggcaaggaggtgctgctgctggtgcacaacctgccccagcagctgtttggctacagctggtacaagggggagcgggtggatggcaaccggcagatcgtgggctacgccatcggcacccagcaggccaccccaggccctgccaacagcggccgggagaccatctacccaaatgccagcctgctgatccagaatgtgacccagaatgacaccggcttctacaccctgcaggtgatcaagagtgacctggtgaatgaggaggccaccggccagttccacgtgtacccagagctgcccaagcccagcatcagcagcaacaacagcaaccctgtggaggacaaggatgctgtggccttcacctgtgagcctgagacccaggacaccacctacctgtggtggatcaacaaccagagcctgcctgtgagcccccggctgcagctgagcaatggaaacagaaccctgaccctgctgtctgtgaccagaaatgacaccggcccctatgaatgtgagatccagaaccctgtgtctgccaacagaagtgaccctgtgaccctgaatgtgacctacggccctgacacccccaccatcagccccagcgacacctactacagacctggggccaacctgagcctgagctgctatgctgccagcaaccccccagcccagtacagctggctgatcaatggcaccttccagcagagcacccaggagctgttcatccccaacatcaccgtgaacaacagcggcagctacacctgccacgccaacaacagcgtgacaggctgcaacagaaccaccgtgaagaccatcatcgtgacagagctgagccctgtggtggccaagccccagatcaaggccagcaagaccaccgtgactggagacaaggacagcgtgaacctgacctgcagcaccaatgacaccggcatcagcatccgctggttcttcaagaaccagagcctgcccagcagcgagaggatgaagctgagccagggcaacaccaccctgagcatcaaccctgtgaagagagaagatgctggcacctactggtgtgaggtgttcaaccccatcagcaagaaccagagcgaccccatcatgctgaatgtgaactacaatgccctgccccaggagaatggcctgagccctggggccatcgccggcatcgtgattggagtggtggccctggtggccctgattgctgtggccctggcctgcttcctgcactttgggaagacaggccgggccagtgaccagagggacctgacagagcacaagcccagcgtgagcaaccacacccaggaccacagcaatgacccccccaacaagatgaatgaggtgacctacagcaccctgaactttgaggcccagcagcccacccagcccaccagcgccagccccagcctgacagccacagagatcatctacagcgaggtgaagaagcagtag

SEQ ID NO: 146274 - DNA, 1080 bp, synthetic construct
  misc_feature 1..1080: note = Description of Artificial Sequence: Synthetic coding sequence
  source 1..1080: mol_type = other DNA
atgcccttcaacgtggccgagggcaaggaggtgctgctgctggtgcacaacctgccccagcagctgtttggctacagctggtacaagggggagcgggtggatggcaaccggcagatcgtgggctacgccatcggcacccagcaggccaccccaggccctgccaacagcggccgggagaccatctacccaaatgccagcctgctgatccagaatgtgacccagaatgacaccggcttctacaccctgcaggtgatcaagagtgacctggtgaatgaggaggccaccggccagttccacgtgtacccagagctgcccaagcccagcatcagcagcaacaacagcaaccctgtggaggacaaggatgctgtggccttcacctgtgagcctgagacccaggacaccacctacctgtggtggatcaacaaccagagcctgcctgtgagcccccggctgcagctgagcaatggaaacagaaccctgaccctgctgtctgtgaccagaaatgacaccggcccctatgaatgtgagatccagaaccctgtgtctgccaacagaagtgaccctgtgaccctgaatgtgacctacggccctgacacccccaccatcagccccagcgacacctactacagacctggggccaacctgagcctgagctgctatgctgccagcaaccccccagcccagtacagctggctgatcaatggcaccttccagcagagcacccaggagctgttcatccccaacatcaccgtgaacaacagcggcagctacacctgccacgccaacaacagcgtgacaggctgcaacagaaccaccgtgaagaccatcatcgtgacagagatggccttccaccacgtggccaaggccggcctgaagctgctgagcagcagcaaccccccagccagcaccagccagagcgccaagatcacagacaatgccctgccccaggagaatggcctgagccctggggccatcgccggcatcgtcatcggcgtggtggccctggtggccctgattgctgtggccctggcctgcttcctgcactttgggaagacaggcagcagcggccccctgcagtag

SEQ ID NO: 146275 - DNA, 1056 bp, synthetic construct
  misc_feature 1..1056: note = Description of Artificial Sequence: Synthetic coding sequence
  source 1..1056: mol_type = other DNA
atgggccacctgagcgcccccctgcaccgggtgcgggtgccctggcagggcctgctgctgacagccagcctgctgaccttctggaacccccccaccacagcccagctgaccacagagagcatgcccttcaacgtggccgagggcaaggaggtgctgctgctggtgcacaacctgccccagcagctgtttggctacagctggtacaagggggagcgggtggatggcaaccggcagatcgtgggctacgccatcggcacccagcaggccaccccaggccctgccaacagcggccgggagaccatctacccaaatgccagcctgctgatccagaatgtgacccagaatgacaccggcttctacaccctgcaggtgatcaagagtgacctggtgaatgaggaggccaccggccagttccacgtgtacccagagctgcccaagcccagcatcagcagcaacaacagcaaccctgtggaggacaaggatgctgtggccttcacctgtgagcctgagacccaggacaccacctacctgtggtggatcaacaaccagagcctgcctgtgagcccccggctgcagctgagcaatggaaacagaaccctgaccctgctgtctgtgaccagaaatgacaccggcccctatgaatgtgagatccagaaccctgtgtctgccaacagaagtgaccctgtgaccctgaatgtgacctacggccctgacacccccaccatcagccccagcgacacctactacagacctggggccaacctgagcctgagctgctatgctgccagcaaccccccagcccagtacagctggctgatcaatggcaccttccagcagagcacccaggagctgttcatccccaacatcaccgtgaacaacagcggcagctacacctgccacgccaacaacagcgtgacaggctgcaacagaaccaccgtgaagaccatcatcgtgacagagagccctgtgctgggggaggatgaagctgtgcccggccagcaccacccccagcacaagccctgccaggagggcggctgctgggatgtgctggtgtag

SEQ ID NO: 146276 - DNA, 759 bp, synthetic construct
  misc_feature 1..759: note = Description of Artificial Sequence: Synthetic coding sequence
  source 1..759: mol_type = other DNA
atgggccacctgagcgcccccctgcaccgggtgcgggtgccctggcagggcctgctgctgacagccagcctgctgaccttctggaacccccccaccacagcccagctgaccacagagagcatgcccttcaacgtggccgagggcaaggaggtgctgctgctggtgcacaacctgccccagcagctgtttggctacagctggtacaagggggagcgggtggatggcaaccggcagatcgtgggctacgccatcggcacccagcaggccaccccaggccctgccaacagcggccgggagaccatctacccaaatgccagcctgctgatccagaatgtgacccagaatgacaccggcttctacaccctgcaggtgatcaagagtgacctggtgaatgaggaggccaccggccagttccacgtgtaccacaatgccctgccccaggagaatggcctgagccctggggccatcgccggcatcgtgattggagtggtggccctggtggccctgattgctgtggccctggcctgcttcctgcactttgggaagacaggccgggccagtgaccagagggacctgacagagcacaagcccagcgtgagcaaccacacccaggaccacagcaatgacccccccaacaagatgaatgaggtgacctacagcaccctgaactttgaggcccagcagcccacccagcccaccagcgccagccccagcctgacagccacagagatcatctacagcgaggtgaagaagcagtag

SEQ ID NO: 146277 - DNA, 1293 bp, synthetic construct
  misc_feature 1..1293: note = Description of Artificial Sequence: Synthetic coding sequence
  source 1..1293: mol_type = other DNA
atgggccacctgagcgcccccctgcaccgggtgcgggtgccctggcagggcctgctgctgacagccagcctgctgaccttctggaacccccccaccacagcccagctgaccacagagagcatgcccttcaacgtggccgagggcaaggaggtgctgctgctggtgcacaacctgccccagcagctgtttggctacagctggtacaagggggagcgggtggatggcaaccggcagatcgtgggctacgccatcggcacccagcaggccaccccaggccctgccaacagcggccgggagaccatctacccaaatgccagcctgctgatccagaatgtgacccagaatgacaccggcttctacaccctgcaggtgatcaagagtgacctggtgaatgaggaggccaccggccagttccacgtgtacccagagctgcccaagcccagcatcagcagcaacaacagcaaccctgtggaggacaaggatgctgtggccttcacctgtgagcctgagacccaggacaccacctacctgtggtggatcaacaaccagagcctgcctgtgagcccccggctgcagctgagcaatggaaacagaaccctgaccctgctgtctgtgaccagaaatgacaccggcccctatgaatgtgagatccagaaccctgtgtctgccaacagaagtgaccctgtgaccctgaatgtgacctacggccctgacacccccaccatcagccccagcgacacctactacagacctggggccaacctgagcctgagctgctatgctgccagcaaccccccagcccagtacagctggctgatcaatggcaccttccagcagagcacccaggagctgttcatccccaacatcaccgtgaacaacagcggcagctacacctgccacgccaacaacagcgtgacaggctgcaacagaaccaccgtgaagaccatcatcgtgacagacaatgccctgccccaggagaatggcctgagccctggggccatcgccggcatcgtgattggagtggtggccctggtggccctgattgctgtggccctggcctgcttcctgcactttgggaagacaggccgggccagtgaccagagggacctgacagagcacaagcccagcgtgagcaaccacacccaggaccacagcaatgacccccccaacaagatgaatgaggtgacctacagcaccctgaactttgaggcccagcagcccacccagcccaccagcgccagccccagcctgacagccacagagatcatctacagcgaggtgaagaagcagtag

SEQ ID NO: 146278 - DNA, 1386 bp, synthetic construct
  misc_feature 1..1386: note = Description of Artificial Sequence: Synthetic coding sequence
  source 1..1386: mol_type = other DNA
atgggccacctgagcgcccccctgcaccgggtgcgggtgccctggcagggcctgctgctgacagccagcctgctgaccttctggaacccccccaccacagcccagctgaccacagagagcatgcccttcaacgtggccgagggcaaggaggtgctgctgctggtgcacaacctgccccagcagctgtttggctacagctggtacaagggggagcgggtggatggcaaccggcagatcgtgggctacgccatcggcacccagcaggccaccccaggccctgccaacagcggccgggagaccatctacccaaatgccagcctgctgatccagaatgtgacccagaatgacaccggcttctacaccctgcaggtgatcaagagtgacctggtgaatgaggaggccaccggccagttccacgtgtacccagagctgcccaagcccagcatcagcagcaacaacagcaaccctgtggaggacaaggatgctgtggccttcacctgtgagcctgagacccaggacaccacctacctgtggtggatcaacaaccagagcctgcctgtgagcccccggctgcagctgagcaatggaaacagaaccctgaccctgctgtctgtgaccagaaatgacaccggcccctatgaatgtgagatccagaaccctgtgtctgccaacagaagtgaccctgtgaccctgaatgtgacctacggccctgacacccccaccatcagccccagcgacacctactacagacctggggccaacctgagcctgagctgctatgctgccagcaaccccccagcccagtacagctggctgatcaatggcaccttccagcagagcacccaggagctgttcatccccaacatcaccgtgaacaacagcggcagctacacctgccacgccaacaacagcgtgacaggctgcaacagaaccaccgtgaagaccatcatcgtgacagagcggcagaacctgaccatgctgccccggctggacagcaacagctgggcccaggccatcctgcccagcgtgtcccagagcgctgagatcacagacaatgccctgccccaggagaatggcctgagccctggggccatcgccggcatcgtcatcggcgtggtggccctggtggccctgattgctgtggccctggcctgcttcctgcactttgggaagacaggccgggccagtgaccagagggacctgacagagcacaagcccagcgtgagcaaccacacccaggaccacagcaatgacccccccaacaagatgaatgaggtgacctacagcaccctgaactttgaggcccagcagcccacccagcccaccagcgccagccccagcctgacagccacagagatcatctacagcgaggtgaagaagcagtag

SEQ ID NO: 146279 - DNA, 1254 bp, synthetic construct
  misc_feature 1..1254: note = Description of Artificial Sequence: Synthetic coding sequence
  source 1..1254: mol_type = other DNA
atgggccacctgagcgcccccctgcaccgggtgcgggtgccctggcagggcctgctgctgacagccagcctgctgaccttctggaacccccccaccacagcccagctgaccacagagagcatgcccttcaacgtggccgagggcaaggaggtgctgctgctggtgcacaacctgccccagcagctgtttggctacagctggtacaagggggagcgggtggatggcaaccggcagatcgtgggctacgccatcggcacccagcaggccaccccaggccctgccaacagcggccgggagaccatctacccaaatgccagcctgctgatccagaatgtgacccagaatgacaccggcttctacaccctgcaggtgatcaagagtgacctggtgaatgaggaggccaccggccagttccacgtgtacccagagctgcccaagcccagcatcagcagcaacaacagcaaccctgtggaggacaaggatgctgtggccttcacctgtgagcctgagacccaggacaccacctacctgtggtggatcaacaaccagagcctgcctgtgagcccccggctgcagctgagcaatggaaacagaaccctgaccctgctgtctgtgaccagaaatgacaccggcccctatgaatgtgagatccagaaccctgtgtctgccaacagaagtgaccctgtgaccctgaatgtgacctacggccctgacacccccaccatcagccccagcgacacctactacagacctggggccaacctgagcctgagctgctatgctgccagcaaccccccagcccagtacagctggctgatcaatggcaccttccagcagagcacccaggagctgttcatccccaacatcaccgtgaacaacagcggcagctacacctgccacgccaacaacagcgtgacaggctgcaacagaaccaccgtgaagaccatcatcgtgacagagctgagccctgtggtggccaagccccagatcaaggccagcaagaccaccgtgactggagacaaggacagcgtgaacctgacctgcagcaccaatgacaccggcatcagcatccgctggttcttcaagaaccagagcctgcccagcagcgagaggatgaagctgagccagggcaacaccaccctgagcatcaaccctgtgaagagagaagatgctggcacctactggtgtgaggtgttcaaccccatcagcaagaaccagagcgaccccatcatgctgaatgtgaactgcaagtag

SEQ ID NO: 146280 - DNA, 1437 bp, synthetic construct
  misc_feature 1..1437: note = Description of Artificial Sequence: Synthetic coding sequence
  source 1..1437: mol_type = other DNA
atgcccttcaacgtggccgagggcaaggaggtgctgctgctggtgcacaacctgccccagcagctgtttggctacagctggtacaagggggagcgggtggatggcaaccggcagatcgtgggctacgccatcggcacccagcaggccaccccaggccctgccaacagcggccgggagaccatctacccaaatgccagcctgctgatccagaatgtgacccagaatgacaccggcttctacaccctgcaggtgatcaagagtgacctggtgaatgaggaggccaccggccagttccacgtgtacccagagctgcccaagcccagcatcagcagcaacaacagcaaccctgtggaggacaaggatgctgtggccttcacctgtgagcctgagacccaggacaccacctacctgtggtggatcaacaaccagagcctgcctgtgagcccccggctgcagctgagcaatggaaacagaaccctgaccctgctgtctgtgaccagaaatgacaccggcccctatgaatgtgagatccagaaccctgtgtctgccaacagaagtgaccctgtgaccctgaatgtgacctacggccctgacacccccaccatcagccccagcgacacctactacagacctggggccaacctgagcctgagctgctatgctgccagcaaccccccagcccagtacagctggctgatcaatggcaccttccagcagagcacccaggagctgttcatccccaacatcaccgtgaacaacagcggcagctacacctgccacgccaacaacagcgtgacaggctgcaacagaaccaccgtgaagaccatcatcgtgacagagctgagccctgtggtggccaagccccagatcaaggccagcaagaccaccgtgactggagacaaggacagcgtgaacctgacctgcagcaccaatgacaccggcatcagcatccgctggttcttcaagaaccagagcctgcccagcagcgagaggatgaagctgagccagggcaacaccaccctgagcatcaaccctgtgaagagagaagatgctggcacctactggtgtgaggtgttcaaccccatcagcaagaaccagagcgaccccatcatgctgaatgagatggccttccaccacgtggccaaggccggcctgaagctgctgagcagcagcaaccccccagccagcaccagccagagcgccaagatcacagagcggcagaacctgaccatgctgccccggctggacagcaacagctgggcccaggccatcctgcccagcgtgtcccagagcgctgagatcacagacaatgccctgccccaggagaatggcctgagccctggggccatcgccggcatcgtgattggagtggtggccctggtggccctgattgctgtggccctggcctgcttcctgcactttgggaagacaggatag

SEQ ID NO: 146281 - DNA, 966 bp, synthetic construct
  misc_feature 1..966: note = Description of Artificial Sequence: Synthetic coding sequence
  source 1..966: mol_type = other DNA
atgggccacctgagcgcccccctgcaccgggtgcgggtgccctggcagggcctgctgctgacagccagcctgctgaccttctggaacccccccaccacagcccagctgaccacagagagcatgcccttcaacgtggccgagggcaaggaggtgctgctgctggtgcacaacctgccccagcagctgtttggctacagctggtacaagggggagcgggtggatggcaaccggcagatcgtgggctacgccatcggcacccagcaggccaccccaggccctgccaacagcggccgggagaccatctacccaaatgccagcctgctgatccagaatgtgacccagaatgacaccggcttctacaccctgcaggtgatcaagagtgacctggtgaatgaggaggccaccggccagttccacgtgtacccagagctgcccaagcccagcatcagcagcaacaacagcaaccctgtggaggacaaggatgctgtggccttcacctgtgagcctgagacccaggacaccacctacctgtggtggatcaacaaccagagcctgcctgtgagcccccggctgcagctgagcaatggaaacagaaccctgaccctgctgtctgtgaccagaaatgacaccggcccctatgaatgtgagatccagaaccctgtgtctgccaacagaagtgaccctgtgaccctgaatgtgacctacggccctgacacccccaccatcagccccagcgacacctactacagacctggggccaacctgagcctgagctgctatgctgccagcaaccccccagcccagtacagctggctgatcaatggcaccttccagcagagcacccaggagctgttcatccccaacatcaccgtgaacaacagcggcagctacacctgccacgccaacaacagcgtgacaggctgcaacagaaccaccgtgaagaccatcatcgtgacaggcaagtag

SEQ ID NO: 146282 - DNA, 1458 bp, synthetic construct
  misc_feature 1..1458: note = Description of Artificial Sequence: Synthetic coding sequence
  source 1..1458: mol_type = other DNA
cggggggacagagctgctgtgctggaggccttcctggagcccaagctgagcagcactggagaagatcgggccagccgccgccaccacggggcccccctgagccccaccagccagagcgcctgcaccctgggcctgctgctgacagccagcctgctgaccttctggaacccccccaccacagcccagctgaccacagagagcatgcccttcaacgtggccgagggcaaggaggtgctgctgctggtgcacaacctgccccagcagctgtttggctacagctggtacaagggggagcgggtggatggcaaccggcagatcgtgggctacgccatcggcacccagcaggccaccccaggccctgccaacagcggccgggagaccatctacccaaatgccagcctgctgatccagaatgtgacccagaatgacaccggcttctacaccctgcaggtgatcaagagtgacctggtgaatgaggaggccaccggccagttccacgtgtacccagagctgcccaagcccagcatcagcagcaacaacagcaaccctgtggaggacaaggatgctgtggccttcacctgtgagcctgagacccaggacaccacctacctgtggtggatcaacaaccagagcctgcctgtgagcccccggctgcagctgagcaatggaaacagaaccctgaccctgctgtctgtgaccagaaatgacaccggcccctatgaatgtgagatccagaaccctgtgtctgccaacagaagtgaccctgtgaccctgaatgtgacctacggccctgacacccccaccatcagccccagcgacacctactacagacctggggccaacctgagcctgagctgctacgccgccagcaaccccccagcccagtacagctggctgatcaatggcaccttccagcagagcacccaggagctgttcatccccaacatcaccgtgaacaacagcggcagctacacctgccacgccaacaacagcgtgacaggctgcaacagaaccaccgtgaagaccatcatcgtgacagagctgagccctgtggtggccaagccccagatcaaggccagcaagaccaccgtgactggagacaaggacagcgtgaacctgacctgcagcaccaatgacaccggcatcagcatccgctggttcttcaagaaccagagcctgcccagcagcgagaggatgaagctgagccagggcaacaccaccctgagcatcaaccctgtgaagcgggaggatgctggcacctactggtgtgaggtgttcaaccccatcagcaagaaccagagcgaccccatcatgctgaatgtgaactacaatgccctgccccaggagaatggcctgagccctggggccatcgccggcatcgtcatcggcgtggtggccctggtggccctgattgctgtggccctggcctgcttcctgcactttgggaagacaggatag

SEQ ID NO: 146283 - DNA, 1395 bp, synthetic construct
  misc_feature 1..1395: note = Description of Artificial Sequence: Synthetic coding sequence
  source 1..1395: mol_type = other DNA
atgggccacctgagcgcccccctgcaccgggtgcgggtgccctggcagggcctgctgctgacagccagcctgctgaccttctggaacccccccaccacagcccagctgaccacagagagcatgcccttcaacgtggccgagggcaaggaggtgctgctgctggtgcacaacctgccccagcagctgtttggctacagctggtacaagggggagcgggtggatggcaaccggcagatcgtgggctacgccatcggcacccagcaggccaccccaggccctgccaacagcggccgggagaccatctacccaaatgccagcctgctgatccagaatgtgacccagaatgacaccggcttctacaccctgcaggtgatcaagagtgacctggtgaatgaggaggccaccggccagttccacgtgtacccagagctgcccaagcccagcatcagcagcaacaacagcaaccctgtggaggacaaggatgctgtggccttcacctgtgagcctgagacccaggacaccacctacctgtggtggatcaacaaccagagcctgcctgtgagcccccggctgcagctgagcaatggaaacagaaccctgaccctgctgtctgtgaccagaaatgacaccggcccctatgaatgtgagatccagaaccctgtgtctgccaacagaagtgaccctgtgaccctgaatgtgacctacggccctgacacccccaccatcagccccagcgacacctactacagacctggggccaacctgagcctgagctgctatgctgccagcaaccccccagcccagtacagctggctgatcaatggcaccttccagcagagcacccaggagctgttcatccccaacatcaccgtgaacaacagcggcagctacacctgccacgccaacaacagcgtgacaggctgcaacagaaccaccgtgaagaccatcatcgtgacagagctgagccctgtggtggccaagccccagatcaaggccagcaagaccaccgtgactggagacaaggacagcgtgaacctgacctgcagcaccaatgacaccggcatcagcatccgctggttcttcaagaaccagagcctgcccagcagcgagaggatgaagctgagccagggcaacaccaccctgagcatcaaccctgtgaagagagaagatgctggcacctactggtgtgaggtgttcaaccccatcagcaagaaccagagcgaccccatcatgctgaatgtgaactacaatgccctgccccaggagaatggcctgagccctggggccatcgccggcatcgtgattggagtggtggccctggtggccctgattgctgtggccctggcctgcttcctgcactttgggaagacaggcagcagcggccccctgcagtag

SEQ ID NO: 146284 - DNA, 1107 bp, synthetic construct
  misc_feature 1..1107: note = Description of Artificial Sequence: Synthetic coding sequence
  source 1..1107: mol_type = other DNA
atgggccacctgagcgcccccctgcaccgggtgcgggtgccctggcagggcctgctgctgacagccagcctgctgaccttctggaacccccccaccacagcccagctgaccacagagagcatgcccttcaacgtggccgagggcaaggaggtgctgctgctggtgcacaacctgccccagcagctgtttggctacagctggtacaagggggagcgggtggatggcaaccggcagatcgtgggctacgccatcggcacccagcaggccaccccaggccctgccaacagcggccgggagaccatctacccaaatgccagcctgctgatccagaatgtgacccagaatgacaccggcttctacaccctgcaggtgatcaagagtgacctggtgaatgaggaggccaccggccagttccacgtgtacccagagctgcccaagcccagcatcagcagcaacaacagcaaccctgtggaggacaaggatgctgtggccttcacctgtgagcctgagacccaggacaccacctacctgtggtggatcaacaaccagagcctgcctgtgagcccccggctgcagctgagcaatggaaacagaaccctgaccctgctgtctgtgaccagaaatgacaccggcccctatgaatgtgagatccagaaccctgtgtctgccaacagaagtgaccctgtgaccctgaatgtgacctacggccctgacacccccaccatcagccccagcgacacctactacagacctggggccaacctgagcctgagctgctatgctgccagcaaccccccagcccagtacagctggctgatcaatggcaccttccagcagagcacccaggagctgttcatccccaacatcaccgtgaacaacagcggcagctacacctgccacgccaacaacagcgtgacaggctgcaacagaaccaccgtgaagaccatcatcgtgacagacaatgccctgccccaggagaatggcctgagccctggggccatcgccggcatcgtgattggagtggtggccctggtggccctgattgctgtggccctggcctgcttcctgcactttgggaagacaggcagcagcggccccctgcagtag

SEQ ID NO: 146285 - DNA, 906 bp, synthetic construct
  misc_feature 1..906: note = Description of Artificial Sequence: Synthetic coding sequence
  source 1..906: mol_type = other DNA
atgctggccctgcgggtggcccggggctcctggggcgccctgcggggagctgcctgggcccctggcacccggcccagcaagaggcgggcctgctgggccctgctgccccctgtgccctgctgcctgggctgcctggccgagcgctggaggctgcggcctgctgccctgggcctgcggctgcccggcatcggccagaggaaccactgcagcggggccggcaaggccgcccccaggcctgctgctggagctggagctgctgctgaggcccctgggggccagtggggccctgccagcacccccagcctgtatgagaacccctggaccatccccaacatgctgtccatgacccgcatcggcctggcccctgtgctgggctacctgatcatcgaggaggacttcaacatcgccctgggcgtgtttgccctggccggcctgacagacctgctggatggcttcatcgccaggaactgggccaaccagaggtctgccctgggcagcgccctggaccccctggccgacaagatcctgatcagcatcctgtatgtgtccctgacctatgctgacctgatccctgtgcccctgacctacatgatcatcagcagagatgtgatgctgattgctgctgtgttctacgtgcgctaccgcaccctgcccacccccaggaccctggccaagtacttcaacccctgctacgccacagcccggctgaagcccaccttcatcagcaaggtgaacacagctgtgcagctgatcctggtggccgccagcctggccgcccctgtgttcaactatgctgacagcatctacctgcagatcctgtggtgcttcaccgccttcaccacagctgccagcgcctacagctactaccactacggcaggaagacagtgcaggtgatcaaggactag

SEQ ID NO: 146286 - DNA, 609 bp, synthetic construct
  misc_feature 1..609: note = Description of Artificial Sequence: Synthetic coding sequence
  source 1..609: mol_type = other DNA
atgccccagtatgagaacccctggaccatccccaacatgctgtccatgaccagaattggcctggcccctgtgctgggctacctgatcatcgaggaggacttcaacatcgccctgggcgtgtttgccctggccggcctgacagacctgctggatggcttcatcgccaggaactgggccaaccagaggtctgccctgggcagcgccctggaccccctggccgacaagatcctgatcagcatcctgtatgtgtccctgacctacgccgacctgatccctgtgcccctgacctacatgatcatcagcagagatgtgatgctgattgctgctgtgttctacgtgcgctaccgcaccctgcccacccccaggaccctggccaagtacttcaacccctgctacgccacagcccggctgaagcccaccttcatcagcaaggtgaacacagctgtgcagctgatcctggtggccgccagcctggccgcccctgtgttcaactatgctgacagcatctacctgcagatcctgtggtgcttcaccgccttcaccacagctgccagcgcctacagctactaccactacggcaggaagacagtgcaggtgatcaaggactag

SEQ ID NO: 146287 - DNA, 618 bp, synthetic construct
  misc_feature 1..618: note = Description of Artificial Sequence: Synthetic coding sequence
  source 1..618: mol_type = other DNA
atgctggccctgcgggtggcccggggctcctggggcgccctgcggggagctgcctgggcccctggcacccggcccagcaagaggcgggcctgctgggccctgctgccccctgtgccctgctgcctgggctgcctggccgagcgctggaggctgcggcctgctgccctgggcctgcggctgcccggcatcggccagaggaaccactgcagcggggccggcaaggccgcccccaggcctgctgctggagctggagctgctgctgaggcccctgggggccagtggggccctgccagcacccccagcctgtatgagaacccctggaccatccccaacatgctgtccatgacccgcatcggcctggcccctgtgctgggctacctgatcatcgaggaggacttcaacatcgccctgggcgtgtttgccctggccggcctgacagacctgctggatggcttcatcgccaggaactgggccaaccagaggtctgccctgggcagcgccctggaccccctggccgacaagatcctgatcagcatcctgtatgtgtccctgacctatgctgacctgatcccagccaacacctgccaggtgttccagagcctgctgtgccactgctag

SEQ ID NO: 146288 - DNA, 12210 bp, synthetic construct
  misc_feature 1..12210: note = Description of Artificial Sequence: Synthetic coding sequence
  source 1..12210: mol_type = other DNA
atggccagccgggacagcaaccacgccggggagagcttcctgggcagtgatggagatgaggaggccacccgggagctggagacagaggaggagagcgagggggaggaggatgaaacagctgctgagagcgaggaggagccagacagccggctgagtgaccaggatgaggagggcaagatcaagcaggagtacatcatcagtgaccccagcttctccatggtgacagtgcagagagaagattctggcatcacctgggagaccaacagcagccgcagcagcaccccctgggccagcgaggagagccagaccagcggcgtgtgcagccgggagggcagcacagtgaacagccccccaggaaatgtgtccttcatcgtggatgaggtgaagaaggtgaggaagaggacccacaagagcaagcacggcagccccagcctgcggaggaagggcaacaggaagagaaattcctttgagagccaggatgtgcccaccaacaagaagggcagccccctgaccagcgccagccaggtgctgaccacagagaaggagaagagctacacaggcatctatgacaaggccaggaagaagaagaccaccagcaacaccccacccatcactggagccatctacaaggagcacaagcccctggtgctgcggcctgtgtacatcggcaccgtgcagtacaagatcaagatgttcaacagcgtgaaggaggagctgatccccctgcagttctacggcaccctgcccaagggctacgtgatcaaggagatccactacaggaagggcaaggatgccagcatcagcctggagccagacctggacaacagcggcagcaacacagtgtccaagaccaggaagctggtggcccagagcattgaggacaaggtgaaggaggtgtttcctccctggaggggggccctgagcaaaggaagtgagagcctgaccctgatgttcagccatgaggaccagaagaagatctatgctgacagccccctgaatgccaccagcgccctggagcacacagtgcccagctacagcagcagcggccgggcagagcagggcatccagctgcggcacagccagagcgtgccccagcagccagaagatgaggccaagccccatgaggtggagccccccagcgtgaccccagacaccccagccaccatgttcctgcggaccaccaaggaggagtgtgagctggccagccctggaacagctgcctctgaaaatgacagctctgtgagccccagctttgccaatgaggtgaagaaggaggatgtgtacagcgcccaccacagcatcagcctggaggccgccagccctggcctggccgccagcacccaggacggcctggaccctgaccaggagcagcctgacctgaccagcattgagcgggcagagcctgtgtctgccaagctgacccccacccaccccagcgtgaagggggagaaggaggagaacatgctggagcccagcatcagcctgtctgagcccctgatgctggaggagcctgagaaggaggagattgagaccagcctgcccatcgccatcaccccagagcctgaggacagcaacctggtggaggaggagatcgtggagctggactacccagagagccccctggtgtctgagaagcccttccccccccacatgagccctgaggtggagcacaaggaggaggagctgatcctgcccctgctggccgccagcagccctgagcacgtggccctgtctgaggaggagcgggaggagatcgcctctgtgtccacaggcagcgcctttgtgtctgagtacagcgtgccccaggacctgaaccacgagctgcaggagcaggagggggagcctgtgccccccagcaatgtggaggccatcgccgagcacgctgtgctgtctgaggaggagaatgaggagtttgaggcctacagccctgctgctgcccccaccagcgagagcagcctgagccccagcaccacagagaagaccagcgagaaccagagccccctcttcagcacagtgaccccagagtacatggtgctgtctggagatgaggccagcgagagcggctgctacaccccagacagcaccagcgccagcgagtacagcgtgcccagcctggccaccaaggagagcctgaagaagaccatcgacaggaagagccccctcatcctgaagggcgtgtctgagtacatgatccccagcgaggagaaggaggacaccggcagcttcaccccagctgtggccccagccagcgagcccagcctgagccccagcaccacagagaagaccagcgagtgccagagccccctgcccagcacagccaccagcgagcacgtggtgcccagcgagggggaggacctgggcagcgagcgcttcaccccagacagcaagctgatcagcaaatatgctgcccccctgaatgccacccaggagagccagaagaagatcatcaatgaggccagccagttcaagcccaagggcatcagcgagcacacagtgctgtctgtggatggcaaggaggtgattggccccagcagcccagacctggtggtggccagcgagcacagcttccccccccacaccacagagatgaccagcgagtgccaggccccacccctgagcgccaccccatctgaatatgtggtgctgagtgatgaggaggccgtggagctggagcgctacacccccagcagcaccagcgccagcgagttctctgtgcccccctatgccaccccagaggcccaggaggaggagatcgtgcacaggagcctgaacctgaagggggccagcagccccatgaacctgtctgaggaggaccaggaggacatcggccccttctccccagattctgcctttgtgtctgagttctccttccccccctatgccacccaggaggccgagaagcgggagtttgaatgtgacagccccatctgcctgaccagccccagcgagcacaccatcctgagtgatgaggacacagaggaggccgagctgttctccccagacagcgccagccaggtgtccatcccccccttccgcatcagcgagacagagaagaatgagctggagccagacagcctgctgacagctgtgtctgccagcggctacagctgcttcagcgaggctgatgaggaggacatcggcagcacagctgccacccctgtgtctgagcagttcagcagcagccagaagcagaaggccgagaccttccccctgatgagccccctggaggacctgagcctgccccccagcacagacaagtctgagaaggccgagatcaagccagagatccccaccaccagcacctctgtgtctgagtacctgatcctggcccagaagcagaagacccaggcctacctggagcctgagagcgaggacctgatccccagccacctgaccagcgaggtggagaagggggagcgggaggccagcagctctgtggccgccatcccagctgccctgcctgcccagagcagcatcgtgaaggaggagaccaagccagccagcccccacagcgtgctgcctgacagcgtgcctgccatcaagaaggagcaggagcccacagctgccctgaccctgaaggctgctgatgagcagatggccctgagcaaggtgaggaaggaggagatcgtgcctgacagccaggaggccacagcccacgtgtcccaggaccagaagatggagccccagccccccaacgtgcctgagagcgagatgaagtacagcgtgctgcctgacatggtggatgagcccaagaagggcgtgaagcccaagctggtgctgaatgtgaccagcgagctggagcagaggaagctgagcaagaatgaacctgaggtgatcaagccctacagccccctgaaggagaccagcctgagcggccctgaggccctgtctgctgtgaagatggagatgaagcatgacagcaagatcaccaccacccccatcgtgctgcacagcgccagcagtggagtggagaagcaggtggagcacggccccccagccctggccttcagcgccctgtctgaggagatcaagaaggagattgagcccagcagcagcaccaccacagcctctgtgaccaagctggacagcaacctgaccagggctgtgaaggaggagatccccacagacagcagcctcatcacccctgtggacaggcctgtgctgaccaaggtgggcaaaggagagctgggcagcggcctgccccccctggtgaccagcgcagatgagcacagcgtgctggccgaggaggacaaggtggccatcaagggggccagccccatcgagaccagcagcaagcacctggcctggagcgaggccgagaaggagatcaagtttgacagcctgcccagcgtgagcagcattgctgagcacagcgtgctgtctgaggtggaggccaaggaggtgaaggccggcctgcctgtgatcaagaccagcagcagccagcacagcgacaagtctgaggaggcccgggtggaggacaagcaggacctgctcttcagcacagtgtgtgacagcgagcggctggtgagcagccagaagaagagcctgatgagcaccagcgaggtgctggagcctgagcacgagctgcccctgagcctgtggggcgagatcaagaagaaggagacagagctgcccagcagccagaatgtgtccccagccagcaagcacatcatccccaagggcaaggatgaggagacagccagcagcagccctgagctggagaacctggccagcggcctggcccccaccctgctgctgctgagtgatgacaagaacaagccagctgtggaggtgagcagcacagcccagggcgacttccccagcgagaagcaggatgtggccctggccgagctgagcctggagcctgagaagaaggacaagccccaccagcccctggagctgcccaatgccggcagcgagttcagcagtgacctgggccggcagagcggcagcatcggcaccaagcaggccaagagccccatcacagaaacagaagattctgtgctggagaagggccctgctgagctgcggagccgggagggcaaggaggagaaccgggagctgtgtgccagcagcaccatgcctgccatcagcgagctgagcagcctgctgcgggaggagagccagaatgaggagatcaagcccttcagccccaagatcatcagcctggagagcaaggagcccccagcctctgtggccgagggcggcaaccctgaggagttccagcccttcaccttcagcctgaagggcctgtctgaggaggtgagccaccctgctgacttcaagaagggcggcaaccaggagatcggccccctgcccccaactggaaacctgaaggcccaggtgatgggagacatcctggacaagctgtctgaggagaccggccaccccaacagcagccaggtgctgcagagcatcacagagcccagcaagatcgcccccagcgacctgctggtggagcagaagaagacagagaaggccctgcacagcgaccagacagtgaagctgcctgatgtgtccaccagcagcgaggacaagcaggacctgggcatcaagcagttcagcctgatgagggagaacctgcccctggagcagagcaagagcttcatgaccaccaagccagcagatgtgaaggagaccaagatggaggagttcttcatcagccccaaggatgagaactggatgctgggcaagccagaaaatgtggccagccagcacgagcagagaattgctggctctgtgcagctggacagcagcagcagcaatgagctgcggcccggccagctgaaggctgctgtgagcagcaaggaccacacctgtgaggtgaggaagcaggtgctgccccacagcgctgaggagagccacctgagcagccaggaggccgtgtctgccctggacaccagcagcggcaacacagagaccctgagcagcaagagctacagcagcgaggaggtgaagctggccgaggagcccaagagcctggtgctggccggaaatgtggagaggaacattgctgagggcaaggagatccacagcctgatggagagcgagagcctgctgctggagaaggccaacacagagctgtcctggcccagcaaggaggacagccaggagaagatcaagctgcccccagagcgcttcttccagaagcctgtgtctggcctgtctgtggagcaggtgaagtctgagaccatcagcagctctgtgaagacagcccacttccctgctgagggcgtggagcccgccctgggcaatgagaaggaggcccacaggagcaccccacccttccctgaggagaagcccctggaggagagcaagatggtgcagagcaaggtgattgatgatgctgatgagggcaagaagcccagccctgaggtgaagatccccacccagaggaagcccatcagcagcatccacgcccgggagccccagagccctgagagccctgaggtgacccagaacccccccacccagcccaaggtggccaagccagacctgcctgaggagaagggcaagaagggcatcagcagcttcaagtcctggatgagcagcctcttcttcggcagcagcaccccagacaacaaggtggccgagcaggaggacctggagacccagcccagccccagcgtggagaaggctgtgacagtgattgatcctgagggcaccatccccaccaacttcaacgtggccgagaagccagctgaccacagcctgtctgaggtgaagctgaagacagcagatgagccccggggcaccctggtgaagtctggagatggccagaatgtgaaggagaagtccatgatcctgagcaatgtggaggacctgcagcagcccaagttcatcagcgaggtgtccagagaagattatggcaagaaggagatcagcggggacagcgaggagatgaacatcaacagcgtggtgaccagcgcagatggagagaacctggagatccagagctacagcctgattggagagaagctggtgatggaggaggccaagaccatcgtgccccctcatgtgacagacagcaagagggtgcagaagccagccatcgccccacccagcaagtggaacatcagcatcttcaaggaggagcccaggagtgaccagaagcagaagagcctgctgagctttgatgtggtggacaaggtgccccagcagcccaagagcgccagcagcaactttgccagcaagaacatcaccaaggagagcgagaagccagagagcatcatcctgcctgtggaggagagcaagggcagcctgattgacttcagcgaggaccggctgaagaaggagatgcagaaccccaccagcctgaagatcagcgaggaggagaccaagctgcggtctgtgagccccacagagaagaaggacaacctggagaacagaagctacaccctggccgagaagaaggtgctggccgagaagcagaacagcgtggcccccctggagctgcgggacagcaatgaaattggcaagacccagatcaccctgggcagccgcagcacagagctgaaggagagcaaggcagatgccatgccccagcacttctaccagaatgaagactacaatgaaagacccaagatcatcgtgggcagcgagaaggagaagggggaggagaaggagaaccaggtgtatgtgctgtctgagggcaagaagcagcaggagcaccagccctacagcgtgaatgtggccgagagcatgagccgggagagtgacatcagcctgggccacagcctgggggagacccagagcttcagcctggtgaaggccacctctgtgacagagaagtctgaggccatgctggccgaggcccaccctgagatccgggaggccaaggctgtgggcacccagccccaccccctggaggagagcaaggtgctggtggagaagaccaagaccttcctgcctgtggccctgagctgcagagatgaaattgagaaccacagcctgagccaggagggcaacctggtgctggagaagagcagccgggacatgccagaccacagcgaggagaaggagcagttccgggagagcgagctgagcaaaggaggctctgtggacatcaccaaggagaccgtgaagcagggcttccaggagaaggctgtgggcacccagccccggcccctggaggagagcaaggtgctggtggagaagaccaagaccttcctgcctgtggtgctgagctgccatgatgaaattgagaaccacagcctgagccaggagggcaacctggtgctggagaagagcagccgggacatgccagaccacagcgaggagaaggagcagttcaaggagagcgagctgtggaagggcggctctgtggacatcaccaaggagagcatgaaggagggcttccccagcaaggagagcgagaggaccctggcccggccctttgatgagaccaagagcagcgagaccccaccctacctgctgagccctgtgaagccccagaccctggccagcggggccagccctgagatcaatgctgtgaagaagaaggagatgcccaggtctgagctgaccccagagcggcacacagtgcacaccatccagaccagcaaggatgacaccagtgatgtgcccaagcagagcgtgctggtgtccaagcaccacctggaggccgctgaggacaccagggtgaaggagcccctgagcagcgccaagagcaactatgcccagttcatcagcaacaccagcgccagcaatgctgacaagatggtgagcaacaaggagatgcccaaggagcctgaggacacctacgccaagggggaggacttcaccgtgaccagcaagccagctggcctgtctgaggaccagaagacagccttcagcatcatcagcgagggctgtgagatcctgaacatccacgccccagccttcatcagcagcattgaccaggaggagagcgagcagatgcaggacaagctggagtacctggaggagaaggccagcttcaagaccatccccctgcctgatgattctgaaacagtggcctgccacaagaccctgaagagccggctggaggatgagaaggtgacccccctgaaggagaacaagcagaaggagacccacaagaccaaggaggagatcagcacagattctgaaacagacctgtccttcatccagcccaccatccccagcgaggaggactactttgagaagtacaccctgattgactacaacatcagcccagaccctgagaagcagaaggccccccagaagctgaatgtggaggagaagctgagcaaggaggtgacagaggagaccatctccttccctgtgtcctctgtggagagcgccctggagcacgagtatgacctggtgaagctggatgagagcttctacggccctgagaagggccacaacatcctgagccaccctgagacccagagccagaacagcgctgacagaaatgtgtccaaggacaccaagagagatgtggacagcaagagccctggcatgcccctgtttgaggccgaggagggcgtgctgagcaggacccagatcttccccaccaccatcaaggtgattgatcctgagttcctggaggagcccccagccctggccttcctgtacaaggacctgtatgaggaggccgtgggggagaagaagaaggaggaggagacagccagcgagggggacagcgtgaacagcgaggccagcttccccagcaggaacagcgacacagatgatggcaccggcatctactttgagaagtacatcctgaaggatgacatcctgcatgacaccagcctgacccagaaggaccagggccagggcctggaggagaagagggtgggcaaggatgacagctaccagcccatcgctgctgagggggagatctggggcaagtttggcaccatctgccgggagaagagcctggaggagcagaagggcgtgtatggagagggggagagcgtggaccacgtggagaccgtgggcaatgtggccatgcagaagaaggcccccatcacagaagatgtgcgggtggccacccagaagatctcctatgctgtgccctttgaggacacccaccacgtgctggagcgggcagatgaagctggcagccacggcaatgaggtgggcaatgccagccctgaggtgaacctgaatgtgcctgtgcaggtgtccttccctgaggaggagtttgccagcggggccacccacgtgcaggagaccagcctggaggagcccaagatcctggtgcccccagagcccagcgaggagcggctgaggaacagccctgtgcaggatgaatatgagttcacagagagcctgcacaatgaggtggtgccccaggacatcctgtctgaggagctgagcagcgagagcaccccagaagatgtgctgagccagggcaaggagagctttgagcacatcagtgaaaatgaatttgccagcgaggccgagcagagcaccccagctgagcagaaggagctgggcagcgagaggaaggaggaggaccagctgagcagcgaggtggtgacagagaaggcccagaaggagctgaagaagagccagattgacacctactgctacacctgcaagtgccccatcagcgccacagacaaggtgtttggcacccacaaggaccacgaggtgtccaccctggacacagccatctctgctgtgaaggtgcagctggccgagttcctggagaacctgcaggagaagagcctgagaattgaggcctttgtgtctgaaattgagagcttcttcaacaccatcgaggagaactgcagcaagaatgagaagaggctggaggagcagaatgaggagatgatgaagaaggtgctggcccagtatgatgagaaggcccagagctttgaggaggtgaagaagaagaagatggagttcctgcacgagcagatggtgcacttcctgcagagcatggacacagccaaggacaccctggagaccatcgtgcgggaggccgaggagctggatgaggccgtgttcctgaccagctttgaggagatcaatgaaaggctgctgagcgccatggagagcacagccagcctggagaagatgcctgctgccttcagcctgtttgagcactatgatgacagcagcgcccggagtgaccagatgctgaagcaggtggccgtgccccagcccccccggctggagccccaggagcccaacagcgccaccagcaccaccatcgctgtgtactggagcatgaacaaggaggatgtgattgacagcttccaggtgtactgcatggaggagccccaggatgaccaggaggtgaatgagctggtggaggagtaccgcctgactgtgaaggagagctactgcatctttgaggacctggagccagaccgctgctaccaggtgtgggtgatggctgtgaacttcaccggctgcagcctgcccagcgagcgggccatcttcagaacagcccccagcacccctgtgatccgggcagaggactgcaccgtgtgctggaacacagccaccatccgctggaggcccaccaccccagaggccacagagacctacaccctggagtactgccggcagcacagccctgagggggagggcctgcgctccttcagcggcatcaagggcctgcagctgaaggtgaacctgcagcccaatgacaactacttcttctacgtgcgggccatcaatgccttcggcaccagcgagcagagcgaggccgccctgatcagcacccggggcacccgcttcctgctgctgcgggagacagcccacccagccctgcacatcagcagcagcggcaccgtcatcagctttggagagcggcggcggctgacagagatccccagcgtgctgggggaggagctgcccagctgtggccagcactactgggagaccaccgtgacagactgcccagcctaccgcctgggcatctgcagcagcagcgctgtgcaggccggggccctgggccagggcgagacctcctggtacatgcactgcagcgagccccagcgctacaccttcttctacagcggcatcgtgtctgatgtgcacgtgacagagaggcctgcccgggtgggcatcctgctggactacaacaaccagaggctcatcttcatcaatgctgagagcgagcagctgctcttcatcatccgccaccgcttcaatgaaggagtgcacccagcctttgccctggagaagccaggcaagtgcaccctgcacctgggcatcgagcccccagattctgtgcgccacaagtag

SEQ ID NO: 146289 - DNA, 678 bp, synthetic construct
  misc_feature 1..678: note = Description of Artificial Sequence: Synthetic coding sequence
  source 1..678: mol_type = other DNA
atggacctgcgggccggggacagctggggcatgctggcctgcctgtgcaccgtgctgtggcacctgcctgctgtgcctgccctgaacagaactggagaccccggccctggccccagcatccagaagacctatgacctgacccgctacctggagcaccagctgcggagcctggccggcacctacctgaactacctgggcccccccttcaatgaaccagacttcaaccccccccggctgggcgctgagaccctgccccgggccaccgtggacctggaggtgtggaggagcctgaatgacaagctgcggctgacccagaactatgaggcctacagccacctgctgtgctacctgcggggcctgaaccggcaggccgccacagctgagctgcggcgcagcctggcccacttctgcaccagcctgcagggcctgctgggcagcattgctggggtgatggccgccctgggctaccccctgccccagcccctgcctggaacagagcccacctggaccccaggccctgcccacagcgacttcctgcagaagatggatgacttctggctgctgaaggagctgcagacctggctgtggaggtctgccaaggacttcaaccggctgaagaagaagatgcagcccccagctgctgctgtgaccctgcacctgggcgcccacggcttctag

SEQ ID NO: 146290 - DNA, 648 bp, synthetic construct
  misc_feature 1..648: note = Description of Artificial Sequence: Synthetic coding sequence
  source 1..648: mol_type = other DNA
atgctggcctgcctgtgcaccgtgctgtggcacctgcctgctgtgcctgccctgaacagaactggagaccccggccctggccccagcatccagaagacctatgacctgacccgctacctggagcaccagctgcggagcctggccggcacctacctgaactacctgggcccccccttcaatgaaccagacttcaaccccccccggctgggcgctgagaccctgccccgggccaccgtggacctggaggtgtggaggagcctgaatgacaagctgcggctgacccagaactatgaggcctacagccacctgctgtgctacctgcggggcctgaaccggcaggccgccacagctgagctgcggcgcagcctggcccacttctgcaccagcctgcagggcctgctgggcagcattgctggggtgatggccgccctgggctaccccctgccccagcccctgcctggaacagagcccacctggaccccaggccctgcccacagcgacttcctgcagaagatggatgacttctggctgctgaaggagctgcagacctggctgtggaggtctgccaaggacttcaaccggctgaagaagaagatgcagcccccagctgctgctgtgaccctgcacctgggcgcccacggcttctag

SEQ ID NO: 146291 - DNA, 648 bp, synthetic construct; identical to SEQ ID NO: 146290
  misc_feature 1..648: note = Description of Artificial Sequence: Synthetic coding sequence
  source 1..648: mol_type = other DNA

SEQ ID NO: 146292 - DNA, 1881 bp, synthetic construct
  misc_feature 1..1881: note = Description of Artificial Sequence: Synthetic coding sequence
  source 1..1881: mol_type = other DNA
atgctggcctttgctgccaggacagtggtgaagcccctgggcttcctgaagcccttcagcctgatgaaggccagcagccgcttcaaggcccaccaggatgccctgccccggctgcctgtgccccccctgcagcagagcctggaccactacctgaaggccctgcagcccatcgtgtctgaggaggagtgggcccacaccaagcagctggtggatgagttccaggccagcggcggcgtgggggagcggctgcagaagggcctggagcggcgggccaggaagacagagaactggctgtctgagtggtggctgaagacagcctacctgcagtaccggcagcctgtggtgatctacagcagccctggggtgatgctgcccaagcaggactttgtggacctgcagggccagctgcgctttgctgccaagctgattgaaggagtgctggacttcaaggtgatgattgacaatgagaccctgcctgtggagtacctgggcggcaagcccctgtgcatgaaccagtactaccagatcctgagcagctgccgggtgcccggccccaagcaggacacagtgagcaacttcagcaagaccaagaagccacccacccacatcaccgtggtgcacaactaccagttctttgagctggatgtgtaccacagtgatggcacccccctgacagctgaccagatctttgtgcagctggagaagatctggaacagcagcctgcagaccaacaaggagcctgtgggcatcctgaccagcaaccacaggaacagctgggccaaggcctacaacaccctcatcaaggacaaggtgaacagagattctgtgcgcagcatccagaagagcatcttcaccgtgtgcctggatgccaccatgccccgggtgtctgaagatgtgtaccgcagccacgtggccggccagatgctgcacggcggcggcagccggctgaacagcggcaaccgctggtttgacaagaccctgcagttcatcgtggctgaagatggcagctgtggcctggtgtatgaacatgctgctgctgagggcccccccatcgtgaccctgctggactatgtgattgagtacaccaagaagccagagctggtgcgcagccccctggtgcccctgcccatgcccaagaagctgcgcttcaacatcaccccagagatcaagagtgacatcgagaaggccaagcagaacctgagcatcatgatccaggacctggacatcaccgtgatggtgttccaccactttgggaaggacttccccaagtctgagaagctgagcccagatgccttcatccagatggccctgcagctggcctactaccgcatctacggccaggcctgtgccacctatgagagcgccagcctgaggatgttccacctgggccgcacagacaccatccgcagcgcctccatggacagcctgacctttgtgaaggccatggatgacagctctgtgacagagcaccagaaggtggagctgctgaggaaggctgtgcaggcccaccggggctacacagaccgggccatccggggggaggcctttgacagacacctgctgggcctgaagctgcaggccatcgaggacctggtgtccatgccagacatcttcatggacaccagctatgccatcgccatgcacttccacctgagcaccagccaggtgcctgccaagacagactgtgtgatgttcttcggccctgtggtgcctgatggctacggcgtgtgctacaaccccatggaggcccacatcaacttcagcctgagcgcctacaacagctgtgccgagaccaatgctgcccggctggcccactacctggagaaggccctgctggacatgagggccctgctgcagagccacccccgggccaagctgtag

SEQ ID NO: 146293 - DNA, 1638 bp, synthetic construct
  misc_feature 1..1638: note = Description of Artificial Sequence: Synthetic coding sequence
  source 1..1638: mol_type = other DNA
atgctggcctttgctgccaggacagtggtgaagcccctgggcttcctgaagcccttcagcctgatgaaggccagcagccgcttcaaggcccaccaggatgccctgccccggctgcctgtgccccccctgcagcagagcctggaccactacctgaaggccctgcagcccatcgtgtctgaggaggagtgggcccacaccaagcagctggtggatgagttccaggccagcggcggcgtgggggagcggctgcagaagggcctggagcggcgggccaggaagacagagaactggctgtctgagtggtggctgaagacagcctacctgcagtaccggcagcctgtggtgatctacagcagccctggggtgatgctgcccaagcaggactttgtggacctgcagggccagctgcgctttgctgccaagctgattgaaggagtgctggacttcaaggtgatgattgacaatgagaccctgcctgtggagtacctgggcggcaagcccctgtgcatgaaccagtactaccagatcctgagcagctgccgggtgcccggccccaagcaggacacagtgagcaacttcagcaagaccaagaagccacccacccacatcaccgtggtgcacaactaccagttctttgagctggatgtgtaccacagtgatggcacccccctgacagctgaccagatctttgtgcagctggagaagatctggaacagcagcctgcagaccaacaaggagcctgtgggcatcctgaccagcaaccacaggaacagctgggccaaggcctacaacaccctcatcaaggacaaggtgaacagagattctgtgcgcagcatccagaagaagaagccagagctggtgcgcagccccctggtgcccctgcccatgcccaagaagctgcgcttcaacatcaccccagagatcaagagtgacatcgagaaggccaagcagaacctgagcatcatgatccaggacctggacatcaccgtgatggtgttccaccactttgggaaggacttccccaagtctgagaagctgagcccagatgccttcatccagatggccctgcagctggcctactaccgcatctacggccaggcctgtgccacctatgaaagtgccagcctgaggatgttccacctgggccgcacagacaccatccgcagcgcctccatggacagcctgacctttgtgaaggccatggatgacagctctgtgacagagcaccagaaggtggagctgctgaggaaggctgtgcaggcccaccggggctacacagaccgggccatccggggggaggcctttgacagacacctgctgggcctgaagctgcaggccatcgaggacctggtgtccatgccagacatcttcatggacaccagctatgccatcgccatgcacttccacctgagcaccagccaggtgcctgccaagacagactgtgtgatgttctttggacctgtggtgcctgatggctatggagtgtgctacaaccccatggaggcccacatcaacttcagcctgagcgcctacaacagctgtgccgagaccaatgctgcccggctggcccactacctggagaaggccctgctggacatgagggccctgctgcagagccacccccgggccaagctgtag

SEQ ID NO: 146294 - DNA, 2322 bp, synthetic construct
  misc_feature 1..2322: note = Description of Artificial Sequence: Synthetic coding sequence
  source 1..2322: mol_type = other DNA
atggccgaggcccaccaggccgtggccttccagttcaccgtgaccccagatggcatcgacctgcggctgagccatgaggccctgcggcagatctacctgagcggcctgcacagctggaagaagaagttcatccgcttcaagaatggcatcatcaccggggtgtacccagccagccccagctcctggctgattgtggtggtgggcgtgatgaccaccatgtatgccaagattgaccccagcctgggcatcatcgccaagatcaacagaaccctggagacagccaactgcatgagcagccagaccaagaatgtggtgtctggagtgctgtttggcaccggcctgtgggtggccctgattgtgaccatgagatacagcctgaaggtgctgctgagctaccacggctggatgttcacagagcacggcaagatgagccgggccaccaagatctggatgggcatggtgaagatcttcagcggcaggaagcccatgctgtacagcttccagaccagcctgccccggctgcctgtgcctgctgtgaaggacacagtgaaccgctacctgcagagcgtgcggcccctgatgaaggaggaggacttcaagaggatgacagccctggcccaggactttgctgtgggcctgggcccccggctgcagtggtacctgaagctgaagtcctggtgggccaccaactacgtgtctgactggtgggaggagtacatctacctgcggggccggggccccctgatggtgaacagcaactactatgccatggacctgctgtacatcctgcccacccacatccaggccgcccgggctggaaatgccatccacgccatcctgctgtacagaaggaagctggaccgggaggagatcaagcccatccggctgctgggcagcaccatccccctgtgcagcgcccagtgggagaggatgttcaacaccagccgcatccctggagaggagacagacaccatccagcacatgagggacagcaagcacatcgtggtgtaccaccggggccgctacttcaaggtgtggctgtaccatgatggccgcctgctgaagccccgggagatggagcagcagatgcagaggatcctggacaacaccagcgagccccagcctggagaggcccggctggccgccctgacagctggggacagagtgccctgggcccgctgccggcaggcctacttcggccggggcaagaacaagcagagcctggatgctgtggagaaggccgccttctttgtgaccctggatgaaacagaggagggctacagaagtgaggaccctgacacctccatggacagctatgccaagagcctgctgcacggccgctgctatgaccgctggtttgacaagagcttcacctttgtggtgttcaagaatggcaagatgggcctgaatgctgagcacagctgggcagatgcccccatcgtggcccacctgtgggagtatgtgatgagcattgacagcctgcagctgggctatgcagaagatggccactgcaagggggacatcaaccccaacatcccctaccccacccggctgcagtgggacatccctggagagtgccaggaggtgattgagaccagcctgaacacagccaacctgctggccaatgatgtggacttccacagcttcccctttgtggccttcggcaagggcatcatcaagaagtgcaggaccagcccagatgcctttgtgcagctggccctgcagctggcccactacaaggacatgggcaagttctgcctgacctatgaggcctccatgaccaggctcttccgggagggccgcacagagaccgtgcgcagctgcaccacagagagctgtgactttgtgcgggccatggtggaccctgcccagacagtggagcagaggctgaagctgttcaagctggccagcgagaagcaccagcacatgtaccgcctggccatgactggaagtggcatcgacagacacctgttctgcctgtatgtggtgtccaagtacctggccgtggagagccccttcctgaaggaggtgctgtctgagccctggaggctgagcaccagccagaccccccagcagcaggtggagctgtttgacctggagaacaacccagaatatgtgagcagcggcggcggcttcggccctgtggctgatgatggctacggcgtgtcctacatcctggtgggagaaaatctcatcaacttccacatcagcagcaagttcagctgcccagagacagacagccaccgcttcggccgccacctgaaggaggccatgacagacatcatcaccctgtttggcctgagcagcaacagcaagaagtag

SEQ ID NO: 146295 - DNA, 2271 bp, synthetic construct
  misc_feature 1..2271: note = Description of Artificial Sequence: Synthetic coding sequence
  source 1..2271: mol_type = other DNA
atggccgaggcccaccaggccgtggccttccagttcaccgtgaccccagatggcatcgacctgcggctgagccatgaggccctgcggcagatctacctgagcggcctgcacagctggaagaagaagttcatccgcttcaagaatggcatcatcaccggggtgtacccagccagccccagctcctggctgattgtggtggtgggcgtgatgaccaccatgtatgccaagattgaccccagcctgggcatcatcgccaagatcaacagaaccctggagacagccaactgcatgagcagccagaccaagaatgtggtgtctggagtgctgtttggcaccggcctgtgggtggccctgattgtgaccatgagatacagcctgaaggtgctgctgagctaccacggctggatgttcacagagcacggcaagatgagccgggccaccaagatctggatgggcatggtgaagatcttcagcggcaggaagcccatgctgtacagcttccagaccagcctgccccggctgcctgtgcctgctgtgaaggacacagtgaaccgctacctgcagagcgtgcggcccctgatgaaggaggaggacttcaagaggatgacagccctggcccaggactttgctgtgggcctgggcccccggctgcagtggtacctgaagctgaagtcctggtgggccaccaactacgtgtctgactggtgggaggagtacatctacctgcggggccggggccccctgatggtgaacagcaactactatgccatggacctgctgtacatcctgcccacccacatccaggccgcccgggctggaaatgccatccacgccatcctgctgtacagaaggaagctggaccgggaggagatcaagcccatccggctgctgggcagcaccatccccctgtgcagcgcccagtgggagaggatgttcaacaccagccgcatccctggagaggagacagacaccatccagcacatgagggacagcaagcacatcgtggtgtaccaccggggccgctacttcaaggtgtggctgtaccatgatggccgcctgctgaagccccgggagatggagcagcagatgcagaggatcctggacaacaccagcgagccccagcctggagaggcccggctggccgccctgacagctggggacagagtgccctgggcccgctgccggcaggcctacttcggccggggcaagaacaagcagagcctggatgctgtggagaaggccgccttctttgtgaccctggatgaaacagaggagggctacagaagtgaggaccctgacacctccatggacagctatgccaagagcctgctgcacggccgctgctatgaccgctggtttgacaagagcttcacctttgtggtgttcaagaatggcaagatgggcctgaatgctgagcacagctgggcagatgcccccatcgtggcccacctgtgggagtatgtgatgagcattgacagcctgcagctgggctatgcagaagatggccactgcaagggggacatcaaccccaacatcccctaccccacccggctgcagtgggacatccctggagagtgccaggaggtgattgagaccagcctgaacacagccaacctgctggccaatgatgtggacttccacagcttcccctttgtggccttcggcaagggcatcatcaagaagtgcaggaccagcccagatgcctttgtgcagctggccctgcagctggcccactacaaggacatgggcaagttctgcctgacctatgaggcctccatgaccaggctcttccgggagggccgcacagagaccgtgcgcagctgcaccacagagagctgtgactttgtgcgggccatggtggaccctgcccagacagtggagcagaggctgaagctgttcaagctggccagcgagaagcaccagcacatgtaccgcctggccatgactggaagtggcatcgacagacacctgttctgcctgtatgtggtgtccaagtacctggccgtggagagccccttcctgaaggaggtgctgtctgagccctggaggctgagcaccagccagaccccccagcagcaggtggagctgtttgacctggagaacaacccagaatatgtgagcagcggcggcggcttcggccctgtggctgatgatggctacggcgtgtcctacatcctggtgggagaaaatctcatcaacttccacatcagcagcaagttcagctgcccagagaccggcatcatcagccagggccccagcagtgacacctag

SEQ ID NO: 146296 - DNA, 2322 bp, synthetic construct; identical to SEQ ID NO: 146294
  misc_feature 1..2322: note = Description of Artificial Sequence: Synthetic coding sequence
  source 1..2322: mol_type = other DNA

SEQ ID NO: 146297 - DNA, 2322 bp, synthetic construct; identical to SEQ ID NO: 146294
  misc_feature 1..2322: note = Description of Artificial Sequence: Synthetic coding sequence
  source 1..2322: mol_type = other DNA

SEQ ID NO: 146298 - DNA, 2271 bp, synthetic construct; identical to SEQ ID NO: 146295
  misc_feature 1..2271: note = Description of Artificial Sequence: Synthetic coding sequence
  source 1..2271: mol_type = other DNA

SEQ ID NO: 146299 - DNA, 2319 bp, synthetic construct
  misc_feature 1..2319: note = Description of Artificial Sequence: Synthetic coding sequence
  source 1..2319: mol_type = other DNA
atggccgaggcccaccaggccgtggccttccagttcaccgtgaccccagatggagtggacttccggctgagccgggaggccctgaagcacgtgtacctgagcggcatcaacagctggaagaagaggctcatccgcatcaagaatggcatcctgcggggcgtgtacccaggcagccccacctcctggctggtggtgatcatggccaccgtgggcagcagcttctgcaatgtggacatcagcctgggcctggtgtcctgcatccagcgctgcctgccccagggctgcggcccctaccagaccccccagacccgggccctgctgtccatggccatcttcagcactggagtgtgggtgacaggcatcttcttcttccggcagaccctgaagctgctgctgtgctaccacggctggatgtttgagatgcacggcaagaccagcaacctgacccgcatctgggccatgtgcatccggctgctgagcagccgccaccccatgctgtacagcttccagaccagcctgcccaagctgcctgtgccccgggtgtctgccaccatccagcgctacctggagagcgtgcggcccctgctggatgatgaggagtactacaggatggagctgctggccaaggagttccaggacaagacagccccccggctgcagaagtacctggtgctgaagtcctggtgggccagcaactacgtgtctgactggtgggaggagtacatctacctgcggggccgcagccccctgatggtgaacagcaactactacgtgatggacctggtgctgatcaagaacacagatgtgcaggccgcccggctgggcaacatcatccacgccatgatcatgtacagaaggaagctggaccgggaggagatcaagcctgtgatggccctgggcatcgtgcccatgtgcagctaccagatggagaggatgttcaacaccacccgcatccctgggaaggacacagatgtgctgcagcacctgagtgacagccgccacgtggccgtgtaccacaagggccgcttcttcaagctgtggctgtatgaaggagcccggctgctgaagccccaggacctggagatgcagttccagaggatcctggatgaccccagccccccccagcccggggaggagaagctggccgccctgacagctgggggccgggtggagtgggcccaggcccggcaggccttcttcagcagcggcaagaacaaggccgccctggaggccatcgagagagctgccttctttgtggccctggatgaggagagctacagctatgaccctgaagatgaggccagcctgagcctgtatggcaaggccctgctgcacggcaactgctacaaccgctggtttgacaagagcttcaccctcatctccttcaagaatggccagctgggcctgaatgctgagcacgcctgggcagatgcccccatcatcggccacctgtgggagtttgtgctgggcacagacagcttccacctgggctacacagaaacaggccactgcctgggcaagcccaacccagccctggccccacccacccggctgcagtgggacatccccaagcagtgccaggccgtcatcgagagcagctaccaggtggccaaggccctggctgatgatgtggagctgtactgcttccagttcctgccctttgggaagggcctcatcaagaagtgcaggaccagcccagatgcctttgtgcagatcgccctgcagctggcccacttccgggaccggggcaagttctgcctgacctatgaggcctccatgaccaggatgttccgggagggccgcacagagaccgtgcgcagctgcaccagcgagagcacagcctttgtgcaggccatgatggagggcagccacaccaaggctgacctgcgggacctcttccagaaggccgccaagaagcaccagaacatgtaccgcctggccatgactggagctggcatcgacagacacctgttctgcctgtacctggtgtccaagtacctgggcgtgagcagccccttcctggccgaggtgctgtctgagccctggaggctgagcaccagccagatcccccagagccagatccgcatgtttgatcctgagcagcaccccaaccacctgggcgctgggggcggcttcggccctgtggctgatgatggctacggcgtgtcctacatgattgctggggagaacaccatcttcttccacatcagcagcaagttcagcagcagcgagaccaatgcccagcgcttcggcaaccacatcaggaaggccctgctggacattgctgacctcttccaggtgcccaaggcctacagctag

SEQ ID NO: 146300 - DNA, 2319 bp, synthetic construct; identical to SEQ ID NO: 146299
  misc_feature 1..2319: note = Description of Artificial Sequence: Synthetic coding sequence
  source 1..2319: mol_type = other DNA

SEQ ID NO: 146301 - DNA, 2319 bp, synthetic construct; identical to SEQ ID NO: 146299
  misc_feature 1..2319: note = Description of Artificial Sequence: Synthetic coding sequence
  source 1..2319: mol_type = other DNA

SEQ ID NO: 146302 - DNA, 2319 bp, synthetic construct; identical to SEQ ID NO: 146299
  misc_feature 1..2319: note = Description of Artificial Sequence: Synthetic coding sequence
  source 1..2319: mol_type = other DNA

SEQ ID NO: 146303 - DNA, 378 bp, synthetic construct
  misc_feature 1..378: note = Description of Artificial Sequence: Synthetic coding sequence
  source 1..378: mol_type = other DNA
atggccgaggcccaccaggccgtggccttccagttcaccgtgaccccagatggagtggacttccggctgagccgggaggccctgaagcacgtgtacctgagcggcatcaacagctggaagaagaggctcatccgcatcaagaatggcatcctgcggggcgtgtacccaggcagccccacctcctggctggtggtgatcatggccaccgtgggcagcagcttctgcaatgtggacatcagcctgggcctggtgtcctgcatccagcgctgcctgccccagggctgcggcccctaccagaccccccagacccgggccctgctgtccatggccatcttcagcactggagtgtgggtgacaggcatcttcttcttcagatag

SEQ ID NO: 146304 - DNA, 1704 bp, synthetic construct
  misc_feature 1..1704: note = Description of Artificial Sequence: Synthetic coding sequence
  source 1..1704: mol_type = other DNA
atggagctgctggccaaggagttccaggacaagacagccccccggctgcagaagtacctggtgctgaagtcctggtgggccagcaactacgtgtctgactggtgggaggagtacatctacctgcggggccgcagccccctgatggtgaacagcaactactacgtgatggacctggtgctgatcaagaacacagatgtgcaggccgcccggctgggcaacatcatccacgccatgatcatgtacagaaggaagctggaccgggaggagatcaagcctgtgatggccctgggcatcgtgcccatgtgcagctaccagatggagaggatgttcaacaccacccgcatccctgggaaggacacagatgtgctgcagcacctgagtgacagcagacatgtggccgtgtaccacaagggccgcttcttcaagctgtggctgtatgagggcgcccggctgctgaagccccaggacctggagatgcagttccagaggatcctggatgaccccagccccccccagcctggagaggagaagctggccgccctgacagctgggggccgggtggagtgggcccaggcccggcaggccttcttcagcagcggcaagaacaaggccgccctggaggccatcgagcgggccgccttctttgtggccctggatgaggagagctacagctatgaccctgaagatgaggccagcctgagcctgtatggcaaggccctgctgcacggcaactgctacaaccgctggtttgacaagagcttcaccctcatctccttcaagaatggccagctgggcctgaatgctgagcacgcctgggcagatgcccccatcatcggccacctgtgggagtttgtgctgggcacagacagcttccacctgggctacacagagaccggccactgcctgggcaagcccaacccagccctggccccacccacccggctgcagtgggacatccccaagcaggccgtgattgagagcagctaccaggtggccaaggccctggctgatgatgtggagctgtactgcttccagttcctgccctttgggaagggcctcatcaagaagtgcaggaccagcccagatgcctttgtgcagatcgccctgcagctggcccacttccgggaccggggcaagttctgcctgacctatgaggcctccatgaccaggatgttccgggagggccgcacagaaacagtgcgcagctgcaccagcgagagcacagcctttgtgcaggccatgatggagggcagccacaccaaggctgacctgcgggacctcttccagaaggccgccaagaagcaccagaacatgtaccgcctggccatgaccggggccggcatcgacagacacctgttctgcctgtacctggtgtccaagtacctgggcgtgagcagccccttcctggccgaggtgctgtctgagccctggaggctgagcaccagccagatcccccagagccagatccgcatgtttgatcctgagcagcaccccaaccacctgggcgccggcggcggctttggacctgtggctgatgatggctatggagtgtcctacatgattgctggggagaacaccatcttcttccacatcagcagcaagttcagcagcagcgagaccaatgcccagagatttggaaaccacatcaggaaggccctgctggacattgctgacctcttccaggtgcccaaggcctacagctag

SEQ ID NO: 146305 - DNA, 2076 bp, synthetic construct
  misc_feature 1..2076: note = Description of Artificial Sequence: Synthetic coding sequence
  source 1..2076: mol_type = other DNA
atggccgaggcccaccaggccgtggccttccagttcaccgtgaccccagatggagtggacttccggctgagccgggaggccctgaagcacgtgtacctgagcggcatcaacagctggaagaagaggctcatccgcatcaagaatggcatcctgcggggcgtgtacccaggcagccccacctcctggctggtggtgatcatggccaccgtgggcagcagcttctgcaatgtggacatcagcctgggcctggtgtcctgcatccagcgctgcctgccccagggctgcggcccctaccagaccccccagacccgggccctgctgtccatggccatcttcagcactggagtgtgggtgacaggcatcttcttcttccggcagaccctgaagctgctgctgtgctaccacggctggatgtttgagatgcacggcaagaccagcaacctgacccgcatctgggccatgtgcatccggctgctgagcagccgccaccccatgctgtacagcttccagaccagcctgcccaagctgcctgtgccccgggtgtctgccaccatccagcgctacctggagagcgtgcggcccctgctggatgatgaggagtactacaggatggagctgctggccaaggagttccaggacaagacagccccccggctgcagaagtacctggtgctgaagtcctggtgggccagcaactacgtgtctgactggtgggaggagtacatctacctgcggggccgcagccccctgatggtgaacagcaactactacgtgatggacctggtgctgatcaagaacacagatgtgcaggccgcccggctgggcaacatcatccacgccatgatcatgtacagaaggaagctggaccgggaggagatcaagcctgtgatggccctgggcatcgtgcccatgtgcagctaccagatggagaggatgttcaacaccacccgcatccctgggaaggacacagatgtgctgcagcacctgagtgacagccgccacgtggccgtgtaccacaagggccgcttcttcaagctgtggctgtatgaaggagcccggctgctgagcctgtatggcaaggccctgctgcacggcaactgctacaaccgctggtttgacaagagcttcaccctcatctccttcaagaatggccagctgggcctgaatgctgagcacgcctgggcagatgcccccatcatcggccacctgtgggagtttgtgctgggcacagacagcttccacctgggctacacagagaccggccactgcctgggcaagcccaacccagccctggccccacccacccggctgcagtgggacatccccaagcagtgccaggccgtgattgagagcagctaccaggtggccaaggccctggctgatgatgtggagctgtactgcttccagttcctgccctttgggaagggcctcatcaagaagtgcaggaccagcccagatgcctttgtgcagatcgccctgcagctggcccacttccgggaccggggcaagttctgcctgacctatgaggcctccatgaccaggatgttccgggagggccgcacagaaacagtgcgcagctgcaccagcgagagcacagcctttgtgcaggccatgatggagggcagccacaccaaggctgacctgcgggacctcttccagaaggccgccaagaagcaccagaacatgtaccgcctggccatgaccggggccggcatcgacagacacctgttctgcctgtacctggtgtccaagtacctgggcgtgagcagccccttcctggccgaggtgctgtctgagccctggaggctgagcaccagccagatcccccagagccagatccgcatgtttgatcctgagcagcaccccaaccacctgggcgccggcggcggctttggacctgtggctgatgatggctatggagtgtcctacatgattgctggggagaacaccatcttcttccacatcagcagcaagttcagcagcagcgagaccaatgcccagagatttggaaaccacatcaggaaggccctgctggacattgctgacctcttccaggtgcccaaggcctacagctag

SEQ ID NO: 146306 - DNA, 2217 bp, synthetic construct
  misc_feature 1..2217: note = Description of Artificial Sequence: Synthetic coding sequence
  source 1..2217: mol_type = other DNA
atggccgaggcccaccaggccgtggccttccagttcaccgtgaccccagatggagtggacttccggctgagccgggaggccctgaagcacgtgtacctgagcggcatcaacagctggaagaagaggctcatccgcatcaagaatggcatcctgcggggcgtgtacccaggcagccccacctcctggctggtggtgatcatggccaccgtgggcagcagcttctgcaatgtggacatcagcctgggcctggtgtcctgcatccagcgctgcctgccccagggctgcggcccctaccagaccccccagacccgggccctgctgtccatggccatcttcagcactggagtgtgggtgacaggcatcttcttcttccggcagaccctgaagctgctgctgtgctaccacggctggatgtttgagatgcacggcaagaccagcaacctgacccgcatctgggcctacctggagagcgtgcggcccctgctggatgatgaggagtactacaggatggagctgctggccaaggagttccaggacaagacagccccccggctgcagaagtacctggtgctgaagtcctggtgggccagcaactacgtgtctgactggtgggaggagtacatctacctgcggggccgcagccccctgatggtgaacagcaactactacgtgatggacctggtgctgatcaagaacacagatgtgcaggccgcccggctgggcaacatcatccacgccatgatcatgtacagaaggaagctggaccgggaggagatcaagcctgtgatggccctgggcatcgtgcccatgtgcagctaccagatggagaggatgttcaacaccacccgcatccctgggaaggacacagatgtgctgcagcacctgagtgacagccgccacgtggccgtgtaccacaagggccgcttcttcaagctgtggctgtatgaaggagcccggctgctgaagccccaggacctggagatgcagttccagaggatcctggatgaccccagccccccccagcccggggaggagaagctggccgccctgacagctgggggccgggtggagtgggcccaggcccggcaggccttcttcagcagcggcaagaacaaggccgccctggaggccatcgagagagctgccttctttgtggccctggatgaggagagctacagctatgaccctgaagatgaggccagcctgagcctgtatggcaaggccctgctgcacggcaactgctacaaccgctggtttgacaagagcttcaccctcatctccttcaagaatggccagctgggcctgaatgctgagcacgcctgggcagatgcccccatcatcggccacctgtgggagtttgtgctgggcacagacagcttccacctgggctacacagaaacaggccactgcctgggcaagcccaacccagccctggccccacccacccggctgcagtgggacatccccaagcagtgccaggccgtcatcgagagcagctaccaggtggccaaggccctggctgatgatgtggagctgtactgcttccagttcctgccctttgggaagggcctcatcaagaagtgcaggaccagcccagatgcctttgtgcagatcgccctgcagctggcccacttccgggaccggggcaagttctgcctgacctatgaggcctccatgaccaggatgttccgggagggccgcacagagaccgtgcgcagctgcaccagcgagagcacagcctttgtgcaggccatgatggagggcagccacaccaaggctgacctgcgggacctcttccagaaggccgccaagaagcaccagaacatgtaccgcctggccatgactggagctggcatcgacagacacctgttctgcctgtacctggtgtccaagtacctgggcgtgagcagccccttcctggccgaggtgctgtctgagccctggaggctgagcaccagccagatcccccagagccagatccgcatgtttgatcctgagcagcaccccaaccacctgggcgctgggggcggcttcggccctgtggctgatgatggctacggcgtgtcctacatgattgctggggagaacaccatcttcttccacatcagcagcaagttcagcagcagcgagaccaatgcccagcgcttcggcaaccacatcaggaaggccctgctggacattgctgacctcttccaggtgcccaaggcctacagctag

SEQ ID NO: 146307 - DNA, 1458 bp, synthetic construct
  misc_feature 1..1458: note = Description of Artificial Sequence: Synthetic coding sequence
  source 1..1458: mol_type = other DNA
atgctgttctcctaccagaggagcctgccccggcagcctgtgcccagcgtgcaggacacagtgaggaagtacctggagagcgtgcggcccatcctgagtgatgaagattttgactggacagctgtgctggcccaggagttcctgcggctgcaggccagcctgctgcagtggtacctgcggctgaagtcctggtgggccagcaactacgtgtctgactggtgggaggagtttgtgtacctgcggagcaggaaccccctgatggtgaacagcaactactacatgatggacttcctgtatgtgacccccacccccctgcaggccgcccgggctggaaatgctgtgcacgccctgctgctgtaccgccaccggctgaaccggcaggagatcccccctgtgcggggcccccagtgggtgagagatggcggcgtggtgctgtggcccctgggccacgtgggccctggccggcagctgacagcccacggcttcctgcagaccctgctgatgggcatgaggcccctgtgcagcgcccagtatgagaagatcttcaacaccacccgcatccctggggtgcagaaggactacatccgccacctgcatgacagccagcacgtggccgtgttccaccggggccgcttcttcaggatgggcacccacagcaggaacagcctgctgagcccccgggccctggagcagcagttccagaggatcctggatgaccccagccctgcctgcccccatgaggagcacctggccgccctgacagctgccccccggggcacctgggcccaggtgaggaccagcctgaagacccaggccgctgaggccctggaggccgtggagggcgccgccttctttgtgtccctggatgctgagcctgctggcctgacccgggaggaccctgctgccagcctggatgcctatgcccacgccctgctggccggccggggccatgaccgctggtttgacaagagcttcaccctcatcgtgttcagcaatggcaagctgggcctgtctgtggagcacagctgggccgactgccccatcagcggccacatgtgggagttcaccctggccacagagtgcttccagctgggctacagcacagatggccactgcaagggccacccagaccccaccctgccccagccccagaggctgcagtgggacctgcctgaccagatccacagcagcatcagcctggccctgcggggggccaagatcctgtctgaaaatgtggactgccacgtggtgcccttcagcctgtttgggaagagcttcatccgccgctgccacctgagcagtgacagcttcatccagatcgccctgcagctggcccacttccgggtgtcctgggtgccccacccccagcccccccagggcctgagccccccagagccccccaggcctgccccaccccgcttcctggtggtggccgccatcgtgggccggcccagctag

SEQ ID NO: 146308 - DNA, 2412 bp, synthetic construct
  misc_feature 1..2412: note = Description of Artificial Sequence: Synthetic coding sequence
  source 1..2412: mol_type = other DNA
atggccgaggcccaccaggccgtgggcttccggcccagcctgaccagtgatggagctgaggtggagctgagcgcccctgtgctgcaggagatctacctgagcggcctgcgctcctggaagaggcacctgagccgcttctggaatgacttcctgactggagtcttccctgccagccccctgtcctggctgttcctgttcagcgccatccagctggcctggttcctgcagctggaccccagcctgggcctgatggagaagatcaaggagctgctgcctgactggggcggccagcaccacggcctgcggggcgtgctggccgccgccctgtttgccagctgcctgtggggcgccctgatcttcaccctgcacgtggccctgcggctgctgctgagctaccacggctggctgctggagccccacggggccatgagcagccccaccaagacctggctggccctggtgcgcatcttcagcggccgccaccccatgctgttctcctaccagaggagcctgccccggcagcctgtgcccagcgtgcaggacacagtgaggaagtacctggagagcgtgcggcccatcctgagtgatgaagattttgactggacagctgtgctggcccaggagttcctgcggctgcaggccagcctgctgcagtggtacctgcggctgaagtcctggtgggccagcaactacgtgtctgactggtgggaggagtttgtgtacctgcggagcaggaaccccctgatggtgaacagcaactactacatgatggacttcctgtatgtgacccccacccccctgcaggccgcccgggctggaaatgctgtgcacgccctgctgctgtaccgccaccggctgaaccggcaggagatcccccccaccctgctgatgggcatgaggcccctgtgcagcgcccagtatgagaagatcttcaacaccacccgcatccctggggtgcagaaggactacatccgccacctgcatgacagccagcacgtggccgtgttccaccggggccgcttcttcaggatgggcacccacagcaggaacagcctgctgagcccccgggccctggagcagcagttccagaggatcctggatgaccccagccctgcctgcccccatgaggagcacctggccgccctgacagctgccccccggggcacctgggcccaggtgaggaccagcctgaagacccaggccgctgaggccctggaggccgtggagggcgccgccttctttgtgtccctggatgctgagcccgccggcctgaccagagaagatcctgctgccagcctggatgcctatgcccacgccctgctggccggccggggccatgaccgctggtttgacaagagcttcaccctgattgtgttcagcaatggcaagctgggcctgtctgtggagcacagctgggccgactgccccatcagcggccacatgtgggagttcaccctggccacagagtgcttccagctgggctacagcacagatggccactgcaagggccacccagaccccaccctgccccagccccagaggctgcagtgggacctgcctgaccagatccacagcagcatcagcctggccctgcggggggccaagatcctgtctgaaaatgtggactgccacgtggtgcccttcagcctgtttgggaagagcttcatccgccgctgccacctgagcagtgacagcttcatccagatcgccctgcagctggcccacttccgggaccggggccagttctgcctgacctatgagagcgccatgaccaggctcttcctggagggccgcacagaaacagtgcgcagctgcacccgggaggcctgcaactttgtgcgggccatggaggacaaggagaagacagacccccagtgcctggccctcttccgggtggccgtggacaagcaccaggccctgctgaaggccgccatgagcggccagggcgtggacagacacctgtttgccctgtacatcgtgagccgcttcctgcacctgcagagccccttcctgacccaggtgcacagcgagcagtggcagctgagcaccagccagatccctgtgcagcagatgcacctgtttgatgtgcacaactacccagactatgtgtcctctgggggcggctttggaccagcagatgaccacggctatggagtgtcctacatcttcatgggagatggcatgatcaccttccacatcagcagcaagaagagcagcaccaagacagacagccaccggctgggccagcacattgaagatgccctgctggatgtggccagcctcttccaggccggccagcacttcaagaggcgcttccggggcagcggcaaggagaacagccgccaccgctgtggcttcctgagccggcagacaggagccagcaaggcctccatgaccagcacagacttctag

SEQ ID NO: 146309 - DNA, 2145 bp, synthetic construct
  misc_feature 1..2145: note = Description of Artificial Sequence: Synthetic coding sequence
  source 1..2145: mol_type = other DNA
atggccgaggcccaccaggccgtgggcttccggcccagcctgaccagtgatggagctgaggtggagctgagcgcccctgtgctgcaggagatctacctgagcggcctgcgctcctggaagaggcacctgagccgcttctggaatgacttcctgactggagtcttccctgccagccccctgtcctggctgttcctgttcagcgccatccagctggcctggttcctgcagctggaccccagcctgggcctgatggagaagatcaaggagctgctgcctgactggggcggccagcaccacggcctgcggggcgtgctggccgccgccctgtttgccagctgcctgtggggcgccctgatcttcaccctgcacgtggccctgcggctgctgctgagctaccacggctggctgctggagccccacggggccatgagcagccccaccaagacctggctggccctggtgcgcatcttcagcggccgccaccccatgctgttctcctaccagaggagcctgccccggcagcctgtgcccagcgtgcaggacacagtgaggaagtacctggagagcgtgcggcccatcctgagtgatgaagattttgactggacagctgtgctggcccaggagttcctgcggctgcaggccagcctgctgcagtggtacctgcggctgaagtcctggtgggccagcaactacgtgtctgactggtgggaggagtttgtgtacctgcggagcaggaaccccctgatggtgaacagcaactactacatgatggacttcctgtatgtgacccccacccccctgcaggccgcccgggctggaaatgctgtgcacgccctgctgctgtaccgccaccggctgaaccggcaggagatcccccccaccctgctgatgggcatgaggcccctgtgcagcgcccagtatgagaagatcttcaacaccacccgcatccctggggtgcagaaggactacatccgccacctgcatgacagccagcacgtggccgtgttccaccggggccgcttcttcaggatgggcacccacagcaggaacagcctgctgagcccccgggccctggagcagcagttccagaggatcctggatgaccccagccctgcctgcccccatgaggagcacctggccgccctgacagctgccccccggggcacctgggcccaggtgaggaccagcctgaagacccaggccgctgaggccctggaggccgtggagggcgccgccttctttgtgtccctggatgctgagcccgccggcctgaccagagaagatcctgctgccagcctggatgcctatgcccacgccctgctggccggccggggccatgaccgctggtttgacaagagcttcaccctgattgtgttcagcaatggcaagctgggcctgtctgtggagcacagctgggccgactgccccatcagcggccacatgtgggagttcaccctggccacagagtgcttccagctgggctacagcacagatggccactgcaagggccacccagaccccaccctgccccagccccagaggctgcagtgggacctgcctgaccagatccacagcagcatcagcctggccctgcggggggccaagatcctgtctgaaaatgtggactgccacgtggtgcccttcagcctgtttgggaagagcttcatccgccgctgccacctgagcagtgacagcttcatccagatcgccctgcagctggcccacttccgggaccggggccagttctgcctgacctatgagagcgccatgaccaggctcttcctggagggccgcacagaaacagtgcgcagctgcacccgggaggcctgcaactttgtgcgggccatggaggacaaggagaagacagcagatgaccacggctacggcgtgtcctacatcttcatgggagatggcatgatcaccttccacatcagcagcaagaagagcagcaccaagacagacagccaccggctgggccagcacattgaagatgccctgctggatgtggccagcctcttccaggccggccagcacttcaagaggcgcttccggggcagcggcaaggagaacagccgccaccgctgtggcttcctgagccggcagacaggagccagcaaggcctccatgaccagcacagacttctag

SEQ ID NO: 146310 - DNA, 2412 bp, synthetic construct; identical to SEQ ID NO: 146308
  misc_feature 1..2412: note = Description of Artificial Sequence: Synthetic coding sequence
  source 1..2412: mol_type = other DNA

SEQ ID NO: 146311 - DNA, 2379 bp, synthetic construct
  misc_feature 1..2379: note = Description of Artificial Sequence: Synthetic coding sequence
  source 1..2379: mol_type = other DNA
atggccgaggcccaccaggccgtgggcttccggcccagcctgaccagtgatggagctgaggtggagctgagcgcccctgtgctgcaggagatctacctgagcggcctgcgctcctggaagaggcacctgagccgcttctggaatgacttcctgactggagtcttccctgccagccccctgtcctggctgttcctgttcagcgccatccagctggcctggttcctgcagctggaccccagcctgggcctgatggagaagatcaaggagctgctgcctgactggggcggccagcaccacggcctgcggggcgtgctggccgccgccctgtttgccagctgcctgtggggcgccctgatcttcaccctgcacgtggccctgcggctgctgctgagctaccacggctggctgctggagccccacggggccatgagcagccccaccaagacctggctggccctggtgcgcatcttcagcggccgccaccccatgctgttctcctaccagaggagcctgccccggcagcctgtgcccagcgtgcaggacacagtgaggaagtacctggagagcgtgcggcccatcctgagtgatgaagattttgactggacagctgtgctggcccaggagttcctgcggctgcaggccagcctgctgcagtggtacctgcggctgaagtcctggtgggccagcaactacgtgtctgactggtgggaggagtttgtgtacctgcggagcaggaaccccctgatggtgaacagcaactactacatgatggccgcccgggctggaaatgctgtgcacgccctgctgctgtaccgccaccggctgaaccggcaggagatcccccccaccctgctgatgggcatgaggcccctgtgcagcgcccagtatgagaagatcttcaacaccacccgcatccctggggtgcagaaggactacatccgccacctgcatgacagccagcacgtggccgtgttccaccggggccgcttcttcaggatgggcacccacagcaggaacagcctgctgagcccccgggccctggagcagcagttccagaggatcctggatgaccccagccctgcctgcccccatgaggagcacctggccgccctgacagctgccccccggggcacctgggcccaggtgaggaccagcctgaagacccaggccgctgaggccctggaggccgtggagggcgccgccttctttgtgtccctggatgctgagcctgctggcctgacccgggaggaccctgctgccagcctggatgcctatgcccacgccctgctggccggccggggccatgaccgctggtttgacaagagcttcaccctcatcgtgttcagcaatggcaagctgggcctgtctgtggagcacagctgggccgactgccccatcagcggccacatgtgggagttcaccctggccacagagtgcttccagctgggctacagcacagatggccactgcaagggccacccagaccccaccctgccccagccccagaggctgcagtgggacctgcctgaccagatccacagcagcatcagcctggccctgcggggggccaagatcctgtctgaaaatgtggactgccacgtggtgcccttcagcctgtttgggaagagcttcatccgccgctgccacctgagcagtgacagcttcatccagatcgccctgcagctggcccacttccgggaccggggccagttctgcctgacctatgaaagtgccatgaccaggctcttcctggagggccgcacagagaccgtgcgcagctgcacccgggaggcctgcaactttgtgcgggccatggaggacaaggagaagacagacccccagtgcctggccctcttccgggtggccgtggacaagcaccaggccctgctgaaggccgccatgagcggccagggcgtggacagacacctgtttgccctgtacatcgtgagccgcttcctgcacctgcagagccccttcctgacccaggtgcacagcgagcagtggcagctgagcaccagccagatccctgtgcagcagatgcacctgtttgatgtgcacaactacccagactatgtgagcagcggcggcggcttcggccctgcagatgaccacggctacggcgtgtcctacatcttcatgggagatggcatgatcaccttccacatcagcagcaagaagagcagcaccaagacagacagccaccggctgggccagcacattgaagatgccctgctggatgtggccagcctcttccaggccggccagcacttcaagaggcgcttccggggcagcggcaaggagaacagccgccaccgctgtggcttcctgagccggcagacaggagccagcaaggcctccatgaccagcacagacttctag

SEQ ID NO: 146312 - DNA, 2412 bp, synthetic construct; identical to SEQ ID NO: 146308
  misc_feature 1..2412: note = Description of Artificial Sequence: Synthetic coding sequence
  source 1..2412: mol_type = other DNA

SEQ ID NO: 146313 - DNA, 1524 bp, synthetic construct
  misc_feature 1..1524: note = Description of Artificial Sequence: Synthetic coding sequence
  source 1..1524: mol_type = other DNA
atggaccccaagctgggccgcatggccgccagcctgctggccgtgctgctgctgctgctggagcggggcatgttcagcagccccagccccccaccagccctgctggagaaggtgttccagtacatcgacctgcaccaggatgaatttgtgcagaccctgaaggagtgggtggccattgaaagtgacagcgtgcagcctgtgccccgcttccggcaggagctgttcaggatgatggctgtggccgctgacaccctgcagaggctgggcgcccgggtggcctctgtggacatgggcccccagcagctgcctgatggccagagcctgcccatcccccccatcatcctggccgagctgggcagtgaccccaccaagggcaccgtgtgcttctacggccacctggatgtgcagcctgctgacagaggagatggctggctgacagacccctacgtgctgacagaggtggatggcaagctgtatggccgcggggccacagacaacaagggccctgtgctggcctggatcaatgctgtgtctgccttccgggccctggagcaggacctgcctgtgaacatcaagttcatcatcgagggcatggaggaggccggctctgtggccctggaggagctggtggagaaggagaaggaccgcttcttctctggagtggactacatcgtcatcagtgacaacctgtggatcagccagaggaagccagccatcacctacggcacccggggcaacagctacttcatggtggaggtgaagtgccgggaccaggacttccacagcggcacctttggaggcatcctgcacgagcccatggctgacctggtggccctgctgggcagcctggtggacagcagcggccacatcctggtgcccggcatctatgatgaggtggtgcccctgacagaggaggagatcaacacctacaaggccatccacctggacctggaggagtacagaaacagcagccgggtggagaagttcctgtttgacaccaaggaggagatcctgatgcacctgtggagataccccagcctgagcatccacggcatcgagggcgcctttgatgagcccggcaccaagacagtcatccctggccgggtcatcggcaagttcagcatccggctggtgccccacatgaatgtgtctgctgtggagaagcaggtgaccaggcacctggaggatgtgttcagcaagaggaacagcagcaacaagatggtggtgtccatgaccctgggcctgcacccctggatcgccaacattgatgacacccagtacctggccgccaagagggccatcagaacagtgtttggaacagagccagacatgatcagagatggcagcaccatccccatcgccaagatgttccaggagatcgtgcacaagtctgtggtgctgatccccctgggcgctgtggatgatggagagcacagccagaatgagaagatcaaccgctggaactacatcgagggcaccaagctgtttgctgccttcttcctggagatggcccagctgcactag

SEQ ID NO: 146314 - DNA, 2484 bp, synthetic construct
  misc_feature 1..2484: note = Description of Artificial Sequence: Synthetic coding sequence
  source 1..2484: mol_type = other DNA
atgctgctgtgcctgagccctgcctggctgatgaaggtgcctgcccctggccagcctggagaggccgccctgctggtgtccaaggctgtgtccttccaccctgggggcctgaccttcctggatgactttgtgcccccaagaagagccacctacttcctggccggcctgggcctgggccctggccggggccgggaggccgctgagctggcccgggacctgacctgccccactggagccagcgctgagctggcccggctgctggaggaccggctgctgacccggcagctgctggcccagcagggcggcgtggccgtgcctgccaccctggccttcacctacaagcccccaggcctgctgcggggaggagatgccagcctgggcctgcggctggtggagctgagcggcaaggagggccaggagaccctggtgaaggaggaggtggaggccttcctgcggtctgaggccctgggggacatcctgcaggtggccgtgaagctgagcggctggcgctggaggggccggcaggcctggaggctgcaccccagggctgagctgggcgctgtggtggacacagtgctggccctgctggagaagctggaggaggaggagagcgtgctggtggaggccgtgtaccccccagcccagctgccctgcagtgatggccccagccctggccctggcctggccgtgcgcatctgtgctgtggtgtgcaggacccagggcgaccggcccctgctgagcaaggtggtgtgtggggtgggccgcggggaccggcccctgcggcaccacaacagcctgcccaggaccctggaggtggccctggcccagtgtggcctgggggaggaggcccaggtggccgctgtgcggcagagggtgaaggctgctgctgaggccgccctggccgctgtgctggccctggaggccggcctgtctgctgagcagaggggcggccggcgggcccacacagacttcctgggcgtggactttgccctgacagctgctgggggcgtgctgacccctgtggccctggagctgaatggaggcctgtgcctggaggcctgtggggccctggagggcctgtgggccgccccccggctgggccctgctgctgatgaagctgtggccgcccccctggtggagaccatgctgcggcgcagcgcccgctgcctgatggagggcaagcagctgctggtggtgggcgctgggggcgtgtccaagaagtttgtgtgggaggccgcccgggactatggcctgcagctgcacctggtggagagtgaccccaaccactttgccagccagctggtgcagaccttcatccactttgacatgacagagcacagaagagatgaagaaaatgcccggctgctggccgagctggtgcgggcccggggcctgaagctggatggctgcttctcctactgggatgactgcctggtgctgacagccctgctgtgccaggagctgggcctgccctgcagcagccctgctgccatgaggctggccaagcagaagagcctgacccagctgcacctgctgcaccaccacggccccccctggccagcccccagcctgcatgctgtgccctgctgccccctggagagcgaggctgatgtggagagagctgtgcaccaggtgcccctgcccggggtgatgaagctggagtttggagctggagctgtgggcgtgcggctggtggaggatgccccccagtgccacgagcacttcagccgcatcacccgggacctgcagggcgaggccgaccaccctggcatcggcctgggctggggcaatgccatgctgctgatggagtttgtggagggcacagaacatgatgtggacctggtgctgtttggaggccgcctgctggccgcctttgtgtctgacaatggccccacccggctgcccggcttcacagaaacagctgcctgcatgcccaccggcctggcccctgagcaggaggcccagatggtgcaggccgccttccgctgctgcctgggctgcggcctgctggatggagtcttcaacgtggagctgaagctgactggagctggccccaggctcatcgagatcaaccccaggatgggcggcttctacctgcgggactggatcctggagctgtatggagtggacctgctgctggccgctgtgatggtggcctgtggcctgcggcctgccctgcccacccggccccgggcccggggccacctggtgggcgtgatgtgcctggtgtcccagcacctgcaggccctgagcagcacagccagccgggagaccctgcaggccctgcatgaccggggcctgctgcggctgaacctgctggaggaggccctggtgcctggagaatatgaggagccctactgcagcgtggcctgtgccggccccagccccacagaggcccggctgcggctgctgggcctgtgccagggcctgggcattgatggccccagctaccctgtggcccacttcctgagccacttcaagtag

SEQ ID NO: 146315 - DNA, 2484 bp, synthetic construct; identical to SEQ ID NO: 146314
  misc_feature 1..2484: note = Description of Artificial Sequence: Synthetic coding sequence
  source 1..2484: mol_type = other DNA

SEQ ID NO: 146316 - DNA, 2853 bp, synthetic construct
  misc_feature 1..2853: note = Description of Artificial Sequence: Synthetic coding sequence
  source 1..2853: mol_type = other DNA
atgctgagcctggaccccagcggccctgagtgggactgccccctgggcagcaaggacctggaggaggagggcccctggggcggcggcagcggcctgcccccaacaggctgcttccctggctcctggaggcaggatgtgggcctggactgcaagggcagccctgagggcgctgaggcccgggcctggacagtgtactactacagcctgctgcagagctgcctgcagcaggccggcctgcctgagacccaggaccggggccaggtgcccaggacaggctgccctggagctgaggtgaccctgtgtgtgctgggcagccccagcaccttcctgcctgtgctgctggagggcggcgtgcagagccctggcaacatgctgctgtgcctgagccctgcctggctgatgaaggtgcctgcccctggccagcccggggaggccgccctgctggtgtccaaggctgtgtccttccaccctgggggcctgaccttcctggatgactttgtgcccccccggcgggccacctacttcctggccggcctgggcctgggccctggccggggccgggaggccgctgagctggcccgggacctgacctgccccaccggggccagcgctgagctggcccggctgctggaggaccggctgctgacccggcagctgctggcccagcagggcggcgtggccgtgcctgccaccctggccttcacctacaagcccccaggcctgctgcggggaggagatgccagcctgggcctgcggctggtggagctgagcggcaaggagggccaggagaccctggtgaaggaggaggtggaggccttcctgcggtctgaggccctgggggacatcctgcaggtggccgtgaagctgagcggctggcgctggaggggccggcaggcctggaggctgcaccccagggctgagctgggcgctgtggtggacacagtgctggccctgctggagaagctggaggaggaggagagcgtgctggtggaggccgtgtaccccccagcccagctgccctgcagtgatggccccagccctggccctggcctggccgtgcgcatctgtgctgtggtgtgcaggacccagggcgaccggcccctgctgagcaaggtggtgtgtggggtgggccgcggggaccggcccctgcggcaccacaacagcctgcccaggaccctggaggtggccctggcccagtgtggcctgggggaggaggcccaggtggccgctgtgcggcagagggtgaaggctgctgctgaggccgccctggccgctgtgctggccctggaggccggcctgtctgctgagcagagaggaggaagaagagcccacacagacttcctgggcgtggactttgccctgacagctgctggaggagtgctgacccctgtggccctggagctgaatggaggcctgtgcctggaggcctgtggggccctggagggcctgtgggccgccccccggctgggccctgctgctgatgaggccgtggccgcccccctggtggagaccatgctgcggcgcagcgcccgctgcctgatggagggcaagcagctgctggtggtgggcgctgggggcgtgtccaagaagtttgtgtgggaggccgcccgggactatggcctgcagctgcacctggtggagagtgaccccaaccactttgccagccagctggtgcagaccttcatccactttgacatgacagagcacagaagagatgaggagaatgcccggctgctggccgagctggtgcgggcccggggcctgaagctggatggctgcttctcctactgggatgactgcctggtgctgacagccctgctgtgccaggagctgggcctgccctgcagcagccctgctgccatgaggctggccaagcagaagagcctgacccagctgcacctgctgcaccaccacggccccccctggccagcccccagcctgcatgctgtgccctgctgccccctggagagcgaggctgatgtggagagagctgtgcaccaggtgcccctgcccggggtgatgaagctggagtttggagctggagctgtgggcgtgcggctggtggaggatgccccccagtgccacgagcacttcagccgcatcacccgggacctgcagggcgaggccgaccaccctggcatcggcctgggctggggcaatgccatgctgctgatggagtttgtggagggcacagaacatgatgtggacctggtgctgtttggaggccgcctgctggccgcctttgtgtctgacaatggccccacccggctgcccggcttcacagaaacagctgcctgcatgcccaccggcctggcccctgagcaggaggcccagatggtgcaggccgccttccgctgctgcctgggctgcggcctgctggatggagtcttcaacgtggagctgaagctgaccggggccggcccccggctgattgagatcaaccccaggatgggcggcttctacctgcgggactggatcctggagctgtatggagtggacctgctgctggccgctgtgatggtggcctgtggcctgcggcctgccctgcccacccggccccgggcccggggccacctggtgggcgtgatgtgcctggtgtcccagcacctgcaggccctgagcagcacagccagccgggagaccctgcaggccctgcatgaccggggcctgctgcggctgaacctgctggaggaggccctggtgcctggagaatatgaggagccctactgcagcgtggcctgtgccggccccagccccacagaggcccggctgcggctgctgggcctgtgccagggcctgggcattgatggccccagctaccctgtggcccacttcctgagccacttcaagtag

SEQ ID NO: 146317 - DNA, 2775 bp, synthetic construct
  misc_feature 1..2775: note = Description of Artificial Sequence: Synthetic coding sequence
  source 1..2775: mol_type = other DNA
atgctgagcctggaccccagcggccctgagtgggactgccccctgggcagcaaggacctggaggaggagggcccctggggcggcggcagcggcctgcccccaacaggctgcttccctggctcctggaggcaggatgtgggcctggactgcaagggcagccctgagggcgctgaggcccgggcctggacagtgtactactacagcctgctgcagagctgcctgcagcaggccggcctgcctgagacccaggaccggggccaggtgcccaggacaggctgccctggagctgaggtgaccctgtgtgtgctgggcagccccagcaccttcctgcctgtgctgctggagggcggcgtgcagagccctggcaacatgctgctgtgcctgagccctgcctggctgatgaaggtgcctgcccctggccagcccggggaggccgccctgctggtgtccaaggctgtgtccttccaccctgggggcctgaccttcctggatgactttgtgcccccccggcgggccacctacttcctggccggcctgggcctgggccctggccggggccgggaggccgctgagctggcccgggacctgacctgccccaccggggccagcgctgagctggcccggctgctggaggaccggctgctgacccggcagctgctggcccagcagggcggcgtggccgtgcctgccaccctggccttcacctacaagcccccaggcctgctgcggggaggagatgccagcctgggcctgcggctggtggagctgagcggcaaggagggccaggagaccctggtgaaggaggaggtggaggccttcctgcggtctgaggccctgggggacatcctgcaggtggccgtgaagctgagcggctggcgctggaggggccggcaggcctggaggctgcaccccagggctgagctgggcgctgtggtggacacagtgctggccctgctggagaagctggaggaggaggagagcgtgctggtggaggccgtgtaccccccagcccagctgccctgcagtgatggccccagccctggccctggcctggccgtgcgcatctgtgctgtggtgtgcaggacccagggcgaccggcccctgctgagcaaggtggtgtgtggggtgggccgcggggaccggcccctgcggcaccacaacagcctgcccaggaccctggaggccgccctggccgctgtgctggccctggaggccggcctgtctgctgagcagagaggaggaagaagagcccacacagacttcctgggcgtggactttgccctgacagctgctggaggagtgctgacccctgtggccctggagctgaatggaggcctgtgcctggaggcctgtggggccctggagggcctgtgggccgccccccggctgggccctgctgctgatgaggccgtggccgcccccctggtggagaccatgctgcggcgcagcgcccgctgcctgatggagggcaagcagctgctggtggtgggcgctgggggcgtgtccaagaagtttgtgtgggaggccgcccgggactatggcctgcagctgcacctggtggagagtgaccccaaccactttgccagccagctggtgcagaccttcatccactttgacatgacagagcacagaagagatgaggagaatgcccggctgctggccgagctggtgcgggcccggggcctgaagctggatggctgcttctcctactgggatgactgcctggtgctgacagccctgctgtgccaggagctgggcctgccctgcagcagccctgctgccatgaggctggccaagcagaagagcctgacccagctgcacctgctgcaccaccacggccccccctggccagcccccagcctgcatgctgtgccctgctgccccctggagagcgaggctgatgtggagagagctgtgcaccaggtgcccctgcccggggtgatgaagctggagtttggagctggagctgtgggcgtgcggctggtggaggatgccccccagtgccacgagcacttcagccgcatcacccgggacctgcagggcgaggccgaccaccctggcatcggcctgggctggggcaatgccatgctgctgatggagtttgtggagggcacagaacatgatgtggacctggtgctgtttggaggccgcctgctggccgcctttgtgtctgacaatggccccacccggctgcccggcttcacagaaacagctgcctgcatgcccaccggcctggcccctgagcaggaggcccagatggtgcaggccgccttccgctgctgcctgggctgcggcctgctggatggagtcttcaacgtggagctgaagctgaccggggccggcccccggctgattgagatcaaccccaggatgggcggcttctacctgcgggactggatcctggagctgtatggagtggacctgctgctggccgctgtgatggtggcctgtggcctgcggcctgccctgcccacccggccccgggcccggggccacctggtgggcgtgatgtgcctggtgtcccagcacctgcaggccctgagcagcacagccagccgggagaccctgcaggccctgcatgaccggggcctgctgcggctgaacctgctggaggaggccctggtgcctggagaatatgaggagccctactgcagcgtggcctgtgccggccccagccccacagaggcccggctgcggctgctgggcctgtgccagggcctgggcattgatggccccagctaccctgtggcccacttcctgagccacttcaagtag

SEQ ID NO: 146318 - DNA, 903 bp, synthetic construct
  misc_feature 1..903: note = Description of Artificial Sequence: Synthetic coding sequence
  source 1..903: mol_type = other DNA
atgtgccccctggcccacccagcccaggacctgcccctgctgcccagccagctgagcctggaccccagcggccctgagtgggactgccccctgggcagcaaggacctggaggaggagggcccctggggcggcggcagcggcctgcccccaacaggctgcttccctggctcctggaggcaggatgtgggcctggactgcaagggcagccctgagggcgctgaggcccgggcctggacagtgtactactacagcctgctgcagagctgcctgcagcaggccggcctgcctgagacccaggaccggggccaggtgcccaggacaggctgccctggagctgaggtgaccctgtgtgtgctgggcagccccagcaccttcctgcctgtgctgctggagggcggcgtgcagagccctggcaacatgctgctgtgcctgagccctgcctggctgatgaaggtgcctgcccctggccagcccggggaggccgccctgctggtgtccaaggctgtgtccttccaccctgggggcctgaccttcctggatgactttgtgcccccccggcgggccacctacttcctggccggcctgggcctgggccctggccggggccgggaggccgctgagctggcccgggacctgacctgccccaccggggccagcgctgagctggcccggctgctggaggaccggctgctgacccggcagctgctggcccagcagggcggcgtggccgtgcctgccaccctggccttcacctacaagcccccaggcctgctgcggggaggagatgccagcctgggcctgcggctggtggagctgagcggcaaggagggccaggagaccctggtgaaggaggagaggacctggctgggccccaagccctggaccaaccctgggaagacctag

SEQ ID NO: 146319 - DNA, 2775 bp, synthetic construct
  misc_feature 1..2775: note = Description of Artificial Sequence: Synthetic coding sequence
  source 1..2775: mol_type = other DNA
atgctgagcctggaccccagcggccctgagtgggactgccccctgggcagcaaggacctggaggaggagggcccctggggcggcggcagcggcctgcccccaacaggctgcttccctggctcctggaggcaggatgtgggcctggactgcaagggcagccctgagggcgctgaggcccgggcctggacagtgtactactacagcctgctgcagagctgcctgcagcaggccggcctgcctgagacccaggaccggggccaggtgcccaggacaggctgccctggagctgaggtgaccctgtgtgtgctgggcagccccagcaccttcctgcctgtgctgctggagggcggcgtgcagagccctggcaacatgctgctgtgcctgagccctgcctggctgatgaaggtgcctgcccctggccagcccggggaggccgccctgctggtgtccaaggctgtgtccttccaccctgggggcctgaccttcctggatgactttgtgcccccccggcgggccacctacttcctggccggcctgggcctgggccctggccggggccgggaggccgctgagctggcccgggacctgacctgccccaccggggccagcgctgagctggcccggctgctggaggaccggctgctgacccggcagctgctggcccagcagggcggcgtggccgtgcctgccaccctggccttcacctacaagcccccaggcctgctgcggggaggagatgccagcctgggcctgcggctggtggagctgagcggcaaggagggccaggagaccctggtgaaggaggaggtggaggccttcctgcggtctgaggccctgggggacatcctgcaggtggccgtgaagctgagcggctggcgctggaggggccggcaggcctggaggctgcaccccagggctgagctgggcgctgtggtggacacagtgctggccctgctggagaagctggaggaggaggagagcgtgctggtggaggccgtgtaccccccagcccagctgccctgcagtgatggccccagccctggccctggcctggccgtgcgcatctgtgctgtggtgtgcaggacccagggcgaccggcccctgctgagcaaggtggtgtgtggggtgggccgcggggaccggcccctgcggcaccacaacagcctgcccaggaccctggaggtggccctggccgctgtgctggccctggaggccggcctgtctgctgagcagagaggaggaagaagagcccacacagacttcctgggcgtggactttgccctgacagctgctggaggagtgctgacccctgtggccctggagctgaatggaggcctgtgcctggaggcctgtggggccctggagggcctgtgggccgccccccggctgggccctgctgctgatgaggccgtggccgcccccctggtggagaccatgctgcggcgcagcgcccgctgcctgatggagggcaagcagctgctggtggtgggcgctgggggcgtgtccaagaagtttgtgtgggaggccgcccgggactatggcctgcagctgcacctggtggagagtgaccccaaccactttgccagccagctggtgcagaccttcatccactttgacatgacagagcacagaagagatgaggagaatgcccggctgctggccgagctggtgcgggcccggggcctgaagctggatggctgcttctcctactgggatgactgcctggtgctgacagccctgctgtgccaggagctgggcctgccctgcagcagccctgctgccatgaggctggccaagcagaagagcctgacccagctgcacctgctgcaccaccacggccccccctggccagcccccagcctgcatgctgtgccctgctgccccctggagagcgaggctgatgtggagagagctgtgcaccaggtgcccctgcccggggtgatgaagctggagtttggagctggagctgtgggcgtgcggctggtggaggatgccccccagtgccacgagcacttcagccgcatcacccgggacctgcagggcgaggccgaccaccctggcatcggcctgggctggggcaatgccatgctgctgatggagtttgtggagggcacagaacatgatgtggacctggtgctgtttggaggccgcctgctggccgcctttgtgtctgacaatggccccacccggctgcccggcttcacagaaacagctgcctgcatgcccaccggcctggcccctgagcaggaggcccagatggtgcaggccgccttccgctgctgcctgggctgcggcctgctggatggagtcttcaacgtggagctgaagctgaccggggccggcccccggctgattgagatcaaccccaggatgggcggcttctacctgcgggactggatcctggagctgtatggagtggacctgctgctggccgctgtgatggtggcctgtggcctgcggcctgccctgcccacccggccccgggcccggggccacctggtgggcgtgatgtgcctggtgtcccagcacctgcaggccctgagcagcacagccagccgggagaccctgcaggccctgcatgaccggggcctgctgcggctgaacctgctggaggaggccctggtgcctggagaatatgaggagccctactgcagcgtggcctgtgccggccccagccccacagaggcccggctgcggctgctgggcctgtgccagggcctgggcattgatggccccagctaccctgtggcccacttcctgagccacttcaagtag

SEQ ID NO: 146320 - DNA, 1206 bp, synthetic construct
  misc_feature 1..1206: note = Description of Artificial Sequence: Synthetic coding sequence
  source 1..1206: mol_type = other DNA
atggagcctggaagaagaggagctgctgccctgctggccctgctgtgtgtggcctgtgccctgcgggccggccgggcccagtatgaaagatacagcttccgctccttccccagagatgagctgatgcccctggagagcgcctacagacatgccctggacaagtacagcggggagcactgggccgagagcgtgggctacctggagatcagcctgcggctgcaccggctgctgcgggacagcgaggccttctgccacaggaactgcagcgctgccccccagcctgagcctgctgctggcctggccagctacccagagctgcggctgtttggaggcctgctgcggcgggcccactgcctgaagcgctgcaagcagggcctgcctgccttccggcagagccagcccagccgggaggtgctggccgacttccagaggcgggagccctacaagttcctgcagtttgcctacttcaaggccaacaacctgcccaaggccatcgctgctgcccacaccttcctgctgaagcacccagatgatgagatgatgaagaggaacatggcctactacaagagcctgcccggggctgaggactacatcaaggacctggagaccaagagctatgagagcctcttcatccgggctgtgcgggcctacaacggggagaactggaggaccagcatcacagacatggagctggccctgcctgacttcttcaaggccttctatgagtgcctggccgcctgtgagggcagccgggagatcaaggacttcaaggacttctacctgagcattgctgaccactacgtggaggtgctggagtgcaagatccagtgtgaggagaacctgacccctgtgattggaggctaccctgtggagaagtttgtggccaccatgtaccactacctgcagtttgcctactacaagctgaatgacctgaagaatgctgccccctgtgctgtgtcctacctgctgtttgaccagaatgacaaggtgatgcagcagaacctggtgtactaccagtaccaccgggacacctggggcctgagtgatgagcacttccagcccaggcctgaggccgtgcagttcttcaacgtgaccaccctgcagaaggagctgtatgactttgccaaggagaacatcatggatgatgatgaaggagaggtggtggagtatgtggatgacctgctggagctggaggagaccagctag

SEQ ID NO: 146321 - DNA, 789 bp, synthetic construct
  misc_feature 1..789: note = Description of Artificial Sequence: Synthetic coding sequence
  source 1..789: mol_type = other DNA
atggagcctggaagaagaggagctgctgccctgctggccctgctgtgtgtggcctgtgccctgcgggccggccgggcccagtatgaaagatacagcttccgctccttccccagagatgagctgatgcccctggagagcgcctacagacatgccctggacaagtacagcggggagcactgggccgagagcgtgggctacctggagatcagcctgcggctgcaccggctgctgcgggacagcgaggccttctgccacaggaactgcagcgctgccccccagcctgagcctgctgctggcctggccagctacccagagctgcggctgtttggaggcctgctgcggcgggcccactgcctgaagcgctgcaagcagggcctgcctgccttccggcagagccagcccagccgggaggtgctggccgacttccagaggcgggagccctacaagttcctgcagtttgcctacttcaaggccaacaacctgcccaaggccatcgctgctgcccacaccttcctgctgaagcacccagatgatgagatgatgaagaggaacatggcctactacaagagcctgcccggggctgaggactacctgaagacctggaagcccagccacatgaaggcctgcagcagcgagcagtgtggccacaccaccgtgaggactggagagcaccccagccagacctggagctggcccttccccaccagcagcaagcccttcacctctgtgtcccagcctgcccgggtgcccggccgcagcaggaccagccgcatcagcaccttcccctag

SEQ ID NO: 146322 - DNA, 789 bp, synthetic construct
  misc_feature 1..789: note = Description of Artificial Sequence: Synthetic coding sequence
  source 1..789: mol_type = other DNA
atggagcctggaagaagaggagctgctgccctgctggccctgctgtgtgtggcctgtgccctgcgggccggccgggcccagtatgaaagatacagcttccgctccttccccagagatgagctgatgcccctggagagcgcctacagacatgccctggacaagtacagcggggagcactgggccgagagcgtgggctacctggagatcagcctgcggctgcaccggctgctgcgggacagcgaggccttctgccacaggaactgcagcgctgccccccagcctgagcctgctgctggcctggccagctacccagagctgcggctgtttggaggcctgctgcggcgggcccactgcctgaagcgctgcaagcagggcctgcctgccttccggcagagccagcccagccgggaggtgctggccgacttccagaggcgggagccctacaagttcctgcagtttgcctacttcaaggccaacaacctgcccaaggccatcgctgctgcccacaccttcctgctgaagcacccagatgatgagatgatgaagaggaacatggcctactacaagagcctgcccggggctgaggactacatcaaggacctggagaccaagagctatgagagcctcttcatcgagcagtgtggccacaccaccgtgaggactggagagcaccccagccagacctggagctggcccttccccaccagcagcaagcccttcacctctgtgtcccagcctgcccgggtgcccggccgcagcaggaccagccgcatcagcaccttcccctag

SEQ ID NO: 146323 - DNA, 1167 bp, synthetic construct
  misc_feature 1..1167: note = Description of Artificial Sequence: Synthetic coding sequence
  source 1..1167: mol_type = other DNA
atggagcctggaagaagaggagctgctgccctgctggccctgctgtgtgtggcctgtgccctgcgggccggccgggcccagtatgaaagatacagcttccgctccttccccagagatgagctgatgcccctggagagcgcctacagacatgccctggacaagtacagcggggagcactgggccgagagcgtgcgggacagcgaggccttctgccacaggaactgcagcgctgccccccagcctgagcctgctgctggcctggccagctacccagagctgcggctgtttggaggcctgctgcggcgggcccactgcctgaagcgctgcaagcagggcctgcctgccttccggcagagccagcccagccgggaggtgctggccgacttccagaggcgggagccctacaagttcctgcagtttgcctacttcaaggccaacaacctgcccaaggccatcgccgccgcccacaccttcctgctgaagcacccagatgatgagatgatgaagaggaacatggcctactacaagagcctgcctggagctgaggactacatcaaggacctggagaccaagagctatgagagcctcttcatccgggctgtgcgggcctacaatggagagaactggaggaccagcatcacagacatggagctggccctgcctgacttcttcaaggccttctatgaatgtctggccgcctgtgagggcagccgggagatcaaggacttcaaggacttctacctgagcattgctgaccactacgtggaggtgctggagtgcaagatccagtgtgaggagaacctgacccctgtgattggaggctaccctgtggagaagtttgtggccaccatgtaccactacctgcagtttgcctactacaagctgaatgacctgaagaatgctgccccctgtgctgtgtcctacctgctgtttgaccagaatgacaaggtgatgcagcagaacctggtgtactaccagtaccaccgggacacctggggcctgagtgatgagcacttccagcccaggcctgaggccgtgcagttcttcaacgtgaccaccctgcagaaggagctgtatgactttgccaaggagaacatcatggatgatgatgaaggagaggtggtggagtatgtggatgacctgctggagctggaggagaccagctag

SEQ ID NO: 146324 - DNA, 3471 bp, synthetic construct
  misc_feature 1..3471: note = Description of Artificial Sequence: Synthetic coding sequence
  source 1..3471: mol_type = other DNA
atggccagcctgctgcccctgctgtgcctgtgtgtggtggccgcccacctggccggggccagagatgccacccccacagaggagcccatggccacagccctgggcctggagcggcgctctgtgtacacaggccagcccagccctgccctggaggactgggaggaggccagcgagtggacctcctggttcaacgtggaccaccctggaggagatggagactttgagagcctggccgccatccgcttctactacggccctgcccgggtgtgcccccggcccctggccctggaggcccggaccacagactgggccctgcccagcgctgtgggggagcgggtgcacctgaaccccacccggggcttctggtgcctgaaccgggagcagccccggggccgccgctgcagcaactaccacgtgcgcttccgctgccccctggaggcctcctggggcgcctggggcccctggggcccctgcagcggcagctgtggccctggccggcggctgcggcggcggcactgccccagccctgctggagatgcctgccccggccggcccctggaggcccagaagtgtgtgcggccccgctgccccggctgcagcctggacacctgtgaatgtcctgaccacatcctgctgggctctgtggtgaccccatctggccagcccctgctgggcgcccgggtgtccctgcgggaccagcccggcaccgtggccaccagtgatgcccacggcaccttccgggtgcctggggtgtgtgccgacagccgggccaacatccgggcccagatggatggcttctctgctggggaggcccaggcccaggccaacggcagcatctctgtggtgaccatcatcctggacaagctggagaagccctacctggtgaagcaccctgagagccgggtgcgggaggccggccagaatgtgaccttctgctgcaaggccagcggcacccccatgcccaagaagtacagctggttccacaacggcaccctgctggacagaagagcccacggctacggggcccacctggagctgcggggcctgcggccagaccaggccggcatctaccactgcaaggcctggaatgaagctggagctgtgcgcagcggcacagcccggctgactgtgctggcccctggccagcctgcctgtgacccccggccccgggagtacctgatcaagctgcctgaggactgtggccagcccggcagcggccctgcctacctggatgtgggcctgtgcccagacacccgctgccccagcctggccggcagcagcccccgctgtggagatgccagcagccgctgctgcagcgtgcggcggctggagcggcgggagatccactgccccggctacgtgctgcctgtgaaggtggtggccgagtgtggctgccagaagtgcctgcccccccggggcctggtgcggggccgggtggtggccgctgacagcggggagcccctgcgctttgcccgcatcctgctgggccaggagcccatcggcttcaccgcctaccagggcgacttcaccatcgaggtgccccccagcacccagaggctggtggtgacctttgtggaccccagcggggagttcatggatgctgtgcgggtgctgccctttgaccccagaggagctggggtgtaccacgaggtgaaggccatgaggaagaaggcccctgtgatcctgcacaccagccagagcaacaccatccccctgggggagctggaggatgaggcccccctgggggagctggtgctgcccagcggggccttccggcgggcagatggcaagccctacagcggccctgtggaggcccgggtgacctttgtggacccccgggacctgaccagcgctgccagcgcccccagcgacctgcgctttgtggacagtgatggagagctggcccccctgcggacctacggcatgttttctgtggacctgcgggcccctggcagcgctgagcagctgcaggtgggccctgtggccgtgcgggtggccgccagccagatccacatgcctggccacgtggaggccctgaagctgtggagcctgaaccctgagaccggcctgtgggaggaggagagcggcttccggcgggagggcagcagcggcccccgggtgcggcgggaggagagggtcttcctggtgggcaatgtggagatccgggagcggcggctcttcaacctggatgtgcctgagcggcggcgctgctttgtgaaggtgcgggcctatgccaatgacaagttcacccccagcgagcaggtggagggcgtggtggtgaccctggtgaacctggagcccgcccctggcttcagcgccaacccccgggcctggggccgctttgattctgctgtgacaggccccaatggagcctgcctgcctgccttctgtgatgctgacagaccagatgcctacacagccctggtgacagccaccctgggcggggaggagctggagcccgcccccagcctgccccggcccctgcctgccaccgtgggcgtgacccagccctacctggaccggctgggctacagaagaacagaccatgatgatcctgccttcaagagaaatggcttccgcatcaacctggccaagcccaggcctggggaccctgctgaggccaatggacctgtgtacccctggaggagcctgcgggagtgccagggcgcccctgtgacagccagccacttccgctttgcccgggtggaggccgacaagtatgagtacaacgtggtgcccttccgggagggcaccccagcctcctggacaggagacctgctggcctggtggcccaacccccaggagttccgggcctgcttcctgaaggtgaagatccagggcccccaggagtacatggtgcgcagccacaatgctgggggcagccaccccaggacccggggccagctgtatggcctgagagatgcccggtctgtgcgggaccctgagcggcccggcaccagcgctgcctgtgtggagttcaagtgcagcggcatgctgtttgaccagaggcaggtggacaggaccctggtgaccatcatgccccagggcagctgcagaagagtggccgtgaatggcctgctgcgggactacctgaccaggcaccccccacctgtgcctgcagaagatcctgctgccttctccatgctggcccccctggaccccctgggccacaactatggagtgtacacagtgacagaccagagcccccggctggccaaggagatcgccatcggccgctgctttgatggcagcagtgatggcttcagccgggagatgaaggcagatgctggaacagctgtgaccttccagtgccgggagcccccagctggccggcccagcctcttccagaggctgctggagagccctgccacagccctgggggacatccggcgggagatgtctgaggccgcccaggcccaggcccgggccagcggccccctgcggacccggcggggccgggtgcggcagtag

SEQ ID NO: 146325 - DNA, 3555 bp, synthetic construct
  misc_feature 1..3555: note = Description of Artificial Sequence: Synthetic coding sequence
  source 1..3555: mol_type = other DNA
atggtgggcaccaaggcctgggtgttctccttcctggtgctggaggtgacctctgtgctgggccggcagaccatgctgacccagagcgtgagaagagtgcagcccgggaagaagaaccccagcatctttgccaagccagctgacaccctggagagccctggagagtggaccacctggttcaacatcgactacccaggcggcaagggggactatgagcggctggatgccatccgcttctactatggagacagagtgtgtgcccggcccctgcggctggaggcccggaccacagactggaccccagctggcagcacaggccaggtggtgcacggcagcccccgggagggcttctggtgcctgaaccgggagcagaggcctggccagaactgcagcaactacacagtgcgcttcctgtgccccccaggcagcctgcggcgggacacagagcgcatctggagcccctggagcccctggagcaagtgcagcgctgcctgtggccagacaggagtgcagaccaggacccgcatctgcctggccgagatggtgtccctgtgcagcgaggccagcgaggagggccagcactgcatgggccaggactgcacagcctgtgacctgacctgccccatgggccaggtgaatgctgactgtgatgcctgcatgtgccaggacttcatgctgcatggagctgtgtccctgcctggaggagccccagccagcggggccgccatctacctgctgaccaagacccccaagctgctgacccagacagacagtgatggccgcttccgcatccctggcctgtgcccagatggcaagagcatcctgaagatcaccaaggtgaagtttgcccccatcgtgctgaccatgcccaagaccagcctgaaggccgccaccatcaaggccgagtttgtgcgggcagagaccccctacatggtgatgaaccctgagaccaaggcccggcgggccggccagagcgtgtccctgtgctgcaaggccaccgggaagcccaggccagacaagtacttctggtaccacaatgacaccctgctggaccccagcctgtacaagcatgagagcaagctggtgctgaggaagctgcagcagcaccaggccggggagtacttctgcaaggcccagagtgatgctggagctgtgaagagcaaggtggcccagctgattgtgattgccagtgatgagaccccctgcaaccctgtgcctgagagctacctgatccggctgccccatgactgcttccagaatgccaccaacagcttctactatgatgtgggccgctgccctgtgaagacctgtgccggccagcaggacaatggcatccgctgcagagatgctgtgcagaactgctgcggcatcagcaagacagaggagcgggagatccagtgcagcggctacaccctgcccaccaaggtggccaaggaatgtagctgccagcgctgcacagagaccaggagcatcgtgcggggccgggtgtctgctgctgacaatggagagcccatgagatttggacatgtgtacatgggcaacagccgggtgtccatgacaggctacaagggcaccttcaccctgcacgtgccccaggacacagagcggctggtgctgacctttgtggaccggctgcagaagtttgtgaacaccaccaaggtgctgcccttcaacaagaagggcagcgctgtgttccacgagatcaagatgctgcggaggaagaagcccatcaccctggaggccatggagaccaacatcatccccctgggggaggtggtgggggaggaccccatggccgagctggagatccccagccgctccttctaccggcagaatggagagccctacatcggcaaggtgaaggcctctgtgaccttcctggaccccaggaacatcagcacagccacagctgcccagacagacctgaacttcatcaatgatgaaggagacaccttccccctgcggacctacggcatgttttctgtggacttcagagatgaggtgaccagcgagcccctgaatgccggcaaggtgaaggtgcacctggacagcacccaggtgaagatgcctgagcacatcagcacagtgaagctgtggagcctgaacccagacaccggcctgtgggaggaggagggggacttcaagtttgagaaccagaggaggaacaagcgggaggacaggaccttcctggtgggcaacctggagatccgggagaggaggctcttcaacctggatgtgcctgagagccgccgctgctttgtgaaggtgcgggcctacagaagtgagcgcttcctgcccagcgagcagatccagggcgtggtgatcagcgtcatcaacctggagcccaggacaggcttcctgagcaacccccgggcctggggccgctttgacagcgtcatcaccggccccaacggggcctgtgtgcctgccttctgtgatgaccagagcccagatgcctacagcgcctacgtgctggccagcctggccggggaggagctgcaggccgtggagagcagccccaagttcaaccccaatgccatcggcgtgccccagccctacctgaacaagctgaactacagaagaacagaccacgaggacccccgggtgaagaagacagccttccagatctccatggccaagccccggcccaacagcgctgaggagagcaatggccccatctatgcctttgagaacctgcgggcctgtgaggaggccccacccagcgctgcccacttccgcttctaccagattgaaggagacagatatgactacaacacagtgcccttcaatgaagatgaccccatgtcctggacagaggactacctggcctggtggcccaagcccatggagttccgggcctgctacatcaaggtgaagatcgtgggccccctggaggtgaatgtgcgcagcaggaacatgggcggcacccaccggcagacagtgggcaagctgtatggcatcagagatgtgcgcagcacccgggaccgggaccagcccaacgtgtctgctgcctgcctggagttcaagtgcagcggcatgctgtatgaccaggacagagtggacaggaccctggtgaaggtgatcccccagggcagctgccggcgggcctctgtgaaccccatgctgcacgagtacctggtgaaccacctgcccctggccgtgaacaatgacaccagcgagtacaccatgctggcccccctggaccccctgggccacaactacggcatctacacagtgacagaccaggaccccaggacagccaaggagatcgccctgggccgctgctttgatggcaccagtgatggcagcagccgcatcatgaagagcaatgtgggcgtggccctgaccttcaactgtgtggagcggcaggtgggccggcagagcgccttccagtacctgcagagcaccccagcccagagccctgctgctggcaccgtgcagggccgggtgcccagccggcggcagcagagggccagcagaggaggccagaggcagggcggcgtggtggccagcctgcgcttcccccgggtggcccagcagcccctcatcaactag

SEQ ID NO: 146326 - DNA, 8148 bp, synthetic construct
  misc_feature 1..8148: note = Description of Artificial Sequence: Synthetic coding sequence
  source 1..8148: mol_type = other DNA
atggctgctgctgctgggggcggcagctgccccggccctggcagcgcccggggccgcttccctggccggcccagaggagctgggggcggcggcggccggggcggcagaggaaatggagctgagcgggtgcgggtggccctgcggcggggcggcggggccaccggccctgggggcgctgagcctggagaggacacagccctgctgcggctgctgggcctgcggcggggcctgcggcggctgcggcggctgtgggccggcccccgggtgcagaggggccggggccggggccggggccggggctggggccccagccggggctgtgtgcctgaggaggagagcagtgatggagagagtgatgaggaggagttccagggcttccacagtgatgaagatgtggcccccagcagcctgcggagcgccctgcggagccagaggggccgggccccccggggccggggcaggaagcacaagaccacccccctgcccccaccccggctggctgatgtggcccccaccccacccaagaccccagccaggaagagaggagaggagggcacagagaggatggtgcaggccctgacagagctgctgcggcgggcccaggccccccaggcccccaggagccgggcctgtgagcccagcaccccaagaagaagccggggccggcccccaggccggcctgctggcccctgcaggaggaagcagcaggccgtggtggtggccgaggccgctgtgaccatccccaagccagagcccccacctcctgtggtgcctgtgaagcaccagacaggctcctggaagtgcaaggagggccctggccctggccctggcaccccccggcggggcggccagagcagccggggcggccggggcggccggggccggggccggggcggcggcctgccctttgtgatcaagtttgtgtcccgggccaagaaggtgaagatgggccagctgagcctgggcctggagagcggccagggccagggccagcacgaggagagctggcaggatgtgccccagaggagagtgggcagcggccagggcggcagcccctgctggaagaagcaggagcagaagctggatgatgaggaggaggagaagaaggaggaggaggagaaggacaaggagggggaggagaaggaggagagagctgtggccgaggagatgatgcctgctgctgagaaggaggaggccaagctgcccccaccacccctgaccccaccagcccccagccccccaccacccctgcccccacccagcaccagccccccaccacccctgtgccccccacctcctcctcctgtgagccccccacccctgcccagccccccacctcctccagcccaggaggagcaggaggagagccccccacctgtggtgcctgccacctgcagcaggaagaggggccggccccccctgacccccagccagagagctgagcgggaggccgcccgggccggccctgagggcaccagcccccccacccccacccccagcacagccactggaggccccccagaggacagccccaccgtggcccccaagagcaccaccttcctgaagaacatccggcagttcatcatgcctgtggtgtctgcccggagcagcagggtcatcaagaccccccggcgcttcatggatgaagatcctcccaagccacccaaggtggaggtgtcccctgtgctgcggccccccatcaccaccagcccccctgtgccccaggagcccgcccctgtgcccagccccccccgggcccccaccccacccagcacccctgtgcccctgcctgagaagaggaggagcatcctgcgggagcccaccttccgctggaccagcctgacccgggagctgcccccacctcctccagcccctcctcctcctccagcccccagccccccaccagccccagccaccagcagccggcggcccctgctgctgcgggccccccagttcaccccatctgaggcccacctgaagatctatgagagcgtgctgaccccaccacccctgggcgcccctgaggcccctgagcctgagcccccaccagcagatgacagccctgctgagcctgagcccagggctgtgggccgcaccaaccacctgagcctgcccaggtttgcccctgtggtgaccacccctgtgaaggccgaggtgagcccccacggggccccagccctgagcaatggcccccagacccaggcccagctgctgcagcccctgcaggccctgcagacccagctgctgccccaggccctgcccccaccccagccccagctgcagcccccacccagcccccagcagatgccacccctggagaaggccagaattgctggggtgggcagcctgcccctgagcggcgtggaggagaagatgttcagcctgctgaagagggccaaggtgcagctgttcaagattgaccagcagcagcagcagaaggtggccgcctccatgcccctgagccctgggggccagatggaggaggtggccggggctgtgaagcagatcagtgaccggggccctgtgcgctcagaagatgagagcgtggaggccaagcgggagcggcccagcggccctgagagccctgtgcagggcccccgcatcaagcacgtgtgcagacatgctgctgtggccctgggccaggcccgggccatggtgcctgaagatgtgccccggctgagcgccctgcccctgcgggaccggcaggacctggccacagaggacaccagcagcgccagcgagacagaatctgtgcccagccgcagcagaagaggcaaggtggaggccgccggccctggaggagagagcgagcccactggaagtggcggcaccctggcccacaccccccggcgcagcctgcccagccaccacggcaagaagatgaggatggcccgctgtggccactgccggggctgcctgcgggtgcaggactgtggcagctgtgtgaactgcctggacaagcccaagtttggaggccccaacaccaagaagcagtgctgcgtgtacagaaaatgtgacaagattgaggccaggaagatggagcggctggccaagaagggccgcaccatcgtgaagaccctgctgccctgggacagtgatgagagccctgaggccagccctggccccccaggccccaggagaggagctggagctgggggcccccgggaggaggtggtggcccaccctggccctgaggagcaggacagcctgctgcagaggaagagcgcccggcgctgtgtgaagcagaggcccagctatgacatctttgaggacagtgatgattctgagcccggcggccccccagcccccaggaggaggaccccccgggagaatgagctgcccctgcctgagcctgaggagcagagccggcccaggaagcccaccctgcagcctgtgctgcagctgaaggcccggcggcggctggacaaggatgccctggcccctggcccctttgccagcttccccaacggctggacaggcaagcagaagagcccagatggagtgcaccgggtgcgggtggacttcaaggaggactgtgacctggagaatgtgtggctgatgggcggcctgtctgtgctgacctctgtgcctgggggcccccccatggtgtgcctgctgtgtgccagcaagggcctgcacgagctggtgttctgccaggtgtgctgtgaccccttccaccccttctgcctggaggaggccgagcggcccctgccccagcaccacgacacctggtgctgccgccgctgcaagttctgccacgtgtgtggcaggaagggccggggcagcaagcacctgctggagtgtgagcgctgcagacatgcctaccacccagcctgcctgggccccagctaccccacccgggccaccaggaagaggaggcactggatctgcagcgcctgtgtgcgctgcaagagctgtggggccacccctgggaagaactgggatgtggagtggagcggggactacagcctgtgcccccgctgcacccagctgtatgagaagggcaactactgccccatctgcacccgctgctatgaggacaatgactatgagagcaagatgatgcagtgtgcccagtgtgaccactgggtgcacgccaagtgtgagggcctgagtgatgaggactatgagatcctgagcggcctgcctgattctgtgctgtacacctgtggcccctgtgccggggccgcccagccccgctggagggaggccctgagcggggccctgcagggcggcctgcggcaggtgctgcagggcctgctgagcagcaaggtggtgggccccctgctgctgtgcacccagtgtggcccagatggcaagcagctgcaccctggcccctgtggcctgcaggccgtgtcccagagatttgaagatggccactacaagtctgtgcacagcttcatggaggacatggtgggcatcctgatgaggcacagcgaggagggggagaccccagacagaagagctgggggccagatgaagggcctgctgctgaagctgctggagagcgccttcggctggtttgatgcccatgaccccaagtactggaggaggagcacccggctgcccaacggggtgctgcccaatgctgtgctgccccccagcctggaccacgtgtatgcccagtggaggcagcaggagcctgagaccccagagagcggccagcccccaggggaccccagcgctgccttccagggcaaggaccctgctgccttcagccacctggaggacccccggcagtgtgccctgtgcctgaagtatggagatgctgacagcaaggaggccggccgcctgctgtacatcggccagaatgagtggacccacgtgaactgtgccatctggagcgctgaggtgtttgaagaaaatgatggcagcctgaagaatgtgcatgctgctgtggcccggggccggcagatgagatgtgagctgtgcctgaagccaggggccaccgtgggctgctgcctgagcagctgcctgagcaacttccacttcatgtgtgcccgggccagctactgcatcttccaggatgacaagaaggtgttctgccagaagcacacagacctgctggatggcaaggagatcgtgaacccagatggctttgatgtgctgcggcgggtgtatgtggactttgagggcatcaacttcaagaggaagttcctgaccggcctggagccagatgccatcaacgtgctgattggcagcatcagaattgacagcctgggcaccctgagtgacctgagtgactgtgagggccgcctcttccccatcggctaccagtgcagccggctgtactggagcacagtggatgcccggcggcgctgctggtaccgctgccgcatcctggagtaccggccctggggcccccgggaggagcccgcccacctggaggccgctgaggagaaccagaccatcgtgcacagccctgcccccagcagcgagcccccaggaggagaggacccccccctggacacagatgtgctggtgcctggggcccctgagcggcacagccccatccagaacctggacccccccctgcggccagattctggcagcgcccctcctccagcccccaggagcttcagcggggcccgcatcaaggtgcccaactacagccccagccggcggcccctgggcggcgtgtcctttggccccctgcccagccctggcagccccagcagcctgacccaccacatccccaccgtgggggaccctgacttccctgcccccccaagaagaagccggcggcccagccccctggccccccggcccccacccagccgctgggccagcccccccctgaagaccagcccccagctgcgggtgcccccacccacctctgtggtgacagccctgacccccaccagcggggagctggcccctcctggccctgcccccagccccccacctcctgaggacctgggccctgactttgaggacatggaggtggtgtctggcctgtctgctgctgacctggactttgctgccagcctgctgggcacagagcccttccaggaggagatcgtggccgccggggccatgggcagcagccatggaggccctggggacagcagcgaggaggagagcagccccaccagccgctacatccacttccctgtgacagtggtgtctgcccctggcctggcccccagcgccacccctggggccccccgcatcgagcagctggatggagtggatgatggaacagacagcgaggccgaggccgtgcagcagccccggggccagggcaccccacccagcggccctggggtggtgcgggccggcgtgctgggcgctgctggggaccgggcccggcccccagaggacctgcccagcgagatcgtggactttgtgctgaagaacctgggcggccctggagatggaggagctggcccccgggaggagagcctgcccccagccccacccctggccaacggcagccagcccagccagggcctgacagccagccctgctgaccccaccaggacctttgcctggctgcccggggcccctggggtgcgggtgctgagcctgggccctgcccctgagccccccaagccagccaccagcaagatcatcctggtgaacaagctgggccaggtgtttgtgaagatggccggggagggggagcctgtgcccccacctgtgaagcagccccccctgccccccaccatcagccccacagcccccacctcctggaccctgcccccaggccccctgctgggcgtgctgcctgtggtgggcgtggtgcggcctgcccctcctcctcctcctccacccctgaccctggtgctgagcagcggccctgccagccccccccggcaggccatccgggtgaagagggtgtccaccttcagcggccgcagccccccagcccccccaccctacaaggccccccggctggatgaagatggagaggccagcgaggacaccccccaggtgcccggcctgggcagcggcggcttcagccgggtgaggatgaagacccccaccgtgcggggcgtgctggacctggacaggcctggagagcctgctggggaggagagccctggccccctgcaggagaggagccccctgctgcccctgcctgaagatggccccccccaggtgcctgatggccccccagacctgctgctggagagccagtggcaccactacagcggggaggccagcagcagcgaggaggagccccccagcccagatgacaaggagaaccaggcccccaagaggacaggcccccacctgcgctttgagatcagcagtgaagatggcttctctgtggaggccgagagcctggagggcgcctggaggaccctgattgagaaggtgcaggaggcccggggccacgcccggctgcggcacctgtccttcagcggcatgtctggggcccggctgctgggcatccaccatgatgctgtgatcttcctggccgagcagctgcccggggcccagcgctgccagcactacaagttccgctaccaccagcagggcgagggccaggaggagccccccctgaacccccatggagctgcccgggcagaggtgtacctgaggaagtgcacctttgacatgttcaacttcctggccagccagcaccgggtgctgcctgagggcgccacctgtgatgaggaggaggatgaggtgcagctgcggagcacccggcgggccaccagcctggagctgcccatggccatgaggttccgccacctgaagaagaccagcaaggaggccgtgggcgtgtaccgcagcgccatccacggccggggcctcttctgcaagagaaatattgatgctggggagatggtgattgagtacagcggcatcgtcatccgctctgtgctgacagacaagcgggagaagttctatgatggcaagggcatcggctgctacatgttcaggatggatgactttgatgtggtggatgccaccatgcacggcaatgctgcccgcttcatcaaccacagctgtgagcccaactgcttcagcagggtcatccacgtggagggccagaagcacatcgtcatctttgccctgcggcgcatcctgcggggggaggagctgacctatgactacaagttccccattgaagatgccagcaacaagctgccctgcaactgtggggccaagcgctgccgccgcttcctgaactag

SEQ ID NO: 146327 - DNA, 2115 bp, synthetic construct
  misc_feature 1..2115: note = Description of Artificial Sequence: Synthetic coding sequence
  source 1..2115: mol_type = other DNA
atggtgcctgacacagcctgtgtgctgctgctgaccctggccgccctgggcgccagcggccagggccagagccccctgggcagtgacctgggcccccagatgctgcgggagctgcaggagaccaatgctgccctgcaggatgtgcgggagctgctgcggcagcaggtgcgggagatcaccttcctgaagaacacagtgatggagtgtgatgcctgtggcatgcagcagagcgtgaggacaggcctgcccagcgtgcggcccctgctgcactgtgcccctggcttctgcttccctggggtggcctgcatccagacagaaagtggggcccgctgtggcccctgcccagctggcttcaccggaaatggcagccactgcacagatgtgaatgaatgtgaaacaggccagcacaactgtgtgcccaacagcgtgtgcatcaacacccggggcagcttccagtgtggcccctgccagcccggctttgtgggggaccaggccagcggctgccagaggcgggcccagcgcttctgcccagatggcagccccagtgaatgtcatgaacatgctgactgtgtgctggagagagatggcagccgcagctgtgtgtgtgctgtgggctgggccggaaatggcatcctgtgtggccgggacacagacctggatggcttcccagatgagaagctgcgctgcccagagcggcagtgcaggaaggacaactgtgtgacagtgcccaacagcggccaggaggatgtggacagagatggcattggagatgcctgtgaccctgatgctgatggagatggagtgcccaatgagaaggacaactgccccctggtgagaaatccagaccagaggaacacagatgaggacaagtggggagatgcctgtgacaactgccgcagccagaagaatgatgaccagaaggacacagaccaggacggcagaggagatgcctgtgatgatgacattgatggagaccgcatccggaaccaggccgacaactgcccccgggtgcccaacagcgaccagaaggacagtgatggagatggcattggagatgcctgtgacaactgcccccagaagagcaacccagaccaggctgatgtggaccatgactttgtgggagatgcctgtgacagcgaccaggaccaggatggagatggccaccaggacagccgggacaactgccccaccgtgcccaacagcgcccaggaggacagcgaccatgatggccagggagatgcctgtgatgatgatgatgacaatgatggagtgcctgacagccgggacaactgccgcctggtgcccaaccctggccaggaggatgctgacagagatggagtgggagatgtgtgccaggatgactttgatgctgacaaggtggtggacaagattgatgtgtgcccagaaaatgctgaggtgaccctgacagacttccgggccttccagacagtggtgctggaccctgaaggagatgcccagattgaccccaactgggtggtgctgaaccagggccgggagatcgtgcagaccatgaacagcgaccccggcctggccgtgggctacacagccttcaatggagtggactttgagggcaccttccacgtgaacacagtgacagatgatgattatgccggcttcatcttcggctaccaggacagcagcagcttctacgtggtgatgtggaagcagatggagcagacctactggcaggccaaccccttccgggctgtggccgagcccggcatccagctgaaggctgtgaagagcagcactggacctggagagcagctgagaaatgccctgtggcacactggagacacagagagccaggtgcggctgctgtggaaggaccccagaaatgtgggctggaaggacaagaagagctaccgctggttcctgcagcaccggccccaggtgggctacatccgggtgcgcttctatgagggccctgagctggtggccgacagcaatgtggtgctggacaccaccatgaggggcggccgcctgggcgtcttctgcttcagccaggagaacatcatctgggccaacctgcgctaccgctgcaatgacaccatccctgaggactatgagacccaccagctgcggcaggcctag

SEQ ID NO: 146328 - DNA, 2235 bp, synthetic construct
  misc_feature 1..2235: note = Description of Artificial Sequence: Synthetic coding sequence
  source 1..2235: mol_type = other DNA
atggtgcctgacacagcctgtgtgctgctgctgaccctggccgccctgggcgccagcggccagggccagagccccctgggcagtgacctgggcccccagatgctgcgggagctgcaggagaccaatgctgccctgcaggatgtgcgggagctgctgcggcagcaggtgcgggagatcaccttcctgaagaacacagtgatggagtgtgatgcctgtggcatgcagcagagcgtgaggacaggcctgcccagcgtgcggcccctgctgcactgtgcccctggcttctgcttccctggcccctgcccagctggcttcaccggaaatggcagccactgcacagatgtgaatgaatgtaatgcccacccctgcttcccccgggtgcgctgcatcaacaccagccctggcttccgctgtgaggcctgccccccaggctacagcggccccacccaccagggcgtgggcctggcctttgccaaggccaacaagcaggtgtgcacagacatcaatgaatgtgaaacaggccagcacaactgtgtgcccaacagcgtgtgcatcaacacccggggcagcttccagtgtggcccctgccagcccggctttgtgggggaccaggccagcggctgccagaggcgggcccagcgcttctgcccagatggcagccccagtgaatgtcatgaacatgctgactgtgtgctggagagagatggcagccgcagctgtgtgtgtgctgtgggctgggccggaaatggcatcctgtgtggccgggacacagacctggatggcttcccagatgagaagctgcgctgcccagagcggcagtgcaggaaggacaactgtgtgacagtgcccaacagcggccaggaggatgtggacagagatggcattggagatgcctgtgaccctgatgctgatggagatggagtgcccaatgagaaggacaactgccccctggtgagaaatccagaccagaggaacacagatgaggacaagtggggagatgcctgtgacaactgccgcagccagaagaatgatgaccagaaggacacagaccaggacggcagaggagatgcctgtgatgatgacattgatggagaccgcatccggaaccaggccgacaactgcccccgggtgcccaacagcgaccagaaggacagtgatggagatggcattggagatgcctgtgacaactgcccccagaagagcaacccagaccaggctgatgtggaccatgactttgtgggagatgcctgtgacagcgaccaggaccaggatggagatggccaccaggacagccgggacaactgccccaccgtgcccaacagcgcccaggaggacagcgaccatgatggccagggagatgcctgtgatgatgatgatgacaatgatggagtgcctgacagccgggacaactgccgcctggtgcccaaccctggccaggaggatgctgacagagatggagtgggagatgtgtgccaggatgactttgatgctgacaaggtggtggacaagattgatgtgtgcccagaaaatgctgaggtgaccctgacagacttccgggccttccagacagtggtgctggaccctgaaggagatgcccagattgaccccaactgggtggtgctgaaccagggccgggagatcgtgcagaccatgaacagcgaccccggcctggccgtgggctacacagccttcaatggagtggactttgagggcaccttccacgtgaacacagtgacagatgatgattatgccggcttcatcttcggctaccaggacagcagcagcttctacgtggtgatgtggaagcagatggagcagacctactggcaggccaaccccttccgggctgtggccgagcccggcatccagctgaaggctgtgaagagcagcactggacctggagagcagctgagaaatgccctgtggcacactggagacacagagagccaggtgcggctgctgtggaaggaccccagaaatgtgggctggaaggacaagaagagctaccgctggttcctgcagcaccggccccaggtgggctacatccgggtgcgcttctatgagggccctgagctggtggccgacagcaatgtggtgctggacaccaccatgaggggcggccgcctgggcgtcttctgcttcagccaggagaacatcatctgggccaacctgcgctaccgctgcaatgacaccatccctgaggactatgagacccaccagctgcggcaggcctag

SEQ ID NO: 146329 - DNA, 2394 bp, synthetic construct
  misc_feature 1..2394: note = Description of Artificial Sequence: Synthetic coding sequence
  source 1..2394: mol_type = other DNA
atggccgccctggcctacaacctgggcaagcgggagatcaaccactacttctctgtgcgcagcgccaaggtgctggccctggtggccgtgctgctgctggccgcctgccacctggccagccgccgctacagaggaaatgacagctgtgagtacctgctgagcagcggccgcttcctgggggagaaggtgtggcagccccacagctgcatgatgcacaagtacaagatcagcgaggccaagaactgcctggtggacaagcacatcgccttcatcggggacagccgcatccggcagctgttctacagctttgtgaagatcatcaacccccagttcaaggaggagggcaacaagcatgagaacatcccctttgaggacaagacagcctctgtgaaggtggacttcctgtggcaccctgaggtgaatggctccatgaagcagtgcatcaaggtgtggacagaagattccatcgccaagccccacgtgattgtggccggggccgccacctggagcatcaagatccacaacggcagcagcgaggccctgagccagtacaagatgaacatcaccagcatcgcccccctgctggagaagctggccaagaccagtgatgtgtactgggtgctgcaggaccctgtgtatgaggacctgctgtctgaaaataggaagatgatcaccaatgagaagattgatgcctacaatgaagctgctgtgtccatcctgaacagcagcaccaggaacagcaagagcaatgtgaagatgttttctgtgtccaagctgattgcccaggagaccatcatggagagcctggatggcctgcacctgcctgagagcagccgggagaccacagccatgatcctgatgaatgtgtactgcaacaagatcctgaagcctgtggatggcagctgctgccagcccaggcctcctgtgaccctcatccagaagctggccgcctgcttcttcaccctgagcatcatcggctacctgatcttctacatcatccacagaaatgcccacaggaagaacaagccctgcacagacctggagagcggggaggagaagaagaacatcatcaacacccctgtgagcagcctggagatcctgctgcagagcttctgcaagctgggcctcatcatggcctacttctacatgtgtgaccgggccaacctcttcatgaaggagaacaagttctacacccacagcagcttcttcatccccatcatctacatcctggtgctgggcgtcttctacaatgaaaacaccaaggagaccaaggtgctgaaccgggagcagacagatgagtggaagggctggatgcagctggtgatcctgatctaccacatcagcggggccagcaccttcctgcctgtgtacatgcacatccgggtgctggtggccgcctacctgttccagacaggctacggccacttctcctacttctggatcaagggggactttggcatctacagagtgtgccaggtgctcttccggctgaacttcctggtggtggtgctgtgcatcgtgatggaccggccctaccagttctactactttgtgcccctggtgacagtgtggttcatggtgatctacgtgaccctggccctgtggccccagatcatccagaagaaggccaacggcaactgcttctggcacttcggcctgctgctgaagctgggcttcctgctgctcttcatctgcttcctggcctacagccagggcgcctttgagaagatcttcagcctgtggcccctgagcaaatgttttgagctgaagggaaatgtgtatgagtggtggttccgctggaggctggacagatatgtggtgttccacggcatgctgtttgccttcatctacctggccctgcagaagaggcagatcctgtctgagggcaagggggagcccctcttcagcaacaagatcagcaacttcctgctcttcatctctgtggtgtccttcctgacctacagcatctgggccagcagctgcaagaacaaggccgagtgcaatgagctgcaccccagcgtgtctgtggtgcagatcctggccttcatcctgatccggaacatccctggctacgcccggtctgtgtacagcagcttctttgcctggtttgggaagatcagcctggagctgttcatctgccagtaccacatctggctggccgctgacacccggggcatcctggtgctgatccctggcaaccccatgctgaacatcatcgtgtccaccttcatctttgtgtgtgtggcccacgagatcagccagatcaccaatgacctggcccagatcatcatccccaaggacaacagcagcctgctgaagaggctggcctgcatcgccgccttcttctgtggcctgctgatcctgagcagcatccaggacaagagcaagcactag

SEQ ID NO: 146330 - DNA, 2721 bp, synthetic construct
  misc_feature 1..2721: note = Description of Artificial Sequence: Synthetic coding sequence
  source 1..2721: mol_type = other DNA
atggctggaaatgtgaagaagagcagtggagctgggggcggcagcggcagcggcggcagcggcagcggcggcctcatcggcctgatgaaggatgccttccagccccaccaccaccaccaccaccacctgagcccccaccccccaggcaccgtggacaagaagatggtggagaagtgctggaagctgatggacaaggtggtgcggctgtgccagaaccccaagctggccctgaagaacagccccccctacatcctggacctgctgcctgacacctaccagcacctgcggaccatcctgagccgctatgagggcaagatggagaccctgggagaaaatgagtacttccgggtcttcatggagaacctgatgaagaagaccaagcagaccatcagcctcttcaaggagggcaaggagaggatgtatgaggagaacagccagcccaggaggaacctgaccaagctgagcctcatcttcagccacatgctggccgagctgaagggcatcttccccagcggcctcttccagggcgacaccttccgcatcaccaaggcagatgctgctgagttctggaggaaggccttcggggagaagaccatcgtgccctggaagagcttccggcaggccctgcacgaggtgcaccccatcagcagcggcctggaggccatggccctgaagagcaccatcgacctgacctgcaatgactacatctctgtgtttgaatttgacatcttcaccaggctcttccagccctggagcagcctgctgaggaactggaacagcctggccgtgacccaccctggctacatggccttcctgacctatgatgaggtgaaggcccggctgcagaagttcatccacaagccaggcagctacatcttccggctgagctgcacccggctgggccagtgggccatcggctacgtgacagcagatggcaacatcctgcagaccatcccccacaacaagcccctcttccaggccctgattgatggcttccgggagggcttctacctgttcccagatggaagaaaccagaacccagacctgaccggcctgtgtgagcccaccccccaggaccacatcaaggtgacccaggagcagtatgagctgtactgtgagatgggcagcaccttccagctgtgcaagatctgtgccgagaatgacaaggatgtgaagattgagccctgtggccacctgatgtgcaccagctgcctgacctcctggcaggagagcgagggccagggctgccccttctgccgctgtgagatcaagggcacagagcccatcgtggtggacccctttgacccccggggcagcggcagcctgctgcggcagggcgctgagggcgcccccagccccaactatgatgatgatgatgatgaaagagcagatgacaccctcttcatgatgaaggagctggccggggccaaggtggagaggcctcccagccccttctccatggccccccaggccagcctgccccctgtgcccccccggctggacctgctgccccagagggtgtgtgtgcccagcagcgccagcgccctgggcacagccagcaaggccgccagcggcagcctgcacaaggacaagcccctgcctgtgccccccaccctgcgggacctgcccccacctcctcctccagaccggccctacagcgtgggcgctgagagccggccccagaggcggcccctgccctgcacccctggggactgccccagccgggacaagctgccccctgtgcccagcagccggctgggggacagctggctgccccggcccatccccaaggtgcctgtgtctgcccccagcagcagtgacccctggacaggccgggagctgaccaacagacacagcctgcccttcagcctgcccagccagatggagcccaggccagatgtgccccggctgggcagcaccttcagcctggacacctccatgtccatgaacagcagccccctggtgggcccagaatgtgaccaccccaagatcaagcccagcagcagcgccaatgccatctacagcctggccgcccggcccctgcctgtgcccaagctgcccccaggagagcagtgtgagggggaggaggacacagagtacatgacccccagcagccggcccctgcggcccctggacaccagccagagcagccgggcctgtgactgtgaccagcagattgacagctgcacctatgaggccatgtacaacatccagagccaggcccccagcatcacagagagcagcaccttcggggagggcaacctggccgccgcccacgccaacacaggccctgaggagagtgaaaatgaagatgatggctatgatgtgcccaagccccctgtgcctgctgtgctggcccggaggaccctgagtgacatcagcaatgccagcagcagctttggctggctgagcctggatggagaccccaccaccaacgtgacagagggcagccaggtgcctgagaggcctcccaagcccttcccccggcgcatcaacagcgagaggaaggccggcagctgccagcagggcagcggccctgctgccagcgctgccacagccagcccccagctgagcagcgagattgagaacctgatgagccagggctacagctaccaggacatccagaaggccctggtgattgcccagaacaacatcgagatggccaagaacatcctgcgggagtttgtgtccatcagcagccctgcccacgtggccacctag

SEQ ID NO: 146331 - DNA, 2949 bp, synthetic construct
  misc_feature 1..2949: note = Description of Artificial Sequence: Synthetic coding sequence
  source 1..2949: mol_type = other DNA
atggccaacagcatgaatggaagaaatcctgggggccggggcggcaaccccaggaagggccgcatcctgggcatcattgatgccatccaggatgctgtgggcccccccaagcaggccgctgctgacagaagaacagtggagaagacctggaagctgatggacaaggtggtgcggctgtgccagaaccccaagctgcagctgaagaacagccccccctacatcctggacatcctgcctgacacctaccagcacctgcggctcatcctgagcaaatatgatgacaaccagaagctggcccagctgtctgaaaatgagtacttcaagatctacatcgacagcctgatgaagaagagcaagagggccatccgcctcttcaaggagggcaaggagaggatgtatgaggagcagagccaggacagaagaaacctgaccaagctgagcctcatcttcagccacatgctggccgagatcaaggccatcttccccaacggccagttccagggcgacaacttccgcatcaccaaggcagatgctgctgagttctggaggaagttcttcggggacaagaccatcgtgccctggaaggtgttccggcagtgcctgcacgaggtgcaccagatcagcagcggcctggaggccatggccctgaagagcaccatcgacctgacctgcaatgactacatctctgtgtttgaatttgacatcttcaccaggctcttccagccctggggcagcatcctgaggaactggaacttcctggccgtgacccaccctggctacatggccttcctgacctatgatgaggtgaaggcccggctgcagaagtacagcaccaagccaggcagctacatcttccggctgagctgcacccggctgggccagtgggccatcggctacgtgactggagatggcaacatcctgcagaccatcccccacaacaagcccctcttccaggccctgattgatggcagccgggagggcttctacctgtacccagatggccgcagctacaacccagacctgaccggcctgtgtgagcccacccctcatgaccacatcaaggtgacccaggagcagtatgagctgtactgtgagatgggcagcaccttccagctgtgcaagatctgtgccgagaatgacaaggatgtgaagattgagccctgtggccacctgatgtgcaccagctgcctgacagcctggcaggagagtgatggccagggctgccccttctgccgctgtgagatcaagggcacagagcccatcatcgtggacccctttgaccccagagatgagggcagccgctgctgcagcatcatcgaccccttcggcatgcccatgctggacctggatgatgatgatgaccgggaggagagcctgatgatgaaccggctggccaacgtgaggaaatgtacagaccggcagaacagccctgtgaccagccctggcagcagccccctggcccagaggaggaagccccagcctgaccccctgcagatcccccacctgagcctgccccctgtgcccccccggctggacctgatccagaagggcatcgtgcgcagcccctgtggcagccccaccggcagccccaagagcagcccctgcatggtgaggaagcaggacaagcccctgcctgcccctcctccacccctgcgggaccccccacctcctcctcctgagcggcccccacccatccccccagacaaccggctgagccgccacatccaccacgtggagagcgtgcccagccgggacccccccatgcccctggaggcctggtgccccagagatgtgtttggcaccaaccagctggtgggctgccgcctgctgggggagggcagccccaagccaggcatcacagccagcagcaatgtgaatggccgccacagccgggtgggcagtgaccctgtgctgatgaggaagcacagaagacatgacctgcccctggagggcgccaaggtgttcagcaatggccacctgggcagcgaggagtatgatgtgcccccccggctgagccccccacctcctgtgaccaccctgctgcccagcatcaagtgcaccggccccctggccaacagcctgtctgagaagacccgggaccctgtggaggaggatgatgatgagtacaagatccccagcagccaccctgtgtccctgaacagccagcccagccactgccacaacgtgaagccccctgtgcgcagctgtgacaatggccactgcatgctgaatggcacccacggccccagcagcgagaagaagagcaacatcccagacctgagcatctacctgaagggagatgtgtttgattctgccagtgaccctgtgcccctgcccccagcccggccccccacccgggacaaccccaagcacggcagcagcctgaacagaacacccagcgactatgacctgctgatcccccccctgggagaagatgcctttgatgccctgccccccagcctgcccccacctcctcctccagcccggcacagcctgattgagcacagcaagcccccaggcagcagcagccggcccagcagcggccaggacctcttcctgctgcccagcgacccctttgtggacctggccagcggccaggtgcccctgcccccagcccggcggctgcccggggagaatgtgaagaccaacagaaccagccaggactatgaccagctgcccagctgcagtgatggcagccaggccccagcccggccccccaagccccggcccaggagaacagcccctgagatccaccacaggaagccccacggccctgaggccgccctggagaatgtggatgccaagatcgccaagctgatgggagagggctacgcctttgaggaggtgaagagggccctggagatcgcccagaacaacgtggaggtggcccggagcatcctgcgggagtttgccttccccccacctgtgagcccccggctgaacctgtag

SEQ ID NO: 146332 - DNA, 2883 bp, synthetic construct
  misc_feature 1..2883: note = Description of Artificial Sequence: Synthetic coding sequence
  source 1..2883: mol_type = other DNA
atggccctggcccctggcccagatgcccacgcccacctgccccccctgattgagctgaagttccagatggccaacagcatgaatggaagaaatcctgggggccggggcggcaaccccaggaagggccgcatcctgggcatcattgatgccatccaggatgctgtgggcccccccaagcaggccgctgctgacagaagaacagtggagaagacctggaagctgatggacaaggtggtgcggctgtgccagaaccccaagctgcagctgaagaacagccccccctacatcctggacatcctgcctgacacctaccagcacctgcggctcatcctgagcaaatatgatgacaaccagaagctggcccagctgtctgaaaatgagtacttcaagatctacatcgacagcctgatgaagaagagcaagagggccatccgcctcttcaaggagggcaaggagaggatgtatgaggagcagagccaggacagaagaaacctgaccaagctgagcctcatcttcagccacatgctggccgagatcaaggccatcttccccaacggccagttccagggcgacaacttccgcatcaccaaggcagatgctgctgagttctggaggaagttcttcggggacaagaccatcgtgccctggaaggtgttccggcagtgcctgcacgaggtgcaccagatcagcagcggcctggaggccatggccctgaagagcaccatcgacctgacctgcaatgactacatctctgtgtttgaatttgacatcttcaccaggctcttccagccctggggcagcatcctgaggaactggaacttcctggccgtgacccaccctggctacatggccttcctgacctatgatgaggtgaaggcccggctgcagaagtacagcaccaagccaggcagctacatcttccggctgagctgcacccggctgggccagtgggccatcggctacgtgactggagatggcaacatcctgcagaccatcccccacaacaagcccctcttccaggccctgattgatggcagccgggagggcttctacctgtacccagatggccgcagctacaacccagacctgaccggcctgtgtgagcccacccctcatgaccacatcaaggtgacccaggagcagtatgagctgtactgtgagatgggcagcaccttccagctgtgcaagatctgtgccgagaatgacaaggatgtgaagattgagccctgtggccacctgatgtgcaccagctgcctgacagcctggcaggagagtgatggccagggctgccccttctgccgctgtgagatcaagggcacagagcccatcatcgtggacccctttgaccccagagatgagggcagccgctgctgcagcatcatcgaccccttcggcatgcccatgctggacctggatgatgatgatgaccgggaggagagcctgatgatgaaccggctggccaacgtgaggaaatgtacagaccggcagaacagccctgtgaccagccctggcagcagccccctggcccagaggaggaagccccagcctgaccccctgcagatcccccacctgagcctgccccctgtgcccccccggctggacctgatccagaagggcatcgtgcgcagcccctgtggcagccccaccggcagccccaagagcagcccctgcatggtgaggaagcaggacaagcccctgcctgcccctcctccacccctgcgggaccccccacctcctcctcctgagcggcccccacccatccccccagacaaccggctgagccgccacatccaccacgtggagagcgtgcccagccgggacccccccatgcccctggaggcctggtgccccagagatgtgtttggcaccaaccagctggtgggctgccgcctgctgggggagggcagccccaagccaggcatcacagccagcagcaatgtgaatggccgccacagccgggtgggcagtgaccctgtgctgatgaggaagcacagaagacatgacctgcccctggagggcgccaaggtgttcagcaatggccacctgggcagcgaggagtatgatgtgcccccccggctgagccccccacctcctgtgaccaccctgctgcccagcatcaagtgcaccggccccctggccaacagcctgtctgagaagacccgggaccctgtggaggaggatgatgatgagtacaagatccccagcagccaccctgtgtccctgaacagccagcccagccactgccacaacgtgaagccccctgtgcgcagctgtgacaatggccactgcatgctgaatggcacccacggccccagcagcgagaagaagagcaacatcccagacctgagcatctacctgaagggagaagatgcctttgatgccctgccccccagcctgcccccacctcctcctccagcccggcacagcctgattgagcacagcaagcccccaggcagcagcagccggcccagcagcggccaggacctcttcctgctgcccagcgacccctttgtggacctggccagcggccaggtgcccctgcccccagcccggcggctgcccggggagaatgtgaagaccaacagaaccagccaggactatgaccagctgcccagctgcagtgatggcagccaggccccagcccggccccccaagccccggcccaggagaacagcccctgagatccaccacaggaagccccacggccctgaggccgccctggagaatgtggatgccaagatcgccaagctgatgggagagggctacgcctttgaggaggtgaagagggccctggagatcgcccagaacaacgtggaggtggcccggagcatcctgcgggagtttgccttccccccacctgtgagcccccggctgaacctgtag

SEQ ID NO: 146333 - DNA, 2313 bp, synthetic construct
  misc_feature 1..2313: note = Description of Artificial Sequence: Synthetic coding sequence
  source 1..2313: mol_type = other DNA
atggccaacagcatgaatggaagaaatcctgggggccggggcggcaaccccaggaagggccgcatcctgggcatcattgatgccatccaggatgctgtgggcccccccaagcaggccgctgctgacagaagaacagtggagaagacctggaagctgatggacaaggtggtgcggctgtgccagaaccccaagctgcagctgaagaacagccccccctacatcctggacatcctgcctgacacctaccagcacctgcggctcatcctgagcaaatatgatgacaaccagaagctggcccagctgtctgaaaatgagtacttcaagatctacatcgacagcctgatgaagaagagcaagagggccatccgcctcttcaaggagggcaaggagaggatgtatgaggagcagagccaggacagaagaaacctgaccaagctgagcctcatcttcagccacatgctggccgagatcaaggccatcttccccaacggccagttccagggcgacaacttccgcatcaccaaggcagatgctgctgagttctggaggaagttcttcggggacaagaccatcgtgccctggaaggtgttccggcagtgcctgcacgaggtgcaccagatcagcagcggcctggaggccatggccctgaagagcaccatcgacctgacctgcaatgactacatctctgtgtttgaatttgacatcttcaccaggctcttccagccctggggcagcatcctgaggaactggaacttcctggccgtgacccaccctggctacatggccttcctgacctatgatgaggtgaaggcccggctgcagaagtacagcaccaagccaggcagctacatcttccggctgagctgcacccggctgggccagtgggccatcggctacgtgactggagatggcaacatcctgcagaccatcccccacaacaagcccctcttccaggccctgattgatggcagccgggagggcttctacctgtacccagatggccgcagctacaacccagacctgaccggcctgtgtgagcccacccctcatgaccacatcaaggtgacccaggagcagtatgagctgtactgtgagatgggcagcaccttccagctgtgcaagatctgtgccgagaatgacaaggatgtgaagattgagccctgtggccacctgatgtgcaccagctgcctgacagcctggcaggagagtgatggccagggctgccccttctgccgctgtgagatcaagggcacagagcccatcatcgtggacccctttgaccccagagatgagggcagccgctgctgcagcatcatcgaccccttcggcatgcccatgctggacctggatgatgatgatgaccgggaggagagcctgatgatgaaccggctggccaacgtgaggaaatgtacagaccggcagaacagccctgtgaccagccctggcagcagccccctggcccagaggaggaagccccagcctgaccccctgcagatcccccacctgagcctgccccctgtgcccccccggctggacctgatccagaagggcatcgtgcgcagcccctgtggcagccccaccggcagccccaagagcagcccctgcatggtgaggaagcaggacaagcccctgcctgcccctcctccacccctgcgggaccccccacctcctcctcctgagcggcccccacccatccccccagacaaccggctgagccgccacatccaccacgtggagagcgtgcccagccgggacccccccatgcccctggaggcctggtgccccagagatgtgtttggcaccaaccagctggtgggctgccgcctgctgggggagggcagccccaagccaggcatcacagccagcagcaatgtgaatggccgccacagccgggtgggcagtgaccctgtgctgatgaggaagcacagaagacatgacctgcccctggagggcgccaaggtgttcagcaatggccacctgggcagcgaggagtatgatgtgcccccccggctgagccccccacctcctgtgaccaccctgctgcccagcatcaagtgcaccggccccctggccaacagcctgtctgagaagacccgggaccctgtggaggaggatgatgatgagtacaagatccccagcagccaccctgtgtccctgaacagccagcccagccactgccacaacgtgaagccccctgtgcgcagctgtgacaatggccactgcatgctgaatggcacccacggccccagcagcgagaagaagagcaacatcccagacctgagcatctacctgaagggcacctaccgcatctag

SEQ ID NO: 146334 - DNA, 2433 bp, synthetic construct
  misc_feature 1..2433: note = Description of Artificial Sequence: Synthetic coding sequence
  source 1..2433: mol_type = other DNA
atggccaacagcatgaatggaagaaatcctgggggccggggcggcaaccccaggaagggccgcatcctgggcatcattgatgccatccaggatgctgtgggcccccccaagcaggccgctgctgacagaagaacagtggagaagacctggaagctgatggacaaggtggtgcggctgtgccagaaccccaagctgcagctgaagaacagccccccctacatcctggacatcctgcctgacacctaccagcacctgcggctcatcctgagcaaatatgatgacaaccagaagctggcccagctgtctgaaaatgagtacttcaagatctacatcgacagcctgatgaagaagagcaagagggccatccgcctcttcaaggagggcaaggagaggatgtatgaggagcagagccaggacagaagaaacctgaccaagctgagcctcatcttcagccacatgctggccgagatcaaggccatcttccccaacggccagttccagggcgacaacttccgcatcaccaaggcagatgctgctgagttctggaggaagttcttcggggacaagaccatcgtgccctggaaggtgttccggcagtgcctgcacgaggtgcaccagatcagcagcggcctggaggccatggccctgaagagcaccatcgacctgacctgcaatgactacatctctgtgtttgaatttgacatcttcaccaggctcttccagccctggggcagcatcctgaggaactggaacttcctggccgtgacccaccctggctacatggccttcctgacctatgatgaggtgaaggcccggctgcagaagtacagcaccaagccaggcagctacatcttccggctgagctgcacccggctgggccagtgggccatcggctacgtgactggagatggcaacatcctgcagaccatcccccacaacaagcccctcttccaggccctgattgatggcagccgggagggcttctacctgtacccagatggccgcagctacaacccagacctgaccggcctgtgtgagcccacccctcatgaccacatcaaggtgacccaggagcagtatgagctgtactgtgagatgggcagcaccttccagctgtgcaagatctgtgccgagaatgacaaggatgtgaagattgagccctgtggccacctgatgtgcaccagctgcctgacagcctggcaggagagtgatggccagggctgccccttctgccgctgtgagatcaagggcacagagcccatcatcgtggacccctttgaccccagagatgagggcagccgctgctgcagcatcatcgaccccttcggcatgcccatgctggacctggatgatgatgatgaccgggaggagagcctgatgatgaaccggctggccaacgtgaggaaatgtacagaccggcagaacagccctgtgaccagccctggcagcagccccctggcccagaggaggaagccccagcctgaccccctgcagatcccccacctgagcctgccccctgtgcccccccggctggacctgatccagaagggcatcgtgcgcagcccctgtggcagccccaccggcagccccaagagcagcccctgcatggtgaggaagcaggacaagcccctgcctgcccctcctccacccctgcgggaccccccacctcctcctcctgagcggcccccacccatccccccagacaaccggctgagccgccacatccaccacgtggagagcgtgcccagccgggacccccccatgcccctggaggcctggtgccccagagatgtgtttggcaccaaccagctggtgggctgccgcctgctgggggagggcagccccaagccaggcatcacagccagcagcaatgtgaatggccgccacagccgggtgggcagtgaccctgtgctgatgaggaagcacagaagacatgacctgcccctggagggcgccaaggtgttcagcaatggccacctgggcagcgaggagtatgatgtgcccccccggctgagccccccacctcctgtgaccaccctgctgcccagcatcaagtgcaccggccccctggccaacagcctgtctgagaagacccgggaccctgtggaggaggatgatgatgagtacaagatccccagcagccaccctgtgtccctgaacagccagcccagccactgccacaacgtgaagccccctgtgcgcagctgtgacaatggccactgcatgctgaatggcacccacggccccagcagcgagaagaagagcaacatcccagacctgagcatctacctgaagggagatgtgtttgattctgccagtgaccctgtgcccctgcccccagcccggccccccacccgggacaaccccaagcacggcagcagcctgaacagaacacccagcgactatgacctgctgatcccccccctgggctag

SEQ ID NO: 146335 - DNA, 420 bp, synthetic construct
  misc_feature 1..420: note = Description of Artificial Sequence: Synthetic coding sequence
  source 1..420: mol_type = other DNA
atggccaacagcatgaatggaagaaatcctgggggccggggcggcaaccccaggaagggccgcatcctgggcatcattgatgccatccaggatgctgtgggcccccccaagcaggccgctgctgacagaagaacagtggagaagacctggaagctgatggacaaggtggtgcggctgtgccagaaccccaagctgcagctgaagaacagccccccctacatcctggacatcctgcctgacacctaccagcacctgcggctcatcctgagcaaatatgatgacaaccagaagctggcccagctgtctgaaaatgagtacttcaagatctacatcgacagcctgatgaagaagagcaagagggccatccgcctcttcaaggagggcaaggagaggatgtatgaggagcagagccaggactag

SEQ ID NO: 146336 - DNA, 684 bp, synthetic construct
  misc_feature 1..684: note = Description of Artificial Sequence: Synthetic coding sequence
  source 1..684: mol_type = other DNA
atggccctggcccctggcccagatgcccacgcccacctgccccccctgattgagctgaagttccagatggccaacagcatgaatggaagaaatcctgggggccggggcggcaaccccaggaagggccgcatcctgggcatcattgatgccatccaggatgctgtgggcccccccaagcaggccgctgctgacagaagaacagtggagaagacctggaagctgatggacaaggtggtgcggctgtgccagaaccccaagctgcagctgaagaacagccccccctacatcctggacatcctgcctgacacctaccagcacctgcggctcatcctgagcaaatatgatgacaaccagaagctggcccagctgtctgaaaatgagtacttcaagatctacatcgacagcctgatgaagaagagcaagagggccatccgcctcttcaaggagggcaaggagaggatgtatgaggagcagagccaggacaggaccatcgtgccctggaaggtgttccggcagtgcctgcacgaggtgcaccagatcagcagcggcctggaggccatggccctgaagagcaccatcgacctgacctgcaatgactacatctctgtgtttgaatttgacatcttcaccaggctcttccaggtgtctgacaacttcacagagtacctgatctacctgacctag

SEQ ID NO: 146337 - DNA, 1425 bp, synthetic construct
  misc_feature 1..1425: note = Description of Artificial Sequence: Synthetic coding sequence
  source 1..1425: mol_type = other DNA
atggccctggccgtggccccctggggccggcagtgggaggaggcccgggccctgggccgggctgtgaggatgctgcagaggctggaggagcagtgtgtggacccccggctgtctgtgtccccacccagcctgcgggacctgctgcccaggacagcccagctgctgcgggaggtggcccacagccggcgggctgctgggggcggcggccctgggggccctgggggcagcggggacttcctgctgatctacctggccaacctggaggccaagagccggcaggtggccgccctgctgcccccccggggcagaagaagtgccaatgatgagctgttccgggccggcagccggctgcggcggcagctggccaagctggccatcatcttcagccacatgcatgctgagctgcacgccctcttccctgggggcaagtactgcggccacatgtaccagctgaccaaggccccagcccacaccttctggagggagagctgtggggcccgctgtgtgctgccctgggccgagtttgagagcctgctgggcacctgccaccctgtggagcccggctgcacagccctggccctgcggaccaccatcgacctgacctgcagcggccacgtgtccatctttgaatttgatgtgttcaccaggctcttccagccctggcccaccctgctgaagaactggcagctgctggccgtgaaccaccctggctacatggccttcctgacctatgatgaggtgcaggagcggctgcaggcctgccgggacaagccaggcagctacatcttccggcccagctgcacccggctgggccagtgggccatcggctacgtgtccagtgatggcagcatcctgcagaccatcccagccaacaagcccctgagccaggtgctgctggagggccagaaggatggcttctacctgtacccagatggcaagacccacaacccagacctgacagagctgggccaggccgagccccagcagaggatccacgtgtctgaggagcagctgcagctgtactgggccatggacagcacctttgagctgtgcaagatctgtgccgagagcaacaaggatgtgaagattgagccctgtggccacctgctgtgcagctgctgcctggccgcctggcagcacagcgacagccagacctgccccttctgccgctgtgagatcaagggctgggaggccgtgtccatctaccagttccacggccaggccacagcagaagattctggcaacagcagtgaccaggagggccgggagctggagctgggccaggtgcccctgagcgccccacccctgccccccaggccagacctgccccccaggaagcccagaaatgcccagcccaaggtgcggctgctgaagggcaacagccccccagctgccctgggcccccaggaccctgccccagcctag

SEQ ID NO: 146338 - DNA, 1287 bp, synthetic construct
  misc_feature 1..1287: note = Description of Artificial Sequence: Synthetic coding sequence
  source 1..1287: mol_type = other DNA
atggccctggccgtggccccctggggccggcagtgggaggaggcccgggccctgggccgggctgtgaggatgctgcagaggctggaggagcagtgtgtggacccccggctgtctgtgtccccacccagcctgcgggacctgctgcccaggacagcccagctgctgcgggaggtggcccacagccggcgggctgctgggggcggcggccctgggggccctgggggcagcggggacttcctgctgatctacctggccaacctggaggccaagagccggcaggtggccgccctgctgcccccccggggcagaagaagtgccaatgatgagctgttccgggccggcagccggctgcggcggcagctggccaagctggccatcatcttcagccacatgcatgctgagctgcacgccctcttccctgggggcaagtactgcggccacatgtaccagctgaccaaggccccagcccacaccttctggagggagagctgtggggcccgctgtgtgctgccctgggccgagtttgagagcctgctgggcacctgccaccctgtggagcccggctgcacagccctggccctgcggaccaccatcgacctgacctgcagcggccacgtgtccatctttgaatttgatgtgttcaccaggctcttccagccctggcccaccctgctgaagaactggcagctgctggccgtgaaccaccctggctacatggccttcctgacctatgatgaggtgcaggagcggctgcaggcctgccgggacaagccaggcagctacctgtacccagatggcaagacccacaacccagacctgacagagctgggccaggccgagccccagcagaggatccacgtgtctgaggagcagctgcagctgtactgggccatggacagcacctttgagctgtgcaagatctgtgccgagagcaacaaggatgtgaagattgagccctgtggccacctgctgtgcagctgctgcctggccgcctggcagcacagcgacagccagacctgccccttctgccgctgtgagatcaagggctgggaggccgtgtccatctaccagttccacggccaggccacagcagaagattctggcaacagcagtgaccaggagggccgggagctggagctgggccaggtgcccctgagcgccccacccctgccccccaggccagacctgccccccaggaagcccagaaatgcccagcccaaggtgcggctgctgaagggcaacagccccccagctgccctgggcccccaggaccctgccccagcctag

SEQ ID NO: 146339 - DNA, 2355 bp, synthetic construct
  misc_feature 1..2355: note = Description of Artificial Sequence: Synthetic coding sequence
  source 1..2355: mol_type = other DNA
atgtctgaccagaagaaggaggaggaggaggaggccgctgctgctgctgccatggccacagagggcggcaagaccagcgagcctgagaacaacaacaagaagcccaagaccagcggcagccaggacagccagcccagccccctggccctgctggccgccacctgcagcaagattggcaccccaggagagaaccaggccaccggccagcagcagatcatcatcgaccccagccagggcctggtgcagctgcagaaccagccccagcagctggagctggtgaccacccagctggccggaaatgcctggcagctggtggccagcaccccaccagccagcaaggagaacaacgtgtcccagcctgccagcagcagcagcagcagcagcagcagcaacaacggcagcgccagccccaccaagaccaagagcggcaacagcagcaccccaggccagttccaggtgatccaggtgcagaaccccagcggctctgtgcagtaccaggtgatcccccagctgcagacagtggagggccagcagatccagatcaaccccaccagcagcagcagcctgcaggacctgcagggccagatccagctgatctctgctggcaacaaccaggccatcctgacagctgccaacagaacagccagcggcaacatcctggcccagaacctggccaaccagacagtgcctgtgcagatccggcctggggtgtccatccccctgcagctgcagaccctgcccggcacccaggcccaggtggtgaccaccctgcccatcaacattggaggagtgaccctggccctgcctgtgatcaacaacgtggccgccggcggcggcaccggccaggtgggccagcctgctgccacagctgacagcggcaccagcaatggaaaccagctggtgtccacccccaccaacaccaccaccagcgccagcaccatgcctgagagccccagcagcagcaccacctgcaccaccacagccagcaccagcctgaccagcagtgacaccctggtgtcctctgctgacaccggccagtatgccagcaccagcgccagcagcagcgagaggaccatcgaggagagccagaccccagctgccacagagagcgaggcccagagcagcagccagctgcagcccaacggcatgcagaatgcccaggaccagagcaacagcctgcagcaggtgcagatcgtgggccagcccatcctgcagcagatccagatccagcagccccagcagcagatcatccaggccatccccccccagagcttccagctgcagagcggccagaccatccagaccatccagcagcagcccctgcagaatgtgcagctgcaggccgtgaaccccacccaggtgctgatccgggcccccaccctgacccccagcggccagatctcctggcagacagtgcaggtgcagaacatccagagcctgagcaacctgcaggtgcagaatgccggcctgagccagcagctgaccatcacccctgtgagcagcagcggcggcaccaccctggcccagatcgcccctgtggccgtggccggggcccccatcaccctgaacacagcccagctggcctctgtgcccaacctgcagacagtgtctgtggccaacctgggcgccgccggcgtgcaggtgcagggcgtgcctgtgaccatcacctctgtggccggccagcagcagggccaggatggagtgaaggtgcagcaggccaccatcgcccctgtgacagtggccgtgggcggcatcgccaatgccaccatcggggctgtgtccccagaccagctgacccaggtgcacctgcagcagggccagcagaccagtgaccaggaggtgcagcccgggaagaggctgcggcgggtggcctgcagctgccccaactgccgggagggggagggccggggcagcaatgaacctgggaagaagaagcagcacatctgccacatcgagggctgtgggaaggtgtatggcaagaccagccacctgcgggcccacctgcgctggcacactggagagcggcccttcatctgcaactggatgttctgtgggaagcgcttcaccaggagtgatgagctgcagaggcacaggaggacccacactggagagaagagatttgagtgcccagaatgttccaagcgcttcatgagaagtgaccacctgagcaagcacgtgaagacccaccagaacaagaagggcggcggcacagccctggccatcgtgaccagcggggagctggacagctctgtgacagaggtgctgggcagcccccgcatcgtgacagtggccgccatcagccaggacagcaacccagccacccccaacgtgtccaccaacatggaggagttctag

SEQ ID NO: 146340 - DNA, 1476 bp, synthetic construct
  misc_feature 1..1476: note = Description of Artificial Sequence: Synthetic coding sequence
  source 1..1476: mol_type = other DNA
atggaccacacagacaatgagctgcagggcaccaacagcagcggcagcctgggcggcctggatgtgagaagacgcatccccatcaagctgatcagcaagcaggccaacaaggccaagccagcccccaggacccagaggaccatcaacaggatgcctgccaaggcccctcctggagatgaggagggctttgactacaatgaggaggagagatatgactgcaagggcggggagctgtttgccaaccagaggcgcttccctggccacctgttctgggacttccagatcaacatcctgggggagaaggatgacacccctgtgcacttctgtgacaagtgtggcctgcccatcaagatctacggccgcatgatcccctgcaagcacgtgttctgctatgactgtgccatcctgcacgagaagaagggggacaagatgtgccccggctgcagcgaccctgtgcagagaattgagcagtgcacccggggcagcctcttcatgtgcagcatcgtgcagggctgcaagaggacctacctgagccagagggacctgcaggcccacatcaaccaccgccacatgagagctgggaagcctgtgacccgggccagcctggagaatgtgcacccccccatcgcccccccacccacagagatccctgagcgcttcatcatgcccccagacaagcaccacatgagccacatcccccccaagcagcacatcatgatgcctcctccacccctgcagcacgtgccccatgagcactacaaccagccccatgaggacatccgggcccctcctgctgagctgtccatggcccctcctccacccaggtctgtgtcccaggagaccttccgcatcagcaccaggaagcacagcaacctgatcaccgtgcccatccaggatgacagcaacagcggggcccgggagcccccacctccagccccagccccagcccaccaccaccctgagtaccagggccagcctgtggtgagccacccccaccacatcatgccaccccagcagcactacgcccctcctcctcctcctcctccacccatcagccaccccatgccccaccccccccaggccgccggcaccccccacctggtgtacagccaggcccctcctccacccatgaccagcgcccccccacccatcaccccacctcctggccacatcatcgcccagatgccaccctacatgaaccaccccccacctggccccccaccaccccagcacggcggcccccctgtgacagcccccccaccccaccactacaaccccaacagcctgccccagttcacagaggaccagggcaccctgagcccccccttcacccagcccggcggcatgagccctggcatctggccagccccccggggccccccacctccaccccggctgcagggcccccccagccagacccccctgcccggcccccaccacccagaccagacccgctaccggccctactaccagtag

SEQ ID NO: 146341 - DNA, 1113 bp, synthetic construct
  misc_feature 1..1113: note = Description of Artificial Sequence: Synthetic coding sequence
  source 1..1113: mol_type = other DNA
atgatcccctgcaagcacgtgttctgctatgactgtgccatcctgcacgagaagaagggggacaagatgtgccccggctgcagcgaccctgtgcagagaattgagcagtgcacccggggcagcctcttcatgtgcagcatcgtgcagggctgcaagaggacctacctgagccagagggacctgcaggcccacatcaaccaccgccacatgagagctgggaagcctgtgacccgggccagcctggagaatgtgcacccccccatcgcccccccacccacagagatccctgagcgcttcatcatgcccccagacaagcaccacatgagccacatcccccccaagcagcacatcatgatgcctcctccacccctgcagcacgtgccccatgagcactacaaccagccccatgaggacatccgggcccccccagctgagctgtccatggcccctcctccacccaggtctgtgtcccaggagaccttccgcatcagcaccaggaagcacagcaacctgatcaccgtgcccatccaggatgacagcaacagcggggcccgggagcccccacctccagccccagccccagcccaccaccaccctgagtaccagggccagcctgtggtgagccacccccaccacatcatgccaccccagcagcactacgcccctcctcctcctcctcctccacccatcagccaccccatgccccaccccccccaggccgccggcaccccccacctggtgtacagccaggcccctcctccacccatgaccagcgcccccccacccatcaccccacctcctggccacatcatcgcccagatgccaccctacatgaaccaccccccacctggccccccaccaccccagcacggcggcccccctgtgacagcccccccaccccaccactacaaccccaacagcctgccccagttcacagaggaccagggcaccctgagcccccccttcacccagcccggcggcatgagccctggcatctggccagccccccggggccccccacctccaccccggctgcagggcccccccagccagacccccctgcccggcccccaccacccagaccagacccgctaccggccctactaccagtag

SEQ ID NO: 146342 - DNA, 681 bp, synthetic construct
  misc_feature 1..681: note = Description of Artificial Sequence: Synthetic coding sequence
  source 1..681: mol_type = other DNA
atgaaggtgctgatcctggcctgcctggtggccctggccctggcccgggagaccatcgagagcctgagcagcagcgaggagagcatcacagagtacaagcagaaggtggagaaggtgaagcatgaggaccagcagcagggagaagatgagcaccaggacaagatctaccccagcttccagccccagcccctcatctacccctttgtggagcccatcccctacggcttcctgccccagaacatcctgcccctggcccagcctgctgtggtgctgcctgtgccccagcctgagatcatggaggtgcccaaggccaaggacacagtgtacaccaagggccgggtgatgcctgtgctgaagagccccaccatccccttctttgacccccagatccccaagctgacagacctggagaacctgcacctgcccctgcccctgctgcagcccctgatgcagcaggtgccccagcccatcccccagaccctggccctgcccccccagcccctgtggagcgtgccccagcccaaggtgctgcccatcccccagcaggtggtgccctacccccagagagctgtgcctgtgcaggccctgctgctgaaccaggagctgctgctgaaccccacccaccagatctaccctgtgacccagcccctggcccctgtgcacaaccccatctctgtgtag

SEQ ID NO: 146343 - DNA, 549 bp, synthetic construct
  misc_feature 1..549: note = Description of Artificial Sequence: Synthetic coding sequence
  source 1..549: mol_type = other DNA
atgaagagcttcctgctggtggtgaatgccctggccctgaccctgcccttcctggccgtggaggtgcagaaccagaagcagcctgcctgccatgaaaatgatgagcggcccttctaccagaagacagccccctacgtgcccatgtactacgtgcccaacagctacccctactacggcaccaacctgtaccagaggaggcctgccatcgccatcaacaacccctacgtgcccaggacctactatgccaacccagctgtggtgcggccccacgcccagatcccccagaggcagtacctgcccaacagccacccccccaccgtggtgagaagacccaacctgcaccccagcttcatcgccatcccccccaagaagatccaggacaagatcatcatccccaccatcaacaccatcgccaccgtggagcccaccccagccccagccacagagcccaccgtggacagcgtggtgaccccagaggccttcagcgagagcatcatcaccagcaccccagagaccaccaccgtggccgtgaccccacccacagcctag

SEQ ID NO: 146344 - DNA, 978 bp, synthetic construct
  misc_feature 1..978: note = Description of Artificial Sequence: Synthetic coding sequence
  source 1..978: mol_type = other DNA
atggccagcagcagcggcagcaaggccgagttcatcgtgggcggcaagtacaagctggtgaggaagattggcagcggcagctttggagacatctacctggccatcaacatcaccaatggagaggaggtggccgtgaagctggagagccagaaggcccggcacccccagctgctgtatgagagcaagctgtacaagatcctgcagggcggcgtgggcatcccccacatccgctggtacggccaggagaaggactacaacgtgctggtgatggacctgctgggccccagcctggaggacctcttcaacttctgcagccgccgcttcaccatgaagacagtgctgatgctggccgaccagatgatcagccgcatcgagtatgtgcacaccaagaacttcatccaccgggacatcaagccagacaacttcctgatgggcatcggccgccactgcaacaagctgttcctgattgactttggcctggccaagaagtacagagacaacagaacccggcagcacatcccctaccgggaggacaagaacctgaccggcacagcccgctatgccagcatcaatgcccacctgggcatcgagcagagcagaagagatgacatggagagcctgggctacgtgctgatgtacttcaacagaaccagcctgccctggcagggcctgaaggccgccaccaagaagcagaagtatgagaagatcagcgagaagaagatgagcacccctgtggaggtgctgtgcaagggcttccctgctgagtttgccatgtacctgaactactgccggggcctgcgctttgaggaggccccagactacatgtacctgcggcagctgttccgcatcctcttccgcaccctgaaccaccagtatgactacacctttgactggaccatgctgaagcagaaggccgcccagcaggccgccagcagcagcggccagggccagcaggcccagacccccaccggcttctag

SEQ ID NO: 146345 - DNA, 978 bp, synthetic construct; identical to SEQ ID NO: 146344
  misc_feature 1..978: note = Description of Artificial Sequence: Synthetic coding sequence
  source 1..978: mol_type = other DNA

SEQ ID NO: 146346 - DNA, 1014 bp, synthetic construct
  misc_feature 1..1014: note = Description of Artificial Sequence: Synthetic coding sequence
  source 1..1014: mol_type = other DNA
atggccagcagcagcggcagcaaggccgagttcatcgtgggcggcaagtacaagctggtgaggaagattggcagcggcagctttggagacatctacctggccatcaacatcaccaatggagaggaggtggccgtgaagctggagagccagaaggcccggcacccccagctgctgtatgagagcaagctgtacaagatcctgcagggcggcgtgggcatcccccacatccgctggtacggccaggagaaggactacaacgtgctggtgatggacctgctgggccccagcctggaggacctcttcaacttctgcagccgccgcttcaccatgaagacagtgctgatgctggccgaccagatgatcagccgcatcgagtatgtgcacaccaagaacttcatccaccgggacatcaagccagacaacttcctgatgggcatcggccgccactgcaacaagctgttcctgattgactttggcctggccaagaagtacagagacaacagaacccggcagcacatcccctaccgggaggacaagaacctgaccggcacagcccgctatgccagcatcaatgcccacctgggcatcgagcagagcagaagagatgacatggagagcctgggctacgtgctgatgtacttcaacagaaccagcctgccctggcagggcctgaaggccgccaccaagaagcagaagtatgagaagatcagcgagaagaagatgagcacccctgtggaggtgctgtgcaagggcttccctgctgagtttgccatgtacctgaactactgccggggcctgcgctttgaggaggccccagactacatgtacctgcggcagctgttccgcatcctcttccgcaccctgaaccaccagtatgactacacctttgactggaccatgctgaagcagaaggccgcccagcaggccgccagcagcagcggccagggccagcaggcccagacccccaccgggaagcagacagacaagaccaagagcaacatgaagggcttctag

SEQ ID NO: 146347 - DNA, 1098 bp, synthetic construct
  misc_feature 1..1098: note = Description of Artificial Sequence: Synthetic coding sequence
  source 1..1098: mol_type = other DNA
atggccagcagcagcggcagcaaggccgagttcatcgtgggcggcaagtacaagctggtgaggaagattggcagcggcagctttggagacatctacctggccatcaacatcaccaatggagaggaggtggccgtgaagctggagagccagaaggcccggcacccccagctgctgtatgagagcaagctgtacaagatcctgcagggcggcgtgggcatcccccacatccgctggtacggccaggagaaggactacaacgtgctggtgatggacctgctgggccccagcctggaggacctcttcaacttctgcagccgccgcttcaccatgaagacagtgctgatgctggccgaccagatgatcagccgcatcgagtatgtgcacaccaagaacttcatccaccgggacatcaagccagacaacttcctgatgggcatcggccgccactgcaacaagtgcctggagagccctgtgggcaagaggaagaggtccatgacagtgtccaccagccaggaccccagcttcagcggcctgaaccagctgttcctgattgactttggcctggccaagaagtacagagacaacagaacccggcagcacatcccctaccgggaggacaagaacctgaccggcacagcccgctatgccagcatcaatgcccacctgggcatcgagcagagcagaagagatgacatggagagcctgggctacgtgctgatgtacttcaacagaaccagcctgccctggcagggcctgaaggccgccaccaagaagcagaagtatgagaagatcagcgagaagaagatgagcacccctgtggaggtgctgtgcaagggcttccctgctgagtttgccatgtacctgaactactgccggggcctgcgctttgaggaggccccagactacatgtacctgcggcagctgttccgcatcctcttccgcaccctgaaccaccagtatgactacacctttgactggaccatgctgaagcagaaggccgcccagcaggccgccagcagcagcggccagggccagcaggcccagacccccaccgggaagcagacagacaagaccaagagcaacatgaagggcttctag

SEQ ID NO: 146348 - DNA, 1029 bp, synthetic construct
  misc_feature 1..1029: note = Description of Artificial Sequence: Synthetic coding sequence
  source 1..1029: mol_type = other DNA
tgccgggaggagatcagccgcatcgagtacatccacagcaagaacttcatccacagagatgtgaagccagacaacttcctgatgggcctgggcaagaagggcaacctggtgtacatcatcgactttggcctggccaagaagtacagagatgcccggacccaccagcacatcccctaccgggagaacaagaacctgaccggcacagcccgctatgccagcatcaacacccacctgggcatcgagcagagcagaagagatgacctggagagcctgggctacgtgctgatgtacttcaacctgggcagcctgccctggcagggcctgaaggccgccaccaagaggcagaagtatgagcgcatcagcgagaagaagatgagcacccccatcgaggtgctgtgcaagggctaccccagcgagtttgccacctacctgaacttctgccgcagcctgcgctttgatgacaagccagactacagctacctgcggcagctgttcaggaacctcttccaccggcagggcttctcctatgactatgtgtttgactggaacatgctgaagtttggagccagcagagctgctgatgatgctgagcgggagcggcgggaccgggaggagcggctgcggcacagcagaaatcctgccacccggggcctgcccagcacagccagcggccgcctgcggggcacccaggaggtggccccacccacccccctgacccccaccagccacacagccaacaccagccccaggcctgtgtctggcatggagcgggagaggaaggtgtccatgaggctgcacagaggagcccctgtgaacatcagcagcagtgacctgaccggccggcaggacaccagcaggatgagcaccagccaggtgggcgctgagctgcccggcggccgctgggccagcggctaccctgtgcgggtgaagagcggcctgtggttcctgcagggcttcttcttccccttcttcccccccttcctgcgggtcttcaacctggcccgggtgtggaggctgggctgcaggtag

SEQ ID NO: 146349 - DNA, 1248 bp, synthetic construct
  misc_feature 1..1248: note = Description of Artificial Sequence: Synthetic coding sequence
  source 1..1248: mol_type = other DNA
atggagctgcgggtgggcaaccgctaccgcctgggcaggaagattggcagcggcagctttggagacatctacctgggcacagacattgctgctggggaggaggtggccatcaagctggagtgtgtgaagaccaagcacccccagctgcacatcgagagcaagatctacaagatgatgcagggcggcgtgggcatccccaccatccgctggtgtggggctgagggggactacaacgtgatggtgatggagctgctgggccccagcctggaggacctcttcaacttctgcagcaggaagttcagcctgaagacagtgctgctgctggccgaccagatgatcagccgcatcgagtacatccacagcaagaacttcatccacagagatgtgaagccagacaacttcctgatgggcctgggcaagaagggcaacctggtgtacatcatcgactttggcctggccaagaagtacagagatgcccggacccaccagcacatcccctaccgggagaacaagaacctgaccggcacagcccgctatgccagcatcaacacccacctgggcatcgagcagagcagaagagatgacctggagagcctgggctacgtgctgatgtacttcaacctgggcagcctgccctggcagggcctgaaggccgccaccaagaggcagaagtatgagcgcatcagcgagaagaagatgagcacccccatcgaggtgctgtgcaagggctaccccagcgagtttgccacctacctgaacttctgccgcagcctgcgctttgatgacaagccagactacagctacctgcggcagctgttcaggaacctcttccaccggcagggcttctcctatgactatgtgtttgactggaacatgctgaagtttggagccagcagagctgctgatgatgctgagcgggagcggcgggaccgggaggagcggctgcggcacagcagaaatcctgccacccggggcctgcccagcacagccagcggccgcctgcggggcacccaggaggtggccccacccacccccctgacccccaccagccacacagccaacaccagccccaggcctgtgtctggcatggagcgggagaggaaggtgtccatgaggctgcacagaggagcccctgtgaacatcagcagcagtgacctgaccggccggcaggacaccagcaggatgagcaccagccagatccctggccgggtggccagcagcggcctgcagagcgtggtgcacaggtag

SEQ ID NO: 146350 - DNA, 1230 bp, synthetic construct
  misc_feature 1..1230: note = Description of Artificial Sequence: Synthetic coding sequence
  source 1..1230: mol_type = other DNA
atggagctgcgggtgggcaaccgctaccgcctgggcaggaagattggcagcggcagctttggagacatctacctgggcacagacattgctgctggggaggaggtggccatcaagctggagtgtgtgaagaccaagcacccccagctgcacatcgagagcaagatctacaagatgatgcagggcggcgtgggcatccccaccatccgctggtgtggggctgagggggactacaacgtgatggtgatggagctgctgggccccagcctggaggacctcttcaacttctgcagcaggaagttcagcctgaagacagtgctgctgctggccgaccagatgatcagccgcatcgagtacatccacagcaagaacttcatccacagagatgtgaagccagacaacttcctgatgggcctgggcaagaagggcaacctggtgtacatcatcgactttggcctggccaagaagtacagagatgcccggacccaccagcacatcccctaccgggagaacaagaacctgaccggcacagcccgctatgccagcatcaacacccacctgggcatcgagcagagcagaagagatgacctggagagcctgggctacgtgctgatgtacttcaacctgggcagcctgccctggcagggcctgaaggccgccaccaagaggcagaagtatgagcgcatcagcgagaagaagatgagcacccccatcgaggtgctgtgcaagggctaccccagcgagtttgccacctacctgaacttctgccgcagcctgcgctttgatgacaagccagactacagctacctgcggcagctgttcaggaacctcttccaccggcagggcttctcctatgactatgtgtttgactggaacatgctgaagtttggagccagcagagctgctgatgatgctgagcgggagcggcgggaccgggaggagcggctgcggcacagcagaaatcctgccacccggggcctgcccagcacagccagcggccgcctgcggggcacccaggaggtggccccacccacccccctgacccccaccagccacacagccaacaccagccccaggcctgtgtctggcatggagcgggagaggaaggtgtccatgaggctgcacagaggagcccctgtgaacatcagcagcagtgacctgaccggccggcaggacaccagcaggatgagcaccagccagaacagcatcccctttgagcaccacggcaagtag

SEQ ID NO: 146351 - DNA, 1077 bp, synthetic construct
  misc_feature 1..1077: note = Description of Artificial Sequence: Synthetic coding sequence
  source 1..1077: mol_type = other DNA
atgatgcagggcggcgtgggcatccccaccatccgctggtgtggggctgagggggactacaacgtgatggtgatggagctgctgggccccagcctggaggacctcttcaacttctgcagcaggaagttcagcctgaagacagtgctgctgctggccgaccagatgatcagcagaattgagtacatccacagcaagaacttcatccacagagatgtgaagccagacaacttcctgatgggcctgggcaagaagggcaacctggtgtacatcatcgactttggcctggccaagaagtacagagatgcccggacccaccagcacatcccctaccgggagaacaagaacctgactggaacagcccgctatgccagcatcaacacccacctgggcatcgagcagagcagaagagatgacctggagagcctgggctacgtgctgatgtacttcaacctgggcagcctgccctggcagggcctgaaggccgccaccaagaggcagaagtatgaaagaatcagcgagaagaagatgagcacccccatcgaggtgctgtgcaagggctaccccagcgagtttgccacctacctgaacttctgccgcagcctgcgctttgatgacaagccagactacagctacctgcggcagctgttcaggaacctcttccaccggcagggcttctcctatgactatgtgtttgactggaacatgctgaagtttggagccagcagagctgctgatgatgctgagcgggagcggcgggaccgggaggagcggctgcggcacagcaggaacccagccacccggggcctgcccagcacagccagcggccgcctgcggggcacccaggaggtggccccacccacccccctgacccccaccagccacacagccaacaccagccccaggcctgtgtctggcatggagcgggagaggaaggtgtccatgaggctgcacagaggagcccctgtgaacatcagcagcagtgacctgaccggccggcaggacaccagcaggatgagcaccagccagatccctggccgggtggccagcagcggcctgcagagcgtggtgcacaggtag

SEQ ID NO: 146352 - DNA, 381 bp, synthetic construct
  misc_feature 1..381: note = Description of Artificial Sequence: Synthetic coding sequence
  source 1..381: mol_type = other DNA
atggagctgcgggtgggcaaccgctaccgcctgggcaggaagattggcagcggcagctttggagacatctacctgggcacagacattgctgctggggaggaggtggccatcaagctggagtgtgtgaagaccaagcacccccagctgcacatcgagagcaagatctacaagatgatgcagggcggcgtgggcatccccaccatccgctggtgtggggctgagggggactacaacgtgatggtgatggagctgctgggccccagcctggaggacctcttcaacttctgcagcaggaagttcagcctgaagacagtgctgctgctggccgaccagatgaacaaccctgaggagatgacctggagcctgtgggccacctgctag

SEQ ID NO: 146353 - DNA, 1251 bp, synthetic construct
  misc_feature 1..1251: note = Description of Artificial Sequence: Synthetic coding sequence
  source 1..1251: mol_type = other DNA
atggagctgcgggtgggcaacaagtaccgcctgggcaggaagattggcagcggcagctttggagacatctacctgggcgccaacatcgccagcggggaggaggtggccatcaagctggagtgtgtgaagaccaagcacccccagctgcacatcgagagcaagttctacaagatgatgcagggcggcgtgggcatccccagcatcaagtggtgtggggctgagggggactacaacgtgatggtgatggagctgctgggccccagcctggaggacctcttcaacttctgcagcaggaagttcagcctgaagacagtgctgctgctggccgaccagatgatcagccgcatcgagtacatccacagcaagaacttcatccacagagatgtgaagccagacaacttcctgatgggcctgggcaagaagggcaacctggtgtacatcatcgactttggcctggccaagaagtacagagatgcccggacccaccagcacatcccctaccgggagaacaagaacctgaccggcacagcccgctatgccagcatcaacacccacctgggcatcgagcagagcagaagagatgacctggagagcctgggctacgtgctgatgtacttcaacctgggcagcctgccctggcagggcctgaaggccgccaccaagaggcagaagtatgagcgcatcagcgagaagaagatgagcacccccatcgaggtgctgtgcaagggctaccccagcgagttcagcacctacctgaacttctgccgcagcctgcgctttgatgacaagccagactacagctacctgcggcagctgttcaggaacctcttccaccggcagggcttctcctatgactatgtgtttgactggaacatgctgaagtttggagctgccagaaatccagaagatgtggaccgggagcggcgggagcacgagcgggaggagaggatgggccagctgcggggcagcgccacccgggccctgcccccaggcccccccaccggggccacagccaaccggctgcggtctgctgctgagcctgtggccagcaccccagccagccgcatccagcctgctggcaacaccagcccccgggccatcagccgggtggaccgggagaggaaggtgtccatgaggctgcacagaggagccccagccaacgtgagcagcagtgacctgaccggccggcaggaggtgagccgcatcccagccagccagacctctgtgccctttgaccacctgggcaagtag

SEQ ID NO: 146354 - DNA, 360 bp, synthetic construct
  misc_feature 1..360: note = Description of Artificial Sequence: Synthetic coding sequence
  source 1..360: mol_type = other DNA
tgaagaaatccagaagatgtggaccgggagcggcgggagcacgagcgggaggagaggatgggccagctgcggggcagcgccacccgggccctgcccccaggccccccaactggagccacagccaaccggctgcggtctgctgctgagcctgtggccagcaccccagccagccgcatccagcctgctggcaacaccagcccccgggccatcagccgggtggaccgggagaggaaggtgtccatgaggctgcacagaggagccccagccaacgtgagcagcagtgacctgaccggccggcaggaggtgagccgcatcccagccagccagacctctgtgccctttgaccacctgggcaagtag

SEQ ID NO: 146355 - DNA, 1251 bp, synthetic construct; identical to SEQ ID NO: 146353
  misc_feature 1..1251: note = Description of Artificial Sequence: Synthetic coding sequence
  source 1..1251: mol_type = other DNA

SEQ ID NO: 146356 - DNA, 1251 bp, synthetic construct; identical to SEQ ID NO: 146353
  misc_feature 1..1251: note = Description of Artificial Sequence: Synthetic coding sequence
  source 1..1251: mol_type = other DNA

SEQ ID NO: 146357 - DNA, 1251 bp, synthetic construct; identical to SEQ ID NO: 146353
  misc_feature 1..1251: note = Description of Artificial Sequence: Synthetic coding sequence
  source 1..1251: mol_type = other DNA

SEQ ID NO: 146358 - DNA, 1251 bp, synthetic construct; identical to SEQ ID NO: 146353
  misc_feature 1..1251: note = Description of Artificial Sequence: Synthetic coding sequence
  source 1..1251: mol_type = other DNA

SEQ ID NO: 146359 - DNA, 678 bp, synthetic construct
  misc_feature 1..678: note = Description of Artificial Sequence: Synthetic coding sequence
  source 1..678: mol_type = other DNA
atggagctgcgggtgggcaacaagtaccgcctgggcaggaagattggcagcggcagctttggagacatctacctgggcgccaacatcgccagcggggaggaggtggccatcaagctggagtgtgtgaagaccaagcacccccagctgcacatcgagagcaagttctacaagatgatgcagggcggcgtgggcatccccagcatcaagtggtgtggggctgagggggactacaacgtgatggtgatggagctgctgggccccagcctggaggacctcttcaacttctgcagcaggaagttcagcctgaagacagtgctgctgctggccgaccagatgatcagccgcatcgagtacatccacagcaagaacttcatccacagagatgtgaagccagacaacttcctgatgggcctgggcaagaagggcaacctggtgtacatcatcgactttggcctggccaagaagtacagagatgcccggacccaccagcacatcccctaccgggagaacaagaacctgaccggcacagcccgctatgccagcatcaacacccacctgggcatcgagcagagcagaagagatgacctggagagcctgggctacgtgctgatgtacttcaacctgggcagcctgccctggcagggcctgaaggccgccaccaagaggcagaagtactag

SEQ ID NO: 146360 - DNA, 435 bp, synthetic construct
  misc_feature 1..435: note = Description of Artificial Sequence: Synthetic coding sequence
  source 1..435: mol_type = other DNA
tgaagaaacctcttccaccggcagggcttctcctatgactatgtgtttgactggaacatgctgaagtttggagctgccagaaatccagaagatgtggaccgggagcggcgggagcacgagcgggaggagaggatgggccagctgcggggcagcgccacccgggccctgcccccaggcccccccaccggggccacagccaaccggctgcggtctgctgctgagcctgtggccagcaccccagccagccgcatccagcctgctggcaacaccagcccccgggccatcagccgggtggaccgggagaggaaggtgtccatgaggctgcacagaggagccccagccaacgtgagcagcagtgacctgaccggccggcaggaggtgagccgcatcccagccagccagacctctgtgccctttgaccacctgggcaagtag

SEQ ID NO: 146361 - DNA, 1182 bp, synthetic construct
  misc_feature 1..1182: note = Description of Artificial Sequence: Synthetic coding sequence
  source 1..1182: mol_type = other DNA
atggaccaccccagccgggagaaggatgagcggcagaggaccaccaagcccatggcccagaggtctgcccactgcagccggcccagcggcagcagcagcagcagtggagtgctgatggtgggccccaacttccgggtgggcaagaagattggctgcggcaactttggagagctgcggctgggcaagaacctgtacaccaatgaatatgtggccatcaagctggagcccatcaagagccgggccccccagctgcacctggagtaccgcttctacaagcagctgggcagcgctggggagggcctgccccaggtgtactacttcggcccctgtgggaagtacaatgccatggtgctggagctgctgggccccagcctggaggacctgtttgacctgtgtgacaggaccttcaccctgaagacagtgctgatgattgccatccagctgctgagcaggatggagtatgtgcacagcaagaacctgatctacagagatgtgaagccagagaacttcctgattggccggcagggcaacaagaaggagcacgtgatccacatcatcgactttggcctggccaaggagtacattgatcctgagaccaagaagcacatcccctaccgggagcacaagagcctgaccggcacagcccgctacatgagcatcaacacccacctgggcaaggagcagagcagaagagatgacctggaggccctgggccacatgttcatgtacttcctgcggggcagcctgccctggcagggcctgaaggctgacaccctgaaggagcgctaccagaagatcggggacaccaagaggaacacccccatcgaggccctgtgtgagaacttccctgaggagatggccacctacctgcgctacgtgcggcggctggacttctttgagaagccagactatgagtacctgcggaccctcttcacagacctgtttgagaagaagggctacacctttgattatgcctatgactgggtgggccggcccatccccacccctgtgggctctgtgcacgtggacagcggggccagcgccatcacccgggagagccacacccaccgggaccggcccagccagcagcagcccctgaggaaccagagcctgaggacagtgacagctgagcactatgatgtgaacaacagcgccatctggcaccggggccggggcacctag

SEQ ID NO: 146362 - DNA, 1269 bp, synthetic construct
  misc_feature 1..1269: note = Description of Artificial Sequence: Synthetic coding sequence
  source 1..1269: mol_type = other DNA
atggaccaccccagccgggagaaggatgagcggcagaggaccaccaagcccatggcccagaggtctgcccactgcagccggcccagcggcagcagcagcagcagtggagtgctgatggtgggccccaacttccgggtgggcaagaagattggctgcggcaactttggagagctgcggctgggcaagaacctgtacaccaatgaatatgtggccatcaagctggagcccatcaagagccgggccccccagctgcacctggagtaccgcttctacaagcagctgggcagcgctggggagggcctgccccaggtgtactacttcggcccctgtgggaagtacaatgccatggtgctggagctgctgggccccagcctggaggacctgtttgacctgtgtgacaggaccttcaccctgaagacagtgctgatgattgccatccagctgctgagcaggatggagtatgtgcacagcaagaacctgatctacagagatgtgaagccagagaacttcctgattggccggcagggcaacaagaaggagcacgtgatccacatcatcgactttggcctggccaaggagtacattgatcctgagaccaagaagcacatcccctaccgggagcacaagagcctgaccggcacagcccgctacatgagcatcaacacccacctgggcaaggagcagagcagaagagatgacctggaggccctgggccacatgttcatgtacttcctgcggggcagcctgccctggcagggcctgaaggctgacaccctgaaggagcgctaccagaagatcggggacaccaagaggaacacccccatcgaggccctgtgtgagaacttccctgaggagatggccacctacctgcgctacgtgcggcggctggacttctttgagaagccagactatgagtacctgcggaccctcttcacagacctgtttgagaagaagggctacacctttgattatgcctatgactgggtgggccggcccatccccacccctgtgggctctgtgcacgtggacagcggggccagcgccatcacccgggagagccacacccaccgggaccggcccagccagcagcagcccctgaggaaccaggtggtgagcagcaccaatggagagctgaatgtggatgaccccaccggggcccacagcaatgcccccatcacagcccacgccgaggtggaggtggtggaggaggccaagtgctgctgcttcttcaagaggaagaggaagaagacagcccagaggcacaagtag

SEQ ID NO: 146363 - DNA, 1137 bp, synthetic construct
  misc_feature 1..1137: note = Description of Artificial Sequence: Synthetic coding sequence
  source 1..1137: mol_type = other DNA
atggaccaccccagccgggagaaggatgagcggcagaggaccaccaagcccatggcccagaggtctgcccactgcagccggcccagcggcagcagcagcagcagtggagtgctgatggtgggccccaacttccgggtgggcaagaagattggctgcggcaactttggagagctgcggctgggcaagaacctgtacaccaatgaatatgtggccatcaagctggagctgctgggccccagcctggaggacctgtttgacctgtgtgacaggaccttcaccctgaagacagtgctgatgattgccatccagctgctgagcaggatggagtatgtgcacagcaagaacctgatctacagagatgtgaagccagagaacttcctgattggccggcagggcaacaagaaggagcacgtgatccacatcatcgactttggcctggccaaggagtacattgatcctgagaccaagaagcacatcccctaccgggagcacaagagcctgaccggcacagcccgctacatgagcatcaacacccacctgggcaaggagcagagcagaagagatgacctggaggccctgggccacatgttcatgtacttcctgcggggcagcctgccctggcagggcctgaaggctgacaccctgaaggagcgctaccagaagatcggggacaccaagaggaacacccccatcgaggccctgtgtgagaacttccctgaggagatggccacctacctgcgctacgtgcggcggctggacttctttgagaagccagactatgagtacctgcggaccctcttcacagacctgtttgagaagaagggctacacctttgattatgcctatgactgggtgggccggcccatccccacccctgtgggctctgtgcacgtggacagcggggccagcgccatcacccgggagagccacacccaccgggaccggcccagccagcagcagcccctgaggaaccaggtggtgagcagcaccaatggagagctgaatgtggatgaccccaccggggcccacagcaatgcccccatcacagcccacgccgaggtggaggtggtggaggaggccaagtgctgctgcttcttcaagaggaagaggaagaagacagcccagaggcacaagtag

SEQ ID NO: 146364 - DNA, 1248 bp, synthetic construct
  misc_feature 1..1248: note = Description of Artificial Sequence: Synthetic coding sequence
  source 1..1248: mol_type = other DNA
atggactttgacaagaagggcggcaaaggagaaacagaggagggccgcaggatgagcaaggccggcggcggccgcagcagccacggcatccgcagcagcggcaccagcagtggagtgctgatggtgggccccaacttccgggtgggcaagaagattggctgcggcaactttggagagctgcggctgggcaagaacctgtacaccaatgaatatgtggccatcaagctggagcccatcaagagccgggccccccagctgcacctggagtaccgcttctacaagcagctgagcgccacagaaggagtgccccaggtgtactacttcggcccctgtgggaagtacaatgccatggtgctggagctgctgggccccagcctggaggacctgtttgacctgtgtgacaggaccttcaccctgaagacagtgctgatgattgccatccagctgatcaccaggatggagtatgtgcacaccaagagcctcatctacagagatgtgaagccagagaacttcctggtgggccggcccggcaccaagaggcagcacgccatccacatcatcgactttggcctggccaaggagtacatcgaccctgagaccaagaagcacatcccctaccgggagcacaagagcctgactggaacagcccgctacatgagcatcaacacccacctgggcaaggagcagagcagaagagatgacctggaggccctgggccacatgttcatgtacttcctgcggggcagcctgccctggcagggcctgaaggctgacaccctgaaggagcgctaccagaagattggagacaccaagagggccacccccatcgaggtgctgtgtgagaacttccctgaggagatggccacctacctgcgctacgtgcggcggctggacttctttgagaagccagactatgactacctgaggaagctgttcacagacctgtttgacagaagtggctttgtgtttgattatgaatatgactgggccggcaagcccctgcccacccccatcggcaccgtgcacacagacctgcccagccagccccagctgcgggacaagacccagccccacagcaagaaccaggccctgaacagcaccaacggggagctgaatgctgatgaccccacagctggccacagcaatgcccccatcacagccccagctgaggtggaggtggctgatgagaccaagtgctgctgcttcttcaagaggaggaagaggaagagcctgcagaggcacaagtag

SEQ ID NO: 146365 - DNA, 645 bp, synthetic construct
  misc_feature 1..645: note = Description of Artificial Sequence: Synthetic coding sequence
  source 1..645: mol_type = other DNA
atgagcatcaacacccacctgggcaaggagcagagcagaagagatgacctggaggccctgggccacatgttcatgtacttcctgcggggcagcctgccctggcagggcctgaaggctgacaccctgaaggagcgctaccagaagattggagacaccaagagggccacccccatcgaggtgctgtgtgagaacttccctgaggagatggccacctacctgcgctacgtgcggcggctggacttctttgagaagccagactatgactacctgaggaagctgttcacagacctgtttgacagaagtggctttgtgtttgattatgaatatgactgggccggcaagcccctgcccacccccatcggcaccgtgcacacagacctgcccagccagccccagctgcgggacaagacccagcccccagagagcagcccctgcagccccctgggccgggacctggtgcggggcccccggggccccccaacagctgcccagggccagaccctggccggcagccagaatgctgactgccggggccgggcctggctgcggcggccccaccccagagatgtgggcagcctgcccagctgcaagaccctggccgagatcagcacccctgtgagcagcccccccctgcaggagcactag

SEQ ID NO: 146366 - DNA, 1272 bp, synthetic construct
  misc_feature 1..1272: note = Description of Artificial Sequence: Synthetic coding sequence
  source 1..1272: mol_type = other DNA
atggagaacaagaagaaggacaaggacaagagtgatgacaggatggcccggcccagcggccgcagcggccacaacacccggggcaccggcagcagcagcagcggcgtgctgatggtgggccccaacttccgggtgggcaagaagattggctgcggcaactttggagagctgcggctgggcaagaacctgtacaccaatgaatatgtggccatcaagctggagcccatgaagagccgggccccccagctgcacctggagtaccgcttctacaagcagctgggcagcggagatggcatcccccaggtgtactacttcggcccctgtgggaagtacaatgccatggtgctggagctgctgggccccagcctggaggacctgtttgacctgtgtgacaggaccttcagcctgaagacagtgctgatgattgccatccagctgatcagcaggatggagtatgtgcacagcaagaacctgatctacagagatgtgaagccagagaacttcctgattggccggcccggcaacaagacccagcaggtgatccacatcatcgactttggcctggccaaggagtacattgatcctgagaccaagaagcacatcccctaccgggagcacaagagcctgaccggcacagcccgctacatgagcatcaacacccacctgggcaaggagcagagcagaagagatgacctggaggccctgggccacatgttcatgtacttcctgcggggcagcctgccctggcagggcctgaaggctgacaccctgaaggagcgctaccagaagatcggggacaccaagagggccacccccatcgaggtgctgtgtgagaacttccctgagatggccacctacctgcgctacgtgcggcggctggacttctttgagaagccagactatgactacctgaggaagctgttcacagacctgtttgacaggaagggctacatgtttgattatgaatatgactggattggcaagcagctgcccacccctgtgggcgctgtgcagcaggaccctgccctgagcagcaaccgggaggcccaccagcaccgggacaagatgcagcagagcaagaaccaggtggtgagcagcaccaacggggagctgaacacagatgaccccacagctggccgcagcaatgcccccatcacagcccccacagaggtggaggtgatggatgagaccaactgccagaaggtgctgaacatgtggtgctgctgcttcttcaagaggaggaagaggaagaccatccagaggcacaagtag

SEQ ID NO: 146367 - DNA, 1368 bp, synthetic construct
  misc_feature 1..1368: note = Description of Artificial Sequence: Synthetic coding sequence
  source 1..1368: mol_type = other DNA
atggagaacaagaagaaggacaaggacaagagtgatgacaggatggcccggcccagcggccgcagcggccacaacacccggggcaccggcagcagcagcagcggcgtgctgatggtgggccccaacttccgggtgggcaagaagattggctgcggcaactttggagagctgcggctgggcaagaacctgtacaccaatgaatatgtggccatcaagctggagcccatgaagagccgggccccccagctgcacctggagtaccgcttctacaagcagctgggcagcggagatggcatcccccaggtgtactacttcggcccctgtgggaagtacaatgccatggtgctggagctgctgggccccagcctggaggacctgtttgacctgtgtgacaggaccttcagcctgaagacagtgctgatgattgccatccagctgatcagcaggatggagtatgtgcacagcaagaacctgatctacagagatgtgaagccagagaacttcctgattggccggcccggcaacaagacccagcaggtgatccacatcatcgactttggcctggccaaggagtacattgatcctgagaccaagaagcacatcccctaccgggagcacaagagcctgaccggcacagcccgctacatgagcatcaacacccacctgggcaaggagcagagcagaagagatgacctggaggccctgggccacatgttcatgtacttcctgcggggcagcctgccctggcagggcctgaaggctgacaccctgaaggagcgctaccagaagatcggggacaccaagagggccacccccatcgaggtgctgtgtgagaacttccctgagatggccacctacctgcgctacgtgcggcggctggacttctttgagaagccagactatgactacctgaggaagctgttcacagacctgtttgacaggaagggctacatgtttgattatgaatatgactggattggcaagcagctgcccacccctgtgggcgctgtgcagcaggaccctgccctgagcagcaaccgggaggcccaccagcaccgggacaagatgcagcagagcaagaaccagagcgctgaccaccgggccgcctgggacagccagcaggccaacccccaccacctgcgggcccacctggccgctgacagacatggaggctctgtgcaggtggtgagcagcaccaacggggagctgaacacagatgaccccacagctggccgcagcaatgcccccatcacagcccccacagaggtggaggtgatggatgagaccaactgccagaaggtgctgaacatgtggtgctgctgcttcttcaagaggaggaagaggaagaccatccagaggcacaagtag

SEQ ID NO: 146368 - DNA, 1344 bp, synthetic construct
  misc_feature 1..1344: note = Description of Artificial Sequence: Synthetic coding sequence
  source 1..1344: mol_type = other DNA
atggagaacaagaagaaggacaaggacaagagtgatgacaggatggcccggcccagcggccgcagcggccacaacacccggggcaccggcagcagcagcagcggcgtgctgatggtgggccccaacttccgggtgggcaagaagattggctgcggcaactttggagagctgcggctgggcaagaacctgtacaccaatgaatatgtggccatcaagctggagcccatgaagagccgggccccccagctgcacctggagtaccgcttctacaagcagctgggcagcggagatggcatcccccaggtgtactacttcggcccctgtgggaagtacaatgccatggtgctggagctgctgggccccagcctggaggacctgtttgacctgtgtgacaggaccttcagcctgaagacagtgctgatgattgccatccagctgatcagcaggatggagtatgtgcacagcaagaacctgatctacagagatgtgaagccagagaacttcctgattggccggcccggcaacaagacccagcaggtgatccacatcatcgactttggcctggccaaggagtacattgatcctgagaccaagaagcacatcccctaccgggagcacaagagcctgaccggcacagcccgctacatgagcatcaacacccacctgggcaaggagcagagcagaagagatgacctggaggccctgggccacatgttcatgtacttcctgcggggcagcctgccctggcagggcctgaaggctgacaccctgaaggagcgctaccagaagatcggggacaccaagagggccacccccatcgaggtgctgtgtgagaacttccctgagatggccacctacctgcgctacgtgcggcggctggacttctttgagaagccagactatgactacctgaggaagctgttcacagacctgtttgacaggaagggctacatgtttgattatgaatatgactggattggcaagcagctgcccacccctgtgggcgctgtgcagcaggaccctgccctgagcagcaaccgggaggcccaccagcaccgggacaagatgcagcagagcaagaaccagagcgctgaccaccgggccgcctgggacagccagcaggccaacccccaccacctgcgggcccacctggccgctgacagacatggaggctctgtgcaggtggtgagcagcaccaacggggagctgaacacagatgaccccacagctggccgcagcaatgcccccatcacagcccccacagaggtggaggtgatggatgagaccaagtgctgctgcttcttcaagaggaggaagaggaagaccatccagaggcacaagtag

SEQ ID NO: 146369 - DNA, 1344 bp, synthetic construct; identical to SEQ ID NO: 146368
  misc_feature 1..1344: note = Description of Artificial Sequence: Synthetic coding sequence
  source 1..1344: mol_type = other DNA

SEQ ID NO: 146370 - DNA, 1368 bp, synthetic construct; identical to SEQ ID NO: 146367
  misc_feature 1..1368: note = Description of Artificial Sequence: Synthetic coding sequence
  source 1..1368: mol_type = other DNA

SEQ ID NO: 146371 - DNA, 1275 bp, synthetic construct
  misc_feature 1..1275: note = Description of Artificial Sequence: Synthetic coding sequence
  source 1..1275: mol_type = other DNA
atggagaacaagaagaaggacaaggacaagagtgatgacaggatggcccggcccagcggccgcagcggccacaacacccggggcaccggcagcagcagcagcggcgtgctgatggtgggccccaacttccgggtgggcaagaagattggctgcggcaactttggagagctgcggctgggcaagaacctgtacaccaatgaatatgtggccatcaagctggagcccatgaagagccgggccccccagctgcacctggagtaccgcttctacaagcagctgggcagcggagatggcatcccccaggtgtactacttcggcccctgtgggaagtacaatgccatggtgctggagctgctgggccccagcctggaggacctgtttgacctgtgtgacaggaccttcagcctgaagacagtgctgatgattgccatccagctgatcagcaggatggagtatgtgcacagcaagaacctgatctacagagatgtgaagccagagaacttcctgattggccggcccggcaacaagacccagcaggtgatccacatcatcgactttggcctggccaaggagtacattgatcctgagaccaagaagcacatcccctaccgggagcacaagagcctgaccggcacagcccgctacatgagcatcaacacccacctgggcaaggagcagagcagaagagatgacctggaggccctgggccacatgttcatgtacttcctgcggggcagcctgccctggcagggcctgaaggctgacaccctgaaggagcgctaccagaagatcggggacaccaagagggccacccccatcgaggtgctgtgtgagaacttccctgaggagatggccacctacctgcgctacgtgcggcggctggacttctttgagaagccagactatgactacctgaggaagctgttcacagacctgtttgacaggaagggctacatgtttgattatgaatatgactggattggcaagcagctgcccacccctgtgggcgctgtgcagcaggaccctgccctgagcagcaaccgggaggcccaccagcaccgggacaagatgcagcagagcaagaaccaggtggtgagcagcaccaatggagagctgaacacagatgaccccacagctggccgcagcaatgcccccatcacagcccccacagaggtggaggtgatggatgagaccaactgccagaaggtgctgaacatgtggtgctgctgcttcttcaagaggaggaagaggaagaccatccagaggcacaagtag

SEQ ID NO: 146372 - DNA, 1272 bp, synthetic construct; identical to SEQ ID NO: 146366
  misc_feature 1..1272: note = Description of Artificial Sequence: Synthetic coding sequence
  source 1..1272: mol_type = other DNA

SEQ ID NO: 146373 - DNA, 648 bp, synthetic construct
  misc_feature 1..648: note = Description of Artificial Sequence: Synthetic coding sequence
  source 1..648: mol_type = other DNA
atgagcagcagcgaggaggtgtcctggatctcctggttctgtggcctgcggggaaatgagttcttctgtgaggtggatgaggactacatccaggacaagttcaacctgaccggcctgaatgagcaggtgccccactaccggcaggccctggacatgatcctggacctggagccagatgaggagctggaggacaaccccaaccagagcgacctgattgagcaggccgctgagatgctgtatggcctcatccacgcccgctacatcctgaccaacagaggcatcgcccagatgctggagaagtaccagcagggcgactttggctactgcccccgggtgtactgtgagaaccagcccatgctgcccatcggcctgagtgacatccctggagaggccatggtgaagctgtactgccccaagtgcatggatgtgtacacccccaagagcagccgccaccaccacacagatggagcctactttggaacaggcttcccccacatgctgttcatggtgcaccctgagtaccggcccaagaggcctgccaaccagtttgtgccccggctgtatggcttcaagatccaccccatggcctaccagctgcagctgcaggccgccagcaacttcaagagccctgtgaagaccatcagatag

SEQ ID NO: 146374 - DNA, 648 bp, synthetic construct; identical to SEQ ID NO: 146373
  misc_feature 1..648: note = Description of Artificial Sequence: Synthetic coding sequence
  source 1..648: mol_type = other DNA

SEQ ID NO: 146375 - DNA, 648 bp, synthetic construct; identical to SEQ ID NO: 146373
  misc_feature 1..648: note = Description of Artificial Sequence: Synthetic coding sequence
  source 1..648: mol_type = other DNA

SEQ ID NO: 146376 - DNA, 648 bp, synthetic construct; identical to SEQ ID NO: 146373
  misc_feature 1..648: note = Description of Artificial Sequence: Synthetic coding sequence
  source 1..648: mol_type = other DNA

SEQ ID NO: 146377 - DNA, 687 bp, synthetic construct
  misc_feature 1..687: note = Description of Artificial Sequence: Synthetic coding sequence
  source 1..687: mol_type = other DNA
atgagcagcagcgaggaggtgtcctggatctcctggttctgtggcctgcggggaaatgagttcttctgtgaggtggatgaggactacatccaggacaagttcaacctgaccggcctgaatgagcaggtgccccactaccggcaggccctggacatgatcctggacctggagccagatgaggagctggaggacaaccccaaccagagcgacctgattgagcaggccgctgagatgctgtatggcctcatccacgcccgctacatcctgaccaacagaggcatcgcccagatgctggagaagtaccagcagggcgactttggctactgcccccgggtgtactgtgagaaccagcccatgctgcccatcggcctgagtgacatccctggagaggccatggtgaagctgtactgccccaagtgcatggatgtgtacacccccaagagcagccgccaccaccacacagatggagcctactttggaacaggcttcccccacatgctgttcatggtgcaccctgagtaccggcccaagaggcctgccaaccagtttgtgcccagcagctgcagccgccacccagatgtgcccctgctgccccggcggcggcccttctgcaggatgcacttccggctgcgggaggtgtaccaccagcagctgatccctgtgcacggggaccaccacctgctgtag

SEQ ID NO: 146378 - DNA, 648 bp, synthetic construct; identical to SEQ ID NO: 146373
  misc_feature 1..648: note = Description of Artificial Sequence: Synthetic coding sequence
  source 1..648: mol_type = other DNA

SEQ ID NO: 146379 - DNA, 648 bp, synthetic construct; identical to SEQ ID NO: 146373
  misc_feature 1..648: note = Description of Artificial Sequence: Synthetic coding sequence
  source 1..648: mol_type = other DNA

SEQ ID NO: 146380 - DNA, 705 bp, synthetic construct
  misc_feature 1..705: note = Description of Artificial Sequence: Synthetic coding sequence
  source 1..705: mol_type = other DNA
atggagaagtgcaagggcaccagcaggatggccggcaccaccagcgcagatgtgaagatgagcagcagcgaggaggtgtcctggatctcctggttctgtggcctgcggggaaatgagttcttctgtgaggtggatgaggactacatccaggacaagttcaacctgaccggcctgaatgagcaggtgccccactaccggcaggccctggacatgatcctggacctggagccagatgaggagctggaggacaaccccaaccagagcgacctgattgagcaggccgctgagatgctgtatggcctcatccacgcccgctacatcctgaccaacagaggaattgcccagatgctggagaagtaccagcagggcgactttggctactgcccccgggtgtactgtgagaaccagcccatgctgcccatcggcctgagtgacatccctggagaggccatggtgaagctgtactgccccaagtgcatggatgtgtacacccccaagagcagccgccaccaccacacagatggagcctacttcggcaccggcttcccccacatgctgttcatggtgcaccctgagtaccggcccaagaggcctgccaaccagtttgtgccccggctgtatggcttcaagatccaccccatggcctaccagctgcagctgcaggccgccagcaacttcaagagccctgtgaagaccatcagatag

SEQ ID NO: 146381 - DNA, 648 bp, synthetic construct; identical to SEQ ID NO: 146373
  misc_feature 1..648: note = Description of Artificial Sequence: Synthetic coding sequence
  source 1..648: mol_type = other DNA

SEQ ID NO: 146382 - DNA, 687 bp, synthetic construct; identical to SEQ ID NO: 146377
  misc_feature 1..687: note = Description of Artificial Sequence: Synthetic coding sequence
  source 1..687: mol_type = other DNA

SEQ ID NO: 146383 - DNA, 687 bp, synthetic construct; identical to SEQ ID NO: 146377
  misc_feature 1..687: note = Description of Artificial Sequence: Synthetic coding sequence
  source 1..687: mol_type = other DNA

SEQ ID NO: 146384 - DNA, 648 bp, synthetic construct; identical to SEQ ID NO: 146373
  misc_feature 1..648: note = Description of Artificial Sequence: Synthetic coding sequence
  source 1..648: mol_type = other DNA

SEQ ID NO: 146385 - DNA, 705 bp, synthetic construct; identical to SEQ ID NO: 146380
  misc_feature 1..705: note = Description of Artificial Sequence: Synthetic coding sequence
  source 1..705: mol_type = other DNA

SEQ ID NO: 146386 - DNA, 648 bp, synthetic construct; identical to SEQ ID NO: 146373
  misc_feature 1..648: note = Description of Artificial Sequence: Synthetic coding sequence
  source 1..648: mol_type = other DNA

SEQ ID NO: 146387 - DNA, 705 bp, synthetic construct; identical to SEQ ID NO: 146380
  misc_feature 1..705: note = Description of Artificial Sequence: Synthetic coding sequence
  source 1..705: mol_type = other DNA

SEQ ID NO: 146388 - DNA, 705 bp, synthetic construct; identical to SEQ ID NO: 146380
  misc_feature 1..705: note = Description of Artificial Sequence: Synthetic coding sequence
  source 1..705: mol_type = other DNA

SEQ ID NO: 146389 - DNA, 648 bp, synthetic construct; identical to SEQ ID NO: 146373
  misc_feature 1..648: note = Description of Artificial Sequence: Synthetic coding sequence
  source 1..648: mol_type = other DNA

SEQ ID NO: 146390 - DNA, 648 bp, synthetic construct; identical to SEQ ID NO: 146373
  misc_feature 1..648: note = Description of Artificial Sequence: Synthetic coding sequence
  source 1..648: mol_type = other DNA

SEQ ID NO: 146391 - DNA, 705 bp, synthetic construct; identical to SEQ ID NO: 146380
  misc_feature 1..705: note = Description of Artificial Sequence: Synthetic coding sequence
  source 1..705: mol_type = other DNA

SEQ ID NO: 146392 - DNA, 648 bp, synthetic construct; identical to SEQ ID NO: 146373
  misc_feature 1..648: note = Description of Artificial Sequence: Synthetic coding sequence
  source 1..648: mol_type = other DNA

SEQ ID NO: 146393 - DNA, 687 bp, synthetic construct; identical to SEQ ID NO: 146377
  misc_feature 1..687: note = Description of Artificial Sequence: Synthetic coding sequence
  source 1..687: mol_type = other DNA

SEQ ID NO: 146394 - DNA, 705 bp, synthetic construct; identical to SEQ ID NO: 146380
  misc_feature 1..705: note = Description of Artificial Sequence: Synthetic coding sequence
  source 1..705: mol_type = other DNA

SEQ ID NO: 146395 - DNA, 648 bp, synthetic construct; identical to SEQ ID NO: 146373
  misc_feature 1..648: note = Description of Artificial Sequence: Synthetic coding sequence
  source 1..648: mol_type = other DNA

SEQ ID NO: 146396 - DNA, 648 bp, synthetic construct; identical to SEQ ID NO: 146373
  misc_feature 1..648: note = Description of Artificial Sequence: Synthetic coding sequence
  source 1..648: mol_type = other DNA

SEQ ID NO: 146397 - DNA, 648 bp, synthetic construct; identical to SEQ ID NO: 146373
  misc_feature 1..648: note = Description of Artificial Sequence: Synthetic coding sequence
  source 1..648: mol_type = other DNA

SEQ ID NO: 146398 - DNA, 648 bp, synthetic construct; identical to SEQ ID NO: 146373
  misc_feature 1..648: note = Description of Artificial Sequence: Synthetic coding sequence
  source 1..648: mol_type = other DNA

SEQ ID NO: 146399 - DNA, 648 bp, synthetic construct; identical to SEQ ID NO: 146373
  misc_feature 1..648: note = Description of Artificial Sequence: Synthetic coding sequence
  source 1..648: mol_type = other DNA

SEQ ID NO: 146400 - DNA, 648 bp, synthetic construct; identical to SEQ ID NO: 146373
  misc_feature 1..648: note = Description of Artificial Sequence: Synthetic coding sequence
  source 1..648: mol_type = other DNA

SEQ ID NO: 146401 - DNA, 648 bp, synthetic construct; identical to SEQ ID NO: 146373
  misc_feature 1..648: note = Description of Artificial Sequence: Synthetic coding sequence
  source 1..648: mol_type = other DNA

SEQ ID NO: 146402 - DNA, 648 bp, synthetic construct; identical to SEQ ID NO: 146373
  misc_feature 1..648: note = Description of Artificial Sequence: Synthetic coding sequence
  source 1..648: mol_type = other DNA

SEQ ID NO: 146403 - DNA, 648 bp, synthetic construct; identical to SEQ ID NO: 146373
  misc_feature 1..648: note = Description of Artificial Sequence: Synthetic coding sequence
  source 1..648: mol_type = other DNA

SEQ ID NO: 146404 - DNA, 4296 bp, synthetic construct
  misc_feature 1..4296: note = Description of Artificial Sequence: Synthetic coding sequence
  source 1..4296: mol_type = other DNA
atgggcaaggagcaggagctggtgcaggccgtgaaggccgaggatgtgggcacagcccagaggctgctgcagaggcccaggcctgggaaggccaagctgctgggcagcaccaagaagatcaacgtgaacttccaggaccctgatggcttcagcgccctgcaccacgccgccctgaatggaaacacagagctgatcagcctgctgctggaggcccaggccgctgtggacatcaaggacaacaagggcatgaggcccctgcactatgctgcctggcagggcaggaaggagcccatgaagctggtgctgaaggccggcagcgctgtgaacatccccagtgatgagggccacatccccctgcacctggccgcccagcacggccactatgatgtgtctgagatgctgctgcagcaccagagcaacccctgcatggtggacaacagcggcaagacccccctggacctggcctgtgaatttggccgggtgggcgtggtgcagctgctgctgagcagcaacatgtgtgccgccctgctggagcccaggcctggagatgccacagaccccaacggcaccagccccctgcacctggccgccaagaatggccacatcgacatcatccggctgctgctgcaggccggcatcgacatcaaccggcagaccaagtctggaacagccctgcacgaggccgccctgtgtgggaagacagaggtggtgcggctgctgctggacagcggcatcaatgcccacgtgaggaacacctacagccagacagccctggacatcgtgcaccagttcaccaccagccaggccagccgggagatcaagcagctgctgcgggaggccagcgctgccctgcaggtgcgggccaccaaggactactgcaacaactatgacctgaccagcctgaatgtgaaggccggggacatcatcaccgtgctggagcagcacccagatggccgctggaagggctgcatccatgacaacagaactggaaatgacagagtgggctacttccccagcagcctgggggaggccatcgtgaagagagctggcagcagagctggaacagagcccagcctgccccagggcagcagcagcagcggccccagcgcccctcctgaggagatctgggtgctgaggaagccctttgctggaggagacaggagcggcagcatcagcggcatggccggcggccggggcagcggcggccacgccctgcatgctggcagcgagggcgtgaagctgctggccaccgtgctgagccagaagtctgtgtctgagagcggccctggggacagccctgccaagcccccagagggcagcgctggggtggcccggagccagccccctgtggcccatgctggccaggtgtatggagagcagccccccaagaagctggagcccgccagcgagggcaagagcagcgaggccgtgtcccagtggctgacagccttccagctgcagctgtatgcccccaacttcatctctgctggctatgacctgcccaccatcagcaggatgaccccagaggacctgacagccatcggcgtgaccaagccaggccacaggaagaagattgctgctgagatcagcggcctgagcatcccagactggctgcctgagcacaagccagccaacctggccgtgtggctgtccatgattggcctggcccagtactacaaggtgctggtggacaatggctatgagaacatcgacttcatcacagacatcacctgggaggacctgcaggagatcggcatcaccaagctgggccaccagaagaagctgatgctggccgtgaggaagctggccgagctgcagaaggccgagtatgccaagtatgaaggaggccccctgcggaggaaggccccccagagcctggaggtgatggccatcgagagccccccacctcctgagcccaccccagctgactgccagagccccaagatgaccaccttccaggacagcgagctgagtgatgagctgcaggccgccatgacaggccctgctgaggtgggccccaccacagagaagcccagcagccacctgccccccaccccccgggccaccacccggcaggacagcagcctgggcggccgggcccggcacatgagcagcagccaggagctgctgggagatggccccccaggccccagcagccccatgagccgcagccaggagtacctgctggatgagggccctgcccctggcaccccaccccgggaggcccggcccggcagacatggccacagcatcaagagggcctctgtgccccctgtgcctgggaagccccggcaggtgctgcccccaggcaccagccacttcaccccaccccagacccccaccaagaccaggcctggcagcccccaggccctgggcggcccccacggccctgccccagccacagccaaggtgaagcccaccccccagctgctgcccccaacagagcggcccatgagccccaggagcctgccccagagccccacccaccggggctttgcctacgtgctgccccagcctgtggagggggaggtgggccctgctgcccctggccctgcccctcctcctgtgcccacagctgtgcccaccctgtgcctgcccccagaggctgatgctgagcccggccggcccaagaagagggcccacagcctgaacagatatgctgccagtgacagcgagcctgagagagatgagctgctggtgcctgctgctgctggcccctatgccaccgtgcagaggagagtgggccgcagccacagcgtgcgggccccagctggagctgacaagaatgtgaacagaagccagagctttgctgtgcggcccaggaagaagggccccccacctcctccacccaagaggagcagcagcgccctggccagcgccaacctggctgatgagcctgtgcctgatgctgagccagaagatggcctgctgggcgtgcgggcccagtgccggcgggccagtgacctggccggctctgtggacaccggcagcgctggctctgtgaagagcattgctgccatgctggagctgagcagcattggaggcggcggccgggccgcccggcggcccccagagggccaccccacccccaggcctgccagccctgagcccggccgggtggccaccgtgctggcctctgtgaagcacaaggaggccatcggccctggaggagaggtggtgaacagaagaaggaccctgagcggccctgtgacaggcctgctggccacagcccggcggggccctggagagagcgctgaccccggcccctttgtggaggatggcaccggccggcagaggccccggggccccagcaaaggagaggccggcgtggagggcccccccctggccaaggtggaggccagcgccaccctgaagaggcgcatccgggccaagcagaaccagcaggagaatgtgaagttcatcctgacagaaagtgacacagtgaagaggcggcccaaggccaaggagcgggaggccggccctgagcccccaccacccctgtctgtgtaccacaacggcaccggcaccgtgagaagaagacctgccagcgagcaggccggccccccagagctgcccccacctcctcctcctgctgagcccccacccacagacctggcccacctgccccccctgcccccacctgagggggaggccaggaagccagccaagccccctgtgagccccaagcctgtgctgacccagcctgtgcccaagctgcagggcagccccacccccaccagcaagaaggtgcccctgcccggccctggcagccctgaggtgaagagggcccacggcaccccacctcctgtgagccccaagcccccacctccacccacagcccccaagcctgtgaaggctgtggccggcctgcccagcggcagcgctggccccagccctgcccccagccctgcccggcagcccccagctgccctggccaagcccccaggcaccccacccagcctgggcgccagccctgccaagccacccagccctggggccccagccctgcacgtgcctgccaagccacccagggctgctgctgctgctgctgctgctgctgctgcccccccagcccctcctgagggcgccagccctggggacagcgcccggcagaagctggaggagaccagcgcctgcctggccgccgccctgcaggccgtggaggagaagatccggcaggaggatgcccagggcccccgggacagcgctgctgagaagagcacaggcagcatcctggatgacatcggctccatgtttgatgacctggccgaccagctggatgccatgctggagtag

SEQ ID NO: 146405 - DNA, 2115 bp, synthetic construct
  misc_feature 1..2115: note = Description of Artificial Sequence: Synthetic coding sequence
  source 1..2115: mol_type = other DNA
atgtgtgccgccctgctggagcccaggcctggagatgccacagaccccaacggcaccagccccctgcacctggccgccaagaatggccacatcgacatcatccggctgctgctgcaggccggcatcgacatcaaccggcagaccaagagcggcacagccctgcatgaagctgccctgtgtgggaagacagaggtggtgcggctgctgctggacagcggcatcaatgcccacgtgaggaacacctacagccagacagccctggacatcgtgcaccagttcaccaccagccaggccagccgggagatcaagcagctgctgcgggaggccagcgctgccctgcaggtgcgggccaccaaggactactgcaacaactatgacctgaccagcctgaatgtgaaggccggggacatcatcaccgtgctggagcagcacccagatggccgctggaagggctgcatccatgacaacagaactggaaatgacagagtgggctacttccccagcagcctgggggaggccatcgtgaagagagctggcagccgggccggcacagagcccagcctgccccagggcagcagcagcagcggccccagcgcccctcctgaggagatctgggtgctgaggaagccctttgctggaggagacagaagtggcagcatcagcggcatggccggcggccggggcagcggcggccacgccctgcacgccggcagcgagggcgtgaagctgctggccaccgtgctgagccagaagtctgtgtctgagagcggccctggggacagccctgccaagcccccagagggcagcgctggggtggcccggagccagccccctgtggcccacgccggccaggtgtatggagagcagccccccaagaagctggagcccgccagcgagggcaagagcagcgaggccgtgtcccagtggctgacagccttccagctgcagctgtatgcccccaacttcatctctgctggctatgacctgcccaccatcagcaggatgaccccagaggacctgacagccatcggcgtgaccaagccaggccacaggaagaagattgctgctgagatcagcggcctgagcatcccagactggctgcctgagcacaagccagccaacctggccgtgtggctgtccatgattggcctggcccagtactacaaggtgctggtggacaatggctatgaaaatattgacttcatcacagacatcacctgggaggacctgcaggagatcggcatcaccaagctgggccaccagaagaagctgatgctggccgtgaggaagctggccgagctgcagaaggccgagtatgccaagtatgagggcggccccctgcggaggaaggccccccagagcctggaggtgatggccatcgagagccccccacctcctgagcccaccccagctgactgccagagccccaagatgaccaccttccaggacagcgagctgagtgatgagctgcaggccgccatgactggacctgctgaggtgggccccaccacagagaagcccagcagccacctgccccccaccccccgggccaccacccggcaggacagcagcctgggcggccgggcccggcacatgagcagcagccaggagctgctgggagatggccccccaggccccagcagccccatgagccgcagccaggagtacctgctggatgagggccctgcccctggcaccccaccccgggaggcccggcccggccgccacggccacagcatcaagagggcctctgtgccccctgtgcctgggaagccccggcaggtgctgcccccaggcaccagccacttcaccccaccccagacccccaccaagacccggcccggcagcccccaggccctgggcggcccccacggccctgccccagccacagccaaggtgaagcccaccccccagctgctgcccccaacagagcggcccatgagccccaggagcctgccccagagccccacccagaggacaggccctggccctgcccagaactgccccagcggccgcccagccagccgctctggagctgcccagggcactggagaccagggccagggccccccagccccaccccacccccagaacatctcctaccaggagtactag

SEQ ID NO: 146406 - DNA, 3609 bp, synthetic construct
  misc_feature 1..3609: note = Description of Artificial Sequence: Synthetic coding sequence
  source 1..3609: mol_type = other DNA
atgggccgggagcaggacctgatcctggccgtgaagaatggagatgtgactggagtgcagaagctggtggccaaggtgaaggccaccaagaccaagctgctgggcagcaccaagaggctgaatgtgaactaccaggatgctgatggcttcagcgccctgcaccacgccgccctgggcggcagcctggagctgattgccctgctgctggaggcccaggccaccgtggacatcaaggacagcaatggcatgaggcccctgcactatgctgcctggcagggccgcctggagcctgtgcggctgctgctgcgggccagcgctgctgtgaatgctgccagcctggatggccagatccccctgcacctggccgcccagtatggccactatgaggtgtctgagatgctgctgcagcaccagagcaacccctgcctggtgaacaaggccaagaagacccccctggacctggcctgtgaatttggccgcctgaaggtggcccagctgctgctgaacagccacctgtgtgtggccctgctggagggggaggccaaggacccctgtgaccccaactacaccacccccctgcacctggccgccaagaatggccaccgggaggtgatccggcagctgctgcgggccggcatcgagatcaaccggcagaccaagacaggaacagccctgcacgaggccgccctgtatggcaagacagaggtggtgcggctgctgctggagggcggcgtggatgtgaacatccggaacacctacaaccagacagccctggacatcgtgaaccagttcaccaccagccaggccagccgggagatcaagcagctgctgcgggaggccagcggcatcctgaaggtgcgggccctgaaggacttctggaacctgcatgaccccacagccctgaatgtgcgggctggagatgtgatcaccgtgctggagcagcacccagatggccgctggaagggccacatccacgagagccagaggggcacagaccgcatcggctacttccccccaggcatcgtggaggtggtgtccaagagggtgggcatcccagctgcccggctgcccagcgcccccacccccctgcggcccggcttcagcaggaccccccagcccccagctgaggagcccccccaccccctgacctacagccagctgccccgggtgggcctgagcccagacagccctgctggggacagaaattctgtgggcagcgagggctctgtgggcagcatccgctctgctggcagcggccagagcagcgagggcaccaacggccacggccctggcctgctgattgaaaatgcccagcccctgcccagcgctggggaggaccaggtgctgcccggcctgcacccccccagcctggccgacaacctgagccaccggcccctggccaactgccgctctggagagcagatcttcacccaggatgtgcggcctgagcagctgctggagggcaaggatgcccaggccatccacaactggctgtctgagttccagctggagggctacacagcccacttcctgcaggccggctatgatgtgcccaccatcagcaggatgaccccagaggacctgacagccatcggcgtgaccaagccaggccacaggaagaagatcgccagcgagatcgcccagctgagcattgctgagtggctgcccagctacatccccacagacctgctggagtggctgtgtgccctgggcctgccccagtaccacaagcagctggtgagcagcggctatgacagcatgggcctggtggccgacctgacctgggaggagctgcaggagattggagtgaacaagctgggccaccagaagaagctgatgctgggcgtgaagaggctggccgagctgcggcggggcctgctgcagggcgaggccctgtctgagggcggccgccgcctggccaagggccctgagctgatggccatcgagggcctggagaatggagagggccctgccacagctggcccccggctgctgaccttccagggcagcgagctgagccctgagctgcaggccgccatggccggcggcggccctgagcccctgcccctgcccccagcccggagccccagccaggagagcattggagcccggagccggggcagcggccacagccaggagcagcctgccccccagcccagcggcggggaccccagccccccccaggagaggaacctgcctgagggcacagagaggcctcccaagctgtgcagcagcctgcccggccagggccccccaccctacgtgttcatgtacccccagggcagccccagcagccctgcccctggccccccacctggggccccctgggccttctcctacctggccggccccccagccaccccaccagaccccccccggcccaagaggaggagccacagcctgagccggcccggccccacagaaggagatgctgagggggaggccgagggccctgtgggcagcaccctgggcagctatgccaccctgaccaggaggcctggccgcagcgccctggtgaggaccagccccagcgtgacccccaccccagcccggggcacccccaggagccagagctttgccctgcgggcccggaggaagggccccccacctcctccacccaagaggctgagctctgtgtctggccccagccctgagcccccacccctggatgagagccctggccccaaggagggcgccaccggccccaggaggaggaccctgtctgagcctgctggccccagcgagcccccaggccccccagccccagctggccctgccagtgacacagaggaggaggagcccggccctgagggcaccccacccagccggggcagcagcggggagggcctgccctttgctgaggagggcaacctgaccatcaagcagaggcccaagccagctggccccccaccccgggagacccctgtgcccccaggcctggacttcaacctgacagaaagtgacacagtgaagaggcggcccaagtgccgggagcgggagcccctgcagacagccctgctggcctttggagtggccagcgccaccccaggccctgctgcccccctgcccagccccaccccaggagagagccccccagccagcagcctgccccagcctgagcccagcagcctgcctgcccagggcgtgcccacccccctggcccccagccctgccatgcagccccctgtgcccccctgccccggccctggcctggagagcagcgctgccagccgctggaatggagaaacagagcccccagctgccccagctgccctgctgaaggtgcctggggccggcacagcccccaagcctgtgtctgtggcctgcacccagctggccttcagcggccccaagctggccccccggctgggccccaggcctgtgcccccacccaggcctgagagcacaggcaccgtgggccctggccaggcccagcagaggctggagcagaccagcagcagcctggccgccgccctgcgggctgctgagaagagcatcggcaccaaggagcaggagggcacccccagcgccagcaccaagcacatcctggatgacatcagcaccatgtttgatgccctggccgaccagctggatgccatgctggactag

SEQ ID NO: 146407 - DNA, 3363 bp, synthetic construct
  misc_feature 1..3363: note = Description of Artificial Sequence: Synthetic coding sequence
  source 1..3363: mol_type = other DNA
atgaggcccctgcactatgctgcctggcagggccgcctggagcctgtgcggctgctgctgcgggccagcgctgctgtgaatgctgccagcctggatggccagatccccctgcacctggccgcccagtatggccactatgaggtgtctgagatgctgctgcagcaccagagcaacccctgcctggtgaacaaggccaagaagacccccctggacctggcctgtgaatttggccgcctgaaggtggcccagctgctgctgaacagccacctgtgtgtggccctgctggagggggaggccaaggacccctgtgaccccaactacaccacccccctgcacctggccgccaagaatggccaccgggaggtgatccggcagctgctgcgggccggcatcgagatcaaccggcagaccaagacaggaacagccctgcacgaggccgccctgtatggcaagacagaggtggtgcggctgctgctggagggcggcgtggatgtgaacatccggaacacctacaaccagacagccctggacatcgtgaaccagttcaccaccagccaggccagccgggagatcaagcagctgctgcgggaggccagcggcatcctgaaggtgcgggccctgaaggacttctggaacctgcatgaccccacagccctgaatgtgcgggctggagatgtgatcaccgtgctggagcagcacccagatggccgctggaagggccacatccacgagagccagaggggcacagaccgcatcggctacttccccccaggcatcgtggaggtggtgtccaagagggtgggcatcccagctgcccggctgcccagcgcccccacccccctgcggcccggcttcagcaggaccccccagcccccagctgaggagcccccccaccccctgacctacagccagctgccccgggtgggcctgagcccagacagccctgctggggacagaaattctgtgggcagcgagggctctgtgggcagcatccgctctgctggcagcggccagagcagcgagggcaccaacggccacggccctggcctgctgattgaaaatgcccagcccctgcccagcgctggggaggaccaggtgctgcccggcctgcacccccccagcctggccgacaacctgagccaccggcccctggccaactgccgctctggagagcagatcttcacccaggatgtgcggcctgagcagctgctggagggcaaggatgcccaggccatccacaactggctgtctgagttccagctggagggctacacagcccacttcctgcaggccggctatgatgtgcccaccatcagcaggatgaccccagaggacctgacagccatcggcgtgaccaagccaggccacaggaagaagatcgccagcgagatcgcccagctgagcattgctgagtggctgcccagctacatccccacagacctgctggagtggctgtgtgccctgggcctgccccagtaccacaagcagctggtgagcagcggctatgacagcatgggcctggtggccgacctgacctgggaggagctgcaggagattggagtgaacaagctgggccaccagaagaagctgatgctgggcgtgaagaggctggccgagctgcggcggggcctgctgcagggcgaggccctgtctgagggcggccgccgcctggccaagggccctgagctgatggccatcgagggcctggagaatggagagggccctgccacagctggcccccggctgctgaccttccagggcagcgagctgagccctgagctgcaggccgccatggccggcggcggccctgagcccctgcccctgcccccagcccggagccccagccaggagagcattggagcccggagccggggcagcggccacagccaggagcagcctgccccccagcccagcggcggggaccccagccccccccaggagaggaacctgcctgagggcacagagaggcctcccaagctgtgcagcagcctgcccggccagggccccccaccctacgtgttcatgtacccccagggcagccccagcagccctgcccctggccccccacctggggccccctgggccttctcctacctggccggccccccagccaccccaccagaccccccccggcccaagaggaggagccacagcctgagccggcccggccccacagaaggagatgctgagggggaggccgagggccctgtgggcagcaccctgggcagctatgccaccctgaccaggaggcctggccgcagcgccctggtgaggaccagccccagcgtgacccccaccccagcccggggcacccccaggagccagagctttgccctgcgggcccggaggaagggccccccacctcctccacccaagaggctgagctctgtgtctggccccagccctgagcccccacccctggatgagagccctggccccaaggagggcgccaccggccccaggaggaggaccctgtctgagcctgctggccccagcgagcccccaggccccccagccccagctggccctgccagtgacacagaggaggaggagcccggccctgagggcaccccacccagccggggcagcagcggggagggcctgccctttgctgaggagggcaacctgaccatcaagcagaggcccaagccagctggccccccaccccgggagacccctgtgcccccaggcctggacttcaacctgacagaaagtgacacagtgaagaggcggcccaagtgccgggagcgggagcccctgcagacagccctgctggcctttggagtggccagcgccaccccaggccctgctgcccccctgcccagccccaccccaggagagagccccccagccagcagcctgccccagcctgagcccagcagcctgcctgcccagggcgtgcccacccccctggcccccagccctgccatgcagccccctgtgcccccctgccccggccctggcctggagagcagcgctgccagccgctggaatggagaaacagagcccccagctgccccagctgccctgctgaaggtgcctggggccggcacagcccccaagcctgtgtctgtggcctgcacccagctggccttcagcggccccaagctggccccccggctgggccccaggcctgtgcccccacccaggcctgagagcacaggcaccgtgggccctggccaggcccagcagaggctggagcagaccagcagcagcctggccgccgccctgcgggctgctgagaagagcatcggcaccaaggagcaggagggcacccccagcgccagcaccaagcacatcctggatgacatcagcaccatgtttgatgccctggccgaccagctggatgccatgctggactag

SEQ ID NO: 146408 - DNA, 1026 bp, synthetic construct
  misc_feature 1..1026: note = Description of Artificial Sequence: Synthetic coding sequence
  source 1..1026: mol_type = other DNA
atggctgatgagaagcccagcaatggagtgctggtgcacatggtgaagctgctgatcaagaccttcctggatggcatctttgatgacctgatggagaacaacgtgctgaacacagatgagatccacctgattggcaagtgcctgaagtttgtggtgtccaatgctgagaacctggtggatgacatcacagaaacagcccagacagctgggaagatcttccgggagcacctgtggaacagcaagaagcagctgagcagtgacatcagcagtgatggagagcgggaggccaacatgcctggcctgaacatccggaacaaggagttcaactacctgcacaacagaaatggaagtgagctggacctgctgggcatgagggacctgctggagaacctgggctacagcgtggtgatcaaggagaacctgacagcccaggagatggagacagccctgcggcagtttgctgcccaccctgagcaccagagcagtgacagcaccttcctggtgttcatgagccacagcatcctgaatggcatctgtggcaccaagcactgggaccaggagccagatgtgctgcatgatgacaccatctttgagatcttcaacaacagaaactgccagagcctgaaggacaagcccaaggtgatcatcatgcaggcctgcagaggaaatggagctggcatcgtgtggttcaccacagacagcggcaaggccggggctgacacccacggccgcctgctgcagggcaacatctgcaatgatgctgtgaccaaggcccacgtggagaaggacttcatcgccttcaagagcagcaccccccacaacgtgtcctggaggcatgagaccaacggcagcgtcttcatcagccagatcatctactacttccgggagtacagctggagccaccacctggaggagatcttccagaaggtgcagcacagctttgagacccccaacatcctgacccagctgcccaccatcgagcggctgtccatgacccgctacttctacctgtttcctggcaactag

SEQ ID NO: 146409 - DNA, 1026 bp, synthetic construct; identical to SEQ ID NO: 146408
  misc_feature 1..1026: note = Description of Artificial Sequence: Synthetic coding sequence
  source 1..1026: mol_type = other DNA

SEQ ID NO: 146410 - DNA, 834 bp, synthetic construct
  misc_feature 1..834: note = Description of Artificial Sequence: Synthetic coding sequence
  source 1..834: mol_type = other DNA
atggagaacacagaaaattctgtggacagcaagagcatcaagaacctggagcccaagatcatccacggcagcgagagcatggattctggcatcagcctggacaacagctacaagatggactacccagagatgggcctgtgcatcatcatcaacaacaagaacttccacaagagcacaggcatgaccagccgctctggaacagatgtggatgctgccaacctgcgggagaccttcaggaacctgaagtatgaggtgaggaacaagaatgacctgacccgggaggagatcgtggagctgatgagagatgtgtccaaggaggaccacagcaagaggagcagctttgtgtgtgtgctgctgagccatggagaggagggcatcatcttcggcaccaatggacctgtggacctgaagaagatcaccaacttcttccggggggaccgctgccgcagcctgaccgggaagcccaagctgttcatcatccaggcctgccggggcacagagctggactgtggcatcgagacagacagcggcgtggatgatgacatggcctgccacaagatccctgtggaggccgacttcctgtatgcctacagcacagcccctggctactacagctggaggaacagcaaggatggctcctggttcatccagagcctgtgtgccatgctgaagcagtatgctgacaagctggagttcatgcacatcctgaccagggtgaacaggaaggtggccacagaatttgagagcttctcctttgatgccaccttccacgccaagaagcagatcccctgcatcgtgtccatgctgaccaaggagctgtacttctaccactag

SEQ ID NO: 146411 - DNA, 471 bp, synthetic construct
  misc_feature 1..471: note = Description of Artificial Sequence: Synthetic coding sequence
  source 1..471: mol_type = other DNA
atgtctgatgccctgatcaaggtgtccatggagaacacagagaacagcgtggacagcaagagcatcaagaacctggagcccaagatcatccacggcagcgagagcatggacagcggcatcagcctggacaacagctacaagatggactacccagagatgggcctgtgcatcatcatcaacaacaagaacttccacaagagcacaggcatgaccagccgcagcggcacagatgtggatgctgccaacctgcgggagaccttcaggaacctgaagtatgaggtgaggaacaagaatgacctgacccgggaggagatcgtggagctgatgagagatgtgtccaaagaagaccacagcaagaggagcagctttgtgtgtgtgctgctgagccacggggaggagggcatcatcttcggcaccaacggccctgtggacctgaagaacaacaagctgttccagaggggcagcctgtag

SEQ ID NO: 146412 - DNA, 354 bp, synthetic construct
  misc_feature 1..354: note = Description of Artificial Sequence: Synthetic coding sequence
  source 1..354: mol_type = other DNA
atggagaacacagaaaattctgtggacagcaagagcatcaagaacctggagcccaagatcatccacggcagcgagagcatggattctggcatcagcctggacaacagctacaagatggactacccagagatgggcctgtgcatcatcatcaacaacaagaacttccacaagagcacaggcatgaccagccgctctggaacagatgtggatgctgccaacctgcgggagaccttcaggaacctgaagtatgaggtgaggaacaagaatgacctgacccgggaggagatcgtggagctgatgagagatgtgtccaaggaggaccacagcaagaggagcagctttgtgtgtgtgtag

SEQ ID NO: 146413 - DNA, 834 bp, synthetic construct; identical to SEQ ID NO: 146410
  misc_feature 1..834: note = Description of Artificial Sequence: Synthetic coding sequence
  source 1..834: mol_type = other DNA

SEQ ID NO: 146414 - DNA, 966 bp, synthetic construct
  misc_feature 1..966: note = Description of Artificial Sequence: Synthetic coding sequence
  source 1..966: mol_type = other DNA
atggctgacagcatgcaggagaagcagaggatggccggccagatgctgctgcagaccttcttcaacatcgaccagatcagccccaacaagaaggcccaccccaacatggaggccggccccccagagagcggggagagcacagatgccctgaagctgtgcccccatgaggagttcctgcggctgtgcaaggagcgggcagaggagatctaccccatcaaggagaggaacaacagaacccggctggccctgatcatctgcaacacagaatttgaccacctgcccccaagaaatggagctgactttgacatcaccggcatgaaggagctgctggagggcctggactacagcgtggatgtggaggagaacctgacagcccgggacatggagagcgccctgcgggcctttgccaccaggcctgagcacaagagcagtgacagcaccttcctggtgctgatgagccacggcatcctggagggcatctgtggcaccgtgcatgatgagaagaagccagatgtgctgctgtatgacaccatcttccagatcttcaacaacagaaactgcctgagcctgaaggacaagcccaaggtgatcatcgtgcaggcctgccgcggggccaacagaggagagctgtgggtgcgggacagccctgccagcctggaggtggccagcagccagagcagcgagaacctggaggaggatgctgtgtacaagacccacgtggagaaggacttcatcgccttctgcagcagcaccccccacaacgtgtcctggagggacagcaccatgggcagcatcttcatcacccagctgatcacctgcttccagaagtacagctggtgctgccacctggaggaggtgttcaggaaggtgcagcagagctttgagaccccccgggccaaggcccagatgcccaccatcgagcggctgtccatgacccgctacttctacctgtttcctggcaactag

SEQ ID NO: 146415 - DNA, 213 bp, synthetic construct
  misc_feature 1..213: note = Description of Artificial Sequence: Synthetic coding sequence
  source 1..213: mol_type = other DNA
atggagaagaaggaatgtcctgagaagagcagcagcagcgaggaggagctgccccggcgggacagcggcagcagcaggaacattgatgccagcaagctgatccggctgcagggcagcaggaagctgctggtggacaacagcatccgggagctgcagtacaccaagacaggcatcttcttccaggccgaggcctgtgtgaccaatgacacctag

SEQ ID NO: 146416 - DNA, 3099 bp, synthetic construct
  misc_feature 1..3099: note = Description of Artificial Sequence: Synthetic coding sequence
  source 1..3099: mol_type = other DNA
atgcctggccgggcagaggccggggaggccgaggaggaggccggggccggcagcggcagcgaggccgaggaggatgccctgtgggagagaattgaaggagtgcgccaccggctggcccgggccctgaacccagccaagctgaccccctacctgcggcagtgccgggtgattgatgagcaggatgaggaggaggtgctgagcacctaccgcttcccctgccgggtgaacagaacaggccgcctgatggacatcctgcgctgccggggcaagaggggctatgaggccttcctggaggccctggagttctactacccagagcacttcaccctgctgaccggccaggagcccgcccagcgctgcagcatgatcctggatgaggagggccctgagggcctgacccagttcctgatgacagaggtgcggcggctgcgggaggccaggaagagccagctgcagcgggagcagcagctgcaggcccggggccgggtgctggaggaggagagagctggcctggagcagaggctgcgggaccagcagcaggcccaggagcgctgccagaggctgcgggaggactgggaggccggcagcctggagctgctgcggctgaaggatgagaactacatgattgccatgaggctggcccagctgtctgaggagaagaacagcgctgtgctgcggagccgggacctgcagctggccgtggaccagctgaagctgaaggtgtcccggctggaggaggagtgtgccctgctgcggcgggcccggggccccccacctggagctgaggagaaggagaaggagaaggagaaggagaaggagccagacaacgtggacctggtgtctgagctgcgggcagagaaccagaggctgacagccagcctgcgggagctgcaggagggcctgcagcaggaggccagcaggcctggggcccctggcagcgagcgcatcctgctggacatcctggagcatgactggagggaggcccaggacagccggcaggagctgtgccagaagctgcatgctgtgcagggcgagctgcagtgggccgaggagctgcgggaccagtacctgcaggagatggaggacctgcggctgaagcacaggaccctgcagaaggactgtgacctgtacaagcacaggatggccaccgtgctggcccagctggaggagattgagaaggagcgggaccaggccatccagagccgggaccgcatccagctgcagtacagccagagcctcatcgagaaggaccagtacaggaagcaggtgcggggcctggaggccgagagagatgagctgctgaccaccctgaccagcctggagggcaccaaggccctgctggaggtgcagctgcagagggcccagggcggcacctgcctgaaggcctgtgccagcagccacagcctgtgcagcaacctgagcagcacctggagcctgtctgagttccccagccccctgggcggccctgaggccaccggggaggccgctgtgatgggcggccctgagccccacaacagcgaggaggccacagacagcgagaaggagatcaaccggctgagcatcctgcccttccccccatctgctggcagcatcctgcggcggcagcgggaggaggaccctgccccacccaagaggagcttcagctccatgtctgacatcaccggctctgtgaccctgaagccctggagccctggcctgagcagcagcagcagcagtgacagcgtgtggcccctgggcaagccagagggcctgctggcccggggctgcggcctggacttcctgaacagaagcctggccatccgggtgtctggccgcagccccccaggcggccctgagccccaggacaagggcccagatggcctgtccttctacggggaccgctggagcggggctgtggtgcggcgggtgctgagcggccctggcagcgccaggatggagccccgggagcagagggtggaggccgccggcctggagggcgcctgcctggaggccgaggcccagcagaggaccctgctgtggaaccagggcagcaccctgcccagcctgatggacagcaaggcctgccagagcttccacgaggccctggaggcctgggccaagggccctggagctgagcccttctacatccgggccaacctgaccctgcctgagagagctgacccccacgccctgtgtgtgaaggcccaggagatcctgcggctggtggacagcgcctacaagaggcggcaggagtggttctgcaccagggtggaccccctgaccctgcgggacctggaccggggcaccgtgcccaactaccagagggcccagcagctgctggaggtgcaggagaagtgcctgcccagcagccgccaccggggccccaggagcaacctgaagaagagggccctggaccagctgcggctggtgcggcccaagcctgtgggcgccccagctggggacagcccagaccagctgctgctggagccctgtgccgagcctgagaggagcctgcggccctacagcctggtgcggcccctgctggtgtctgccctgcggcctgtggtgctgctgcctgaatgtctggcccccaggctcatccggaacctgctggacctgcccagcagccggctggacttccaggtgtgcccagctgagagcctgagcggggaggagctgtgccccagcagcgcccctggggcccccaaggcccagcctgccaccccaggcctgggcagccgcatccgggccatccaggagagcgtgggcaagaagcactgcctgctggagctgggcgcccggggcgtgcgggagctggtgcagaatgagatctaccccatcgtcatccacgtggaggtgacagagaagaatgtgcgggaggtgcggggcctgctgggccggcccggctggagggacagcgagctgctgcggcagtgccggggcagcgagcaggtgctgtggggcctgccctgctcctgggtgcaggtgcctgcccacgagtggggccatgctgaggagctggccaaggtggtgcggggccgcatcctgcaggagcaggcccggctggtgtgggtggagtgtggcagcagccggggctgccccagcagcagcgaggcctag

SEQ ID NO: 146417 - DNA, 3099 bp, synthetic construct; identical to SEQ ID NO: 146416
  misc_feature 1..3099: note = Description of Artificial Sequence: Synthetic coding sequence
  source 1..3099: mol_type = other DNA

SEQ ID NO: 146418 - DNA, 2241 bp, synthetic construct
  misc_feature 1..2241: note = Description of Artificial Sequence: Synthetic coding sequence
  source 1..2241: mol_type = other DNA
atgggcgtgggcgtgggcctgggcaatggcctgcggctgctgccctggatggaggccagcaggcctggggcccctggcagcgagcgcatcctgctggacatcctggagcatgactggagggaggcccaggacagccggcaggagctgtgccagaagctgcatgctgtgcagggcgagctgcagtgggccgaggagctgcgggaccagtacctgcaggagatggaggacctgcggctgaagcacaggaccctgcagaaggactgtgacctgtacaagcacaggatggccaccgtgctggcccagctggaggagattgagaaggagcgggaccaggccatccagagccgggaccgcatccagctgcagtacagccagagcctcatcgagaaggaccagtacaggaagcaggtgcggggcctggaggccgagagagatgagctgctgaccaccctgaccagcctggagggcaccaaggccctgctggaggtgcagctgcagagggcccagggcggcacctgcctgaaggcctgtgccagcagccacagcctgtgcagcaacctgagcagcacctggagcctgtctgagttccccagccccctgggcggccctgaggccaccggggaggccgctgtgatgggcggccctgagccccacaacagcgaggaggccacagacagcgagaaggagatcaaccggctgagcatcctgcccttccccccatctgctggcagcatcctgcggcggcagcgggaggaggaccctgccccacccaagaggagcttcagctccatgtctgacatcaccggctctgtgaccctgaagccctggagccctggcctgagcagcagcagcagcagtgacagcgtgtggcccctgggcaagccagagggcctgctggcccggggctgcggcctggacttcctgaacagaagcctggccatccgggtgtctggccgcagccccccaggcggccctgagccccaggacaagggcccagatggcctgtccttctacggggaccgctggagcggggctgtggtgcggcgggtgctgagcggccctggcagcgccaggatggagccccgggagcagagggtggaggccgccggcctggagggcgcctgcctggaggccgaggcccagcagaggaccctgctgtggaaccagggcagcaccctgcccagcctgatggacagcaaggcctgccagagcttccacgaggccctggaggcctgggccaagggccctggagctgagcccttctacatccgggccaacctgaccctgcctgagagagctgacccccacgccctgtgtgtgaaggcccaggagatcctgcggctggtggacagcgcctacaagaggcggcaggagtggttctgcaccagggtggaccccctgaccctgcgggacctggaccggggcaccgtgcccaactaccagagggcccagcagctgctggaggtgcaggagaagtgcctgcccagcagccgccaccggggccccaggagcaacctgaagaagagggccctggaccagctgcggctggtgcggcccaagcctgtgggcgccccagctggggacagcccagaccagctgctgctggagccctgtgccgagcctgagaggagcctgcggccctacagcctggtgcggcccctgctggtgtctgccctgcggcctgtggtgctgctgcctgaatgtctggcccccaggctcatccggaacctgctggacctgcccagcagccggctggacttccaggtgtgcccagctgagagcctgagcggggaggagctgtgccccagcagcgcccctggggcccccaaggcccagcctgccaccccaggcctgggcagccgcatccgggccatccaggagagcgtgggcaagaagcactgcctgctggagctgggcgcccggggcgtgcgggagctggtgcagaatgagatctaccccatcgtcatccacgtggaggtgacagagaagaatgtgcgggaggtgcggggcctgctgggccggcccggctggagggacagcgagctgctgcggcagtgccggggcagcgagcaggtgctgtggggcctgccctgctcctgggtgcaggtgcctgcccacgagtggggccatgctgaggagctggccaaggtggtgcggggccgcatcctgcaggagcaggcccggctggtgtgggtggagtgtggcagcagccggggctgccccagcagcagcgaggcctag

SEQ ID NO: 146419 - DNA, 1443 bp, synthetic construct
  misc_feature 1..1443: note = Description of Artificial Sequence: Synthetic coding sequence
  source 1..1443: mol_type = other DNA
atggaggacctgcggctgaagcacaggaccctgcagaaggactgtgacctgtacaagcacaggatggccaccgtgctggcccagctggaggagattgagaaggagcgggaccaggccatccagagccgggaccgcatccagctgcagtacagccagagcctgattgagaaggaccagtacaggaagcaggtgcggggcctggaggccgagagagatgagctgctgaccaccctgaccagcctggagggcaccaaggccctgctggaggtgcagctgcagagggcccagggcggcacctgcctgaaggcctgtgccagcagccacagcctgtgcagcaacctgagcagcacctggagcctgtctgagttccccagccccctgggcggccctgaggccactggagaggccgctgtgatgggcggccctgagccccacaacagcgaggaggccacagattctgagaaggagatcaaccggctgagcatcctgcccttcccccccagcgctggcagcatcctgcggcggcagcgggaggaggaccctgccccacccaagaggagcttcagctccatgtctgacatcactggatctgtgaccctgaagccctggagccctggcctgagcagcagcagcagcagtgacagcgtgtggcccctgggcaagccagagggcctgctggcccggggctgcggcctggacttcctgaacagaagcctggccatccgggtgtctggccgcagccccccaggcggccctgagccccaggacaagggcccagatggcctgtccttctatggagaccgctggagcggggctgtggtgagaagagtgctgagcggccctggcagcgccaggatggagccccgggagcagagggtggaggccgccggcctggagggcgcctgcctggaggccgaggcccagcagaggaccctgctgtggaaccagggcagcaccctgcccagcctgatggacagcaaggcctgccagagcttccacgaggccctggaggcctgggccaagggccctggagctgagcccttctacatccgggccaacctgaccctgcctgagagagctgacccccacgccctgtgtgtgaaggcccaggagatcctgcggctggtggacagcgcctacaagaggcggcaggagtggttctgcaccagggtggaccccctgaccctgcgggacctggaccggggcaccgtgcccaactaccagagggcccagcagctgctggaggtgcaggagaagtgcctgcccagcagccgccaccggggccccaggagcaacctgaagaagagggccctggaccagctgcggctggtgcggcccaagcctgtgggcgccccagctggggacagcccagaccagctgctgctggagccctgtgccgagcctgagaggagcctgcggccctacagcctggtgcggccctag

SEQ ID NO: 146420 - DNA, 222 bp, synthetic construct
  misc_feature 1..222: note = Description of Artificial Sequence: Synthetic coding sequence
  source 1..222: mol_type = other DNA
atgcctgggggcggccctgagatggatgactacatggagaccctgaaggatgaagaagatgccctgtgggagaatgtggagtgcaacagacacatgctgagccgctacatcaacccagccaagctgaccccctacctgcggcagtgcaaggtgattgatgagcaggatgaagatgaggtgctgaatgcccccatgctgcccagcaagatcaacagagcctag

SEQ ID NO: 146421 - DNA, 3465 bp, synthetic construct
  misc_feature 1..3465: note = Description of Artificial Sequence: Synthetic coding sequence
  source 1..3465: mol_type = other DNA
atgcctgggggcggccctgagatggatgactacatggagaccctgaaggatgaagaagatgccctgtgggagaatgtggagtgcaacagacacatgctgagccgctacatcaacccagccaagctgaccccctacctgcggcagtgcaaggtgattgatgagcaggatgaagatgaggtgctgaatgcccccatgctgcccagcaagatcaacagagctggccgcctgctggacatcctgcacaccaagggccagaggggctacgtggtgttcctggagagcctggagttctactacccagagctgtacaagctggtgacaggcaaggagcccacccggcgcttcagcaccatcgtggtggaggagggccacgagggcctgacccacttcctgatgaatgaagtcatcaagctgcagcagcagatgaaggccaaggacctgcagagatgtgagctgctggcccggctgcggcagctggaggatgagaagaagcagatgaccctgaccagggtggagctgctgaccttccaggagcgctactacaagatgaaggaggagcgggacagctacaatgatgagctggtgaaggtgaaggatgacaactacaacctggccatgagatatgcccagctgtctgaggagaagaacatggctgtgatgaggagccgggacctgcagctggagattgaccagctgaagcaccggctgaacaagatggaggaggagtgcaagctggagaggaaccagagcctgaagctgaagaatgacatcgagaaccggcccaagaaggagcaggtgctggagctggagcgggagaatgagatgctgaagaccaagaaccaggagctgcagagcatcatccaggccggcaagaggagcctgcctgacagcgacaaggccatcctggacatcctggagcatgacaggaaggaggccctggaggaccggcaggagctggtgaaccgcatctacaacctgcaggaggaggcccggcaggccgaggagctgcgggacaagtacctggaggagaaggaggacctggagctgaagtgcagcaccctgggcaaggactgtgagatgtacaagcacaggatgaacacagtgatgctgcagctggaggaggtggagcgggagcgggaccaggccttccacagcagagatgaggcccagacccagtacagccagtgcctgattgagaaggacaagtacaggaagcagatccgggagctggaggagaagaatgatgagatgagaattgagatggtgagaagagaggcctgcatcgtgaacctggagagcaagctgcggcggctgagcaaggacagcaacaacctggaccagagcctgcccaggaacctgcctgtgaccatcatcagccaggactttggagatgccagccccaggaccaacggccaggaggctgatgacagcagcaccagcgaggagagccctgaggacagcaagtacttcctgccctaccaccccccccagaggaggatgaacctgaagggcatccagctgcagagggccaagagccccatcagcctgaagaggaccagtgacttccaggccaagggccacgaggaggagggcacagatgccagccccagcagctgtggcagcctgcccatcaccaacagcttcaccaagatgcagcccccaagaagccgcagcagcatcatgagcatcacagctgagcccccaggaaatgacagcatcgtgcggcgctacaaggaggatgccccccacaggagcacagtggaggaggacaatgattctgggggctttgatgccctggacctggatgatgacagccatgagcgctacagctttggccccagcagcatccacagcagcagcagcagccaccagagcgagggcctggatgcctatgacctggagcaggtgaacctgatgttcaggaagttcagcctggagcggcccttccggcccagcgtgacctctgtgggccacgtgcggggccctggccccagcgtgcagcacaccaccctgaatggagacagcctgaccagccagctgaccctgctgggcggcaatgcccggggcagctttgtgcacagcgtgaagccaggcagcctggccgagaaggccggcctgcgggagggccaccagctgctgctgctggagggctgcatccggggggagcggcagagcgtgcccctggacacctgcaccaaggaggaggcccactggaccatccagcgctgcagcggccctgtgaccctgcactacaaggtgaaccacgagggctacaggaagctggtgaaggacatggaggatggcctcatcaccagcggggacagcttctacatccggctgaacctgaacatcagcagccagctggatgcctgcaccatgagcctgaagtgtgatgatgtggtgcacgtgcgggacaccatgtaccaggacagacatgagtggctgtgtgcccgggtggaccccttcacagaccatgacctggacatgggcaccatccccagctacagccgggcccagcagctgctgctggtgaagctgcagaggctgatgcaccggggcagccgggaggaggtggatggcacccaccacaccctgcgggccctgaggaacaccctgcagcctgaggaggccctgagcaccagtgacccccgggtgagcccccggctgagccgggccagcttcctgtttggccagctgctgcagtttgtgagccgctctgagaacaagtacaagaggatgaacagcaatgaaagagtgcgcatcatcagcggcagccccctgggcagcctggcccggagcagcctggatgccaccaagctgctgacagagaagcaggaggagctggaccctgagagcgagctgggcaagaacctgagcctcatcccctacagcctggtgcgggccttctactgtgaaagaagaagacctgtgctcttcacccccaccgtgctggccaagaccctggtgcagaggctgctgaacagcggcggggccatggagttcaccatctgcaagagtgacatcgtgaccagagatgagttcctgcggcggcagaagacagagaccatcatctacagccgggagaagaaccccaatgcctttgaatgtattgccccagccaacatcgaggccgtggccgccaagaacaagcactgcctgctggaggccggcatcggctgcacccgggacctgatcaagagcaacatctaccccatcgtgctcttcatccgggtgtgtgagaagaacatcaagcgcttcaggaagctgctgcccaggcctgagacagaggaggagttcctgcgggtgtgccgcctgaaggagaaggagctggaggccctgccctgcctgtatgccaccgtggagccagacatgtggggctctgtggaggagctgctgcgggtggtgaaggacaagattggagaggagcagaggaagaccatctgggtggatgaggaccagctgtag

SEQ ID NO: 146422 - DNA, 3114 bp, synthetic construct
  misc_feature 1..3114: note = Description of Artificial Sequence: Synthetic coding sequence
  source 1..3114: mol_type = other DNA
atggccacagagagcacccccagcgagatcatcgagcgggagaggaagaagctgctggagatcctgcagcacgaccctgacagcatcctggacaccctgaccagccggcggctcatcagcgaggaggagtatgagaccctggagaatgtgacagacctgctgaagaagagcaggaagctgctgatcctggtgcagaagaagggggaggccacctgccagcacttcctgaagtgcctcttcagcaccttcccccagagcgctgccatctgtggcctgcggcatgaggtgctgaagcatgagaacacagtgcccccccagagcatgggcgccagcagcaacagtgaagatgccttcagccctggcatcaagcagcctgaggcccctgagatcaccgtcttcttcagcgagaaggagcacctggacctggagaccagcgagttcttccgggacaagaagaccagctaccgggagacagccctgagcgccaggaagaatgagaaggagtatgacaccccagaggtgaccctgagctacagcgtggagaaggtgggctgtgaggtgcctgccaccatcacctacatcaaggatggccagagatatgaggagctggatgacagcctgtacctgggcaaggaggagtacctgggctctgtggacaccccagaagatgctgaggccaccgtggaggaggaggtgtatgatgatcctgagcacgtgggctatgatggagaagaagattttgagaacagcgagaccacagagttcagcggggaggagcccagctatgagggcagcgagaccagcctgagcctggaggaggagcaggagaagagcattgaggagaggaagaaggtgttcaaggatgtgctgctgtgcctgaacatggacaggagcaggaaggtgctgcctgactttgtgaagcagttcagcctggaccggggctgcaagtggaccccagagagccctggggacctggcctggaacttcctgatgaaggtgcaggccagagatgtgacagcccgggacagcatcctgagccacaaggtgctggatgaggacagcaaggaggacctgctggccggcgtggagaacctggagatccgggacatccagaccatcaaccccctggatgtgctgtgtgccaccatgctgtgcagcgacagcagcctgcagaggcaggtgatgagcaacatgtaccagtgccagtttgccctgcccctgctgctgcctgatgctgagaacaacaagagcatcctgatgctgggcgccatgaaggacatcgtgaagaagcagagcacccagttcagcggcggccccacagaggacacagagaagttcctgaccctgatgaagatgcctgtgatcagctttgtgcggctgggctactgcagcttcagcaagagccgcatcctgaacaccctgctgagccctgcccagctgaagctgcacaagatcttcctgcaccaggacctgcccctgctggtgctgccccggcagatcagtgatggcctggtggagatcacctggtgcttcccagacagtgatgacagaaaagaaaaccccttcttccagaagcctgtggccctggccaacctgcggggcaacctggagagcttctggacccagtttggcttcctgatggaggtgtcctctgctgtgttcttcttcacagactgcctgggggagaaggagtgggacctgctgatgttcctgggggaggccgccatcgagcgctgctactttgtgctgagcagccaggcccgggagagcgaggaggcccagatcttccagaggatcctgaacctgaagccagcccagctgctcttctgggagagaggagatgctggggacaggaggaagaacatggagggcctgcaggccgccctgcaggaggtgatgttcagcagctgcctgcgctgtgtgtctgtggaggacatggccgccctggcccgggagctgggcatccaggtggatgaagattttgagaacacccagaggatccaggtgtcctctggagagaacatggccggcacagctgagggggagggccagcagaggcacagccagctgaagagcagcagcaagagccaggccctgatgcccatccaggagcccggcacccagtgtgagctgagccagaacctgcagaacctgtatggcacccctgtgttccggcctgtgctggagaacagctggctgttccccacccgcatcggcggcaacttcaaccacgtgtccctgaaggcctcctgggtgatgggccggccctttggaagtgagcagaggcccaagtggttccaccccctgcccttccagaatgctggggcccagggccggggcaagagctttggcatccagagcttccacccccagatcttctacagcggggagcgcttcatgaagttcagccgggtggcccggggctgccacagcaatggcaccttcggccgcctgccccggcccatctgccagcacgtgcaggcctgcccagagcggccccagatgatgggcaccctggagaggagcagagctgtggccagcaagattggccacagctacagcctggacagccagcctgcccgggctgtgggcaagccctggccccagcaggcctgcaccagggtgacagagctgacagaggccaccgggaagctgatccgcaccagccacatcggcaagccccacccccagagcttccagcctgctgctgccacccagaagctgcggcctgccagccagcagggcgtgcagatgaagacccagggcggggccagcaacccagccctgcagatcggcagccaccccatgtgcaagagcagccagttcaagagtgaccagagcaaccccagcacagtgaagcacagccagcccaagcccttccacagcgtgcccagccagcccaagagcagccagaccaagagctgccagagccagcccagccagaccaagcccagcccctgcaagagcacccagcccaagcccagccagccctggccaccccagagcaagcccagccagcccaggcctccccagcccaagagcagcagcaccaaccccagccaggccaaggcccaccacagcaaggccggccagaagaggggcggcaagcactag

SEQ ID NO: 146423 - DNA, 933 bp, synthetic construct
  misc_feature 1..933: note = Description of Artificial Sequence: Synthetic coding sequence
  source 1..933: mol_type = other DNA
atggccacagagagcacccccagcgagatcatcgagcgggagaggaagaagctgctggagatcctgcagcacgaccctgacagcatcctggacaccctgaccagccggcggctcatcagcgaggaggagtatgagaccctggagaatgtgacagacctgctgaagaagagcaggaagctgctgatcctggtgcagaagaagggggaggccacctgccagcacttcctgaagtgcctcttcagcaccttcccccagagcgctgccatctgtggcctgcggcctgaggtgctgaagcatgagaacacagtgcccccccagagcatgggcgccagcagcaacagtgaagatgccttcagccctggcatcaagcagcctgaggcccctgagatcaccgtcttcttcagcgagaaggagcacctggacctggagaccagcgagttcttccgggacaagaagaccagctaccgggagacagccctgagcgccaggaagaatgagaaggagtatgacaccccagaggtgaccctgagctacagcgtggagaaggtgggctgtgaggtgcctgccaccatcacctacatcaaggatggccagagatatgaggagctggatgacagcctgtacctgggcaaggaggagtacctgggctctgtggacaccccagaagatgctgaggccaccgtggaggaggaggtgtatgatgatcctgagcacgtgggctatgatggagaagaagattttgagaacagcgagaccacagagttcagcggggaggagcccagctatgagggcagcgagaccagcctgagcctggaggaggagcaggagaagagcattgagggctggagcaggacccacggcctgaagaggagcagccacgtgggcctgcccaagtgctgggactacagaagagagcccccctgcctggcctag

SEQ ID NO: 146424 - DNA, 1446 bp, synthetic construct
  misc_feature 1..1446: note = Description of Artificial Sequence: Synthetic coding sequence
  source 1..1446: mol_type = other DNA
atggccacagagagcacccccagcgagatcatcgagcgggagaggaagaagctgctggagatcctgcagcacgaccctgacagcatcctggacaccctgaccagccggcggctcatcagcgaggaggagtatgagaccctggagaatgtgacagacctgctgaagaagagcaggaagctgctgatcctggtgcagaagaagggggaggccacctgccagcacttcctgaagtgcctcttcagcaccttcccccagagcgctgccatctgtggcctgcggcatgaggtgctgaagcatgagaacacagtgcccccccagagcatgggcgccagcagcaacagtgaagatgccttcagccctggcatcaagcagcctgaggcccctgagatcaccgtcttcttcagcgagaaggagcacctggacctggagaccagcgagttcttccgggacaagaagaccagctaccgggagacagccctgagcgccaggaagaatgagaaggagtatgacaccccagaggtgaccctgagctacagcgtggagaaggtgggctgtgaggtgcctgccaccatcacctacatcaaggatggccagagatatgaggagctggatgacagcctgtacctgggcaaggaggagtacctgggctctgtggacaccccagaagatgctgaggccaccgtggaggaggaggtgtatgatgatcctgagcacgtgggctatgatggagaagaagattttgagaacagcgagaccacagagttcagcggggaggagcccagctatgagggcagcgagaccagcctgagcctggaggaggagcaggagaagagcattgaggagaggaagaaggtgttcaaggatgtgctgctgtgcctgaacatggacaggagcaggaaggtgctgcctgactttgtgaagcagttcagcctggaccggggctgcaagtggaccccagagagccctggggacctggcctggaacttcctgatgaaggtgcaggccagagatgtgacagcccgggacagcatcctgagccacaaggtgctggatgaggacagcaaggaggacctgctggccggcgtggagaacctggagatccgggacatccagaccatcaaccccctggatgtgctgtgtgccaccatgctgtgcagcgacagcagcctgcagaggcaggtgatgagcaacatgtaccagtgccagtttgccctgcccctgctgctgcctgatgctgagaacaacaagagcatcctgatgctgggcgccatgaaggacatcgtgaagaagcagagcacccagttcagcggcggccccacagaggacacagagaagttcctgaccctgatgaagaccctgaagaccctgcgggagttcaagttccccctggagaagacctggctgggccagctgaaggtgcgggtgtccaaggacacagtgtcctag

SEQ ID NO: 146425 - DNA, 570 bp, synthetic construct
  misc_feature 1..570: note = Description of Artificial Sequence: Synthetic coding sequence
  source 1..570: mol_type = other DNA
atggtgctggagcacccagcccgggtggagcccttctatgctgtgctggagagccccagcttcagcctgatgggcatcctgctgcgcatcgccagcggcacccggctgagcatccccatcaccagcaacaccctcatctactaccacccccaccctgaggacatcaagttccacctgtacctggtgcccagtgatgccctgctgaccaaggccattgatgatgaggaggaccgcttccacggcgtgcggctgcagaccagcccccccatggagcccctgaactttggcagcagctacatcgtgagcaacagcgccaacctgaaggtgatgcccaaggagctgaagctgagctaccgcagccctggagagatccagcacttcagcaagttctacgccggccagatgaaggagcccatccagctggagatcacagagaagagacatggcaccctggtgtgggacacagaggtgaagcctgtggacctgcagctggtggccgccagcgcccccccacccttcagcggcctgctgtggcagaggcagcccctgaaccccccaccagccaggtag

SEQ ID NO: 146426 - DNA, 1296 bp, synthetic construct
  misc_feature 1..1296: note = Description of Artificial Sequence: Synthetic coding sequence
  source 1..1296: mol_type = other DNA
atgatgaggcagaggcagagccactactgcagcgtgctcttcctgtctgtgaactacctgggcggcaccttccctggggacatctgcagcgaggagaaccagatcgtgagcagctatgccagcaaggtgtgctttgaaattgaggaggactacaagaaccggcagttcctgggccctgagggcaatgtggatgtggagctgattgacaagagcaccaaccgctacagcgtgtggttccccacagctggctggtacctgtggagcgccaccggcctgggcttcctggtgagagatgaggtgacagtgaccatcgccttcggctcctggagccagcacctggccctggacctgcagcaccacgagcagtggctggtgggcggccccctgtttgatgtgacagctgagcctgaggaggccgtggccgagatccacctgccccacttcatcagcctgcagggcgaggtggatgtgtcctggttcctggtggcccacttcaagaatgaaggcatggtgctggagcacccagcccgggtggagcccttctatgctgtgctggagagccccagcttcagcctgatgggcatcctgctgagaattgccagcggcacccggctgagcatccccatcaccagcaacaccctcatctactaccacccccaccctgaggacatcaagttccacctgtacctggtgcccagtgatgccctgctgaccaaggccattgatgatgaagaagatcgcttccatggagtgcggctgcagaccagcccccccatggagcccctgaactttggcagcagctacatcgtgagcaacagcgccaacctgaaggtgatgcccaaggagctgaagctgagctaccgcagccctggagagatccagcacttcagcaagttctacgccggccagatgaaggagcccatccagctggagatcacagagaagagacatggcaccctggtgtgggacacagaggtgaagcctgtggacctgcagctggtggccgccagcgcccccccacccttctctggagctgcctttgtgaaggagaaccaccggcagctgcaggccaggatgggagacctgaagggcgtgctggatgacctgcaggacaatgaggtgctgacagaaaatgagaaggagctggtggagcaggagaagacccggcagagcaagaatgaggccctgctgtccatggtggagaagaagggggacctggccctggatgtgctcttccgcagcatcagcgagcgggacccctacctggtgtcctacctgcggcagcagaacctgtag

SEQ ID NO: 146427 - DNA, 1614 bp, synthetic construct
  misc_feature 1..1614: note = Description of Artificial Sequence: Synthetic coding sequence
  source 1..1614: mol_type = other DNA
atggagaagaaggaatgtcctgagaagagcagcagcagcgaggaggagctgccccggcgggacagcggcagcagcaggaacattgatgccagcaagctgatccggctgcagggcagcaggaagctgctggtggacaacagcatccgggagctgcagtacaccaagacaggcatcttcttccaggccgaggcctgtgtgaccaatgacacagtgtaccgggagctgccctgtgtgtctgagaccctgtgtgacatcagccacttcttccaggaggatgatgaaacagaagctgagcccctgctcttccgggctgtgcctgagtgccagctgtctggaggagacatccccagcgtgtctgaggagcaggagagcagcgagggccaggacagcggggacatctgcagcgaggagaaccagatcgtgtcctcctatgccagcaaggtgtgctttgaaattgaggaggactacaagaaccggcagttcctgggccctgagggcaatgtggatgtggagctgattgacaagagcaccaaccgctacagcgtgtggttccccacagctggctggtacctgtggagcgccaccggcctgggcttcctggtgagagatgaggtgacagtgaccatcgccttcggctcctggagccagcacctggccctggacctgcagcaccacgagcagtggctggtgggcggccccctgtttgatgtgacagctgagcctgaggaggccgtggccgagatccacctgccccacttcatcagcctgcaggccggggaggtggatgtgtcctggttcctggtggcccacttcaagaatgaaggcatggtgctggagcacccagcccgggtggagcccttctatgctgtgctggagagccccagcttcagcctgatgggcatcctgctgagaattgccagcggcacccggctgagcatccccatcaccagcaacaccctcatctactaccacccccaccctgaggacatcaagttccacctgtacctggtgcccagtgatgccctgctgaccaaggccattgatgatgaagaagatcgcttccatggagtgcggctgcagaccagcccccccatggagcccctgaactttggcagcagctacatcgtgagcaacagcgccaacctgaaggtgatgcccaaggagctgaagctgagctaccgcagccctggagagatccagcacttcagcaagttctacgccggccagatgaaggagcccatccagctggagatcacagagaagagacatggcaccctggtgtgggacacagaggtgaagcctgtggacctgcagctggtggccgccagcgcccccccacccttctctggagctgcctttgtgaaggagaaccaccggcagctgcaggccaggatgggagacctgaagggcgtgctggatgacctgcaggacaatgaggtgctgacagaaaatgagaaggagctggtggagcaggagaagacccggcagagcaagaatgaggccctgctgtccatggtggagaagaagggggacctggccctggatgtgctcttccgcagcatcagcgagcgggacccctacctggtgtcctacctgcggcagcagaacctgtag

SEQ ID NO: 146428 - DNA, 1464 bp, synthetic construct
  misc_feature 1..1464: note = Description of Artificial Sequence: Synthetic coding sequence
  source 1..1464: mol_type = other DNA
atggagaagaaggaatgtcctgagaagagcagcagcagcgaggaggagctgcccaggagagtgtaccgggagctgccctgtgtgtctgagaccctgtgtgacatcagccacttcttccaggaggatgatgaaacagaagctgagcccctgctcttccgggctgtgcctgagtgccagctgtctggaggagacatccccagcgtgtctgaggagcaggagagcagcgagggccaggacagcggggacatctgcagcgaggagaaccagatcgtgtcctcctatgccagcaaggtgtgctttgaaattgaggaggactacaagaaccggcagttcctgggccctgagggcaatgtggatgtggagctgattgacaagagcaccaaccgctacagcgtgtggttccccacagctggctggtacctgtggagcgccaccggcctgggcttcctggtgagagatgaggtgacagtgaccatcgccttcggctcctggagccagcacctggccctggacctgcagcaccacgagcagtggctggtgggcggccccctgtttgatgtgacagctgagcctgaggaggccgtggccgagatccacctgccccacttcatcagcctgcaggccggggaggtggatgtgtcctggttcctggtggcccacttcaagaatgaaggcatggtgctggagcacccagcccgggtggagcccttctatgctgtgctggagagccccagcttcagcctgatgggcatcctgctgagaattgccagcggcacccggctgagcatccccatcaccagcaacaccctcatctactaccacccccaccctgaggacatcaagttccacctgtacctggtgcccagtgatgccctgctgaccaaggccattgatgatgaagaagatcgcttccatggagtgcggctgcagaccagcccccccatggagcccctgaactttggcagcagctacatcgtgagcaacagcgccaacctgaaggtgatgcccaaggagctgaagctgagctaccgcagccctggagagatccagcacttcagcaagttctacgccggccagatgaaggagcccatccagctggagatcacagagaagagacatggcaccctggtgtgggacacagaggtgaagcctgtggacctgcagctggtggccgccagcgcccccccacccttctctggagctgcctttgtgaaggagaaccaccggcagctgcaggccaggatgggagacctgaagggcgtgctggatgacctgcaggacaatgaggtgctgacagaaaatgagaaggagctggtggagcaggagaagacccggcagagcaagaatgaggccctgctgtccatggtggagaagaagggggacctggccctggatgtgctcttccgcagcatcagcgagcgggacccctacctggtgtcctacctgcggcagcagaacctgtag

SEQ ID NO: 146429 - DNA, 1101 bp, synthetic construct
  misc_feature 1..1101: note = Description of Artificial Sequence: Synthetic coding sequence
  source 1..1101: mol_type = other DNA
atgtctgactatgaaaatgatgatgagtgctggagcgtgctggagggcttccgggtgaccctgacctctgtgattgaccccagccgcatcaccccctacctgcggcagtgcaaggtgctgaacccagatgatgaggagcaggtgctgagtgaccccaacctggtgatcaggaagaggaaggtgggcgtgctgctggacatcctgcagaggacaggccacaagggctacgtggccttcctggagagcctggagctgtactacccccagctgtacaagaaggtgacaggcaaggagcccgcccgggtcttctccatgatcattgatgccagcggggagagcggcctgacccagctgctgatgacagaggtgatgaagctgcagaagaaggtgcaggacctgacagccctgctgagcagcaaggatgacttcatcaaggagctgcgggtgaaggacagcctgctgaggaagcaccaggagcgggtgcagaggctgaaggaggagtgtgaggccggcagccgggagctgaagcgctgcaaggaggagaactatgacctggccatgaggctggcccaccagagcgaggagaagggggccgccctgatgaggaacagagacctgcagctggagattgaccagctgaagcacagcctgatgaaggcagaagatgactgcaaggtggagaggaagcacaccctgaagctgcggcatgccatggagcagaggcccagccaggagctgctgtgggagctgcagcaggagaaggccctgctgcaggcccgggtgcaggagctggaggcctctgtgcaggagggcaagctggacaggagcagcccctacatccaggtgctggaggaggactggaggcaggccctgcgggaccaccaggagcaggccaacaccatcttcagcctgaggaaggacctgcggcagggcgaggcccggcggctgcgctgcatggaggagaaggagatgtttgagctgcagtgcctggccctgaggaaggacagcaagatgtacaaggacagaattgaggccatcctgctgcagatggaggaggtggccatcgagcgggaccagagcacccagatggagggcctgtag

SEQ ID NO: 146430 - DNA, 1611 bp, synthetic construct
  misc_feature 1..1611: note = Description of Artificial Sequence: Synthetic coding sequence
  source 1..1611: mol_type = other DNA
atgtctgactatgaaaatgatgatgagtgctggagcgtgctggagggcttccgggtgaccctgacctctgtgattgaccccagccgcatcaccccctacctgcggcagtgcaaggtgctgaacccagatgatgaggagcaggtgctgagtgaccccaacctggtgatcaggaagaggaaggtgggcgtgctgctggacatcctgcagaggacaggccacaagggctacgtggccttcctggagagcctggagctgtactacccccagctgtacaagaaggtgacaggcaaggagcccgcccgggtcttctccatgatcattgatgccagcggggagagcggcctgacccagctgctgatgacagaggtgatgaagctgcagaagaaggtgcaggacctgacagccctgctgagcagcaaggatgacttcatcaaggagctgcgggtgaaggacagcctgctgaggaagcaccaggagcgggtgcagaggctgaaggaggagtgtgaggccggcagccgggagctgaagcgctgcaaggaggagaactatgacctggccatgaggctggcccaccagagcgaggagaagggggccgccctgatgaggaacagagacctgcagctggagattgaccagctgaagcacagcctgatgaaggcagaagatgactgcaaggtggagaggaagcacaccctgaagctgcggcatgccatggagcagaggcccagccaggagctgctgtgggagctgcagcaggagaaggccctgctgcaggcccgggtgcaggagctggaggcctctgtgcaggagggcaagctggacaggagcagcccctacatccaggtgctggaggaggactggaggcaggccctgcgggaccaccaggagcaggccaacaccatcttcagcctgaggaaggacctgcggcagggcgaggcccggcggctgcgctgcatggaggagaaggagatgtttgagctgcagtgcctggccctgaggaaggacagcaagatgtacaaggacagaattgaggccatcctgctgcagatggaggaggtggccatcgagcgggaccaggccatcgccacccgggaggagctgcacgcccagcacgcccggggcctgcaggagaaggatgccctgaggaagcaggtgcgggagctgggggagaaggcagatgagctgcagctgcaggtgttccagtgtgaggcccagctgctggccgtggagggccgcctgcggcggcagcagctggagaccctggtgctgagcagtgacctggaggatggcagccccaggaggagccaggagctgagcctgccccaggacctggaggacacccagctgagtgacaagggctgcctggccggcggcggcagccccaagcagccctttgctgccctgcaccaggagcaggtgctgaggaacccccatgatgctggcctgagcagcggggagcccccagagaaggagcggcggcggctgaaggagagctttgagaactacagaaggaagagggccctgaggaagatgcagaagggctggaggcagggcgaggaggaccgggagaacaccaccggcagtgacaacacagacacagagggcagctag

SEQ ID NO: 146431 - DNA, 1479 bp, synthetic construct
  misc_feature 1..1479: note = Description of Artificial Sequence: Synthetic coding sequence
  source 1..1479: mol_type = other DNA
atgtctgactatgaaaatgatgatgagtgctggagcgtgctggagggcttccgggtgaccctgacctctgtgattgaccccagccgcatcaccccctacctgcggcagtgcaaggtgctgaacccagatgatgaggagcaggtgctgagtgaccccaacctggtgatcaggaagaggaaggtgggcgtgctgctggacatcctgcagaggacaggccacaagggctacgtggccttcctggagagcctggagctgtactacccccagctgtacaagaaggtgacaggcaaggagcccgcccgggtcttctccatgatcattgatgccagcggggagagcggcctgacccagctgctgatgacagaggtgatgaagctgcagaagaaggtgcaggacctgacagccctgctgagcagcaaggatgacttcatcaaggagctgcgggtgaaggacagcctgctgaggaagcaccaggagcgggtgcagaggctgaaggaggagtgtgaggccggcagccgggagctgaagcgctgcaaggaggagaactatgacctggccatgaggctggcccaccagagcgaggagaagggggccgccctgatgaggaacagagacctgcagctggagattgaccagctgaagcacagcctgatgaaggcagaagatgactgcaaggtggagaggaagcacaccctgaagctgcggcatgccatggagcagaggcccagccaggagctgctgtgggagctgcagcaggagaaggccctgctgcaggcccgggtgcaggagctggaggcctctgtgcaggagggcaagctggacaggagcagcccctacatccaggtgctggaggaggactggaggcaggccctgcgggaccaccaggagcaggccaacaccatcttcagcctgaggaaggacctgcggcagggcgaggcccggcggctgcgctgcatggaggagaaggagatgtttgagctgcagtgcctggccctgaggaaggacagcaagatgtacaaggacagaattgaggccatcctgctgcagatggaggaggtggccatcgagcgggaccaggccatcgccacccgggaggagctgcacgcccagcacgcccggggcctgcaggagaaggatgccctgaggaagcaggtgcgggagctgggggagaaggcagatgagctgcagctgcaggtgttccagtgtgaggcccagctgctggccgtggagggccgcctgcggcggcagcagctggagaccctggtgctgagcagtgacctggaggatggcagccccaggaggagccaggagctgagcctgccccaggacctggaggacacccagctgagtgacaagggctgcctggccggcggcggcagccccaagcagccctttgctgccctgcaccaggagcaggtgctgaggaacccccatgatgctggccctgctggcctgcccggcatcggggctgtgtgctag

SEQ ID NO: 146432 - DNA, 3501 bp, synthetic construct
  misc_feature 1..3501: note = Description of Artificial Sequence: Synthetic coding sequence
  source 1..3501: mol_type = other DNA
atggacctgggcacagctgagggcacccgctgcacagaccccccagctgggaagccagccatggcccccaagaggaagggcggcctgaagctgaatgccatctgtgccaagctgagccggcaggtggtggtggagaagagagcagatgctggcagccacacagagggcagccccagccagccccgggaccaggagaggagcggccctgagagcggggccgcccgggcccccaggtctgaggaggacaagaggcgggccgtcatcgagaagtgggtgaatggagagtacagcgaggagcccgcccccacccctgtgctgggcagaattgcccgggagggcctggagctgcccccagagggcgtgtacatggtgcagccccagggctgcagtgatgaagaagatcatgctgaggagcccagcaaggatggaggagccctggaggagaaggacagtgatggagctgccagcaaggaggacagcggccccagcacccggcaggccagcggggaggccagcagcctgcgggactatgctgccagcaccatgacagagttcctgggcatgtttggctatgatgaccagaacaccagagatgagctggccaggaagatcagctttgagaagctgcatgctggcagcaccccagaggccgccaccagctccatgctgcccaccagcgaggacaccctgagcaagagggcccgcttcagcaaatatgaggagtacatcaggaagctgaaggccggggagcagctgtcctggccagcccccagcaccaagacagaggagcgggtgggcaaggaggtggtgggcaccctgcccggcctgcggctgcccagcagcacagcccacctggagaccaaggccaccatcctgcccctgcccagccacagctctgtgcagatgcagaacctggtggcccgggccagcaaatatgacttcttcatccagaagctgaagacaggagagaacctgcggccccagaatggcagcacctacaagaagcccagcaaatatgacctggagaatgtgaagtacctgcacctgttcaagccaggagagggcagcccagacatgggcggggccatcgccttcaagacaggcaaggtgggccggcccagcaaatatgatgtgcggggcatccagaagccaggccctgccaaggtgccccccacccccagcctggccccagcccccctggcctctgtgcccagcgcccccagcgcccctggccctggccctgagcccccagccagcctgtccttcaacaccccagagtacctgaagagcaccttcagcaagacagacagcatcaccaccggcaccgtgtccacagtgaagaatggcctgcccacagacaagccagctgtgacagaagatgtgaacatctaccagaagtacatcgcccgcttcagcggcagccagcactgcggccacatccactgtgcctaccagtaccgggagcactaccactgcctggaccctgagtgcaactaccagcgcttcaccagcaagcaggatgtgatccgccactacaacatgcacaagaagagggacaacagcctgcagcacggcttcatgaggttcagccccctggatgactgcagcgtgtactaccacggctgccacctgaatggcaagagcacccactaccactgcatgcaggtgggctgcaacaaggtgtacaccagcaccagtgatgtgatgacccatgagaacttccacaagaagaacacccagctgatcaatgatggcttccagcgcttccgggccacagaggactgtggcacagctgactgccagttctacggccagaagaccacccacttccactgcagaagacctggctgcaccttcaccttcaagaacaagtgtgacatcgagaagcacaagagctaccacatcaaggatgatgcctatgccaaggatggcttcaagaagttctacaagtatgaggagtgcaagtatgagggctgtgtgtacagcaaggccaccaaccacttccactgcatccgggccggctgcggcttcaccttcaccagcaccagccagatgaccagccacaagaggaagcatgagcggcggcacatccgcagcagcggggccctgggcctgccccccagcctgctgggcgccaaggacacagaacatgaggagagcagcaatgatgacctggtggacttcagcgccctgagcagcaagaacagcagcctgagcgccagccccaccagccagcagagcagcgccagcctggccgccgccacagctgccacagaggccggccccagcgccaccaagccacccaacagcaagatcagcggcctgctgccccagggcctgcccggcagcatccccctggccctggccctgagcaacagcggcctgcccacccccaccccctacttccccatcctggccggccggggcagcaccagcctgcctgtgggcacccccagcctgctgggcgctgtgagcagcggcagcgctgccagcgccaccccagacacccccaccctggtggccagcggggccggggacagcgcccctgtggccgccgcctctgtgcctgcccccccagccagcatcatggagcgcatcagcgccagcaagggcctcatcagccccatgatggcccggctggccgctgctgccctgaagcccagcgccacctttgatcctggcagcggccagcaggtgaccccagcccgcttccccccagcccaggtgaagccagagcctggagagagcactggagcccctggcccccatgaggccagccaggacaggagcctggacctgactgtgaaggagcccagcaatgaaagcaatggacatgctgtgcctgccaacagcagcctgctgagcagcctgatgaacaagatgagccagggcaaccctggcctgggcagcctgctgaacatcaaggccgaggccgagggcagccctgctgctgagcccagccccttcctgggcaaggctgtgaaggccctggtgcaggagaagctggccgagccctggaaggtgtacctgcggagatttggcaccaaggacttctgtgatggccagtgtgacttcctgcacaaggcccacttccactgtgtggtggaggagtgtggggccctcttcagcaccctggatggagccatcaagcacgccaacttccacttcagaacagagggcggggccgccaagggcaacacagaagctgccttccctgccagcgctgctgagaccaagccacccatggcccccagcagcccccctgtgccccctgtgaccacagccaccgtgagcagcctggagggccctgcccccagccctgcctctgtgcccagcacccccaccctgctggcctggaagcagctggccagcaccatcccccagatgccccagatcccagcctctgtgccccacctgcctgccagccccctggccaccaccagcctggagaatgccaagccccaggtgaagccaggcttcctgcagttccaggagaagtag

SEQ ID NO: 146433 - DNA, 5280 bp, synthetic construct
  misc_feature 1..5280: note = Description of Artificial Sequence: Synthetic coding sequence
  source 1..5280: mol_type = other DNA
atggacctgggcacagctgagggcacccgctgcacagaccccccagctgggaagccagccatggcccccaagaggaagggcggcctgaagctgaatgccatctgtgccaagctgagccggcaggtggtggtggagaagagagcagatgctggcagccacacagagggcagccccagccagccccgggaccaggagaggagcggccctgagagcggggccgcccgggcccccaggtctgaggaggacaagaggcgggccgtcatcgagaagtgggtgaatggagagtacagcgaggagcccgcccccacccctgtgctgggcagaattgcccgggagggcctggagctgcccccagagggcgtgtacatggtgcagccccagggctgcagtgatgaagaagatcatgctgaggagcccagcaaggatggaggagccctggaggagaaggacagtgatggagctgccagcaaggaggacagcggccccagcacccggcaggccagcggggaggccagcagcctgcgggactatgctgccagcaccatgacagagttcctgggcatgtttggctatgatgaccagaacaccagagatgagctggccaggaagatcagctttgagaagctgcatgctggcagcaccccagaggccgccaccagctccatgctgcccaccagcgaggacaccctgagcaagagggcccgcttcagcaaatatgaggagtacatcaggaagctgaaggccggggagcagctgtcctggccagcccccagcaccaagacagaggagcgggtgggcaaggaggtggtgggcaccctgcccggcctgcggctgcccagcagcacagcccacctggagaccaaggccaccatcctgcccctgcccagccacagctctgtgcagatgcagaacctggtggcccgggccagcaaatatgacttcttcatccagaagctgaagacaggagagaacctgcggccccagaatggcagcacctacaagaagcccagcaaatatgacctggagaatgtgaagtacctgcacctgttcaagccaggagagggcagcccagacatgggcggggccatcgccttcaagacaggcaaggtgggccggcccagcaaatatgatgtgcggggcatccagaagccaggccctgccaaggtgccccccacccccagcctggccccagcccccctggcctctgtgcccagcgcccccagcgcccctggccctggccctgagcccccagccagcctgtccttcaacaccccagagtacctgaagagcaccttcagcaagacagacagcatcaccaccggcaccgtgtccacagtgaagaatggcctgcccacagacaagccagctgtgacagaagatgtgaacatctaccagaagtacatcgcccgcttcagcggcagccagcactgcggccacatccactgtgcctaccagtaccgggagcactaccactgcctggaccctgagtgcaactaccagcgcttcaccagcaagcaggatgtgatccgccactacaacatgcacaagaagagggacaacagcctgcagcacggcttcatgaggttcagccccctggatgactgcagcgtgtactaccacggctgccacctgaatggcaagagcacccactaccactgcatgcaggtgggctgcaacaaggtgtacaccagcaccagtgatgtgatgacccatgagaacttccacaagaagaacacccagctgatcaatgatggcttccagcgcttccgggccacagaggactgtggcacagctgactgccagttctacggccagaagaccacccacttccactgcagaagacctggctgcaccttcaccttcaagaacaagtgtgacatcgagaagcacaagagctaccacatcaaggatgatgcctatgccaaggatggcttcaagaagttctacaagtatgaggagtgcaagtatgagggctgtgtgtacagcaaggccaccaaccacttccactgcatccgggccggctgcggcttcaccttcaccagcaccagccagatgaccagccacaagaggaagcatgagcggcggcacatccgcagcagcggggccctgggcctgccccccagcctgctgggcgccaaggacacagaacatgaggagagcagcaatgatgacctggtggacttcagcgccctgagcagcaagaacagcagcctgagcgccagccccaccagccagcagagcagcgccagcctggccgccgccacagctgccacagaggccggccccagcgccaccaagccacccaacagcaagatcagcggcctgctgccccagggcctgcccggcagcatccccctggccctggccctgagcaacagcggcctgcccacccccaccccctacttccccatcctggccggccggggcagcaccagcctgcctgtgggcacccccagcctgctgggcgctgtgagcagcggcagcgctgccagcgccaccccagacacccccaccctggtggccagcggggccggggacagcgcccctgtggccgccgcctctgtgcctgcccccccagccagcatcatggagcgcatcagcgccagcaagggcctcatcagccccatgatggcccggctggccgctgctgccctgaagcccagcgccacctttgatcctggcagcggccagcaggtgaccccagcccgcttccccccagcccaggtgaagccagagcctggagagagcactggagcccctggcccccatgaggccagccaggacaggagcctggacctgactgtgaaggagcccagcaatgaaagcaatggacatgctgtgcctgccaacagcagcctgctgagcagcctgatgaacaagatgagccagggcaaccctggcctgggcagcctgctgaacatcaaggccgaggccgagggcagccctgctgctgagcccagccccttcctgggcaaggctgtgaaggccctggtgcaggagaagctggccgagccctggaaggtgtacctgcggagatttggcaccaaggacttctgtgatggccagtgtgacttcctgcacaaggcccacttccactgtgtggtggaggagtgtggggccctcttcagcaccctggatggagccatcaagcacgccaacttccacttcagaacagagggcggggccgccaagggcaacacagaagctgccttccctgccagcgctgctgagaccaagccacccatggcccccagcagcccccctgtgccccctgtgaccacagccaccgtgagcagcctggagggccctgcccccagccctgcctctgtgcccagcacccccaccctgctggcctggaagcagctggccagcaccatcccccagatgccccagatcccagcctctgtgccccacctgcctgccagccccctggccaccaccagcctggagaatgccaagccccaggtgaagccaggcttcctgcagttccaggagaatgacccctgcctggccacagactgcaagtatgccaacaagttccacttccactgcctgtttggaaactgcaagtatgtgtgcaagaccagcggcaaggccgagagccactgcctggaccacatcaaccccaacaacaacctggtgaatgtgcgggaccagtttgcctactacagcctgcagtgcctgtgccccaaccagcactgtgagttcaggatgaggggccactaccactgcctgaggacaggctgctactttgtgaccaacatcaccaccaagctgccctggcacatcaagaagcatgagaaggccgagaggagagctgccaacggcttcaagtacttcaccaagcgggaggagtgtggccgcctgggctgcaagtacaaccaggtgaacagccacttccactgcatccgggagggctgccagttctccttcctgctgaagcaccagatgaccagccacgccaggaagcacatgaggaggatgctgggcaagaactttgacagagtgccccccagccagggccccccaggcctgatggatgctgagacagatgagtgcatggactacacaggctgcagccctggggccatgagcagcgagagcagcaccatggacaggagctgcagcagcacccctgtgggcaatgaaagcacagctgctggcaacaccatctccatgcccacagccagcggggccaagaagcgcttctggatcatcgaggacatgagcccctttgggaagaggaggaagacagccagcagcaggaagatgctggatgagggcatgatgctggagggcttcagaagatttgacctgtatgaggactgcaaggatgctgcctgccagttcagcctgaaggtgacccactaccactgcacccgggagaactgtggctacaagttctgtggccgcacccacatgtacaagcacgcccagcaccacgacagagtggacaacctggtgctggatgacttcaagcgcttcaaggccagcctgagctgccactttgctgactgccccttcagcggcaccagcacccacttccactgcctgcgctgccgcttccgctgcacagacagcaccaaggtgacagcccacaggaagcaccacggcaagcaggatgtgatctctgctgctggcttctgccagttcagcagcagcgctgactgtgctgtgcctgactgcaagtacaagctgaagtgcagccacttccactgcaccttccctggctgccgccacacagtggtgggcatgagccagatggacagccacaagaggaagcatgagaagcaggagcggggggagcctgctgctgagggccctgcccctggcccccccatcagcctggatggcagcctgagcctgggcgctgagcccggcagcctgctcttcctgcagagcgctgctgctggcctgggcctggccctgggagatgctggggaccccggccccccagatgctgctgcccctggcccccgggagggcgctgctgctgctgctgctgctgctggggagagcagccaggaggatgaggaggaggagctggagctgcctgaggaggaggccgaggatgatgaagatgaagatgatgatgaagatgatgatgatgaagatgatgatgaagatgatgatgatgaggacctgaggacagattctgaggagagcctgcctgaggccgctgctgaggccgccggggccggggcccggaccccagccctggccgccctggccgccctgggcgcccctggccctgcccccacagctgccagcagcccctag

SEQ ID NO: 146434 - DNA, 4332 bp, synthetic construct
  misc_feature 1..4332: note = Description of Artificial Sequence: Synthetic coding sequence
  source 1..4332: mol_type = other DNA
caggagctggaggccgccctgcacagagatgatgtggagttcatcagtgacctgattgcctgcctgctgcagggctgctaccagaggcgggacatcaccccccagaccttccacagctacctggaggacatcatcaactaccgctgggagctggaggagggcaagcccaaccccctgcgggaggccagcttccaggacctgcccctgcggaccagggtggagatcctgcaccggctgtgtgactaccgcctggatgctgatgatgtgtttgacctgctgaagggcctggatgctgacagcctgcgggtggagcccctgggggaggacaacagcggggccctgtactggtacttctacggcaccaggatgtacaaggaggaccctgtgcagggcaagagcaatggagagctgagcctgagccgggagagcgagggccagaagaatgtgagcagcatccctgggaagacaggcaagagaagaggccggccccccaagaggaagaagctgcaggaggagatcctgctgtctgagaagcaggaggagaacagcctggccagcgagccccagaccaggcatggcagccagggccctggccagggcacctggtggctgctgtgccagacagaggaggagtggaggcaggtgacagagagcttccgggagaggaccagcctgcgggagcggcagctgtacaagctgctgtctgaggacttcctgcctgagatctgcaacatgattgcccagaagggcaagaggccccagaggaccaaggccgagctgcacccccgctggatgtctgaccacctgagcatcaagcctgtgaagcaggaggagacccctgtgctgaccagaattgagaagcagaagaggaaggaggaggaggaggagcggcagatcctgctggccgtgcagaagaaggagcaggagcagatgctgaaggaggagaggaagcgggagctggaggagaaggtgaaggctgtggagggcatgtgcagcgtgcgggtggtgtggaggggggcctgcctgagcaccagcaggcctgtggaccgggccaagaggaggaagctgcgggaggagcgggcctggctgctggcccagggcaaggagctgcccccagagctgagccacctggaccccaacagccccatgagggaggagaagaagaccaaggacctgtttgagctggatgatgacttcaccgccatgtacaaggtgctggatgtggtgaaggcccacaaggacagctggcccttcctggagcctgtggatgagagctatgcccccaactactaccagatcatcaaggcccccatggacatcagctccatggagaagaagctgaatggaggcctgtactgcaccaaggaggagtttgtgaatgacatgaagaccatgttcaggaactgcaggaagtacaatggagagagcagcgagtacaccaagatgtctgacaacctggagcgctgcttccaccgggccatgatgaagcacttccctggagaagatggagacacagatgaggagttctggatcagagaagatgagaagcgggagaagaggaggagccgggccggccgcagcggcggcagccacgtgtggaccaggagccgggaccctgagggcagcagcaggaagcagcagcccatggagaatggaggcaagagcctgccccccacccggcgggcccccagcagtggagatgaccagagcagcagcagcacccagcccccccgggaggtgggcaccagcaatggccggggcttcagccaccccctgcactgcggcggcacccccagccaggcccccttcctgaaccagatgaggcctgctgtgcccggcaccttcggccccctgcggggcagtgaccctgccaccctgtatggcagcagcggcgtgcctgagccccaccctggagagcctgtgcagcagaggcagcccttcaccatgcagccccctgtgggcatcaacagcctgcggggcccccggctgggcaccccagaggagaagcagatgtgtggcggcctgacccacctgagcaacatgggcccccaccctggcagcctgcagctgggccagatcagcggccccagccaggacggctccatgtatgccccagcccagttccagcccggcttcatcccccccaggcatggaggagccccagcccggcccccagacttccctgagagcagcgagatcccccccagccacatgtaccgcagctacaagtacctgaacagagtgcacagcgctgtgtggaatggaaatcatggagccaccaaccagggccccctgggcccagatgagaagccccacctgggccctggccccagccaccagcccaggaccctgggccacgtgatggacagccgggtgatgaggcctcctgtgccccccaaccagtggacagagcagagcggcttcctgccccatggagtgcccagcagcggctacatgaggcctccctgcaagtctgctggccaccggctgcagcccccacctgtgcctgcccccagcagcctgtttggagccccagcccaggccctgcggggcgtgcagggcggggacagcatgatggacagccctgagatgattgccatgcagcagctgagcagccgggtgtgccccccaggagtgccctaccacccccaccagcctgcccacccccggctgcccggccccttcccccaggtggcccaccccatgtctgtgacagtgtctgcccccaagccagccctgggcaaccctggccgggccccagaaaattctgaggcccaggagccagaaaatgaccaggccgagcccctgcccggcctggaggagaagcccccaggagtgggcaccagcgagggcgtgtacctgacccagctgccccaccccaccccacccctgcagacagactgcacccggcagagcagcccccaggagcgggagaccgtgggccctgagctgaagagcagcagcagcgagagcgctgacaactgcaaggccatgaagggcaagaacccctggcccagcgacagcagctacccaggccctgctgcccagggctgtgtgcgggacctgagcacagtggccgacagaggagccctgtctgaaaatggagtgattggagaggccagcccctgtggcagcgagggcaagggcctgggcagcagcggcagcgagaagctgctgtgcccccggggccgcaccctgcaggagaccatgccctgcaccggccagaatgctgccaccccacccagcacagatcctggcctgaccggcggcaccgtgtcccagttcccccccctgtacatgcctggcctggagtaccccaacagcgctgcccactaccacatcagccctggcctgcagggcgtgggccctgtgatgggcggcaagagccctgccagccacccccagcacttccccccccggggcttccagagcaaccacccccacagcggcggcttcccccgctacagaccaccccagggcatgagatacagctaccaccccccaccccagcccagctaccaccactaccagaggaccccctactatgcctgcccccagagcttcagtgactggcagaggcccctgcacccccagggcagccccagcggccccccagccagccagcccccaccacccaggagcctcttcagtgacaagaatgccatggccagcctgcagggctgtgagaccctgaatgctgccctgaccagccccaccaggatggatgctgtggccgccaaggtgcccaatgatggccagaaccctggccctgaggaggagaagctggatgagagcatggagaggcctgagagccccaaggagttcctggacctggacaaccacaatgctgccaccaagaggcagagcagcctgagcgccagcgagtacctgtatggcaccccaccacccctgagcagcggcatgggcttcggcagcagcgccttccccccccacagcgtgatgctgcagacaggccccccctacaccccccagaggcctgccagccacttccagccccgggcctacagcagccctgtggccgccctgcccccccaccaccctggggccacccagcccaacggcctgagccaggagggccccatctaccgctgccaggaggagggcctgggccacttccaggccgtgatgatggagcagatcggcaccaggagcggcatccggggccccttccaggagatgtaccggcccagcggcatgcagatgcaccctgtgcagagccaggccagcttccccaagacccccacagctgccaccagccaggaggaggtgcccccccacaagccacccaccctgcccctggaccagagctag

SEQ ID NO: 146435 - DNA, 1371 bp, synthetic construct
  misc_feature 1..1371: note = Description of Artificial Sequence: Synthetic coding sequence
  source 1..1371: mol_type = other DNA
gagctggaggccgccctgcacagagatgatgtggagttcatcagtgacctgattgcctgcctgctgcagggctgctaccagaggcgggacatcaccccccagaccttccacagctacctggaggacatcatcaactaccgctgggagctggaggagggcaagcccaaccccctgcgggaggccagcttccaggacctgcccctgcggaccagggtggagatcctgcaccggctgtgtgactaccgcctggatgctgatgatgtgtttgacctgctgaagggcctggatgctgacagcctgcgggtggagcccctgggggaggacaacagcggggccctgtactggtacttctacggcaccaggatgtacaaggaggaccctgtgcagggcaagagcaatggagagctgagcctgagccgggagagcgagggccagaagaatgtgagcagcatccctgggaagacaggcaagaggcggggccggccccccaagaggaagaagctgcaggaggagatcctgctgtctgagaagcaggaggagaacagcctggccagcgagccccagaccaggcatggcagccagggccctggccagggcacctggtggctgctgtgccagacagaggaggagtggaggcaggtgacagagagcttccgggagaggaccagcctgcgggagcggcagctgtacaagctgctgtctgaggacttcctgcctgagatctgcaacatgattgcccagaaggagacccctgtgctgacccgcatcgagaagcagaagaggaaggaggaggaggaggagcggcagatcctgctggccgtgcagaagaaggagcaggagcagatgctgaaggaggagaggaagcgggagctggaggagaaggtgaaggctgtggagggcatgtgcagcgtgcgggtggtgtggaggggggcctgcctgagcaccagcaggcctgtggaccgggccaagaggaggaagctgcgggaggagcgggcctggctgctggcccagggcaaggagctgcccccagagctgagccacctggaccccaacagccccatgagggaggagaagaagaccaaggacctgtttgagctggatgatgacttcaccgccatgtacaaggtgctggatgtggtgaaggcccacaaggacagctggcccttcctggagcctgtggatgagagctatgcccccaactactaccagatcatcaaggcccccatggacatcagctccatggagaagaagctgaatggaggcctgtactgcaccaaggaggagtttgtgaatgacatgaagaccatgttcaggaactgcaggaagtacaacggggagagcagcggcaagcagggccgcagcctgtgctag

SEQ ID NO: 146436 - DNA, 1584 bp, synthetic construct
  misc_feature 1..1584: note = Description of Artificial Sequence: Synthetic coding sequence
  source 1..1584: mol_type = other DNA
atggctgacagccgggaccctgccagtgaccagatgcagcactggaaggagcagagagctgcccagaaggcagatgtgctgaccactggagctggcaaccctgtgggggacaagctgaatgtcatcaccgtgggcccccggggccccctgctggtgcaggatgtggtgttcacagatgagatggcccactttgaccgggagcgcatccctgagcgggtggtgcacgccaagggagctggggccttcggctactttgaggtgacccatgacatcaccaagtacagcaaggccaaggtgtttgagcacatcggcaagaagacccccatcgctgtgcgcttcagcacagtggccggggagagcggcagcgctgacacagtgcgggacccccggggctttgctgtgaagttctacacagaagatggcaactgggacctggtgggcaacaacacccccatcttcttcatccgggaccccatcctcttccccagcttcatccacagccagaagaggaacccccagacccacctgaaggaccctgacatggtgtgggacttctggagcctgcggcctgagagcctgcaccaggtgtccttcctgttcagtgaccggggcatcccagatggccaccgccacatgaatggctacggcagccacaccttcaagctggtgaatgccaacggggaggccgtgtactgcaagttccactacaagacagaccagggcatcaagaacctgtctgtggaggatgctgcccggctgagccaggaggaccctgactatggcatccgggacctcttcaatgccatcgccaccgggaagtaccccagctggaccttctacatccaggtgatgaccttcaaccaggccgagaccttccccttcaacccctttgacctgaccaaggtgtggccccacaaggactaccccctcatccctgtgggcaagctggtgctgaacagaaatcctgtgaactactttgctgaggtggagcagatcgcctttgaccccagcaacatgcctcctggcatcgaggccagcccagacaagatgctgcagggccgcctgtttgcctacccagacacccaccgccaccggctgggccccaactacctgcacatccctgtgaactgcccctaccgggcccgggtggccaactaccagagagatggccccatgtgcatgcaggacaaccagggcggggcccccaactactaccccaacagctttggagcccctgagcagcagcccagcgccctggagcacagcatccagtacagcggggaggtgcggcgcttcaacacagccaatgatgacaacgtgacccaggtgcgggccttctacgtgaatgtgctgaatgaggagcagaggaagaggctgtgtgaaaatattgctggccacctgaaggatgcccagatcttcatccagaagaaggctgtgaagaacttcacagaggtgcacccagactatggcagccacatccaggccctgctggacaagtacaatgctgagaagcccaagaatgccatccacacctttgtgcagagcggcagccacctggccgcccgggagaaggccaacctgtag

SEQ ID NO: 146437 - DNA, 816 bp, synthetic construct
  misc_feature 1..816: note = Description of Artificial Sequence: Synthetic coding sequence
  source 1..816: mol_type = other DNA
atgcctgaggccccacccctgctgctggccgctgtgctgctgggcctggtgctgctggtggtgctgctgctgctgctgcggcactggggctggggcctgtgcctgattggctggaatgagttcatcctgcagcccatccacaacctgctgatgggagacaccaaggagcagaggatcctgaaccacgtgctgcagcacgccgagcctggaaatgcccagagcgtgctggaggccatcgacacctactgtgagcagaaggagtgggccatgaatgtgggggacaagaagggcaagatcgtggatgctgtgatccaggagcaccagcccagcgtgctgctggagctgggcgcctactgcggctacagcgctgtgaggatggcccggctgctgagccctggggcccggctcatcaccatcgagatcaacccagactgtgccgccatcacccagaggatggtggactttgctggggtgaaggacaaggtgaccctggtggtgggcgccagccaggacatcatcccccagctgaagaagaagtatgatgtggacaccctggacatggtgttcctggaccactggaaggaccgctacctgcctgacaccctgctgctggaggagtgtggcctgctgaggaagggcaccgtgctgctggccgacaacgtcatctgccctggggccccagacttcctggcccacgtgcggggcagcagctgctttgagtgcacccactaccagagcttcctggagtaccgggaggtggtggatggcctggagaaggccatctacaagggccctggcagcgaggccggcccctag

SEQ ID NO: 146438 - DNA, 816 bp, synthetic construct; identical to SEQ ID NO: 146437
  misc_feature 1..816: note = Description of Artificial Sequence: Synthetic coding sequence
  source 1..816: mol_type = other DNA

SEQ ID NO: 146439 - DNA, 816 bp, synthetic construct; identical to SEQ ID NO: 146437
  misc_feature 1..816: note = Description of Artificial Sequence: Synthetic coding sequence
  source 1..816: mol_type = other DNA

SEQ ID NO: 146440 - DNA, 666 bp, synthetic construct
  misc_feature 1..666: note = Description of Artificial Sequence: Synthetic coding sequence
  source 1..666: mol_type = other DNA
atgggagacaccaaggagcagaggatcctgaaccacgtgctgcagcacgccgagcctggaaatgcccagagcgtgctggaggccatcgacacctactgtgagcagaaggagtgggccatgaatgtgggggacaagaagggcaagatcgtggatgctgtgatccaggagcaccagcccagcgtgctgctggagctgggcgcctactgcggctacagcgctgtgaggatggcccggctgctgagccctggggcccggctcatcaccatcgagatcaacccagactgtgccgccatcacccagaggatggtggactttgctggggtgaaggacaaggtgaccctggtggtgggcgccagccaggacatcatcccccagctgaagaagaagtatgatgtggacaccctggacatggtgttcctggaccactggaaggaccgctacctgcctgacaccctgctgctggaggagtgtggcctgctgaggaagggcaccgtgctgctggccgacaacgtcatctgccctggggccccagacttcctggcccacgtgcggggcagcagctgctttgagtgcacccactaccagagcttcctggagtaccgggaggtggtggatggcctggagaaggccatctacaagggccctggcagcgaggccggcccctag

SEQ ID NO: 146441 - DNA, 672 bp, synthetic construct
  misc_feature 1..672: note = Description of Artificial Sequence: Synthetic coding sequence
  source 1..672: mol_type = other DNA
atgcctgaggccccacccctgctgctggccgctgtgctgctgggcctggtgctgctggtggtgctgctgctgctgctgcggcactggggctggggcctgtgcctgattggctggaatgagttcatcctgcagcccatccacaacctgctgatgggagacaccaaggagcagaggatcctgaaccacgtgctgcagcacgccgagcctggaaatgcccagagcgtgctggaggccatcgacacctactgtgagcagaaggagtgggccatgaatgtgggggacaagaagggcaagatcgtggatgctgtgatccaggagcaccagcccagcgtgctgctggagctgggcgcctactgcggctacagcgctgtgaggatggcccggctgctgagccctggggcccggctcatcaccatcgagatcaacccagactgtgccgccatcacccagaggatggtggactttgctggggtgaaggacaaggtgaccctggtggtgggcgccagccaggacatcatcccccagctgaagaagaagtatgatgtggacaccctggacatggtgttcctggaccactggaaggaccgctacctgcctgacaccctgctgctggaggagtgtggcctgctgaggaagggcaccgtgctgctggccgacaacgtcatctgctag

SEQ ID NO: 146442 - DNA, 666 bp, synthetic construct; identical to SEQ ID NO: 146440
  misc_feature 1..666: note = Description of Artificial Sequence: Synthetic coding sequence
  source 1..666: mol_type = other DNA

SEQ ID NO: 146443 - DNA, 2664 bp, synthetic construct
  misc_feature 1..2664: note = Description of Artificial Sequence: Synthetic coding sequence
  source 1..2664: mol_type = other DNA
atggccaacggcaccctgacccggcggcaccagaatggccgctttgtgggagatgctgacctggagcggcagaagttcagtgacctgaagctgaatggcccccaggaccacagccacctgctgtacagcaccatccccaggatgcaggagcccggccagatcgtggagacctacacagaagaagatcctgagggcgccatgtctgtggtgtctgtggagaccagtgatgatggcaccaccaggagaacagagaccaccgtgaagaaggtggtgaagacagtgaccaccaggacagtgcagcctgtggccatgggcccagatggcctgcctgtggatgccagctctgtgagcaacaactacatccagaccctgggccgggacttcaggaagaatggaaatggaggccctggcccctacgtgggccaggccggcacagccaccctgcccaggaacttccactaccccccagatggctacagccgccactatgaagatggctacccaggcggcagtgacaactacggcagcctgagccgggtgaccagaattgaggagcgctaccggcccagcatggagggctaccgggcccccagccggcaggatgtgtatggcccccagccccaggtgcgggtgggcggcagctctgtggacctgcaccgcttccaccctgagccctacggcctggaggatgaccagaggtccatgggctatgatgacctggactatggcatgatgtctgactatggaacagcccggaggacaggcacccccagcgacccccggcggcggctgcggagctatgaggacatgattggagaggaggtgcccagcgaccagtactactgggcccccctggcccagcacgagcggggcagcctggccagcctggacagcctgaggaaaggaggccccccaccacccaactggaggcagcctgagctgcctgaggtgattgccatgctgggcttccggctggatgctgtgaagagcaatgctgctgcctacctgcagcacctgtgctacagaaatgacaaggtgaagacagatgtgaggaagctgaagggcatccctgtgctggtgggcctgctggaccaccccaagaaggaggtgcacctgggcgcctgtggggccctgaagaacatcagctttggccgggaccaggacaacaagatcgccatcaagaactgtgatggagtgcctgccctggtgcggctgctgaggaaggcccgggacatggacctgacagaggtgatcaccggcaccctgtggaacctgagcagccatgacagcatcaagatggagatcgtggaccacgccctgcacgccctgacagatgaagtcatcatcccccacagcggctgggagcgggagcccaatgaagactgcaagcccaggcacatcgagtgggagagcgtgctgaccaacacagctggctgcctgagaaatgtgtcctctgagaggtctgaggcccggaggaagctgcgggagtgtgatggcctggtggatgccctgatcttcatcgtgcaggccgagatcggccagaaggacagcgacagcaagctggtggagaactgtgtgtgcctgctgaggaacctgagctaccaggtgcaccgggagatcccccaggccgagcgctaccaggaggccgcccccaacgtggccaacaacacaggcccccatgctgccagctgctttggagccaagaagggcaagggcaagaagcccattgaagatcctgccaatgacacagtggacttccccaagaggaccagccctgcccggggctatgagctgctcttccagcctgaggtggtgcgcatctacatcagcctgctgaaggagagcaagaccccagccatcctggaggccagcgctggggccatccagaacctgtgtgccggccgctggacctacggccgctacatccgcagcgccctgcggcaggagaaggccctgagcgccatcgctgacctgctgaccaatgaacatgagcgggtggtgaaggccgccagcggggccctgaggaacctggccgtggatgccaggaacaaggagctgattggcaagcacgccatccccaacctggtgaagaacctgcccggcggccagcagaacagctcctggaacttcagcgaggacaccgtcatcagcatcctgaacaccatcaatgaggtgattgctgagaacctggaggccgccaagaagctgcgggagacccagggcatcgagaagctggtgctgatcaacaagagcggcaacagaagtgagaaggaggtgcgggccgccgccctggtgctgcagaccatctggggctacaaggagctgaggaagcccctggagaaggagggctggaagaagagtgacttccaggtgaacctgaacaatgccagccgcagccagagcagccacagctatgatgacagcaccctgcccctgattgacaggaaccagaagagtgacaacaactacagcaccccaaatgaaagaggagaccacaacagaaccctggacagaagtggggacctgggggacatggagcccctgaagggcaccacccccctgatgcaggatgagggccaggagagcctggaggaggagctggatgtgctggtgctggatgatgagggcggccaggtgtcctaccccagcatgcagaagatctag

SEQ ID NO: 146444 - DNA, 1755 bp, synthetic construct
  misc_feature 1..1755: note = Description of Artificial Sequence: Synthetic coding sequence
  source 1..1755: mol_type = other DNA
atggatggctggaggcggcccctgcagagcgtgggcaaggtgtgtgagaagaacatgaagaccagcgagatgcacaccatgtctggggcccagacaggcaggaaggagaagggggaccccctgaacatcgccatcgacaagatgaccaagaagacccgggacctgcggcggcagctgaggaaggctgtgatggaccacatcagtgacagcttcctggagaccaacgtgcccctgctggtgctgattgaggccgccaagtctggaaatgagaaggaggtgaaggagtatgcccaggtgttccgggagcacgccaacaagctggtggaggtggccaacctggcctgcagcatcagcaacaatgaggagggcgtgaagctggtgaggatggccgccacccagattgacagcctgtgcccccaggtgatcaatgctgccctgaccctggccgcccggccccagagcaaggtggcccaggacaacatggatgtgttcaaggaccagtgggagaagcaggtgcgggtgctgacagaggccgtggatgacatcacctctgtggatgacttcctgtctgtgtctgagaaccacatcctggaggatgtgaacaagtgtgtgattgccctgcaggagggagatgtggacaccctggacagaacagctggggccatccggggccgggccgcccgggtcatccacatcatcaatgctgagatggagaactatgaggccggcgtgtacacagagaaggtgctggaggccaccaagctgctgtctgaaacagtgatgcccaggtttgctgagcaggtggaggtggccatcgaggccctgagcgccaacgtgccccagccctttgaagaaaatgagttcattgatgccagccggctggtgtatgatggagtgcgggacatcaggaaggctgtgctgatgatccgcaccccagaggagctggaggatgacagcgactttgagcaggaggactatgatgtgcgcagcaggacctctgtgcagacagaagatgaccagctgattgctggccagagcgcccgggccatcatggcccagctgccccaggaggagaaggccaagattgctgagcaggtggagatcttccaccaggagaagagcaagctggatgctgaggtggccaagtgggatgacagcggaaatgacatcatcgtgctggccaagcagatgtgcatgatcatgatggagatgacagacttcacccggggcaagggccccctgaagaacaccagtgatgtgatcaatgctgccaagaagattgctgaggccggcagcaggatggacaagctggcccgggctgtggccgaccagtgcccagacagcgcctgcaagcaggacctgctggcctacctgcagagaattgccctgtactgccaccagctgaacatctgcagcaaggtgaaggccgaggtgcagaacctgggcggggagctgattgtgtctggcctggacagcgccaccagcctcatccaggccgccaagaacctgatgaatgctgtggtgctgactgtgaaggccagctatgtggccagcaccaagtaccagaaggtgtatggaacagctgctgtgaacagccctgtggtgtcctggaagatgaaggcccctgagaagaagcccctggtgaagcgggagaagccagaggagttccagaccagggtgagaagaggcagccagaagaagcacatcagccctgtgcaggccctgtctgagttcaaggccatggacagcttctag

SEQ ID NO: 146445 - DNA, 2820 bp, synthetic construct
  misc_feature 1..2820: note = Description of Artificial Sequence: Synthetic coding sequence
  source 1..2820: mol_type = other DNA
atgagcggcctcatctgcctgcagtatggcctgtggcacggccagaagattgactttggaggcccccggcggctgctgcagaggaacagaggagagggctccatgaccagcgccaccagccccatcatcctgaagtgggaccccaagagcctggagatccgcaccctgactgtggagcggctgctggagcccctggtgacccaggtgaccaccctggtgaacaccagcaacaagggccccagcggcaagaagaagggccgcagcaagaaggcccacgtgctggccgcctctgtggagcaggccacccagaacttcctggagaagggggagcagatcgccaaggagagccaggacctgaaggaggagctggtggccgctgtggaggatgtgaggaagcagggcgagaccatgagaattgccagcagcgagtttgctgatgacccctgcagctctgtgaagaggggcaccatggtgcgggccgcccgggccctgctgtctgctgtgacccggctgctgatcctggccgacatggctgatgtgatgaggctgctgagccacctgaagatcgtggaggaggccctggaggccgtgaagaatgccaccaatgagcaggacctggccaaccgcttcaaggagtttgggaaggagatggtgaagctgaactacgtggccgcccggcggcagcaggagctgaaggacccccactgcagagatgagatggccgccgcccggggggccctgaagaagaatgccaccatgctgtacacagccagccaggccttcctgcggcacccagatgtggccgccacccgggccaacagagattatgtgttcaagcaggtgcaggaggccatcgccggcatcagcaatgctgcccaggccaccagccccacagatgaggccaagggccacactggaattggagagctggccgccgccctgaatgaatttgacaacaagatcatcctggaccccatgaccttcagcgaggcccgcttccggcccagcctggaggagcggctggagagcatcatcagcggggccgccctgatggctgacagcagctgcaccagagatgacagaagagaaagaattgtggccgagtgcaatgctgtgcggcaggccctgcaggacctgctgtctgagtacatgaacaacacaggcaggaaggagaagggggaccccctgaacatcgccatcgacaagatgaccaagaagacccgggacctgcggcggcagctgaggaaggctgtgatggaccacatcagtgacagcttcctggagaccaacgtgcccctgctggtgctgattgaagctgccaagtctggaaatgagaaggaggtgaaggagtatgcccaggtgttccgggagcacgccaacaagctggtggaggtggccaacctggcctgcagcatcagcaacaatgaggagggcgtgaagctggtgaggatggccgccacccagattgacagcctgtgcccccaggtgatcaatgctgccctgaccctggccgcccggccccagagcaaggtggcccaggacaacatggatgtgttcaaggaccagtgggagaagcaggtgcgggtgctgacagaagctgtggatgacatcacctctgtggatgacttcctgtctgtgtctgagaaccacatcctggaggatgtgaacaagtgtgtgattgccctgcaggagggagatgtggacaccctggacagaacagctggggccatccggggccgggccgcccgggtcatccacatcatcaatgctgagatggagaactatgaagctggggtgtacacagagaaggtgctggaggccaccaagctgctgtctgagaccgtgatgcccaggtttgctgagcaggtggaggtggccatcgaggccctgagcgccaacgtgccccagccctttgaggagaatgagttcattgatgccagccggctggtgtatgatggagtgcgggacatcaggaaggctgtgctgatgatccgcaccccagaggagctggaggatgacagcgactttgagcaggaggactatgatgtgcgcagcaggacctctgtgcagacagaagatgaccagctgattgctggccagagcgcccgggccatcatggcccagctgccccaggaggagaaggccaagattgctgagcaggtggagatcttccaccaggagaagagcaagctggatgctgaggtggccaagtgggatgattctggaaatgacatcatcgtgctggccaagcagatgtgcatgatcatgatggagatgacagacttcacccggggcaagggccccctgaagaacaccagtgatgtgatcaatgctgccaagaagattgctgaggccggcagcaggatggacaagctggcccgggctgtggccgaccagtgcccagattctgcctgcaagcaggacctgctggcctacctgcagagaattgccctgtactgccaccagctgaacatctgcagcaaggtgaaggccgaggtgcagaacctgggcggggagctgattgtgtctggcctggacagcgccaccagcctcatccaggccgccaagaacctgatgaatgctgtggtgctgactgtgaaggccagctatgtggccagcaccaagtaccagaaggtgtatggaacagctgctgtgaacagccctgtggtgtcctggaagatgaaggcccctgagaagaagcccctggtgaagcgggagaagccagaggagttccagaccagggtgcggcggggcagccagaagaagcacatcagccctgtgcaggccctgtctgagttcaaggccatggacagcttctag

SEQ ID NO: 146446 - DNA, 2862 bp, synthetic construct
  misc_feature 1..2862: note = Description of Artificial Sequence: Synthetic coding sequence
  source 1..2862: mol_type = other DNA
atgaccagcgccaccagccccatcatcctgaagtgggaccccaagagcctggagatccgcaccctgactgtggagcggctgctggagcccctggtgacccaggtgaccaccctggtgaacaccagcaacaagggccccagcggcaagaagaagggccgcagcaagaaggcccacgtgctggccgcctctgtggagcaggccacccagaacttcctggagaagggggagcagatcgccaaggagagccaggacctgaaggaggagctggtggccgctgtggaggatgtgaggaagcagggcgagaccatgagaattgccagcagcgagtttgctgatgacccctgcagctctgtgaagaggggcaccatggtgcgggccgcccgggccctgctgtctgctgtgacccggctgctgatcctggccgacatggctgatgtgatgaggctgctgagccacctgaagatcgtggaggaggccctggaggccgtgaagaatgccaccaatgagcaggacctggccaaccgcttcaaggagtttgggaaggagatggtgaagctgaactacgtggccgcccggcggcagcaggagctgaaggacccccactgcagagatgagatggccgccgcccggggggccctgaagaagaatgccaccatgctgtacacagccagccaggccttcctgcggcacccagatgtggccgccacccgggccaacagagattatgtgttcaagcaggtgcaggaggccatcgccggcatcagcaatgctgcccaggccaccagccccacagatgaggccaagggccacactggaattggagagctggccgccgccctgaatgaatttgacaacaagatcatcctggaccccatgaccttcagcgaggcccgcttccggcccagcctggaggagcggctggagagcatcatcagcggggccgccctgatggctgacagcagctgcaccagagatgacagaagagaaagaattgtggccgagtgcaatgctgtgcggcaggccctgcaggacctgctgtctgagtacatgaacaacacaggcaggaaggagaagggggaccccctgaacatcgccatcgacaagatgaccaagaagacccgggacctgcggcggcagctgaggaaggctgtgatggaccacatcagtgacagcttcctggagaccaacgtgcccctgctggtgctgattgaagctgccaagtctggaaatgagaaggaggtgaaggagtatgcccaggtgttccgggagcacgccaacaagctggtggaggtggccaacctggcctgcagcatcagcaacaatgaggagggcgtgaagctggtgaggatggccgccacccagattgacagcctgtgcccccaggtgatcaatgctgccctgaccctggccgcccggccccagagcaaggtggcccaggacaacatggatgtgttcaaggaccagtgggagaagcaggtgcgggtgctgacagaagctgtggatgacatcacctctgtggatgacttcctgtctgtgtctgagaaccacatcctggaggatgtgaacaagtgtgtgattgccctgcaggagggagatgtggacaccctggacagaacagctggggccatccggggccgggccgcccgggtcatccacatcatcaatgctgagatggagaactatgaagctggggtgtacacagagaaggtgctggaggccaccaagctgctgtctgagaccgtgatgcccaggtttgctgagcaggtggaggtggccatcgaggccctgagcgccaacgtgccccagccctttgaggagaatgagttcattgatgccagccggctggtgtatgatggagtgcgggacatcaggaaggctgtgctgatgatccgcaccccagaggagctggaggatgacagcgactttgagcaggaggactatgatgtgcgcagcaggacctctgtgcagacagaagatgaccagctgattgctggccagagcgcccgggccatcatggcccagctgccccaggaggagaaggccaagattgctgagcaggtggagatcttccaccaggagaagagcaagctggatgctgaggtggccaagtgggatgattctggaaatgacatcatcgtgctggccaagcagatgtgcatgatcatgatggagatgacagacttcacccggggcaagggccccctgaagaacaccagtgatgtgatcaatgctgccaagaagattgctgaggccggcagcaggatggacaagctggcccgggctgtggccgaccagtgcccagattctgcctgcaagcaggacctgctggcctacctgcagagaattgccctgtactgccaccagctgaacatctgcagcaaggtgaaggccgaggtgcagaacctgggcggggagctgattgtgtctggaactggagtgcagagcaccttcaccaccttctatgaggtggactgtgatgtgattgatggcggccgggccagccagctgagcacccacctgcccacctgtgccgagggcgcccccatcggcagcggcagcagtgacagctccatgctggacagcgccaccagcctcatccaggccgccaagaacctgatgaatgctgtggtgctgactgtgaaggccagctatgtggccagcaccaagtaccagaaggtgtatggaacagctgctgtgaacagccctgtggtgtcctggaagatgaaggcccctgagaagaagcccctggtgaagcgggagaagccagaggagttccagaccagggtgcggcggggcagccagaagaagcacatcagccctgtgcaggccctgtctgagttcaaggccatggacagcttctag

SEQ ID NO: 146447 - DNA, 354 bp, synthetic construct
  misc_feature 1..354: note = Description of Artificial Sequence: Synthetic coding sequence
  source 1..354: mol_type = other DNA
atgaccagcgccaccagccccatcatcctgaagtgggaccccaagagcctggagatccgcaccctgactgtggagcggctgctggagcccctggtgacccaggtgaccaccctggtgaacaccagcaacaagggccccagcggcaagaagaagggccgcagcaagaaggcccacgtgctggccgcctctgtggagcaggccacccagaacttcctggagaagggggagcagatcgccaaggagagccaggacctgaaggaggagctggtggccgctgtggaggatgtgaggaagcagggcgagaccatgagaattgccagcagcgagtttgctgatgacccctgcagcagctag

SEQ ID NO: 146448 - DNA, 201 bp, synthetic construct
  misc_feature 1..201: note = Description of Artificial Sequence: Synthetic coding sequence
  source 1..201: mol_type = other DNA
atgaccagcgccaccagccccatcatcctgaagtgggaccccaagagcctggagatccgcaccctgactgtggagcggctgctggagcccctggtgacccaggtgaccaccctggtgaacaccagcaacaagggccccagcggcaagaagaagggccgcagcaagaaggcccacgtgctggccgcctctgtggagcagtag

SEQ ID NO: 146449 - DNA, 2718 bp, synthetic construct
  misc_feature 1..2718: note = Description of Artificial Sequence: Synthetic coding sequence
  source 1..2718: mol_type = other DNA
atgaccagcgccaccagccccatcatcctgaagtgggaccccaagagcctggagatccgcaccctgactgtggagcggctgctggagcccctggtgacccaggtgaccaccctggtgaacaccagcaacaagggccccagcggcaagaagaagggccgcagcaagaaggcccacgtgctggccgcctctgtggagcaggccacccagaacttcctggagaagggggagcagatcgccaaggagagccaggacctgaaggaggagctggtggccgctgtggaggatgtgaggaagcagggcgagaccatgagaattgccagcagcgagtttgctgatgacccctgcagctctgtgaagaggggcaccatggtgcgggccgcccgggccctgctgtctgctgtgacccggctgctgatcctggccgacatggctgatgtgatgaggctgctgagccacctgaagatcgtggaggaggccctggaggccgtgaagaatgccaccaatgagcaggacctggccaaccgcttcaaggagtttgggaaggagatggtgaagctgaactacgtggccgcccggcggcagcaggagctgaaggacccccactgcagagatgagatggccgccgcccggggggccctgaagaagaatgccaccatgctgtacacagccagccaggccttcctgcggcacccagatgtggccgccacccgggccaacagagattatgtgttcaagcaggtgcaggaggccatcgccggcatcagcaatgctgcccaggccaccagccccacagatgaggccaagggccacactggaattggagagctggccgccgccctgaatgaatttgacaacaagatcatcctggaccccatgaccttcagcgaggcccgcttccggcccagcctggaggagcggctggagagcatcatcagcggggccgccctgatggctgacagcagctgcaccagagatgacagaagagaaagaattgtggccgagtgcaatgctgtgcggcaggccctgcaggacctgctgtctgagtacatgaacaacacaggcaggaaggagaagggggaccccctgaacatcgccatcgacaagatgaccaagaagacccgggacctgcggcggcagctgaggaaggctgtgatggaccacatcagtgacagcttcctggagaccaacgtgcccctgctggtgctgattgaagctgccaagtctggaaatgagaaggaggtgaaggagtatgcccaggtgttccgggagcacgccaacaagctggtggaggtggccaacctggcctgcagcatcagcaacaatgaggagggcgtgaagctggtgaggatggccgccacccagattgacagcctgtgcccccaggtgatcaatgctgccctgaccctggccgcccggccccagagcaaggtggcccaggacaacatggatgtgttcaaggaccagtgggagaagcaggtgcgggtgctgacagaagctgtggatgacatcacctctgtggatgacttcctgtctgtgtctgagaaccacatcctggaggatgtgaacaagtgtgtgattgccctgcaggagggagatgtggacaccctggacagaacagctggggccatccggggccgggccgcccgggtcatccacatcatcaatgctgagatggagaactatgaagctggggtgtacacagagaaggtgctggaggccaccaagctgctgtctgagaccgtgatgcccaggtttgctgagcaggtggaggtggccatcgaggccctgagcgccaacgtgccccagccctttgaggagaatgagttcattgatgccagccggctggtgtatgatggagtgcgggacatcaggaaggctgtgctgatgatccgcaccccagaggagctggaggatgacagcgactttgagcaggaggactatgatgtgcgcagcaggacctctgtgcagacagaagatgaccagctgattgctggccagagcgcccgggccatcatggcccagctgccccaggaggagaaggccaagattgctgagcaggtggagatcttccaccaggagaagagcaagctggatgctgaggtggccaagtgggatgattctggaaatgacatcatcgtgctggccaagcagatgtgcatgatcatgatggagatgacagacttcacccggggcaagggccccctgaagaacaccagtgatgtgatcaatgctgccaagaagattgctgaggccggcagcaggatggacaagctggcccgggctgtggccgaccagtgcccagattctgcctgcaagcaggacctgctggcctacctgcagagaattgccctgtactgccaccagctgaacatctgcagcaaggtgaaggccgaggtgcagaacctgggcggggagctgattgtgtctggcctggacagcgccaccagcctcatccaggccgccaagaacctgatgaatgctgtggtgctgactgtgaaggccagctatgtggccagcaccaagtaccagaaggtgtatggaacagctgctgtgaacagccctgtggtgtcctggaagatgaaggcccctgagaagaagcccctggtgaagcgggagaagccagaggagttccagaccagggtgcggcggggcagccagaagaagcacatcagccctgtgcaggccctgtctgagttcaaggccatggacagcttctag

SEQ ID NO: 146450 - DNA, 2718 bp, synthetic construct; identical to SEQ ID NO: 146449
  misc_feature 1..2718: note = Description of Artificial Sequence: Synthetic coding sequence
  source 1..2718: mol_type = other DNA

SEQ ID NO: 146451 - DNA, 2583 bp, synthetic construct
  misc_feature 1..2583: note = Description of Artificial Sequence: Synthetic coding sequence
  source 1..2583: mol_type = other DNA
atgaccagcgccaccagccccatcatcctgaagtgggaccccaagagcctggagatccgcaccctgactgtggagcggctgctggagcccctggtgacccaggtgaccaccctggtgaacaccagcaacaagggccccagcggcaagaagaagggccgcagcaagaaggcccacgtgctggccgcctctgtggagcaggccacccagaacttcctggagaagggggagcagatcgccaaggagagccaggacctgaaggaggagctggtggccgctgtggaggatgtgaggaagcagggcgagaccatgagaattgccagcagcgagtttgctgatgacccctgcagctctgtgaagaggggcaccatggtgcgggccgcccgggccctgctgtctgctgtgacccggctgctgatcctggccgacatggctgatgtgatgaggctgctgagccacctgaagatcgtggaggaggccctggaggccgtgaagaatgccaccaatgagcaggacctggccaaccgcttcaaggagtttgggaaggagatggtgaagctgaactacgtggccgcccggcggcagcaggagctgaaggacccccactgcagagatgagatggccgccgcccggggggccctgaagaagaatgccaccatgctgtacacagccagccaggccttcctgcggcacccagatgtggccgccacccgggccaacagagattatgtgttcaagcaggtgcaggaggccatcgccggcatcagcaatgctgcccaggccaccagccccacagatgaggccaagggccacactggaattggagagctggccgccgccctgaatgaatttgacaacaagatcatcctggaccccatgaccttcagcgaggcccgcttccggcccagcctggaggagcggctggagagcatcatcagcggggccgccctgatggctgacagcagctgcaccagagatgacagaagagaaagaattgtggccgagtgcaatgctgtgcggcaggccctgcaggacctgctgtctgagtacatgaacaacacaggcaggaaggagaagggggaccccctgaacatcgccatcgacaagatgaccaagaagacccgggacctgcggcggcagctgaggaaggctgtgatggaccacatcagtgacagcttcctggagaccaacgtgcccctgctggtgctgattgaagctgccaagtctggaaatgagaaggaggtgaaggagtatgcccaggtgttccgggagcacgccaacaagctggtggaggtggccaacctggcctgcagcatcagcaacaatgaggagggcgtgaagctggtgaggatggccgccacccagattgacagcctgtgcccccaggtgatcaatgctgccctgaccctggccgcccggccccagagcaaggtggcccaggacaacatggatgtgttcaaggaccagtgggagaagcaggtgcgggtgctgacagaagctgtggatgacatcacctctgtggatgacttcctgtctgtgtctgagaaccacatcctggaggatgtgaacaagtgtgtgattgccctgcaggagggagatgtggacaccctggacagaacagctggggccatccggggccgggccgcccgggtcatccacatcatcaatgctgagatggagaactatgaagctggggtgtacacagagaaggtgctggaggccaccaagctgctgtctgagaccgtgatgcccaggtttgctgagcaggtggaggtggccatcgaggccctgagcgccaacgtgccccagccctttgaggagaatgagttcattgatgccagccggctggtgtatgatggagtgcgggacatcaggaaggctgtgctgatgatccgcaccccagaggagctggaggatgacagcgactttgagcaggaggactatgatgtgcgcagcaggacctctgtgcagacagaagatgaccagctgattgctggccagagcgcccgggccatcatggcccagctgccccaggaggagaaggccaagattgctgagcaggtggagatcttccaccaggagaagagcaagctggatgctgaggtggccaagtgggatgattctggaaatgacatcatcgtgctggccaagcagatgtgcatgatcatgatggagatgacagacttcacccggggcaagggccccctgaagaacaccagtgatgtgatcaatgctgccaagaagattgctgaggccggcagcaggatggacaagctggcccgggctgtggccgaccagctggacagcgccaccagcctcatccaggccgccaagaacctgatgaatgctgtggtgctgactgtgaaggccagctatgtggccagcaccaagtaccagaaggtgtatggaacagctgctgtgaacagccctgtggtgtcctggaagatgaaggcccctgagaagaagcccctggtgaagcgggagaagccagaggagttccagaccagggtgagaagaggcagccagaagaagcacatcagccctgtgcaggccctgtctgagttcaaggccatggacagcttctag

SEQ ID NO: 146452 - DNA, 2718 bp, synthetic construct; identical to SEQ ID NO: 146449
  misc_feature 1..2718: note = Description of Artificial Sequence: Synthetic coding sequence
  source 1..2718: mol_type = other DNA

SEQ ID NO: 146453 - DNA, 582 bp, synthetic construct
  misc_feature 1..582: note = Description of Artificial Sequence: Synthetic coding sequence
  source 1..582: mol_type = other DNA
atgtctgctgagacccccatcaccctgaacatcgacccccaggacctgcaggtgcagaccttcaccgtggagaagctgctggagcccctcatcatccaggtgaccaccctggtgaactgcccccagaaccccagcagcaggaagaagggccgcagcaagagggcctctgtgctgctggcctctgtggaggaggccacctggaacctgctggacaagggggagaagatcgcccaggaggccaccgtgctgaaggatgagctgacagccagcctggaggaggtgaggaaggagagcgaggccctgaaggtgtctgctgagcgcttcacagatgacccctgcttcctgcccaagcgggaggccgtggtgcaggccgcccgggccctgctggccgctgtgacccggctgctgatcctggccgacatgattgatgtgatgtgcctgctgcagcacgtgtctgccttccagaggacctttgagagcctgaagaatgtggccaacaagagtgacctgcagaagacctaccagaagctgggcaaggagctggagaacctggactacctggccttcaagaggcagcagtag

SEQ ID NO: 146454 - DNA, 705 bp, synthetic construct
  misc_feature 1..705: note = Description of Artificial Sequence: Synthetic coding sequence
  source 1..705: mol_type = other DNA
atgacccagctgcctgaggccgagaaggagaagattgctgagcaggtggccgacttcaagaaggtgaagagcaagctggatgctgagattgagatctgggatgacaccagcaatgacatcatcgtgctggccaagaacatgtgcatgatcatgatggagatgacagacttcacccggggcaagggccccctgaagcacaccacagatgtgatctatgctgccaagatgatcagcgagagcggcagcaggatggatgtgctggcccggcagatcgccaaccagtgcccagaccccagctgcaagcaggacctgctggcctacctggagcagatcaagttctacagccaccagctgaagatctgcagccaggtgaaggccgagatccagaacctgggcggggagctgatcatgtctgccctggacagcgtgaccagcctcatccaggccgccaagaacctgatgaatgctgtggtgcagacagtgaagatgagctacatcgccagcaccaagatcatccgcatccagagccctgctggccccaggcaccctgtggtgatgtggaggatgaaggccccagccaagaagcccctcatcaagcgggagaagccagaggagacctgtgccgctgtgagaagaggcagcgccaagaagaagatccaccccctgcaggtgatgtctgagttccggggccggcagatctactag

SEQ ID NO: 146455 - DNA, 2688 bp, synthetic construct
  misc_feature 1..2688: note = Description of Artificial Sequence: Synthetic coding sequence
  source 1..2688: mol_type = other DNA
atgtctgctgagacccccatcaccctgaacatcgacccccaggacctgcaggtgcagaccttcaccgtggagaagctgctggagcccctcatcatccaggtgaccaccctggtgaactgcccccagaaccccagcagcaggaagaagggccgcagcaagagggcctctgtgctgctggcctctgtggaggaggccacctggaacctgctggacaagggggagaagatcgcccaggaggccaccgtgctgaaggatgagctgacagccagcctggaggaggtgaggaaggagagcgaggccctgaaggtgtctgctgagcgcttcacagatgacccctgcttcctgcccaagcgggaggccgtggtgcaggccgcccgggccctgctggccgctgtgacccggctgctgatcctggccgacatgattgatgtgatgtgcctgctgcagcacgtgtctgccttccagaggacctttgagagcctgaagaatgtggccaacaagagtgacctgcagaagacctaccagaagctgggcaaggagctggagaacctggactacctggccttcaagaggcagcaggacctgaagagccccaaccagagagatgaaattgctggggcccgggccagcctgaaggagaacagccccctgctgcacagcatctgcagcgcctgcctggagcacagtgatgtggccagcctgaaggccagcaaggacacagtgtgtgaggagatccagaatgccctgaatgtcatcagcaatgccagccagggcatccagaacatgaccaccccacctgagccccaggccgccaccctgggcagcgccctggatgagctggagaacctgattgtgctgaaccccctgactgtgacagaggaggagatccggcccagcctggagaagaggctggaggccatcatctctggagctgccctgctggccgacagcagctgcacccgggacctgcaccgggagcgcatcatcgcagaatgtaatgccatccggcaggccctgcaggacctgctgtctgagtacatgaacaatgctgggaagaaggagaggagcaacaccctgaacatcgccctggacaacatgtgcaagaagacccgggacctgcggcggcagctgaggaaggccatcatcgaccacgtgtctgacagcttcctggacaccaccgtgcccctgctggtgctgattgaggccgccaagaatggccgggagaaggagatcaaggagtatgctgccatcttccacgagcacaccagccggctggtggaggtggccaacctggcctgcagcatgagcaccaatgaagatggcatcaagatcgtgaagattgctgccaaccacctggagaccctgtgcccccagatcatcaatgctgccctggccctggccgcccggcccaagagccaggccgtgaagaacaccatggagatgtacaagaggacctgggagaaccacatccacgtgctgacagaggccgtggatgacatcaccagcattgatgacttcctggccgtgtctgagagccacatcctggaggatgtgaacaagtgcatcatcgccctgcgggaccaggatgctgacaacctggacagagctgctggggccatccggggccgggccgcccgggtggcccacatcgtgactggagagatggacagctatgagcccggggcctacacagagggcgtgatgagaaatgtgaacttcctgaccagcaccgtcatccctgagtttgtgacccaggtgaatgtggccctggaggccctgagcaagagcagcctgaatgtgctggatgacaaccagtttgtggacatcagcaagaagatctatgacaccatccatgacatccgctgcagcgtgatgatgatccgcaccccagaggagctggaggatgtgtctgacctggaggaggagcacgaggtgcgcagccacaccagcatccagacagagggcaagacagaccgggccaagatgacccagctgcctgaggccgagaaggagaagattgctgagcaggtggccgacttcaagaaggtgaagagcaagctggatgctgagattgagatctgggatgacaccagcaatgacatcatcgtgctggccaagaacatgtgcatgatcatgatggagatgacagacttcacccggggcaagggccccctgaagcacaccacagatgtgatctatgctgccaagatgatcagcgagagcggcagcaggatggatgtgctggcccggcagatcgccaaccagtgcccagaccccagctgcaagcaggacctgctggcctacctggagcagatcaagttctacagccaccagctgaagatctgcagccaggtgaaggccgagatccagaacctgggcggggagctgatcatgtctgccctggacagcgtgaccagcctcatccaggccgccaagaacctgatgaatgctgtggtgcagacagtgaagatgagctacatcgccagcaccaagatcatccgcatccagagccctgctggccccaggcaccctgtggtgatgtggaggatgaaggccccagccaagaagcccctcatcaagcgggagaagccagaggagacctgtgccgctgtgcggcggggcagcgccaagaagaagatccaccccctgcaggtgatgtctgagttccggggccggcagatctactag

SEQ ID NO: 146456 - DNA, 2688 bp, synthetic construct; identical to SEQ ID NO: 146455
  misc_feature 1..2688: note = Description of Artificial Sequence: Synthetic coding sequence
  source 1..2688: mol_type = other DNA

SEQ ID NO: 146457 - DNA, 1131 bp, synthetic construct
  misc_feature 1..1131: note = Description of Artificial Sequence: Synthetic coding sequence
  source 1..1131: mol_type = other DNA
atgtctgctgagacccccatcaccctgaacatcgacccccaggacctgcaggtgcagaccttcaccgtggagaagctgctggagcccctcatcatccaggtgaccaccctggtgaactgcccccagaaccccagcagcaggaagaagggccgcagcaagagggcctctgtgctgctggcctctgtggaggaggccacctggaacctgctggacaagggggagaagatcgcccaggaggccaccgtgctgaaggatgagctgacagccagcctggaggaggtgaggaaggagagcgaggccctgaaggtgtctgctgagcgcttcacagatgacccctgcttcctgcccaagcgggaggccgtggtgcaggccgcccgggccctgctggccgctgtgacccggctgctgatcctggccgacatgattgatgtgatgtgcctgctgcagcacgtgtctgccttccagaggacctttgagagcctgaagaatgtggccaacaagagtgacctgcagaagacctaccagaagctgggcaaggagctggagaacctggactacctggccttcaagaggcagcaggacctgaagagccccaaccagagagatgaaattgctggggcccgggccagcctgaaggagaacagccccctgctgcacagcatctgcagcgcctgcctggagcacagtgatgtggccagcctgaaggccagcaaggacacagtgtgtgaggagatccagaatgccctgaatgtcatcagcaatgccagccagggcatccagaacatgaccaccccacctgagccccaggccgccaccctgggcagcgccctggatgagctggagaacctgattgtgctgaaccccctgactgtgacagaggaggagatccggcccagcctggagaagaggctggaggccatcatctctggagctgccctgctggccgacagcagctgcacccgggacctgcaccgggagcgcatcatcgcagaatgtaatgccatccggcaggccctgcaggacctgctgtctgagtacatgaacaacctgtgcaaccagaagagtgacctgggcctgactggagtgaagatcaagctgctggaggagtgcatcatcttctggagcctgtag

SEQ ID NO: 146458 - DNA, 582 bp, synthetic construct; identical to SEQ ID NO: 146453
  misc_feature 1..582: note = Description of Artificial Sequence: Synthetic coding sequence
  source 1..582: mol_type = other DNA

SEQ ID NO: 146459 - DNA, 1131 bp, synthetic construct; identical to SEQ ID NO: 146457
  misc_feature 1..1131: note = Description of Artificial Sequence: Synthetic coding sequence
  source 1..1131: mol_type = other DNA

SEQ ID NO: 146460 - DNA, 2205 bp, synthetic construct
  misc_feature 1..2205: note = Description of Artificial Sequence: Synthetic coding sequence
  source 1..2205: mol_type = other DNA
atggccgccagccctggccctgctggggtgggcggggccggggctgtgtatggcagcggcagcagcggctttgccctggacagcggcctggagatcaagaccaggtctgtggagcagaccctgctgcccctggtgtcccagatcaccaccctcatcaaccacaaggacaacaccaagaagagtgacaagaccctgcaggccatccagagggtgggccaggccgtgaacctggccgtgggccgctttgtgaaggtgggggaggccatcgccaatgaaaactgggacctgaaggaggagatcaacatcgcctgcatcgaggccaagcaggccggggagaccatcgccgccctgacagacatcaccaacctgaaccacctggagagtgatggccagatcaccatcttcacagacaagacaggagtcatcaaggccgcccggctgctgctgagctctgtgaccaaggtgctgctgctggccgacagagtggtgatcaagcagatcatcaccagcaggaacaaggtgctggccaccatggagcggctggagaaggtgaacagcttccaggagtttgtgcagatcttcagccagtttggaaatgagatggtggagtttgcccacctgagcggggaccggcagaatgacctgaaggatgagaagaagaaggccaagatggccgccgcccgggctgtgctggagaagtgcaccatgatgctgctgacagccagcaagacctgcctgcggcaccccaactgtgagagcgcccacaagaacaaggagggcgtgtttgacaggatgaaggtggccctggacaaggtgattgaaattgtgacagactgcaagcccaacggggagacagacatcagcagcatcagcatcttcaccggcatcaaggagttcaagatgaacatcgaggccctgcgggagaacctgtacttccagagcaaggagaacctgtctgtgaccctggaggtgatcctggagaggatggaggacttcacagattctgcctacaccagccatgagcaccgggagcgcatcctggagctgagcacccaggccaggatggagctgcagcagctgatctctgtgtggatccaggcccagagcaagaagaccaagagcattgctgaggagctggagctgagcatcctgaagatcagccacagcctgaatgagctgaagaaggagctgcacagcacagccacccagctggccgctgacctgctgaagtaccacgccgaccacgtggtgctgaaggccctgaagctgactggagtggagggcaacctggaggccctggccgagtatgcctgcaagctgtctgagcagaaggagcagctggtggagacctgccgcctgctgcggcacatcagcggcacagagcccctggagatcacctgcatccacgccgaggagaccttccaggtgacaggccagcagatcatctctgctgctgagaccctgaccctgcaccccagcagcaagatcgccaaggagaacctggatgtgttctgtgaggcctgggagagccagatcagtgacatgagcaccctgctgcgggagatcaatgatgtgtttgagggcagaagaggagagaagtatggctacctgagcctgcccaagcccatgaagaacaatgccaacctgaagagcctgaagccagacaagccagattctgaggagcaggccaagatcgccaagctgggcctgaagctgggcctgctgaccagtgatgctgactgtgaaattgagaagtgggaggaccaggagaatgaaattgtgcagtatggcaggaacatgagctccatggcctacagcctgtacctgttcaccagaggagagggccccctgaagaccagccaggacctgatccaccagctggaggtgtttgctgctgagggcctgaagctgaccagctctgtgcaggccttcagcaagcagctgaaggatgatgacaagctgatgctgctgctggagatcaacaagctgatccccctgtgccaccagctgcagacagtgaccaagaccagcctgcagaacaaggtgttcctgaaggtggacaagtgcatcaccaagaccaggtccatgatggccctgctggtgcagctgctgagcctgtgctacaagctgctgaagaagctgcagatggagaacaacggctgggtgtctgtgaccaacaaggacaccatggacagcaagacctag

SEQ ID NO: 146461 - DNA, 1953 bp, synthetic construct
  misc_feature 1..1953: note = Description of Artificial Sequence: Synthetic coding sequence
  source 1..1953: mol_type = other DNA
atggccgccagccctggccctgctggggtgggcggggccggggctgtgtatggcagcggcagcagcggctttgccctggacagcggcctggagatcaagaccaggtctgtggagcagaccctgctgcccctggtgtcccagatcaccaccctcatcaaccacaaggacaacaccaagaagagtgacaagaccctgcaggccatccagagggtgggccaggccgtgaacctggccgtgggccgctttgtgaaggtgggggaggccatcgccaatgaaaactgggacctgaaggaggagatcaacatcgcctgcatcgaggccaagcaggccggggagaccatcgccgccctgacagacatcaccaacctgaaccacctggagagtgatggccagatcaccatcttcacagacaagacaggagtcatcaaggccgcccggctgctgctgagctctgtgaccaaggtgctgctgctggccgacagagtggtgatcaagcagatcatcaccagcaggaacaaggtgctggccaccatggagcggctggagaaggtgaacagcttccaggagtttgtgcagatcttcagccagtttggaaatgagatggtggagtttgcccacctgagcggggaccggcagaatgacctgaaggatgagaagaagaaggccaagatggccgccgcccgggctgtgctggagaagtgcaccatgatgctgctgacagccagcaagacctgcctgcggcaccccaactgtgagagcgcccacaagaacaaggagggcgtgtttgacaggatgaaggtggccctggacaaggtgattgaaattgtgacagactgcaagcccaacggggagacagacatcagcagcatcagcatcttcaccggcatcaaggagttcaagatgaacatcgaggccctgcgggagaacctgtacttccagagcaaggagaacctgtctgtgaccctggaggtgatcctggagaggatggaggacttcacagattctgcctacaccagccatgagcaccgggagcgcatcctggagctgagcacccaggccaggatggagctgcagcagctgatctctgtgtggatccaggcccagagcaagaagaccaagagcattgctgaggagctggagctgagcatcctgaagatcagccacagcctgaatgagctgaagaaggagatcatctctgctgctgagaccctgaccctgcaccccagcagcaagatcgccaaggagaacctggatgtgttctgtgaggcctgggagagccagatcagtgacatgagcaccctgctgcgggagatcaatgatgtgtttgagggcagaagaggagagaagtatggctacctgagcctgcccaagcccatgaagaacaatgccaacctgaagagcctgaagccagacaagccagattctgaggagcaggccaagatcgccaagctgggcctgaagctgggcctgctgaccagtgatgctgactgtgaaattgagaagtgggaggaccaggagaatgaaattgtgcagtatggcaggaacatgagctccatggcctacagcctgtacctgttcaccagaggagagggccccctgaagaccagccaggacctgatccaccagctggaggtgtttgctgctgagggcctgaagctgaccagctctgtgcaggccttcagcaagcagctgaaggatgatgacaagctgatgctgctgctggagatcaacaagctgatccccctgtgccaccagctgcagacagtgaccaagaccagcctgcagaacaaggtgttcctgaaggtggacaagtgcatcaccaagaccaggtccatgatggccctgctggtgcagctgctgagcctgtgctacaagctgctgaagaagctgcagatggagaacaacggctgggtgtctgtgaccaacaaggacaccatggacagcaagacctag

SEQ ID NO: 146462 - DNA, 552 bp, synthetic construct
  misc_feature 1..552: note = Description of Artificial Sequence: Synthetic coding sequence
  source 1..552: mol_type = other DNA
atggccgccagccctggccctgctggggtgggcggggccggggctgtgtatggcagcggcagcagcggctttgccctggacagcggcctggagatcaagaccaggtctgtggagcagaccctgctgcccctggtgtcccagatcaccaccctcatcaaccacaaggacaacaccaagaagagtgacaagaccctgcaggccatccagagggtgggccaggccgtgaacctggccgtgggccgctttgtgaaggtgggggaggccatcgccaatgaaaactgggacctgaaggaggagatcaacatcgcctgcatcgaggccaagcaggccggggagaccatcgccgccctgacagacatcaccaacctgaaccacctggagagtgatggccagatcaccatcttcacagacaagacaggagtcatcaaggccgcccggctgctgctgagctctgtgaccaaggtgctgctgctggccgacagagtggtgatcaagcagatcatcaccagcaggaacaagaggctgaccatctacaacctgcggcacagctag

SEQ ID NO: 146463 - DNA, 408 bp, synthetic construct
  misc_feature 1..408: note = Description of Artificial Sequence: Synthetic coding sequence
  source 1..408: mol_type = other DNA
atgagctccatggcctacagcctgtacctgttcaccagaggagagggccccctgaagaccagccaggacctgatccaccagctggaggtgtttgctgctgagggcctgaagctgaccagctctgtgcaggccttcagcaagcagctgaaggatgatgacaagctgatgctgctgctggagatcaacaagctgatccccctgtgccaccagctgcagacagtgaccaagaccagcctgcagaacaaggtgttcctgaaggtggacaagtgcatcaccaagaccaggtccatgatggccctgctggtgcagctgctgagcctgtgctacaagctgctgaagaagctgcagatggagaacaacggctgggtgtctgtgaccaacaaggacaccatggacagcaagacctag

SEQ ID NO: 146464 - DNA, 2157 bp, synthetic construct
  misc_feature 1..2157: note = Description of Artificial Sequence: Synthetic coding sequence
  source 1..2157: mol_type = other DNA
atggccgccagccctggccctgctggggtgggcggggccggggctgtgtatggcagcggcagcagcggctttgccctggacagcggcctggagatcaagaccaggtctgtggagcagaccctgctgcccctggtgtcccagatcaccaccctcatcaaccacaaggacaacaccaagaagagtgacaagaccctgcaggccatccagagggtgggccaggccgtgaacctggccgtgggccgctttgtgaaggtgggggaggccatcgccaatgaaaactgggacctgaaggaggagatcaacatcgcctgcatcgaggccaagcaggccggggagaccatcgccgccctgacagacatcaccaacctgaaccacctggagagtgatggccagatcaccatcttcacagacaagacaggagtcatcaaggccgcccggctgctgctgagctctgtgaccaaggtgctgctgctggccgacagagtggtgatcaagcagatcatcaccagcaggaacaaggtgctggccaccatggagcggctggagaaggtgaacagcttccaggagtttgtgcagatcttcagccagtttggaaatgagatggtggagtttgcccacctgagcggggaccggcagaatgacctgaaggatgagaagaagaaggccaagatggccgccgcccgggctgtgctggagaagtgcaccatgatgctgctgacagccagcaagacctgcctgcggcaccccaactgtgagagcgcccacaagaacaaggagggcgtgtttgacaggatgaaggtggccctggacaaggtgattgaaattgtgacagactgcaagcccaacggggagacagacatcagcagcatcagcatcttcaccggcatcaaggagttcaagatgaacatcgaggccctgcgggagaacctgtacttccagagcaaggagaacctgtctgtgaccctggaggtgatcctggagaggatggaggacttcacagattctgcctacaccagccatgagcaccgggagcgcatcctggagctgagcacccaggccaggatggagctgcagcagctgatctctgtgtggatccaggcccagagcaagaagaccaagagcattgctgaggagctggagctgagcatcctgaagatcagccacagcctgaatgagctgaagaaggagctgcacagcacagccacccagctggccgctgacctgctgaagtaccacgccgaccacgtggtgctgaaggccctgaagctgactggagtggagggcaacctggaggccctggccgagtatgcctgcaagctgtctgagcagaaggagcagctggtggagacctgccgcctgctgcggcacatcagcggcacagagcccctggagatcacctgcatccacgccgaggagaccttccaggtgacaggccagcagatcatctctgctgctgagaccctgaccctgcaccccagcagcaagatcgccaaggagaacctggatgtgttctgtgaggcctgggagagccagatcagtgacatgagcaccctgctgcgggagatcaatgatgtgtttgagggcagaagaggagagaagtatggctacctgagcctgcccaagcccatgaagaacaatgccaacctgaagagcctgaagccagacaagccagattctgaggagcaggccaagatcgccaagctgggcctgaagctgggcctgctgaccagtgatgctgactgtgaaattgagaagtgggaggaccaggagaatgaaattgtgcagtatggcaggaacatgagctccatggcctacagcctgtacctgttcaccagaggagagggccccctgaagaccagccaggacctgatccaccagctggaggtgtttgctgctgagggcctgaagctgaccagctctgtgcaggccttcagcaagcagctgaaggatgatgacaagctgatgctgctgctggagatcaacaagctgatccccctgtgccaccagctgcagacagtgaccaagaccagcctgcagaacaaggtgttcctgaaggtggacaagtgcatcaccaagaccaggtccatgatggccctgctggtgcagctgctgagcctgtgctacaagctgctgaagaagtctgagacccgctactag

SEQ ID NO: 146465 - DNA, 2802 bp, synthetic construct
  misc_feature 1..2802: note = Description of Artificial Sequence: Synthetic coding sequence
  source 1..2802: mol_type = other DNA
atggatgacagcgaggtggagagcacagccagcatcctggcctctgtgaaggagcaggaggcccagtttgagaagctgacccgggccctggaggaggagcggcggcacgtgtctgcccagctggagcgggtgcgggtgagcccccaggatgccaaccccctgatggccaacggcaccctgacccggcggcaccagaatggccgctttgtgggagatgctgacctggagcggcagaagttcagtgacctgaagctgaatggcccccaggaccacagccacctgctgtacagcaccatccccaggatgcaggagcccggccagatcgtggagacctacacagaagaagatcctgagggcgccatgtctgtggtgtctgtggagaccagtgatgatggcaccaccaggagaacagagaccaccgtgaagaaggtggtgaagacagtgaccaccaggacagtgcagcctgtggccatgggcccagatggcctgcctgtggatgccagctctgtgagcaacaactacatccagaccctgggccgggacttcaggaagaatggaaatggaggccctggcccctacgtgggccaggccggcacagccaccctgcccaggaacttccactaccccccagatggctacagccgccactatgaagatggctacccaggcggcagtgacaactacggcagcctgagccgggtgaccagaattgaggagcgctaccggcccagcatggagggctaccgggcccccagccggcaggatgtgtatggcccccagccccaggtgcgggtgggcggcagctctgtggacctgcaccgcttccaccctgagccctacggcctggaggatgaccagaggtccatgggctatgatgacctggactatggcatgatgtctgactatggaacagcccggaggacaggcacccccagcgacccccggcggcggctgcggagctatgaggacatgattggagaggaggtgcccagcgaccagtactactgggcccccctggcccagcacgagcggggcagcctggccagcctggacagcctgaggaaaggaggccccccaccacccaactggaggcagcctgagctgcctgaggtgattgccatgctgggcttccggctggatgctgtgaagagcaatgctgctgcctacctgcagcacctgtgctacagaaatgacaaggtgaagacagatgtgaggaagctgaagggcatccctgtgctggtgggcctgctggaccaccccaagaaggaggtgcacctgggcgcctgtggggccctgaagaacatcagctttggccgggaccaggacaacaagatcgccatcaagaactgtgatggagtgcctgccctggtgcggctgctgaggaaggcccgggacatggacctgacagaggtgatcaccggcaccctgtggaacctgagcagccatgacagcatcaagatggagatcgtggaccacgccctgcacgccctgacagatgaagtcatcatcccccacagcggctgggagcgggagcccaatgaagactgcaagcccaggcacatcgagtgggagagcgtgctgaccaacacagctggctgcctgagaaatgtgtcctctgagaggtctgaggcccggaggaagctgcgggagtgtgatggcctggtggatgccctgatcttcatcgtgcaggccgagatcggccagaaggacagcgacagcaagctggtggagaactgtgtgtgcctgctgaggaacctgagctaccaggtgcaccgggagatcccccaggccgagcgctaccaggaggccgcccccaacgtggccaacaacacaggcccccatgctgccagctgctttggagccaagaagggcaagggcaagaagcccattgaagatcctgccaatgacacagtggacttccccaagaggaccagccctgcccggggctatgagctgctcttccagcctgaggtggtgcgcatctacatcagcctgctgaaggagagcaagaccccagccatcctggaggccagcgctggggccatccagaacctgtgtgccggccgctggacctacggccgctacatccgcagcgccctgcggcaggagaaggccctgagcgccatcgctgacctgctgaccaatgaacatgagcgggtggtgaaggccgccagcggggccctgaggaacctggccgtggatgccaggaacaaggagctgattggcaagcacgccatccccaacctggtgaagaacctgcccggcggccagcagaacagctcctggaacttcagcgaggacaccgtcatcagcatcctgaacaccatcaatgaggtgattgctgagaacctggaggccgccaagaagctgcgggagacccagggcatcgagaagctggtgctgatcaacaagagcggcaacagaagtgagaaggaggtgcgggccgccgccctggtgctgcagaccatctggggctacaaggagctgaggaagcccctggagaaggagggctggaagaagagtgacttccaggtgaacctgaacaatgccagccgcagccagagcagccacagctatgatgacagcaccctgcccctgattgacaggaaccagaagagtgacaagaagccagaccgggaggagatccagatgagcaacatgggcagcaacaccaagagcctggacaacaactacagcaccccaaatgaaagaggagaccacaacagaaccctggacagaagtggggacctgggggacatggagcccctgaagggcaccacccccctgatgcagaagatctag

SEQ ID NO: 146466 - DNA, 2844 bp, synthetic construct
  misc_feature 1..2844: note = Description of Artificial Sequence: Synthetic coding sequence
  source 1..2844: mol_type = other DNA
atggatgacagcgaggtggagagcacagccagcatcctggcctctgtgaaggagcaggaggcccagtttgagaagctgacccgggccctggaggaggagcggcggcacgtgtctgcccagctggagcgggtgcgggtgagcccccaggatgccaaccccctgatggccaacggcaccctgacccggcggcaccagaatggccgctttgtgggagatgctgacctggagcggcagaagttcagtgacctgaagctgaatggcccccaggaccacagccacctgctgtacagcaccatccccaggatgcaggagcccggccagatcgtggagacctacacagaagaagatcctgagggcgccatgtctgtggtgtctgtggagaccagtgatgatggcaccaccaggagaacagagaccaccgtgaagaaggtggtgaagacagtgaccaccaggacagtgcagcctgtggccatgggcccagatggcctgcctgtggatgccagctctgtgagcaacaactacatccagaccctgggccgggacttcaggaagaatggaaatggaggccctggcccctacgtgggccaggccggcacagccaccctgcccaggaacttccactaccccccagatggctacagccgccactatgaagatggctacccaggcggcagtgacaactacggcagcctgagccgggtgaccagaattgaggagcgctaccggcccagcatggagggctaccgggcccccagccggcaggatgtgtatggcccccagccccaggtgcgggtgggcggcagctctgtggacctgcaccgcttccaccctgagccctacggcctggaggatgaccagaggtccatgggctatgatgacctggactatggcatgatgtctgactatggaacagcccggaggacaggcacccccagcgacccccggcggcggctgcggagctatgaggacatgattggagaggaggtgcccagcgaccagtactactgggcccccctggcccagcacgagcggggcagcctggccagcctggacagcctgaggaaaggaggccccccaccacccaactggaggcagcctgagctgcctgaggtgattgccatgctgggcttccggctggatgctgtgaagagcaatgctgctgcctacctgcagcacctgtgctacagaaatgacaaggtgaagacagatgtgaggaagctgaagggcatccctgtgctggtgggcctgctggaccaccccaagaaggaggtgcacctgggcgcctgtggggccctgaagaacatcagctttggccgggaccaggacaacaagatcgccatcaagaactgtgatggagtgcctgccctggtgcggctgctgaggaaggcccgggacatggacctgacagaggtgatcaccggcaccctgtggaacctgagcagccatgacagcatcaagatggagatcgtggaccacgccctgcacgccctgacagatgaagtcatcatcccccacagcggctgggagcgggagcccaatgaagactgcaagcccaggcacatcgagtgggagagcgtgctgaccaacacagctggctgcctgagaaatgtgtcctctgagaggtctgaggcccggaggaagctgcgggagtgtgatggcctggtggatgccctgatcttcatcgtgcaggccgagatcggccagaaggacagcgacagcaagctggtggagaactgtgtgtgcctgctgaggaacctgagctaccaggtgcaccgggagatcccccaggccgagcgctaccaggaggccgcccccaacgtggccaacaacacaggcccccatgctgccagctgctttggagccaagaagggcaaggatgagtggttcagccggggcaagaagcccattgaagatcctgccaatgacacagtggacttccccaagaggaccagccctgcccggggctatgagctgctcttccagcctgaggtggtgcgcatctacatcagcctgctgaaggagagcaagaccccagccatcctggaggccagcgctggggccatccagaacctgtgtgccggccgctggacctacggccgctacatccgcagcgccctgcggcaggagaaggccctgagcgccatcgctgacctgctgaccaatgaacatgagcgggtggtgaaggccgccagcggggccctgaggaacctggccgtggatgccaggaacaaggagctgattggcaagcacgccatccccaacctggtgaagaacctgcccggcggccagcagaacagctcctggaacttcagcgaggacaccgtcatcagcatcctgaacaccatcaatgaggtgattgctgagaacctggaggccgccaagaagctgcgggagacccagggcatcgagaagctggtgctgatcaacaagagcggcaacagaagtgagaaggaggtgcgggccgccgccctggtgctgcagaccatctggggctacaaggagctgaggaagcccctggagaaggagggctggaagaagagtgacttccaggtgaacctgaacaatgccagccgcagccagagcagccacagctatgatgacagcaccctgcccctgattgacaggaaccagaagagtgacaacaactacagcaccccaaatgaaagaggagaccacaacagaaccctggacagaagtggggacctgggggacatggagcccctgaagggcaccacccccctgatgcaggatgagggccaggagagcctggaggaggagctggatgtgctggtgctggatgatgagggcggccaggtgtcctaccccagcatgcagaagatctag

SEQ ID NO: 146467 - DNA, 2889 bp, synthetic construct
  misc_feature 1..2889: note = Description of Artificial Sequence: Synthetic coding sequence
  source 1..2889: mol_type = other DNA
atggatgacagcgaggtggagagcacagccagcatcctggcctctgtgaaggagcaggaggcccagtttgagaagctgacccgggccctggaggaggagcggcggcacgtgtctgcccagctggagcgggtgcgggtgagcccccaggatgccaaccccctgatggccaacggcaccctgacccggcggcaccagaatggccgctttgtgggagatgctgacctggagcggcagaagttcagtgacctgaagctgaatggcccccaggaccacagccacctgctgtacagcaccatccccaggatgcaggagcccggccagatcgtggagacctacacagaagaagatcctgagggcgccatgtctgtggtgtctgtggagaccagtgatgatggcaccaccaggagaacagagaccaccgtgaagaaggtggtgaagacagtgaccaccaggacagtgcagcctgtggccatgggcccagatggcctgcctgtggatgccagctctgtgagcaacaactacatccagaccctgggccgggacttcaggaagaatggaaatggaggccctggcccctacgtgggccaggccggcacagccaccctgcccaggaacttccactaccccccagatggctacagccgccactatgaagatggctacccaggcggcagtgacaactacggcagcctgagccgggtgaccagaattgaggagcgctaccggcccagcatggagggctaccgggcccccagccggcaggatgtgtatggcccccagccccaggtgcgggtgggcggcagctctgtggacctgcaccgcttccaccctgagccctacggcctggaggatgaccagaggtccatgggctatgatgacctggactatggcatgatgtctgactatggaacagcccggaggacaggcacccccagcgacccccggcggcggctgcggagctatgaggacatgattggagaggaggtgcccagcgaccagtactactgggcccccctggcccagcacgagcggggcagcctggccagcctggacagcctgaggaaaggaggccccccaccacccaactggaggcagcctgagctgcctgaggtgattgccatgctgggcttccggctggatgctgtgaagagcaatgctgctgcctacctgcagcacctgtgctacagaaatgacaaggtgaagacagatgtgaggaagctgaagggcatccctgtgctggtgggcctgctggaccaccccaagaaggaggtgcacctgggcgcctgtggggccctgaagaacatcagctttggccgggaccaggacaacaagatcgccatcaagaactgtgatggagtgcctgccctggtgcggctgctgaggaaggcccgggacatggacctgacagaggtgatcaccggcaccctgtggaacctgagcagccatgacagcatcaagatggagatcgtggaccacgccctgcacgccctgacagatgaagtcatcatcccccacagcggctgggagcgggagcccaatgaagactgcaagcccaggcacatcgagtgggagagcgtgctgaccaacacagctggctgcctgagaaatgtgtcctctgagaggtctgaggcccggaggaagctgcgggagtgtgatggcctggtggatgccctgatcttcatcgtgcaggccgagatcggccagaaggacagcgacagcaagctggtggagaactgtgtgtgcctgctgaggaacctgagctaccaggtgcaccgggagatcccccaggccgagcgctaccaggaggccgcccccaacgtggccaacaacacaggcccccatgctgccagctgctttggagccaagaagggcaagggcaagaagcccattgaagatcctgccaatgacacagtggacttccccaagaggaccagccctgcccggggctatgagctgctcttccagcctgaggtggtgcgcatctacatcagcctgctgaaggagagcaagaccccagccatcctggaggccagcgctggggccatccagaacctgtgtgccggccgctggacctacggccgctacatccgcagcgccctgcggcaggagaaggccctgagcgccatcgctgacctgctgaccaatgaacatgagcgggtggtgaaggccgccagcggggccctgaggaacctggccgtggatgccaggaacaaggagctgattggcaagcacgccatccccaacctggtgaagaacctgcccggcggccagcagaacagctcctggaacttcagcgaggacaccgtcatcagcatcctgaacaccatcaatgaggtgattgctgagaacctggaggccgccaagaagctgcgggagacccagggcatcgagaagctggtgctgatcaacaagagcggcaacagaagtgagaaggaggtgcgggccgccgccctggtgctgcagaccatctggggctacaaggagctgaggaagcccctggagaaggagggctggaagaagagtgacttccaggtgaacctgaacaatgccagccgcagccagagcagccacagctatgatgacagcaccctgcccctgattgacaggaaccagaagagtgacaagaagccagaccgggaggagatccagatgagcaacatgggcagcaacaccaagagcctggacaacaactacagcaccccaaatgaaagaggagaccacaacagaaccctggacagaagtggggacctgggggacatggagcccctgaagggcaccacccccctgatgcaggatgagggccaggagagcctggaggaggagctggatgtgctggtgctggatgatgaaggaggccaggtgtcctaccccagcatgcagaagatctag

SEQ ID NO: 146468 - DNA, 2826 bp, synthetic construct
  misc_feature 1..2826: note = Description of Artificial Sequence: Synthetic coding sequence
  source 1..2826: mol_type = other DNA
atggatgacagcgaggtggagagcacagccagcatcctggcctctgtgaaggagcaggaggcccagtttgagaagctgacccgggccctggaggaggagcggcggcacgtgtctgcccagctggagcgggtgcgggtgagcccccaggatgccaaccccctgatggccaacggcaccctgacccggcggcaccagaatggccgctttgtgggagatgctgacctggagcggcagaagttcagtgacctgaagctgaatggcccccaggaccacagccacctgctgtacagcaccatccccaggatgcaggagcccggccagatcgtggagacctacacagaagaagatcctgagggcgccatgtctgtggtgtctgtggagaccagtgatgatggcaccaccaggagaacagagaccaccgtgaagaaggtggtgaagacagtgaccaccaggacagtgcagcctgtggccatgggcccagatggcctgcctgtggatgccagctctgtgagcaacaactacatccagaccctgggccgggacttcaggaagaatggaaatggaggccctggcccctacgtgggccaggccggcacagccaccctgcccaggaacttccactaccccccagatggctacagccgccactatgaagatggctacccaggcggcagtgacaactacggcagcctgagccgggtgaccagaattgaggagcgctaccggcccagcatggagggctaccgggcccccagccggcaggatgtgtatggcccccagccccaggtgcgggtgggcggcagctctgtggacctgcaccgcttccaccctgagccctacggcctggaggatgaccagaggtccatgggctatgatgacctggactatggcatgatgtctgactatggaacagcccggaggacaggcacccccagcgacccccggcggcggctgcggagctatgaggacatgattggagaggaggtgcccagcgaccagtactactgggcccccctggcccagcacgagcggggcagcctggccagcctggacagcctgaggaaaggaggccccccaccacccaactggaggcagcctgagctgcctgaggtgattgccatgctgggcttccggctggatgctgtgaagagcaatgctgctgcctacctgcagcacctgtgctacagaaatgacaaggtgaagacagatgtgaggaagctgaagggcatccctgtgctggtgggcctgctggaccaccccaagaaggaggtgcacctgggcgcctgtggggccctgaagaacatcagctttggccgggaccaggacaacaagatcgccatcaagaactgtgatggagtgcctgccctggtgcggctgctgaggaaggcccgggacatggacctgacagaggtgatcaccggcaccctgtggaacctgagcagccatgacagcatcaagatggagatcgtggaccacgccctgcacgccctgacagatgaagtcatcatcccccacagcggctgggagcgggagcccaatgaagactgcaagcccaggcacatcgagtgggagagcgtgctgaccaacacagctggctgcctgagaaatgtgtcctctgagaggtctgaggcccggaggaagctgcgggagtgtgatggcctggtggatgccctgatcttcatcgtgcaggccgagatcggccagaaggacagcgacagcaagctggtggagaactgtgtgtgcctgctgaggaacctgagctaccaggtgcaccgggagatcccccaggccgagcgctaccaggaggccgcccccaacgtggccaacaacacaggcccccatgctgccagctgctttggagccaagaagggcaagggcaagaagcccattgaagatcctgccaatgacacagtggacttccccaagaggaccagccctgcccggggctatgagctgctcttccagcctgaggtggtgcgcatctacatcagcctgctgaaggagagcaagaccccagccatcctggaggccagcgctggggccatccagaacctgtgtgccggccgctggacctacggccgctacatccgcagcgccctgcggcaggagaaggccctgagcgccatcgctgacctgctgaccaatgaacatgagcgggtggtgaaggccgccagcggggccctgaggaacctggccgtggatgccaggaacaaggagctgattggcaagcacgccatccccaacctggtgaagaacctgcccggcggccagcagaacagctcctggaacttcagcgaggacaccgtcatcagcatcctgaacaccatcaatgaggtgattgctgagaacctggaggccgccaagaagctgcgggagacccagggcatcgagaagctggtgctgatcaacaagagcggcaacagaagtgagaaggaggtgcgggccgccgccctggtgctgcagaccatctggggctacaaggagctgaggaagcccctggagaaggagggctggaagaagagtgacttccaggtgaacctgaacaatgccagccgcagccagagcagccacagctatgatgacagcaccctgcccctgattgacaggaaccagaagagtgacaacaactacagcaccccaaatgaaagaggagaccacaacagaaccctggacagaagtggggacctgggggacatggagcccctgaagggcaccacccccctgatgcaggatgagggccaggagagcctggaggaggagctggatgtgctggtgctggatgatgagggcggccaggtgtcctaccccagcatgcagaagatctag

SEQ ID NO: 146469 - DNA, 2802 bp, synthetic construct; identical to SEQ ID NO: 146465
  misc_feature 1..2802: note = Description of Artificial Sequence: Synthetic coding sequence
  source 1..2802: mol_type = other DNA

SEQ ID NO: 146470 - DNA, 2817 bp, synthetic construct
  misc_feature 1..2817: note = Description of Artificial Sequence: Synthetic coding sequence
  source 1..2817: mol_type = other DNA
atggatgacagcgaggtggagagcacagccagcatcctggcctctgtgaaggagcaggaggcccagtttgagaagctgacccgggccctggaggaggagcggcggcacgtgtctgcccagctggagcgggtgcgggtgagcccccaggatgccaaccccctgatggccaacggcaccctgacccggcggcaccagaatggccgctttgtgggagatgctgacctggagcggcagaagttcagtgacctgaagctgaatggcccccaggaccacagccacctgctgtacagcaccatccccaggatgcaggagcccggccagatcgtggagacctacacagaagaagatcctgagggcgccatgtctgtggtgtctgtggagaccagtgatgatggcaccaccaggagaacagagaccaccgtgaagaaggtggtgaagacagtgaccaccaggacagtgcagcctgtggccatgggcccagatggcctgcctgtggatgccagctctgtgagcaacaactacatccagaccctgggccgggacttcaggaagaatggaaatggaggccctggcccctacgtgggccaggccggcacagccaccctgcccaggaacttccactaccccccagatggctacagccgccactatgaagatggctacccaggcggcagtgacaactacggcagcctgagccgggtgaccagaattgaggagcgctaccggcccagcatggagggctaccgggcccccagccggcaggatgtgtatggcccccagccccaggtgcgggtgggcggcagctctgtggacctgcaccgcttccaccctgagccctacggcctggaggatgaccagaggtccatgggctatgatgacctggactatggcatgatgtctgactatggaacagcccggaggacaggcacccccagcgacccccggcggcggctgcggagctatgaggacatgattggagaggaggtgcccagcgaccagtactactgggcccccctggcccagcacgagcggggcagcctggccagcctggacagcctgaggaaaggaggccccccaccacccaactggaggcagcctgagctgcctgaggtgattgccatgctgggcttccggctggatgctgtgaagagcaatgctgctgcctacctgcagcacctgtgctacagaaatgacaaggtgaagacagatgtgaggaagctgaagggcatccctgtgctggtgggcctgctggaccaccccaagaaggaggtgcacctgggcgcctgtggggccctgaagaacatcagctttggccgggaccaggacaacaagatcgccatcaagaactgtgatggagtgcctgccctggtgcggctgctgaggaaggcccgggacatggacctgacagaggtgatcaccggcaccctgtggaacctgagcagccatgacagcatcaagatggagatcgtggaccacgccctgcacgccctgacagatgaagtcatcatcccccacagcggctgggagcgggagcccaatgaagactgcaagcccaggcacatcgagtgggagagcgtgctgaccaacacagctggctgcctgagaaatgtgtcctctgagaggtctgaggcccggaggaagctgcgggagtgtgatggcctggtggatgccctgatcttcatcgtgcaggccgagatcggccagaaggacagcgacagcaagctggtggagaactgtgtgtgcctgctgaggaacctgagctaccaggtgcaccgggagatcccccaggccgagcgctaccaggaggccgcccccaacgtggccaacaacacaggcccccatgctgccagctgctttggagccaagaagggcaaggatgagtggttcagccggggcaagaagcccattgaagatcctgccaatgacacagtggacttccccaagaggaccagccctgcccggggctatgagctgctcttccagcctgaggtggtgcgcatctacatcagcctgctgaaggagagcaagaccccagccatcctggaggccagcgctggggccatccagaacctgtgtgccggccgctggacctacggccgctacatccgcagcgccctgcggcaggagaaggccctgagcgccatcgctgacctgctgaccaatgaacatgagcgggtggtgaaggccgccagcggggccctgaggaacctggccgtggatgccaggaacaaggagctgattggcaagcacgccatccccaacctggtgaagaacctgcccggcggccagcagaacagctcctggaacttcagcgaggacaccgtcatcagcatcctgaacaccatcaatgaggtgattgctgagaacctggaggccgccaagaagctgcgggagacccagggcatcgagaagctggtgctgatcaacaagagcggcaacagaagtgagaaggaggtgcgggccgccgccctggtgctgcagaccatctggggctacaaggagctgaggaagcccctggagaaggagggctggaagaagagtgacttccaggtgaacctgaacaatgccagccgcagccagagcagccacagctatgatgacagcaccctgcccctgattgacaggaaccagaagagtgacaagaagccagaccgggaggagatccagatgagcaacatgggcagcaacaccaagagcctggacaacaactacagcaccccaaatgaaagaggagaccacaacagaaccctggacagaagtggggacctgggggacatggagcccctgaagggcaccacccccctgatgaagatctag

SEQ ID NO: 146471 - DNA, 2907 bp, synthetic construct
  misc_feature 1..2907: note = Description of Artificial Sequence: Synthetic coding sequence
  source 1..2907: mol_type = other DNA
atggatgacagcgaggtggagagcacagccagcatcctggcctctgtgaaggagcaggaggcccagtttgagaagctgacccgggccctggaggaggagcggcggcacgtgtctgcccagctggagcgggtgcgggtgagcccccaggatgccaaccccctgatggccaacggcaccctgacccggcggcaccagaatggccgctttgtgggagatgctgacctggagcggcagaagttcagtgacctgaagctgaatggcccccaggaccacagccacctgctgtacagcaccatccccaggatgcaggagcccggccagatcgtggagacctacacagaagaagatcctgagggcgccatgtctgtggtgtctgtggagaccagtgatgatggcaccaccaggagaacagagaccaccgtgaagaaggtggtgaagacagtgaccaccaggacagtgcagcctgtggccatgggcccagatggcctgcctgtggatgccagctctgtgagcaacaactacatccagaccctgggccgggacttcaggaagaatggaaatggaggccctggcccctacgtgggccaggccggcacagccaccctgcccaggaacttccactaccccccagatggctacagccgccactatgaagatggctacccaggcggcagtgacaactacggcagcctgagccgggtgaccagaattgaggagcgctaccggcccagcatggagggctaccgggcccccagccggcaggatgtgtatggcccccagccccaggtgcgggtgggcggcagctctgtggacctgcaccgcttccaccctgagccctacggcctggaggatgaccagaggtccatgggctatgatgacctggactatggcatgatgtctgactatggaacagcccggaggacaggcacccccagcgacccccggcggcggctgcggagctatgaggacatgattggagaggaggtgcccagcgaccagtactactgggcccccctggcccagcacgagcggggcagcctggccagcctggacagcctgaggaaaggaggccccccaccacccaactggaggcagcctgagctgcctgaggtgattgccatgctgggcttccggctggatgctgtgaagagcaatgctgctgcctacctgcagcacctgtgctacagaaatgacaaggtgaagacagatgtgaggaagctgaagggcatccctgtgctggtgggcctgctggaccaccccaagaaggaggtgcacctgggcgcctgtggggccctgaagaacatcagctttggccgggaccaggacaacaagatcgccatcaagaactgtgatggagtgcctgccctggtgcggctgctgaggaaggcccgggacatggacctgacagaggtgatcaccggcaccctgtggaacctgagcagccatgacagcatcaagatggagatcgtggaccacgccctgcacgccctgacagatgaagtcatcatcccccacagcggctgggagcgggagcccaatgaagactgcaagcccaggcacatcgagtgggagagcgtgctgaccaacacagctggctgcctgagaaatgtgtcctctgagaggtctgaggcccggaggaagctgcgggagtgtgatggcctggtggatgccctgatcttcatcgtgcaggccgagatcggccagaaggacagcgacagcaagctggtggagaactgtgtgtgcctgctgaggaacctgagctaccaggtgcaccgggagatcccccaggccgagcgctaccaggaggccgcccccaacgtggccaacaacacaggcccccatgctgccagctgctttggagccaagaagggcaaggatgagtggttcagccggggcaagaagcccattgaagatcctgccaatgacacagtggacttccccaagaggaccagccctgcccggggctatgagctgctcttccagcctgaggtggtgcgcatctacatcagcctgctgaaggagagcaagaccccagccatcctggaggccagcgctggggccatccagaacctgtgtgccggccgctggacctacggccgctacatccgcagcgccctgcggcaggagaaggccctgagcgccatcgctgacctgctgaccaatgaacatgagcgggtggtgaaggccgccagcggggccctgaggaacctggccgtggatgccaggaacaaggagctgattggcaagcacgccatccccaacctggtgaagaacctgcccggcggccagcagaacagctcctggaacttcagcgaggacaccgtcatcagcatcctgaacaccatcaatgaggtgattgctgagaacctggaggccgccaagaagctgcgggagacccagggcatcgagaagctggtgctgatcaacaagagcggcaacagaagtgagaaggaggtgcgggccgccgccctggtgctgcagaccatctggggctacaaggagctgaggaagcccctggagaaggagggctggaagaagagtgacttccaggtgaacctgaacaatgccagccgcagccagagcagccacagctatgatgacagcaccctgcccctgattgacaggaaccagaagagtgacaagaagccagaccgggaggagatccagatgagcaacatgggcagcaacaccaagagcctggacaacaactacagcaccccaaatgaaagaggagaccacaacagaaccctggacagaagtggggacctgggggacatggagcccctgaagggcaccacccccctgatgcaggatgagggccaggagagcctggaggaggagctggatgtgctggtgctggatgatgaaggaggccaggtgtcctaccccagcatgcagaagatctag

SEQ ID NO: 146472 - DNA, 2604 bp, synthetic construct
  misc_feature 1..2604: note = Description of Artificial Sequence: Synthetic coding sequence
  source 1..2604: mol_type = other DNA
atgcaggagcccggccagatcgtggagacctacacagaggaggaccctgagggcgccatgtctgtggtgtctgtggagaccagtgatgatggcaccaccaggagaacagagaccaccgtgaagaaggtggtgaagacagtgaccaccaggacagtgcagcctgtggccatgggcccagatggcctgcctgtggatgccagctctgtgagcaacaactacatccagaccctgggccgggacttcaggaagaatggaaatggaggccctggcccctacgtgggccaggccggcacagccaccctgcccaggaacttccactaccccccagatggctacagccgccactatgaagatggctacccaggcggcagtgacaactacggcagcctgagccgggtgacccgcatcgaggagcgctaccggcccagcatggagggctaccgggcccccagccggcaggatgtgtatggcccccagccccaggtgcgggtgggcggcagctctgtggacctgcaccgcttccaccctgagccctacggcctggaggatgaccagaggtccatgggctatgatgacctggactatggcatgatgtctgactatggaacagccaggagaacaggcacccccagcgacccccggcggcggctgcggagctatgaggacatgattggagaggaggtgcccagcgaccagtactactgggcccccctggcccagcacgagcggggcagcctggccagcctggacagcctgaggaagggcggccccccaccacccaactggaggcagcctgagctgcctgaggtgattgccatgctgggcttccggctggatgctgtgaagagcaatgctgctgcctacctgcagcacctgtgctacagaaatgacaaggtgaagacagatgtgaggaagctgaagggcatccctgtgctggtgggcctgctggaccaccccaagaaggaggtgcacctgggcgcctgtggggccctgaagaacatcagctttggccgggaccaggacaacaagatcgccatcaagaactgtgatggagtgcctgccctggtgcggctgctgaggaaggcccgggacatggacctgacagaggtgatcaccggcaccctgtggaacctgagcagccatgacagcatcaagatggagatcgtggaccacgccctgcacgccctgacagatgaggtgatcatcccccacagcggctgggagcgggagcccaatgaagactgcaagcccaggcacatcgagtgggagagcgtgctgaccaacacagctggctgcctgagaaatgtgagcagcgagaggtctgaggcccggaggaagctgagagaatgtgatggcctggtggatgccctgatcttcatcgtgcaggccgagatcggccagaaggacagcgacagcaagctggtggagaactgtgtgtgcctgctgaggaacctgagctaccaggtgcaccgggagatcccccaggccgagcgctaccaggaggccgccccaaatgtggccaacaacacaggcccccacgccgccagctgcttcggggccaagaagggcaaggatgagtggttcagccggggcaagaagcccatcgaggaccctgccaatgacacagtggacttccccaagaggaccagccctgcccggggctatgagctgctcttccagcctgaggtggtgcgcatctacatcagcctgctgaaggagagcaagaccccagccatcctggaggccagcgctggggccatccagaacctgtgtgccggccgctggacctacggccgctacatccgcagcgccctgcggcaggagaaggccctgagcgccatcgctgacctgctgaccaatgagcacgagcgggtggtgaaggccgccagcggggccctgaggaacctggccgtggatgccaggaacaaggagctgattggcaagcacgccatccccaacctggtgaagaacctgcccggcggccagcagaacagctcctggaacttctctgaagatactgtcatcagcatcctgaacaccatcaatgaggtgattgctgagaacctggaggccgccaagaagctgcgggagacccagggcatcgagaagctggtgctgatcaacaagagcggcaacagaagtgagaaggaggtgcgggctgctgccctggtgctgcagaccatctggggctacaaggagctgaggaagcccctggagaaggagggctggaagaagagtgacttccaggtgaacctgaacaatgccagccgcagccagagcagccacagctatgatgacagcaccctgcccctgattgacaggaaccagaagagtgacaagaagccagaccgggaggagatccagatgagcaacatgggcagcaacaccaagagcctggacaacaactacagcaccccaaatgaaagaggagaccacaacagaaccctggacagaagtggggacctgggggacatggagcccctgaagggcaccacccccctgatgcaggatgagggccaggagagcctggaggaggagctggatgtgctggtgctggatgatgagggcggccaggtgtcctaccccagcatgcagaagatctag

SEQ ID NO: 146473 - DNA, 2499 bp, synthetic construct
  misc_feature 1..2499: note = Description of Artificial Sequence: Synthetic coding sequence
  source 1..2499: mol_type = other DNA
atgcaggagcccggccagatcgtggagacctacacagaggaggaccctgagggcgccatgtctgtggtgtctgtggagaccagtgatgatggcaccaccaggagaacagagaccaccgtgaagaaggtggtgaagacagtgaccaccaggacagtgcagcctgtggccatgggcccagatggcctgcctgtggatgccagctctgtgagcaacaactacatccagaccctgggccgggacttcaggaagaatggaaatggaggccctggcccctacgtgggccaggccggcacagccaccctgcccaggaacttccactaccccccagatggctacagccgccactatgaagatggctacccaggcggcagtgacaactacggcagcctgagccgggtgacccgcatcgaggagcgctaccggcccagcatggagggctaccgggcccccagccggcaggatgtgtatggcccccagccccaggtgcgggtgggcggcagctctgtggacctgcaccgcttccaccctgagccctacggcctggaggatgaccagaggtccatgggctatgatgacctggactatggcatgatgtctgactatggaacagccaggagaacaggcacccccagcgacccccggcggcggctgcggagctatgaggacatgattggagaggaggtgcccagcgaccagtactactgggcccccctggcccagcacgagcggggcagcctggccagcctggacagcctgaggaagggcggccccccaccacccaactggaggcagcctgagctgcctgaggtgattgccatgctgggcttccggctggatgctgtgaagagcaatgctgctgcctacctgcagcacctgtgctacagaaatgacaaggtgaagacagatgtgaggaagctgaagggcatccctgtgctggtgggcctgctggaccaccccaagaaggaggtgcacctgggcgcctgtggggccctgaagaacatcagctttggccgggaccaggacaacaagatcgccatcaagaactgtgatggagtgcctgccctggtgcggctgctgaggaaggcccgggacatggacctgacagaggtgatcaccggcaccctgtggaacctgagcagccatgacagcatcaagatggagatcgtggaccacgccctgcacgccctgacagatgaggtgatcatcccccacagcggctgggagcgggagcccaatgaagactgcaagcccaggcacatcgagtgggagagcgtgctgaccaacacagctggctgcctgagaaatgtgagcagcgagaggtctgaggcccggaggaagctgagagaatgtgatggcctggtggatgccctgatcttcatcgtgcaggccgagatcggccagaaggacagcgacagcaagctggtggagaactgtgtgtgcctgctgaggaacctgagctaccaggtgcaccgggagatcccccaggccgagcgctaccaggaggccgccccaaatgtggccaacaacacaggcccccacgccgccagctgcttcggggccaagaagggcaagggcaagaagcccatcgaggaccctgccaatgacacagtggacttccccaagaggaccagccctgcccggggctatgagctgctcttccagcctgaggtggtgcgcatctacatcagcctgctgaaggagagcaagaccccagccatcctggaggccagcgctggggccatccagaacctgtgtgccggccgctggacctacggccgctacatccgcagcgccctgcggcaggagaaggccctgagcgccatcgctgacctgctgaccaatgagcacgagcgggtggtgaaggccgccagcggggccctgaggaacctggccgtggatgccaggaacaaggagctgattggcaagcacgccatccccaacctggtgaagaacctgcccggcggccagcagaacagctcctggaacttctctgaagatactgtcatcagcatcctgaacaccatcaatgaggtgattgctgagaacctggaggccgccaagaagctgcgggagacccagggcatcgagaagctggtgctgatcaacaagagcggcaacagaagtgagaaggaggtgcgggctgctgccctggtgctgcagaccatctggggctacaaggagctgaggaagcccctggagaaggagggctggaagaagagtgacttccaggtgaacctgaacaatgccagccgcagccagagcagccacagctatgatgacagcaccctgcccctgattgacaggaaccagaagagtgacaagaagccagaccgggaggagatccagatgagcaacatgggcagcaacaccaagagcctggacaacaactacagcaccccaaatgaaagaggagaccacaacagaaccctggacagaagtggggacctgggggacatggagcccctgaagggcaccacccccctgatgcagaagatctag

SEQ ID NO: 146474 - DNA, 2802 bp, synthetic construct; identical to SEQ ID NO: 146465
  misc_feature 1..2802: note = Description of Artificial Sequence: Synthetic coding sequence
  source 1..2802: mol_type = other DNA

SEQ ID NO: 146475 - DNA, 15 bp, synthetic construct
  misc_feature 1..15: note = Description of Artificial Sequence: Synthetic coding sequence
  source 1..15: mol_type = other DNA
atggatgacagctag

SEQ ID NO: 146476 - DNA, 2802 bp, synthetic construct; identical to SEQ ID NO: 146465
  misc_feature 1..2802: note = Description of Artificial Sequence: Synthetic coding sequence
  source 1..2802: mol_type = other DNA

SEQ ID NO: 146477 - DNA, 1851 bp, synthetic construct
  misc_feature 1..1851: note = Description of Artificial Sequence: Synthetic coding sequence
  source 1..1851: mol_type = other DNA
atgattggagaggaggtgcccagcgaccagtactactgggcccccctggcccagcacgagcggggcagcctggccagcctggacagcctgaggaagggcggccccccaccacccaactggaggcagcctgagctgcctgaggtgattgccatgctgggcttccggctggatgctgtgaagagcaatgctgctgcctacctgcagcacctgtgctacagaaatgacaaggtgaagacagatgtgaggaagctgaagggcatccctgtgctggtgggcctgctggaccaccccaagaaggaggtgcacctgggcgcctgtggggccctgaagaacatcagctttggccgggaccaggacaacaagatcgccatcaagaactgtgatggagtgcctgccctggtgcggctgctgaggaaggcccgggacatggacctgacagaggtgatcaccggcaccctgtggaacctgagcagccatgacagcatcaagatggagatcgtggaccacgccctgcacgccctgacagatgaggtgatcatcccccacagcggctgggagcgggagcccaatgaagactgcaagcccaggcacatcgagtgggagagcgtgctgaccaacacagctggctgcctgagaaatgtgagcagcgagaggtctgaggcccggaggaagctgagagaatgtgatggcctggtggatgccctgatcttcatcgtgcaggccgagatcggccagaaggacagcgacagcaagctggtggagaactgtgtgtgcctgctgaggaacctgagctaccaggtgcaccgggagatcccccaggccgagcgctaccaggaggccgccccaaatgtggccaacaacacaggcccccacgccgccagctgcttcggggccaagaagggcaaggatgagtggttcagccggggcaagaagcccatcgaggaccctgccaatgacacagtggacttccccaagaggaccagccctgcccggggctatgagctgctcttccagcctgaggtggtgcgcatctacatcagcctgctgaaggagagcaagaccccagccatcctggaggccagcgctggggccatccagaacctgtgtgccggccgctggacctacggccgctacatccgcagcgccctgcggcaggagaaggccctgagcgccatcgctgacctgctgaccaatgagcacgagcgggtggtgaaggccgccagcggggccctgaggaacctggccgtggatgccaggaacaaggagctgattggcaagcacgccatccccaacctggtgaagaacctgcccggcggccagcagaacagctcctggaacttctctgaagatactgtcatcagcatcctgaacaccatcaatgaggtgattgctgagaacctggaggccgccaagaagctgcgggagacccagggcatcgagaagctggtgctgatcaacaagagcggcaacagaagtgagaaggaggtgcgggctgctgccctggtgctgcagaccatctggggctacaaggagctgaggaagcccctggagaaggagggctggaagaagagtgacttccaggtgaacctgaacaatgccagccgcagccagagcagccacagctatgatgacagcaccctgcccctgattgacaggaaccagaagagtgacaagaagccagaccgggaggagatccagatgagcaacatgggcagcaacaccaagagcctggacaacaactacagcaccccaaatgaaagaggagaccacaacagaaccctggacagaagtggggacctgggggacatggagcccctgaagggcaccacccccctgatgcagaagatctag

SEQ ID NO: 146478 - DNA, 2727 bp, synthetic construct
  misc_feature 1..2727: note = Description of Artificial Sequence: Synthetic coding sequence
  source 1..2727: mol_type = other DNA
atggccaacggcaccctgacccggcggcaccagaatggccgctttgtgggagatgctgacctggagcggcagaagttcagtgacctgaagctgaatggcccccaggaccacagccacctgctgtacagcaccatccccaggatgcaggagcccggccagatcgtggagacctacacagaagaagatcctgagggcgccatgtctgtggtgtctgtggagaccagtgatgatggcaccaccaggagaacagagaccaccgtgaagaaggtggtgaagacagtgaccaccaggacagtgcagcctgtggccatgggcccagatggcctgcctgtggatgccagctctgtgagcaacaactacatccagaccctgggccgggacttcaggaagaatggaaatggaggccctggcccctacgtgggccaggccggcacagccaccctgcccaggaacttccactaccccccagatggctacagccgccactatgaagatggctacccaggcggcagtgacaactacggcagcctgagccgggtgaccagaattgaggagcgctaccggcccagcatggagggctaccgggcccccagccggcaggatgtgtatggcccccagccccaggtgcgggtgggcggcagctctgtggacctgcaccgcttccaccctgagccctacggcctggaggatgaccagaggtccatgggctatgatgacctggactatggcatgatgtctgactatggaacagcccggaggacaggcacccccagcgacccccggcggcggctgcggagctatgaggacatgattggagaggaggtgcccagcgaccagtactactgggcccccctggcccagcacgagcggggcagcctggccagcctggacagcctgaggaaaggaggccccccaccacccaactggaggcagcctgagctgcctgaggtgattgccatgctgggcttccggctggatgctgtgaagagcaatgctgctgcctacctgcagcacctgtgctacagaaatgacaaggtgaagacagatgtgaggaagctgaagggcatccctgtgctggtgggcctgctggaccaccccaagaaggaggtgcacctgggcgcctgtggggccctgaagaacatcagctttggccgggaccaggacaacaagatcgccatcaagaactgtgatggagtgcctgccctggtgcggctgctgaggaaggcccgggacatggacctgacagaggtgatcaccggcaccctgtggaacctgagcagccatgacagcatcaagatggagatcgtggaccacgccctgcacgccctgacagatgaagtcatcatcccccacagcggctgggagcgggagcccaatgaagactgcaagcccaggcacatcgagtgggagagcgtgctgaccaacacagctggctgcctgagaaatgtgtcctctgagaggtctgaggcccggaggaagctgcgggagtgtgatggcctggtggatgccctgatcttcatcgtgcaggccgagatcggccagaaggacagcgacagcaagctggtggagaactgtgtgtgcctgctgaggaacctgagctaccaggtgcaccgggagatcccccaggccgagcgctaccaggaggccgcccccaacgtggccaacaacacaggcccccatgctgccagctgctttggagccaagaagggcaagggcaagaagcccattgaagatcctgccaatgacacagtggacttccccaagaggaccagccctgcccggggctatgagctgctcttccagcctgaggtggtgcgcatctacatcagcctgctgaaggagagcaagaccccagccatcctggaggccagcgctggggccatccagaacctgtgtgccggccgctggacctacggccgctacatccgcagcgccctgcggcaggagaaggccctgagcgccatcgctgacctgctgaccaatgaacatgagcgggtggtgaaggccgccagcggggccctgaggaacctggccgtggatgccaggaacaaggagctgattggcaagcacgccatccccaacctggtgaagaacctgcccggcggccagcagaacagctcctggaacttcagcgaggacaccgtcatcagcatcctgaacaccatcaatgaggtgattgctgagaacctggaggccgccaagaagctgcgggagacccagggcatcgagaagctggtgctgatcaacaagagcggcaacagaagtgagaaggaggtgcgggccgccgccctggtgctgcagaccatctggggctacaaggagctgaggaagcccctggagaaggagggctggaagaagagtgacttccaggtgaacctgaacaatgccagccgcagccagagcagccacagctatgatgacagcaccctgcccctgattgacaggaaccagaagagtgacaagaagccagaccgggaggagatccagatgagcaacatgggcagcaacaccaagagcctggacaacaactacagcaccccaaatgaaagaggagaccacaacagaaccctggacagaagtggggacctgggggacatggagcccctgaagggcaccacccccctgatgcaggatgagggccaggagagcctggaggaggagctggatgtgctggtgctggatgatgaaggaggccaggtgtcctaccccagcatgcagaagatctag

SEQ ID NO: 146479 - DNA, 1833 bp, synthetic construct
  misc_feature 1..1833: note = Description of Artificial Sequence: Synthetic coding sequence
  source 1..1833: mol_type = other DNA
atgattggagaggaggtgcccagcgaccagtactactgggcccccctggcccagcacgagcggggcagcctggccagcctggacagcctgaggaagggcggccccccaccacccaactggaggcagcctgagctgcctgaggtgattgccatgctgggcttccggctggatgctgtgaagagcaatgctgctgcctacctgcagcacctgtgctacagaaatgacaaggtgaagacagatgtgaggaagctgaagggcatccctgtgctggtgggcctgctggaccaccccaagaaggaggtgcacctgggcgcctgtggggccctgaagaacatcagctttggccgggaccaggacaacaagatcgccatcaagaactgtgatggagtgcctgccctggtgcggctgctgaggaaggcccgggacatggacctgacagaggtgatcaccggcaccctgtggaacctgagcagccatgacagcatcaagatggagatcgtggaccacgccctgcacgccctgacagatgaggtgatcatcccccacagcggctgggagcgggagcccaatgaagactgcaagcccaggcacatcgagtgggagagcgtgctgaccaacacagctggctgcctgagaaatgtgagcagcgagaggtctgaggcccggaggaagctgagagaatgtgatggcctggtggatgccctgatcttcatcgtgcaggccgagatcggccagaaggacagcgacagcaagctggtggagaactgtgtgtgcctgctgaggaacctgagctaccaggtgcaccgggagatcccccaggccgagcgctaccaggaggccgccccaaatgtggccaacaacacaggcccccacgccgccagctgcttcggggccaagaagggcaagggcaagaagcccatcgaggaccctgccaatgacacagtggacttccccaagaggaccagccctgcccggggctatgagctgctcttccagcctgaggtggtgcgcatctacatcagcctgctgaaggagagcaagaccccagccatcctggaggccagcgctggggccatccagaacctgtgtgccggccgctggacctacggccgctacatccgcagcgccctgcggcaggagaaggccctgagcgccatcgctgacctgctgaccaatgagcacgagcgggtggtgaaggccgccagcggggccctgaggaacctggccgtggatgccaggaacaaggagctgattggcaagcacgccatccccaacctggtgaagaacctgcccggcggccagcagaacagctcctggaacttctctgaagatactgtcatcagcatcctgaacaccatcaatgaggtgattgctgagaacctggaggccgccaagaagctgcgggagacccagggcatcgagaagctggtgctgatcaacaagagcggcaacagaagtgagaaggaggtgcgggctgctgccctggtgctgcagaccatctggggctacaaggagctgaggaagcccctggagaaggagggctggaagaagagtgacttccaggtgaacctgaacaatgccagccgcagccagagcagccacagctatgatgacagcaccctgcccctgattgacaggaaccagaagagtgacaagaagccagaccgggaggagatccagatgagcaacatgggcagcaacaccaagagcctggacaacaactacagcaccccaaatgaaagaggagaccacaacagaaccctggacagaagtggggacctgggggacatggagcccctgaagggcaccacccccctgatgcagaagatctag

SEQ ID NO: 146480 - DNA, 1938 bp, synthetic construct
  misc_feature 1..1938: note = Description of Artificial Sequence: Synthetic coding sequence
  source 1..1938: mol_type = other DNA
atgattggagaggaggtgcccagcgaccagtactactgggcccccctggcccagcacgagcggggcagcctggccagcctggacagcctgaggaagggcggccccccaccacccaactggaggcagcctgagctgcctgaggtgattgccatgctgggcttccggctggatgctgtgaagagcaatgctgctgcctacctgcagcacctgtgctacagaaatgacaaggtgaagacagatgtgaggaagctgaagggcatccctgtgctggtgggcctgctggaccaccccaagaaggaggtgcacctgggcgcctgtggggccctgaagaacatcagctttggccgggaccaggacaacaagatcgccatcaagaactgtgatggagtgcctgccctggtgcggctgctgaggaaggcccgggacatggacctgacagaggtgatcaccggcaccctgtggaacctgagcagccatgacagcatcaagatggagatcgtggaccacgccctgcacgccctgacagatgaggtgatcatcccccacagcggctgggagcgggagcccaatgaagactgcaagcccaggcacatcgagtgggagagcgtgctgaccaacacagctggctgcctgagaaatgtgagcagcgagaggtctgaggcccggaggaagctgagagaatgtgatggcctggtggatgccctgatcttcatcgtgcaggccgagatcggccagaaggacagcgacagcaagctggtggagaactgtgtgtgcctgctgaggaacctgagctaccaggtgcaccgggagatcccccaggccgagcgctaccaggaggccgccccaaatgtggccaacaacacaggcccccacgccgccagctgcttcggggccaagaagggcaaggatgagtggttcagccggggcaagaagcccatcgaggaccctgccaatgacacagtggacttccccaagaggaccagccctgcccggggctatgagctgctcttccagcctgaggtggtgcgcatctacatcagcctgctgaaggagagcaagaccccagccatcctggaggccagcgctggggccatccagaacctgtgtgccggccgctggacctacggccgctacatccgcagcgccctgcggcaggagaaggccctgagcgccatcgctgacctgctgaccaatgagcacgagcgggtggtgaaggccgccagcggggccctgaggaacctggccgtggatgccaggaacaaggagctgattggcaagcacgccatccccaacctggtgaagaacctgcccggcggccagcagaacagctcctggaacttctctgaagatactgtcatcagcatcctgaacaccatcaatgaggtgattgctgagaacctggaggccgccaagaagctgcgggagacccagggcatcgagaagctggtgctgatcaacaagagcggcaacagaagtgagaaggaggtgcgggctgctgccctggtgctgcagaccatctggggctacaaggagctgaggaagcccctggagaaggagggctggaagaagagtgacttccaggtgaacctgaacaatgccagccgcagccagagcagccacagctatgatgacagcaccctgcccctgattgacaggaaccagaagagtgacaagaagccagaccgggaggagatccagatgagcaacatgggcagcaacaccaagagcctggacaacaactacagcaccccaaatgaaagaggagaccacaacagaaccctggacagaagtggggacctgggggacatggagcccctgaagggcaccacccccctgatgcaggatgagggccaggagagcctggaggaggagctggatgtgctggtgctggatgatgagggcggccaggtgtcctaccccagcatgcagaagatctag

SEQ ID NO: 146481 - DNA, 2517 bp, synthetic construct
  misc_feature 1..2517: note = Description of Artificial Sequence: Synthetic coding sequence
  source 1..2517: mol_type = other DNA
atgcaggagcccggccagatcgtggagacctacacagaggaggaccctgagggcgccatgtctgtggtgtctgtggagaccagtgatgatggcaccaccaggagaacagagaccaccgtgaagaaggtggtgaagacagtgaccaccaggacagtgcagcctgtggccatgggcccagatggcctgcctgtggatgccagctctgtgagcaacaactacatccagaccctgggccgggacttcaggaagaatggaaatggaggccctggcccctacgtgggccaggccggcacagccaccctgcccaggaacttccactaccccccagatggctacagccgccactatgaagatggctacccaggcggcagtgacaactacggcagcctgagccgggtgacccgcatcgaggagcgctaccggcccagcatggagggctaccgggcccccagccggcaggatgtgtatggcccccagccccaggtgcgggtgggcggcagctctgtggacctgcaccgcttccaccctgagccctacggcctggaggatgaccagaggtccatgggctatgatgacctggactatggcatgatgtctgactatggaacagccaggagaacaggcacccccagcgacccccggcggcggctgcggagctatgaggacatgattggagaggaggtgcccagcgaccagtactactgggcccccctggcccagcacgagcggggcagcctggccagcctggacagcctgaggaagggcggccccccaccacccaactggaggcagcctgagctgcctgaggtgattgccatgctgggcttccggctggatgctgtgaagagcaatgctgctgcctacctgcagcacctgtgctacagaaatgacaaggtgaagacagatgtgaggaagctgaagggcatccctgtgctggtgggcctgctggaccaccccaagaaggaggtgcacctgggcgcctgtggggccctgaagaacatcagctttggccgggaccaggacaacaagatcgccatcaagaactgtgatggagtgcctgccctggtgcggctgctgaggaaggcccgggacatggacctgacagaggtgatcaccggcaccctgtggaacctgagcagccatgacagcatcaagatggagatcgtggaccacgccctgcacgccctgacagatgaggtgatcatcccccacagcggctgggagcgggagcccaatgaagactgcaagcccaggcacatcgagtgggagagcgtgctgaccaacacagctggctgcctgagaaatgtgagcagcgagaggtctgaggcccggaggaagctgagagaatgtgatggcctggtggatgccctgatcttcatcgtgcaggccgagatcggccagaaggacagcgacagcaagctggtggagaactgtgtgtgcctgctgaggaacctgagctaccaggtgcaccgggagatcccccaggccgagcgctaccaggaggccgccccaaatgtggccaacaacacaggcccccacgccgccagctgcttcggggccaagaagggcaaggatgagtggttcagccggggcaagaagcccatcgaggaccctgccaatgacacagtggacttccccaagaggaccagccctgcccggggctatgagctgctcttccagcctgaggtggtgcgcatctacatcagcctgctgaaggagagcaagaccccagccatcctggaggccagcgctggggccatccagaacctgtgtgccggccgctggacctacggccgctacatccgcagcgccctgcggcaggagaaggccctgagcgccatcgctgacctgctgaccaatgagcacgagcgggtggtgaaggccgccagcggggccctgaggaacctggccgtggatgccaggaacaaggagctgattggcaagcacgccatccccaacctggtgaagaacctgcccggcggccagcagaacagctcctggaacttctctgaagatactgtcatcagcatcctgaacaccatcaatgaggtgattgctgagaacctggaggccgccaagaagctgcgggagacccagggcatcgagaagctggtgctgatcaacaagagcggcaacagaagtgagaaggaggtgcgggctgctgccctggtgctgcagaccatctggggctacaaggagctgaggaagcccctggagaaggagggctggaagaagagtgacttccaggtgaacctgaacaatgccagccgcagccagagcagccacagctatgatgacagcaccctgcccctgattgacaggaaccagaagagtgacaagaagccagaccgggaggagatccagatgagcaacatgggcagcaacaccaagagcctggacaacaactacagcaccccaaatgaaagaggagaccacaacagaaccctggacagaagtggggacctgggggacatggagcccctgaagggcaccacccccctgatgcagaagatctag

SEQ ID NO: 146482 - DNA, 2640 bp, synthetic construct
  misc_feature 1..2640: note = Description of Artificial Sequence: Synthetic coding sequence
  source 1..2640: mol_type = other DNA
atggccaacggcaccctgacccggcggcaccagaatggccgctttgtgggagatgctgacctggagcggcagaagttcagtgacctgaagctgaatggcccccaggaccacagccacctgctgtacagcaccatccccaggatgcaggagcccggccagatcgtggagacctacacagaagaagatcctgagggcgccatgtctgtggtgtctgtggagaccagtgatgatggcaccaccaggagaacagagaccaccgtgaagaaggtggtgaagacagtgaccaccaggacagtgcagcctgtggccatgggcccagatggcctgcctgtggatgccagctctgtgagcaacaactacatccagaccctgggccgggacttcaggaagaatggaaatggaggccctggcccctacgtgggccaggccggcacagccaccctgcccaggaacttccactaccccccagatggctacagccgccactatgaagatggctacccaggcggcagtgacaactacggcagcctgagccgggtgaccagaattgaggagcgctaccggcccagcatggagggctaccgggcccccagccggcaggatgtgtatggcccccagccccaggtgcgggtgggcggcagctctgtggacctgcaccgcttccaccctgagccctacggcctggaggatgaccagaggtccatgggctatgatgacctggactatggcatgatgtctgactatggaacagcccggaggacaggcacccccagcgacccccggcggcggctgcggagctatgaggacatgattggagaggaggtgcccagcgaccagtactactgggcccccctggcccagcacgagcggggcagcctggccagcctggacagcctgaggaaaggaggccccccaccacccaactggaggcagcctgagctgcctgaggtgattgccatgctgggcttccggctggatgctgtgaagagcaatgctgctgcctacctgcagcacctgtgctacagaaatgacaaggtgaagacagatgtgaggaagctgaagggcatccctgtgctggtgggcctgctggaccaccccaagaaggaggtgcacctgggcgcctgtggggccctgaagaacatcagctttggccgggaccaggacaacaagatcgccatcaagaactgtgatggagtgcctgccctggtgcggctgctgaggaaggcccgggacatggacctgacagaggtgatcaccggcaccctgtggaacctgagcagccatgacagcatcaagatggagatcgtggaccacgccctgcacgccctgacagatgaagtcatcatcccccacagcggctgggagcgggagcccaatgaagactgcaagcccaggcacatcgagtgggagagcgtgctgaccaacacagctggctgcctgagaaatgtgtcctctgagaggtctgaggcccggaggaagctgcgggagtgtgatggcctggtggatgccctgatcttcatcgtgcaggccgagatcggccagaaggacagcgacagcaagctggtggagaactgtgtgtgcctgctgaggaacctgagctaccaggtgcaccgggagatcccccaggccgagcgctaccaggaggccgcccccaacgtggccaacaacacaggcccccatgctgccagctgctttggagccaagaagggcaagggcaagaagcccattgaagatcctgccaatgacacagtggacttccccaagaggaccagccctgcccggggctatgagctgctcttccagcctgaggtggtgcgcatctacatcagcctgctgaaggagagcaagaccccagccatcctggaggccagcgctggggccatccagaacctgtgtgccggccgctggacctacggccgctacatccgcagcgccctgcggcaggagaaggccctgagcgccatcgctgacctgctgaccaatgaacatgagcgggtggtgaaggccgccagcggggccctgaggaacctggccgtggatgccaggaacaaggagctgattggcaagcacgccatccccaacctggtgaagaacctgcccggcggccagcagaacagctcctggaacttcagcgaggacaccgtcatcagcatcctgaacaccatcaatgaggtgattgctgagaacctggaggccgccaagaagctgcgggagacccagggcatcgagaagctggtgctgatcaacaagagcggcaacagaagtgagaaggaggtgcgggccgccgccctggtgctgcagaccatctggggctacaaggagctgaggaagcccctggagaaggagggctggaagaagagtgacttccaggtgaacctgaacaatgccagccgcagccagagcagccacagctatgatgacagcaccctgcccctgattgacaggaaccagaagagtgacaagaagccagaccgggaggagatccagatgagcaacatgggcagcaacaccaagagcctggacaacaactacagcaccccaaatgaaagaggagaccacaacagaaccctggacagaagtggggacctgggggacatggagcccctgaagggcaccacccccctgatgcagaagatctag

SEQ ID NO: 146483 - DNA, 2640 bp, synthetic construct; identical to SEQ ID NO: 146482
  misc_feature 1..2640: note = Description of Artificial Sequence: Synthetic coding sequence
  source 1..2640: mol_type = other DNA

SEQ ID NO: 146484 - DNA, 2499 bp, synthetic construct; identical to SEQ ID NO: 146473
  misc_feature 1..2499: note = Description of Artificial Sequence: Synthetic coding sequence
  source 1..2499: mol_type = other DNA

SEQ ID NO: 146485 - DNA, 390 bp, synthetic construct
  misc_feature 1..390: note = Description of Artificial Sequence: Synthetic coding sequence
  source 1..390: mol_type = other DNA
atggccaacggcaccctgacccggcggcaccagaatggccgctttgtgggagatgctgacctggagcggcagaagttcagtgacctgaagctgaatggcccccaggaccacagccacctgctgtacagcaccatccccaggatgcaggagcccggccagatcgtggagacctacacagaagaagatcctgagggcgccatgtctgtggtgtctgtggagaccagtgatgatggcaccaccaggagaacagagaccaccgtgaagaaggtggtgaagacagtgaccaccaggacagtgcagcctgtggccatgggcccagatggcctgcctgtggatgccagctctgtgagcaacaactacatccagaccctgggccgggacttcagatag

SEQ ID NO: 146486 - DNA, 2586 bp, synthetic construct
  misc_feature 1..2586: note = Description of Artificial Sequence: Synthetic coding sequence
  source 1..2586: mol_type = other DNA
atgcaggagcccggccagatcgtggagacctacacagaggaggaccctgagggcgccatgtctgtggtgtctgtggagaccagtgatgatggcaccaccaggagaacagagaccaccgtgaagaaggtggtgaagacagtgaccaccaggacagtgcagcctgtggccatgggcccagatggcctgcctgtggatgccagctctgtgagcaacaactacatccagaccctgggccgggacttcaggaagaatggaaatggaggccctggcccctacgtgggccaggccggcacagccaccctgcccaggaacttccactaccccccagatggctacagccgccactatgaagatggctacccaggcggcagtgacaactacggcagcctgagccgggtgacccgcatcgaggagcgctaccggcccagcatggagggctaccgggcccccagccggcaggatgtgtatggcccccagccccaggtgcgggtgggcggcagctctgtggacctgcaccgcttccaccctgagccctacggcctggaggatgaccagaggtccatgggctatgatgacctggactatggcatgatgtctgactatggaacagccaggagaacaggcacccccagcgacccccggcggcggctgcggagctatgaggacatgattggagaggaggtgcccagcgaccagtactactgggcccccctggcccagcacgagcggggcagcctggccagcctggacagcctgaggaagggcggccccccaccacccaactggaggcagcctgagctgcctgaggtgattgccatgctgggcttccggctggatgctgtgaagagcaatgctgctgcctacctgcagcacctgtgctacagaaatgacaaggtgaagacagatgtgaggaagctgaagggcatccctgtgctggtgggcctgctggaccaccccaagaaggaggtgcacctgggcgcctgtggggccctgaagaacatcagctttggccgggaccaggacaacaagatcgccatcaagaactgtgatggagtgcctgccctggtgcggctgctgaggaaggcccgggacatggacctgacagaggtgatcaccggcaccctgtggaacctgagcagccatgacagcatcaagatggagatcgtggaccacgccctgcacgccctgacagatgaggtgatcatcccccacagcggctgggagcgggagcccaatgaagactgcaagcccaggcacatcgagtgggagagcgtgctgaccaacacagctggctgcctgagaaatgtgagcagcgagaggtctgaggcccggaggaagctgagagaatgtgatggcctggtggatgccctgatcttcatcgtgcaggccgagatcggccagaaggacagcgacagcaagctggtggagaactgtgtgtgcctgctgaggaacctgagctaccaggtgcaccgggagatcccccaggccgagcgctaccaggaggccgccccaaatgtggccaacaacacaggcccccacgccgccagctgcttcggggccaagaagggcaagggcaagaagcccatcgaggaccctgccaatgacacagtggacttccccaagaggaccagccctgcccggggctatgagctgctcttccagcctgaggtggtgcgcatctacatcagcctgctgaaggagagcaagaccccagccatcctggaggccagcgctggggccatccagaacctgtgtgccggccgctggacctacggccgctacatccgcagcgccctgcggcaggagaaggccctgagcgccatcgctgacctgctgaccaatgagcacgagcgggtggtgaaggccgccagcggggccctgaggaacctggccgtggatgccaggaacaaggagctgattggcaagcacgccatccccaacctggtgaagaacctgcccggcggccagcagaacagctcctggaacttctctgaagatactgtcatcagcatcctgaacaccatcaatgaggtgattgctgagaacctggaggccgccaagaagctgcgggagacccagggcatcgagaagctggtgctgatcaacaagagcggcaacagaagtgagaaggaggtgcgggctgctgccctggtgctgcagaccatctggggctacaaggagctgaggaagcccctggagaaggagggctggaagaagagtgacttccaggtgaacctgaacaatgccagccgcagccagagcagccacagctatgatgacagcaccctgcccctgattgacaggaaccagaagagtgacaagaagccagaccgggaggagatccagatgagcaacatgggcagcaacaccaagagcctggacaacaactacagcaccccaaatgaaagaggagaccacaacagaaccctggacagaagtggggacctgggggacatggagcccctgaagggcaccacccccctgatgcaggatgagggccaggagagcctggaggaggagctggatgtgctggtgctggatgatgagggcggccaggtgtcctaccccagcatgcagaagatctag

SEQ ID NO: 146487 - DNA, 2658 bp, synthetic construct
  misc_feature 1..2658: note = Description of Artificial Sequence: Synthetic coding sequence
  source 1..2658: mol_type = other DNA
atggccaacggcaccctgacccggcggcaccagaatggccgctttgtgggagatgctgacctggagcggcagaagttcagtgacctgaagctgaatggcccccaggaccacagccacctgctgtacagcaccatccccaggatgcaggagcccggccagatcgtggagacctacacagaagaagatcctgagggcgccatgtctgtggtgtctgtggagaccagtgatgatggcaccaccaggagaacagagaccaccgtgaagaaggtggtgaagacagtgaccaccaggacagtgcagcctgtggccatgggcccagatggcctgcctgtggatgccagctctgtgagcaacaactacatccagaccctgggccgggacttcaggaagaatggaaatggaggccctggcccctacgtgggccaggccggcacagccaccctgcccaggaacttccactaccccccagatggctacagccgccactatgaagatggctacccaggcggcagtgacaactacggcagcctgagccgggtgaccagaattgaggagcgctaccggcccagcatggagggctaccgggcccccagccggcaggatgtgtatggcccccagccccaggtgcgggtgggcggcagctctgtggacctgcaccgcttccaccctgagccctacggcctggaggatgaccagaggtccatgggctatgatgacctggactatggcatgatgtctgactatggaacagcccggaggacaggcacccccagcgacccccggcggcggctgcggagctatgaggacatgattggagaggaggtgcccagcgaccagtactactgggcccccctggcccagcacgagcggggcagcctggccagcctggacagcctgaggaaaggaggccccccaccacccaactggaggcagcctgagctgcctgaggtgattgccatgctgggcttccggctggatgctgtgaagagcaatgctgctgcctacctgcagcacctgtgctacagaaatgacaaggtgaagacagatgtgaggaagctgaagggcatccctgtgctggtgggcctgctggaccaccccaagaaggaggtgcacctgggcgcctgtggggccctgaagaacatcagctttggccgggaccaggacaacaagatcgccatcaagaactgtgatggagtgcctgccctggtgcggctgctgaggaaggcccgggacatggacctgacagaggtgatcaccggcaccctgtggaacctgagcagccatgacagcatcaagatggagatcgtggaccacgccctgcacgccctgacagatgaagtcatcatcccccacagcggctgggagcgggagcccaatgaagactgcaagcccaggcacatcgagtgggagagcgtgctgaccaacacagctggctgcctgagaaatgtgtcctctgagaggtctgaggcccggaggaagctgcgggagtgtgatggcctggtggatgccctgatcttcatcgtgcaggccgagatcggccagaaggacagcgacagcaagctggtggagaactgtgtgtgcctgctgaggaacctgagctaccaggtgcaccgggagatcccccaggccgagcgctaccaggaggccgcccccaacgtggccaacaacacaggcccccatgctgccagctgctttggagccaagaagggcaaggatgagtggttcagccggggcaagaagcccattgaagatcctgccaatgacacagtggacttccccaagaggaccagccctgcccggggctatgagctgctcttccagcctgaggtggtgcgcatctacatcagcctgctgaaggagagcaagaccccagccatcctggaggccagcgctggggccatccagaacctgtgtgccggccgctggacctacggccgctacatccgcagcgccctgcggcaggagaaggccctgagcgccatcgctgacctgctgaccaatgaacatgagcgggtggtgaaggccgccagcggggccctgaggaacctggccgtggatgccaggaacaaggagctgattggcaagcacgccatccccaacctggtgaagaacctgcccggcggccagcagaacagctcctggaacttcagcgaggacaccgtcatcagcatcctgaacaccatcaatgaggtgattgctgagaacctggaggccgccaagaagctgcgggagacccagggcatcgagaagctggtgctgatcaacaagagcggcaacagaagtgagaaggaggtgcgggccgccgccctggtgctgcagaccatctggggctacaaggagctgaggaagcccctggagaaggagggctggaagaagagtgacttccaggtgaacctgaacaatgccagccgcagccagagcagccacagctatgatgacagcaccctgcccctgattgacaggaaccagaagagtgacaagaagccagaccgggaggagatccagatgagcaacatgggcagcaacaccaagagcctggacaacaactacagcaccccaaatgaaagaggagaccacaacagaaccctggacagaagtggggacctgggggacatggagcccctgaagggcaccacccccctgatgcagaagatctag

SEQ ID NO: 146488 - DNA, 1920 bp, synthetic construct
  misc_feature 1..1920: note = Description of Artificial Sequence: Synthetic coding sequence
  source 1..1920: mol_type = other DNA
atgattggagaggaggtgcccagcgaccagtactactgggcccccctggcccagcacgagcggggcagcctggccagcctggacagcctgaggaagggcggccccccaccacccaactggaggcagcctgagctgcctgaggtgattgccatgctgggcttccggctggatgctgtgaagagcaatgctgctgcctacctgcagcacctgtgctacagaaatgacaaggtgaagacagatgtgaggaagctgaagggcatccctgtgctggtgggcctgctggaccaccccaagaaggaggtgcacctgggcgcctgtggggccctgaagaacatcagctttggccgggaccaggacaacaagatcgccatcaagaactgtgatggagtgcctgccctggtgcggctgctgaggaaggcccgggacatggacctgacagaggtgatcaccggcaccctgtggaacctgagcagccatgacagcatcaagatggagatcgtggaccacgccctgcacgccctgacagatgaggtgatcatcccccacagcggctgggagcgggagcccaatgaagactgcaagcccaggcacatcgagtgggagagcgtgctgaccaacacagctggctgcctgagaaatgtgagcagcgagaggtctgaggcccggaggaagctgagagaatgtgatggcctggtggatgccctgatcttcatcgtgcaggccgagatcggccagaaggacagcgacagcaagctggtggagaactgtgtgtgcctgctgaggaacctgagctaccaggtgcaccgggagatcccccaggccgagcgctaccaggaggccgccccaaatgtggccaacaacacaggcccccacgccgccagctgcttcggggccaagaagggcaagggcaagaagcccatcgaggaccctgccaatgacacagtggacttccccaagaggaccagccctgcccggggctatgagctgctcttccagcctgaggtggtgcgcatctacatcagcctgctgaaggagagcaagaccccagccatcctggaggccagcgctggggccatccagaacctgtgtgccggccgctggacctacggccgctacatccgcagcgccctgcggcaggagaaggccctgagcgccatcgctgacctgctgaccaatgagcacgagcgggtggtgaaggccgccagcggggccctgaggaacctggccgtggatgccaggaacaaggagctgattggcaagcacgccatccccaacctggtgaagaacctgcccggcggccagcagaacagctcctggaacttctctgaagatactgtcatcagcatcctgaacaccatcaatgaggtgattgctgagaacctggaggccgccaagaagctgcgggagacccagggcatcgagaagctggtgctgatcaacaagagcggcaacagaagtgagaaggaggtgcgggctgctgccctggtgctgcagaccatctggggctacaaggagctgaggaagcccctggagaaggagggctggaagaagagtgacttccaggtgaacctgaacaatgccagccgcagccagagcagccacagctatgatgacagcaccctgcccctgattgacaggaaccagaagagtgacaagaagccagaccgggaggagatccagatgagcaacatgggcagcaacaccaagagcctggacaacaactacagcaccccaaatgaaagaggagaccacaacagaaccctggacagaagtggggacctgggggacatggagcccctgaagggcaccacccccctgatgcaggatgagggccaggagagcctggaggaggagctggatgtgctggtgctggatgatgagggcggccaggtgtcctaccccagcatgcagaagatctag

SEQ ID NO: 146489 - DNA, 2499 bp, synthetic construct; identical to SEQ ID NO: 146473
  misc_feature 1..2499: note = Description of Artificial Sequence: Synthetic coding sequence
  source 1..2499: mol_type = other DNA

SEQ ID NO: 146490 - DNA, 2499 bp, synthetic construct; identical to SEQ ID NO: 146473
  misc_feature 1..2499: note = Description of Artificial Sequence: Synthetic coding sequence
  source 1..2499: mol_type = other DNA

SEQ ID NO: 146491 - DNA, 2640 bp, synthetic construct; identical to SEQ ID NO: 146482
  misc_feature 1..2640: note = Description of Artificial Sequence: Synthetic coding sequence
  source 1..2640: mol_type = other DNA

SEQ ID NO: 146492 - DNA, 2523 bp, synthetic construct
  misc_feature 1..2523: note = Description of Artificial Sequence: Synthetic coding sequence
  source 1..2523: mol_type = other DNA
atgcaggagcccggccagatcgtggagacctacacagaggaggaccctgagggcgccatgtctgtggtgtctgtggagaccagtgatgatggcaccaccaggagaacagagaccaccgtgaagaaggtggtgaagacagtgaccaccaggacagtgcagcctgtggccatgggcccagatggcctgcctgtggatgccagctctgtgagcaacaactacatccagaccctgggccgggacttcaggaagaatggaaatggaggccctggcccctacgtgggccaggccggcacagccaccctgcccaggaacttccactaccccccagatggctacagccgccactatgaagatggctacccaggcggcagtgacaactacggcagcctgagccgggtgacccgcatcgaggagcgctaccggcccagcatggagggctaccgggcccccagccggcaggatgtgtatggcccccagccccaggtgcgggtgggcggcagctctgtggacctgcaccgcttccaccctgagccctacggcctggaggatgaccagaggtccatgggctatgatgacctggactatggcatgatgtctgactatggaacagccaggagaacaggcacccccagcgacccccggcggcggctgcggagctatgaggacatgattggagaggaggtgcccagcgaccagtactactgggcccccctggcccagcacgagcggggcagcctggccagcctggacagcctgaggaagggcggccccccaccacccaactggaggcagcctgagctgcctgaggtgattgccatgctgggcttccggctggatgctgtgaagagcaatgctgctgcctacctgcagcacctgtgctacagaaatgacaaggtgaagacagatgtgaggaagctgaagggcatccctgtgctggtgggcctgctggaccaccccaagaaggaggtgcacctgggcgcctgtggggccctgaagaacatcagctttggccgggaccaggacaacaagatcgccatcaagaactgtgatggagtgcctgccctggtgcggctgctgaggaaggcccgggacatggacctgacagaggtgatcaccggcaccctgtggaacctgagcagccatgacagcatcaagatggagatcgtggaccacgccctgcacgccctgacagatgaggtgatcatcccccacagcggctgggagcgggagcccaatgaagactgcaagcccaggcacatcgagtgggagagcgtgctgaccaacacagctggctgcctgagaaatgtgagcagcgagaggtctgaggcccggaggaagctgagagaatgtgatggcctggtggatgccctgatcttcatcgtgcaggccgagatcggccagaaggacagcgacagcaagctggtggagaactgtgtgtgcctgctgaggaacctgagctaccaggtgcaccgggagatcccccaggccgagcgctaccaggaggccgccccaaatgtggccaacaacacaggcccccacgccgccagctgcttcggggccaagaagggcaagggcaagaagcccatcgaggaccctgccaatgacacagtggacttccccaagaggaccagccctgcccggggctatgagctgctcttccagcctgaggtggtgcgcatctacatcagcctgctgaaggagagcaagaccccagccatcctggaggccagcgctggggccatccagaacctgtgtgccggccgctggacctacggccgctacatccgcagcgccctgcggcaggagaaggccctgagcgccatcgctgacctgctgaccaatgagcacgagcgggtggtgaaggccgccagcggggccctgaggaacctggccgtggatgccaggaacaaggagctgattggcaagcacgccatccccaacctggtgaagaacctgcccggcggccagcagaacagctcctggaacttctctgaagatactgtcatcagcatcctgaacaccatcaatgaggtgattgctgagaacctggaggccgccaagaagctgcgggagacccagggcatcgagaagctggtgctgatcaacaagagcggcaacagaagtgagaaggaggtgcgggctgctgccctggtgctgcagaccatctggggctacaaggagctgaggaagcccctggagaaggagggctggaagaagagtgacttccaggtgaacctgaacaatgccagccgcagccagagcagccacagctatgatgacagcaccctgcccctgattgacaggaaccagaagagtgacaacaactacagcaccccaaatgaaagaggagaccacaacagaaccctggacagaagtggggacctgggggacatggagcccctgaagggcaccacccccctgatgcaggatgagggccaggagagcctggaggaggagctggatgtgctggtgctggatgatgaaggaggccaggtgtcctaccccagcatgcagaagatctag

SEQ ID NO: 146493 - DNA, 2745 bp, synthetic construct
  misc_feature 1..2745: note = Description of Artificial Sequence: Synthetic coding sequence
  source 1..2745: mol_type = other DNA
atggccaacggcaccctgacccggcggcaccagaatggccgctttgtgggagatgctgacctggagcggcagaagttcagtgacctgaagctgaatggcccccaggaccacagccacctgctgtacagcaccatccccaggatgcaggagcccggccagatcgtggagacctacacagaagaagatcctgagggcgccatgtctgtggtgtctgtggagaccagtgatgatggcaccaccaggagaacagagaccaccgtgaagaaggtggtgaagacagtgaccaccaggacagtgcagcctgtggccatgggcccagatggcctgcctgtggatgccagctctgtgagcaacaactacatccagaccctgggccgggacttcaggaagaatggaaatggaggccctggcccctacgtgggccaggccggcacagccaccctgcccaggaacttccactaccccccagatggctacagccgccactatgaagatggctacccaggcggcagtgacaactacggcagcctgagccgggtgaccagaattgaggagcgctaccggcccagcatggagggctaccgggcccccagccggcaggatgtgtatggcccccagccccaggtgcgggtgggcggcagctctgtggacctgcaccgcttccaccctgagccctacggcctggaggatgaccagaggtccatgggctatgatgacctggactatggcatgatgtctgactatggaacagcccggaggacaggcacccccagcgacccccggcggcggctgcggagctatgaggacatgattggagaggaggtgcccagcgaccagtactactgggcccccctggcccagcacgagcggggcagcctggccagcctggacagcctgaggaaaggaggccccccaccacccaactggaggcagcctgagctgcctgaggtgattgccatgctgggcttccggctggatgctgtgaagagcaatgctgctgcctacctgcagcacctgtgctacagaaatgacaaggtgaagacagatgtgaggaagctgaagggcatccctgtgctggtgggcctgctggaccaccccaagaaggaggtgcacctgggcgcctgtggggccctgaagaacatcagctttggccgggaccaggacaacaagatcgccatcaagaactgtgatggagtgcctgccctggtgcggctgctgaggaaggcccgggacatggacctgacagaggtgatcaccggcaccctgtggaacctgagcagccatgacagcatcaagatggagatcgtggaccacgccctgcacgccctgacagatgaagtcatcatcccccacagcggctgggagcgggagcccaatgaagactgcaagcccaggcacatcgagtgggagagcgtgctgaccaacacagctggctgcctgagaaatgtgtcctctgagaggtctgaggcccggaggaagctgcgggagtgtgatggcctggtggatgccctgatcttcatcgtgcaggccgagatcggccagaaggacagcgacagcaagctggtggagaactgtgtgtgcctgctgaggaacctgagctaccaggtgcaccgggagatcccccaggccgagcgctaccaggaggccgcccccaacgtggccaacaacacaggcccccatgctgccagctgctttggagccaagaagggcaaggatgagtggttcagccggggcaagaagcccattgaagatcctgccaatgacacagtggacttccccaagaggaccagccctgcccggggctatgagctgctcttccagcctgaggtggtgcgcatctacatcagcctgctgaaggagagcaagaccccagccatcctggaggccagcgctggggccatccagaacctgtgtgccggccgctggacctacggccgctacatccgcagcgccctgcggcaggagaaggccctgagcgccatcgctgacctgctgaccaatgaacatgagcgggtggtgaaggccgccagcggggccctgaggaacctggccgtggatgccaggaacaaggagctgattggcaagcacgccatccccaacctggtgaagaacctgcccggcggccagcagaacagctcctggaacttcagcgaggacaccgtcatcagcatcctgaacaccatcaatgaggtgattgctgagaacctggaggccgccaagaagctgcgggagacccagggcatcgagaagctggtgctgatcaacaagagcggcaacagaagtgagaaggaggtgcgggccgccgccctggtgctgcagaccatctggggctacaaggagctgaggaagcccctggagaaggagggctggaagaagagtgacttccaggtgaacctgaacaatgccagccgcagccagagcagccacagctatgatgacagcaccctgcccctgattgacaggaaccagaagagtgacaagaagccagaccgggaggagatccagatgagcaacatgggcagcaacaccaagagcctggacaacaactacagcaccccaaatgaaagaggagaccacaacagaaccctggacagaagtggggacctgggggacatggagcccctgaagggcaccacccccctgatgcaggatgagggccaggagagcctggaggaggagctggatgtgctggtgctggatgatgaaggaggccaggtgtcctaccccagcatgcagaagatctag

SEQ ID NO: 146494 - DNA, 381 bp, synthetic construct
  misc_feature 1..381: note = Description of Artificial Sequence: Synthetic coding sequence
  source 1..381: mol_type = other DNA
atgattggagaggaggtgcccagcgaccagtactactgggcccccctggcccagcacgagcggggcagcctggccagcctggacagcctgaggaagggcggccccccaccacccaactggaggcagcctgagctgcctgaggtgattgccatgctgggcttccggctggatgctgtgaagagcaatgctgctgcctacctgcagcacctgtgctacagaaatgacaaggtgaagacagatgtgaggaagctgaagggcatccctgtgctggtgggcctgctggaccaccccaagaaggaggtgcacctgggcgcctgtggggccctgaagaacatcagctttggccgggaccaggacaacaagatcgccatcaagaactag

SEQ ID NO: 146495 - DNA, 2640 bp, synthetic construct; identical to SEQ ID NO: 146482
  misc_feature 1..2640: note = Description of Artificial Sequence: Synthetic coding sequence
  source 1..2640: mol_type = other DNA

SEQ ID NO: 146496 - DNA, 3678 bp, synthetic construct
  misc_feature 1..3678: note = Description of Artificial Sequence: Synthetic coding sequence
  source 1..3678: mol_type = other DNA
atgtttgccaggaagcccccaggagctgcccccctgggcgccatgcctgtgcctgaccagcccagcagcgccagcgagaagaccagcagcctgagccctggcctgaacaccagcaatggagatggcagcgagacagagaccaccagcgccatcctggcctctgtgaaggagcaggagctgcagtttgagcggctgacccgggagctggaggccgagcggcagatcgtggccagccagctggagcgctgcaagctgggcagcgagaccggctccatgagctccatgagcagcgctgaggagcagttccagtggcagagccaggacggccagaaggacattgaagatgagctgaccaccggcctggagctggtggacagctgcatccgcagcctgcaggagagcggcatcctggacccccaggactacagcactggagagcggcccagcctgctgagccagagcgccctgcagctgaacagcaagccagagggcagcttccagtacccagccagctaccacagcaaccagaccctggccctgggggagaccacccccagccagctgcctgcccggggcacccaggcccgggccaccggccagagcttcagccagggcaccaccagccgggccggccacctggccggccctgagcccgcccctcctcctcctcctccaccccgggagccctttgcccccagcctgggcagcgccttccacctgcctgatgcccccccagctgctgctgctgctgccctgtactacagcagcagcaccctgcctgccccaccccggggcggcagccccctggccgccccccagggcggcagccccaccaagctgcagagaggaggcagcgcccctgagggcgccacctatgctgccccccggggcagcagccccaagcagagccccagccggctggccaagagctacagcaccagcagccccatcaacatcgtggtgtcctctgctggcctgagccccatccgggtgaccagcccccccaccgtgcagagcaccatcagcagcagccccatccaccagctgagcagcaccatcggcacctacgccaccctgagccccaccaagaggctggtgcacgccagcgagcagtacagcaagcacagccaggagctgtatgccacagccaccctgcagaggcctggcagcctggccgccggcagccgggccagctacagcagccagcacggccacctgggccctgagctgcgggccctgcagagccctgagcaccacatcgaccccatctatgaagatagagtgtaccagaagccacccatgaggagcctgagccagagccagggcgaccccctgcccccagcccacacaggcacctaccgcaccagcacagcccccagcagccctggggtggacagcgtgcccctgcagaggacaggcagccagcacggcccccagaatgctgctgctgccaccttccagagggccagctatgctgctggccctgccagcaactatgctgacccctaccggcagctgcagtactgccccagcgtggagagcccctacagcaagagcggccctgccctgcccccagagggcaccctggcccggagccccagcattgacagcatccagaaggacccccgggagtttggctggagggaccctgagctgcctgaggtgatccagatgctgcagcaccagttccccagcgtgcagagcaatgctgctgcctacctgcagcacctgtgctttggagacaacaagatcaaggccgagatccggcggcagggcggcatccagctgctggtggacctgctggaccacaggatgacagaggtgcacaggtctgcctgtggggccctgaggaacctggtgtatggcaaggccaatgatgacaacaagatcgccctgaagaactgtggcggcatcccagccctggtgcggctgctgaggaagaccacagacctggagatccgggagctggtgactggagtgctgtggaacctgagcagctgtgatgccctgaagatgcccatcatccaggatgccctggccgtgctgaccaatgctgtgatcatcccccacagcggctgggagaacagccccctgcaggatgacaggaagatccagctgcacagcagccaggtgctgagaaatgccaccggctgcctgagaaatgtgagcagcgctggggaggaggcccggcggaggatgagagaatgtgatggcctgacagatgccctgctgtatgtgatccagagcgccctgggcagcagcgagattgacagcaagacagtggagaactgtgtgtgcatcctgaggaacctgagctaccgcctggccgctgagaccagccagggccagcacatgggcacagatgagctggatggcctgctgtgtggggaggccaacgggaaggatgctgagagcagcggctgctggggcaagaagaagaagaagaagaagagccaggaccagtgggatggagtgggccccctgcctgactgtgccgagccccccaagggcatccagatgctgtggcaccccagcatcgtgaagccctacctgaccctgctgtctgagtgcagcaacccagacaccctggagggcgctgctggggccctgcagaacctggccgccggctcctggaagtggagcgtgtacatccgggctgctgtgaggaaggagaagggcctgcccatcctggtggagctgctgagaattgacaatgacagagtggtgtgtgctgtggccacagccctgaggaacatggccctggatgtgaggaacaaggagctgattggcaagtatgccatgagggacctggtgcaccggctgcccggcggcaacaacagcaacaacacagccagcaaggccatgtctgatgacacagtgacagctgtgtgctgcaccctgcacgaggtgatcaccaagaacatggagaatgccaaggccctgagagatgctgggggcatcgagaagctggtgggcatcagcaagagcaaaggagacaagcacagccccaaggtggtgaaggccgccagccaggtgctgaacagcatgtggcagtacagagacctgcggagcctgtacaagaaggatggctggagccagtaccactttgtggccagcagcagcaccatcgagcgggaccggcagaggccctacagcagcagcaggacccccagcatcagccctgtgcgggtgagccccaacaacagaagtgccagcgccccagccagcccccgggagatgatcagcctgaaggagaggaagacagattatgaatgtacaggcagcaatgccacctaccacggggccaagggggagcacaccagcaggaaggatgccatgacagcccagaacacaggcatcagcaccctgtacagaaattcctatggagccccagctgaggacatcaagcacaaccaggtgtctgcccagcctgtgccccaggagcccagcaggaaggactatgagacctaccagcccttccagaacagcaccagaaattatgatgagagcttctttgaggaccaggtgcaccaccggcccccagccagcgagtacaccatgcacctgggcctgaagagcacaggcaactacgtggacttctacagcgctgcccggccctacagcgagctgaactatgagaccagccactacccagccagcccagacagctgggtgtag

SEQ ID NO: 146497 - DNA, 3504 bp, synthetic construct
  misc_feature 1..3504: note = Description of Artificial Sequence: Synthetic coding sequence
  source 1..3504: mol_type = other DNA
atgtttgccaggaagcccccaggagctgcccccctgggcgccatgcctgtgcctgaccagcccagcagcgccagcgagaagaccagcagcctgagccctggcctgaacaccagcaatggagatggcagcgagacagagaccaccagcgccatcctggcctctgtgaaggagcaggagctgcagtttgagcggctgacccgggagctggaggccgagcggcagatcgtggccagccagctggagcgctgcaagctgggcagcgagaccggctccatgagctccatgagcagcgctgaggagcagttccagtggcagagccaggacggccagaaggacattgaagatgagctgaccaccggcctggagctggtggacagctgcatccgcagcctgcaggagagcggcatcctggacccccaggactacagcactggagagcggcccagcctgctgagccagagcgccctgcagctgaacagcaagccagagggcagcttccagtacccagccagctaccacagcaaccagaccctggccctgggggagaccacccccagccagctgcctgcccggggcacccaggcccgggccaccggccagagcttcagccagggcaccaccagccgggccggccacctggccggccctgagcccgcccctcctcctcctcctccaccccgggagccctttgcccccagcctgggcagcgccttccacctgcctgatgcccccccagctgctgctgctgctgccctgtactacagcagcagcaccctgcctgccccaccccggggcggcagccccctggccgccccccagggcggcagccccaccaagctgcagagaggaggcagcgcccctgagggcgccacctatgctgccccccggggcagcagccccaagcagagccccagccggctggccaagagctacagcaccagcagccccatcaacatcgtggtgtcctctgctggcctgagccccatccgggtgaccagcccccccaccgtgcagagcaccatcagcagcagccccatccaccagctgagcagcaccatcggcacctacgccaccctgagccccaccaagaggctggtgcacgccagcgagcagtacagcaagcacagccaggagctgtatgccacagccaccctgcagaggcctggcagcctggccgccggcagccgggccagctacagcagccagcacggccacctgggccctgagctgcgggccctgcagagccctgagcaccacatcgaccccatctatgaagatagagtgtaccagaagccacccatgaggagcctgagccagagccagggcgaccccctgcccccagcccacacaggcacctaccgcaccagcacagcccccagcagccctggggtggacagcgtgcccctgcagaggacaggcagccagcacggcccccagaatgctgctgctgccaccttccagagggccagctatgctgctggccctgccagcaactatgctgacccctaccggcagctgcagtactgccccagcgtggagagcccctacagcaagagcggccctgccctgcccccagagggcaccctggcccggagccccagcattgacagcatccagaaggacccccgggagtttggctggagggaccctgagctgcctgaggtgatccagatgctgcagcaccagttccccagcgtgcagagcaatgctgctgcctacctgcagcacctgtgctttggagacaacaagatcaaggccgagatccggcggcagggcggcatccagctgctggtggacctgctggaccacaggatgacagaggtgcacaggtctgcctgtggggccctgaggaacctggtgtatggcaaggccaatgatgacaacaagatcgccctgaagaactgtggcggcatcccagccctggtgcggctgctgaggaagaccacagacctggagatccgggagctggtgactggagtgctgtggaacctgagcagctgtgatgccctgaagatgcccatcatccaggatgccctggccgtgctgaccaatgctgtgatcatcccccacagcggctgggagaacagccccctgcaggatgacaggaagatccagctgcacagcagccaggtgctgagaaatgccaccggctgcctgagaaatgtgagcagcgctggggaggaggcccggcggaggatgagagaatgtgatggcctgacagatgccctgctgtatgtgatccagagcgccctgggcagcagcgagattgacagcaagacagtggagaactgtgtgtgcatcctgaggaacctgagctaccgcctggccgctgagaccagccagggccagcacatgggcacagatgagctggatggcctgctgtgtggggaggccaacgggaaggatgctgagagcagcggctgctggggcaagaagaagaagaagaagaagagccaggaccagtggagcgtgtacatccgggctgctgtgaggaaggagaagggcctgcccatcctggtggagctgctgagaattgacaatgacagagtggtgtgtgctgtggccacagccctgaggaacatggccctggatgtgaggaacaaggagctgattggcaagtatgccatgagggacctggtgcaccggctgcccggcggcaacaacagcaacaacacagccagcaaggccatgtctgatgacacagtgacagctgtgtgctgcaccctgcacgaggtgatcaccaagaacatggagaatgccaaggccctgagagatgctgggggcatcgagaagctggtgggcatcagcaagagcaaaggagacaagcacagccccaaggtggtgaaggccgccagccaggtgctgaacagcatgtggcagtacagagacctgcggagcctgtacaagaaggatggctggagccagtaccactttgtggccagcagcagcaccatcgagcgggaccggcagaggccctacagcagcagcaggacccccagcatcagccctgtgcgggtgagccccaacaacagaagtgccagcgccccagccagcccccgggagatgatcagcctgaaggagaggaagacagattatgaatgtacaggcagcaatgccacctaccacggggccaagggggagcacaccagcaggaaggatgccatgacagcccagaacacaggcatcagcaccctgtacagaaattcctatggagccccagctgaggacatcaagcacaaccaggtgtctgcccagcctgtgccccaggagcccagcaggaaggactatgagacctaccagcccttccagaacagcaccagaaattatgatgagagcttctttgaggaccaggtgcaccaccggcccccagccagcgagtacaccatgcacctgggcctgaagagcacaggcaactacgtggacttctacagcgctgcccggccctacagcgagctgaactatgagaccagccactacccagccagcccagacagctgggtgtag

SEQ ID NO: 146498 - DNA, 2379 bp, synthetic construct
  misc_feature 1..2379: note = Description of Artificial Sequence: Synthetic coding sequence
  source 1..2379: mol_type = other DNA
atgaggagcctgagccagagccagggcgaccccctgcccccagcccacacaggcacctaccgcaccagcacagcccccagcagccctggggtggacagcgtgcccctgcagaggacaggcagccagcacggcccccagaatgctgctgctgccaccttccagagggccagctatgctgctggccctgccagcaactatgctgacccctaccggcagctgcagtactgccccagcgtggagagcccctacagcaagagcggccctgccctgcccccagagggcaccctggcccggagccccagcattgacagcatccagaaggacccccgggagtttggctggagggaccctgagctgcctgaggtgatccagatgctgcagcaccagttccccagcgtgcagagcaatgctgctgcctacctgcagcacctgtgcttcggggacaacaagatcaaggccgagatccggcggcagggcggcatccagctgctggtggacctgctggaccacaggatgacagaggtgcacaggtctgcctgtggggccctgaggaacctggtgtatggcaaggccaatgatgacaacaagatcgccctgaagaactgtggcggcatcccagccctggtgcggctgctgaggaagaccacagacctggagatccgggagctggtgactggagtgctgtggaacctgagcagctgtgatgccctgaagatgcccatcatccaggatgccctggccgtgctgaccaatgctgtgatcatcccccacagcggctgggagaacagccccctgcaggatgacaggaagatccagctgcacagcagccaggtgctgagaaatgccaccggctgcctgagaaatgtgtcctctgctggggaggaggcccggcggaggatgagagaatgtgatggcctgacagatgccctgctgtatgtgatccagagcgccctgggcagcagcgagattgacagcaagacagtggagaactgtgtgtgcatcctgaggaacctgagctaccgcctggccgctgagaccagccagggccagcacatgggcacagatgagctggatggcctgctgtgtggggaggccaacgggaaggatgctgagagcagcggctgctggggcaagaagaagaagaagaagaagagccaggaccagtgggatggagtgggccccctgcctgactgtgccgagccccccaagggcatccagatgctgtggcaccccagcatcgtgaagccctacctgaccctgctgtctgaatgtagcaacccagacaccctggagggcgccgccggggccctgcagaacctggccgccggctcctggaagtggagcgtgtacatccgggctgctgtgaggaaggagaagggcctgcccatcctggtggagctgctgagaattgacaatgacagagtggtgtgtgctgtggccacagccctgaggaacatggccctggatgtgaggaacaaggagctgattggcaagtatgccatgagggacctggtgcaccggctgcccggcggcaacaacagcaacaacacagccagcaaggccatgtctgatgacacagtgacagctgtgtgctgcaccctgcatgaagtcatcaccaagaacatggagaatgccaaggccctgagagatgctgggggcatcgagaagctggtgggcatcagcaagagcaagggggacaagcacagccccaaggtggtgaaggccgccagccaggtgctgaacagcatgtggcagtacagagacctgcggagcctgtacaagaaggatggctggagccagtaccactttgtggccagcagcagcaccatcgagcgggaccggcagaggccctacagcagcagcaggacccccagcatcagccctgtgcgggtgagccccaacaacagaagtgccagcgccccagccagcccccgggagatgatcagcctgaaggagaggaagacagattatgagtgcaccggcagcaatgccacctaccatggagccaagggggagcacaccagcaggaaggatgccatgacagcccagaacacaggcatcagcaccctgtacagaaacagctatggagccccagctgaggacatcaagcacaaccaggtgtctgcccagcctgtgccccaggagcccagcaggaaggactatgagacctaccagcccttccagaacagcaccaggaactatgatgagagcttctttgaggaccaggtgcaccaccggcccccagccagcgagtacaccatgcacctgggcctgaagagcactggaaactacgtggacttctacagcgctgcccggccctacagcgagctgaactatgagaccagccactacccagccagcccagacagctgggtgtag

SEQ ID NO: 146499 - DNA, 2667 bp, synthetic construct
  misc_feature 1..2667: note = Description of Artificial Sequence: Synthetic coding sequence
  source 1..2667: mol_type = other DNA
atgagctccatgagcagcgctgaggagcagttccagtggcagagccaggacggccagaaggacattgaagatgagctgaccaccggcctggagctggtggacagctgcatccgcagcctgcaggagagcggcatcctggacccccaggactacagcactggagagaccggcagccgggccagctacagcagccagcacggccacctgggccctgagctgcgggccctgcagagccctgagcaccacatcgaccccatctatgaggacagagtgtaccagaagccacccatgaggagcctgagccagagccagggcgaccccctgcccccagcccacacaggcacctaccgcaccagcacagcccccagcagccctggggtggacagcgtgcccctgcagaggacaggcagccagcacggcccccagaatgctgctgctgccaccttccagagggccagctatgctgctggccctgccagcaactatgctgacccctaccggcagctgcagtactgccccagcgtggagagcccctacagcaagagcggccctgccctgcccccagagggcaccctggcccggagccccagcattgacagcatccagaaggacccccgggagtttggctggagggaccctgagctgcctgaggtgatccagatgctgcagcaccagttccccagcgtgcagagcaatgctgctgcctacctgcagcacctgtgcttcggggacaacaagatcaaggccgagatccggcggcagggcggcatccagctgctggtggacctgctggaccacaggatgacagaggtgcacaggtctgcctgtggggccctgaggaacctggtgtatggcaaggccaatgatgacaacaagatcgccctgaagaactgtggcggcatcccagccctggtgcggctgctgaggaagaccacagacctggagatccgggagctggtgactggagtgctgtggaacctgagcagctgtgatgccctgaagatgcccatcatccaggatgccctggccgtgctgaccaatgctgtgatcatcccccacagcggctgggagaacagccccctgcaggatgacaggaagatccagctgcacagcagccaggtgctgagaaatgccaccggctgcctgagaaatgtgtcctctgctggggaggaggcccggcggaggatgagagaatgtgatggcctgacagatgccctgctgtatgtgatccagagcgccctgggcagcagcgagattgacagcaagacagtggagaactgtgtgtgcatcctgaggaacctgagctaccgcctggccgctgagaccagccagggccagcacatgggcacagatgagctggatggcctgctgtgtggggaggccaacgggaaggatgctgagagcagcggctgctggggcaagaagaagaagaagaagaagagccaggaccagtgggatggagtgggccccctgcctgactgtgccgagccccccaagggcatccagatgctgtggcaccccagcatcgtgaagccctacctgaccctgctgtctgaatgtagcaacccagacaccctggagggcgccgccggggccctgcagaacctggccgccggctcctggaagtggagcgtgtacatccgggctgctgtgaggaaggagaagggcctgcccatcctggtggagctgctgagaattgacaatgacagagtggtgtgtgctgtggccacagccctgaggaacatggccctggatgtgaggaacaaggagctgattggcaagtatgccatgagggacctggtgcaccggctgcccggcggcaacaacagcaacaacacagccagcaaggccatgtctgatgacacagtgacagctgtgtgctgcaccctgcatgaagtcatcaccaagaacatggagaatgccaaggccctgagagatgctgggggcatcgagaagctggtgggcatcagcaagagcaagggggacaagcacagccccaaggtggtgaaggccgccagccaggtgctgaacagcatgtggcagtacagagacctgcggagcctgtacaagaaggatggctggagccagtaccactttgtggccagcagcagcaccatcgagcgggaccggcagaggccctacagcagcagcaggacccccagcatcagccctgtgcgggtgagccccaacaacagaagtgccagcgccccagccagcccccgggagatgatcagcctgaaggagaggaagacagattatgagtgcaccggcagcaatgccacctaccatggagccaagggggagcacaccagcaggaaggatgccatgacagcccagaacacaggcatcagcaccctgtacagaaacagctatggagccccagctgaggacatcaagcacaaccaggtgtctgcccagcctgtgccccaggagcccagcaggaaggactatgagacctaccagcccttccagaacagcaccaggaactatgatgagagcttctttgaggaccaggtgcaccaccggcccccagccagcgagtacaccatgcacctgggcctgaagagcactggaaactacgtggacttctacagcgctgcccggccctacagcgagctgaactatgagaccagccactacccagccagcccagacagctgggtgtag

SEQ ID NO: 146500 - DNA, 546 bp, synthetic construct
  misc_feature 1..546: note = Description of Artificial Sequence: Synthetic coding sequence
  source 1..546: mol_type = other DNA
atgagctccatgagcagcgctgaggagcagttccagtggcagagccaggacggccagaaggacattgaagatgagctgaccaccggcctggagctggtggacagctgcatccgcagcctgcaggagagcggcatcctggacccccaggactacagcactggagagcggcccagcctgctgagccagagcgccctgcagctgaacagcaagccagagggcagcttccagtacccagccagctaccacagcaaccagaccctggccctgggggagaccacccccagccagctgcctgcccggggcacccaggcccgggccaccggccagagcttcagccagggcaccaccagcagagctggccacctggccggccctgagcccgcccctcctcctcctcctccaccccgggagccctttgcccccagcctgggcagcgccttccacctgcctgatgcccctcctgctgctgctgctgctgccctgtactacagcagcagcaccctgcctgccccaccccggggcggcagccccctggccgccccctag

SEQ ID NO: 146501 - DNA, 963 bp, synthetic construct
  misc_feature 1..963: note = Description of Artificial Sequence: Synthetic coding sequence
  source 1..963: mol_type = other DNA
atgacagtgtggtgtgctgtggccacagccctgaggaacatggccctggatgtgaggaacaaggagctgattggcaagtatgccatgagggacctggtgcaccggctgcccggcggcaacaacagcaacaacacagccagcaaggccatgtctgatgacacagtgacagctgtgtgctgcaccctgcatgaagtcatcaccaagaacatggagaatgccaaggccctgagagatgctgggggcatcgagaagctggtgggcatcagcaagagcaagggggacaagcacagccccaaggtggtgaaggccgccagccaggtgctgaacagcatgtggcagtacagagacctgcggagcctgtacaagaaggatggctggagccagtaccactttgtggccagcagcagcaccatcgagcgggaccggcagaggccctacagcagcagcaggacccccagcatcagccctgtgcgggtgagccccaacaacagaagtgccagcgccccagccagcccccgggagatgatcagcctgaaggagaggaagacagattatgagtgcaccggcagcaatgccacctaccatggagccaagggggagcacaccagcaggaaggatgccatgacagcccagaacacaggcatcagcaccctgtacagaaacagctatggagccccagctgaggacatcaagcacaaccaggtgtctgcccagcctgtgccccaggagcccagcaggaaggactatgagacctaccagcccttccagaacagcaccaggaactatgatgagagcttctttgaggaccaggtgcaccaccggcccccagccagcgagtacaccatgcacctgggcctgaagagcactggaaactacgtggacttctacagcgctgcccggccctacagcgagctgaactatgagaccagccactacccagccagcccagacagctgggtgtag

SEQ ID NO: 146502 - DNA, 246 bp, synthetic construct
  misc_feature 1..246: note = Description of Artificial Sequence: Synthetic coding sequence
  source 1..246: mol_type = other DNA
atgaaccgggagggcgcccctgggaagagccctgaggagatgtacatccagcagaaggtgcgggtgctgctgatgctgaggaagatgggcagcaacctgacagccagcgaggaggagttcctgcggacctacgccggcgtggtgaacagccagctgagccagctgcccccccacagcattgaccagggcgcagaagatgtggtgatggccttcagccgctcagaaacagaagatcggcggcagtag

SEQ ID NO: 146503 - DNA, 246 bp, synthetic construct; identical to SEQ ID NO: 146502
  misc_feature 1..246: note = Description of Artificial Sequence: Synthetic coding sequence
  source 1..246: mol_type = other DNA

SEQ ID NO: 146504 - DNA, 246 bp, synthetic construct; identical to SEQ ID NO: 146502
  misc_feature 1..246: note = Description of Artificial Sequence: Synthetic coding sequence
  source 1..246: mol_type = other DNA

SEQ ID NO: 146505 - DNA, 246 bp, synthetic construct; identical to SEQ ID NO: 146502
  misc_feature 1..246: note = Description of Artificial Sequence: Synthetic coding sequence
  source 1..246: mol_type = other DNA

SEQ ID NO: 146506 - DNA, 246 bp, synthetic construct; identical to SEQ ID NO: 146502
  misc_feature 1..246: note = Description of Artificial Sequence: Synthetic coding sequence
  source 1..246: mol_type = other DNA

SEQ ID NO: 146507 - DNA, 1692 bp, synthetic construct
  misc_feature 1..1692: note = Description of Artificial Sequence: Synthetic coding sequence
  source 1..1692: mol_type = other DNA
atggatgtgggggagctgctgagctaccagcccaacagaggcaccaagaggcccagagatgatgaggaggaggagcagaagatgaggaggaagcagacaggcacccgggagcggggccgctaccgggaggaggagatgacagtggtggaggaggctgatgatgacaagaagaggctgctgcagatcatcgacagagatggagaggaggaggaggaggaggaggagcccctggatgagagctctgtgaagaagatgatcctgacctttgagaagaggagctacaagaaccaggagctgcgcatcaagttcccagacaaccctgagaagttcatggagagcgagctggacctgaatgacatcatccaggagatgcacgtggtggccaccatgccagacctgtaccacctgctggtggagctgaatgctgtgcagagcctgctgggcctgctgggccatgacaacacagatgtgtccattgctgtggtggacctgctgcaggagctgacagacatcgacaccctgcatgaaagtgaggagggcgctgaggtgctgattgatgccctggtggatggccaggtggtggccctgctggtgcagaacctggagcggctggatgaatctgtgaaggaggaggctgatggagtgcacaacaccctggccatcgtggagaacatggccgagttccggcctgagatgtgcacagagggcgcccagcagggcctgctgcagtggctgctgaagaggctgaaggccaagatgccctttgatgccaacaagctgtactgcagcgaggtgctggccatcctgctgcaggacaatgatgaaaatcgggagctgctgggggagctggatggcattgatgtgctgctgcagcagctgagcgtcttcaagaggcacaaccccagcacagctgaggagcaggagatgatggagaacctgtttgacagcctgtgcagctgcctgatgctgagcagcaaccgggagcgcttcctgaagggggagggcctgcagctgatgaacctgatgctgcgggagaagaagatcagccgcagcagcgccctgaaggtgctggaccacgccatgattggccctgagggcacagacaactgccacaagtttgtggacatcctgggcctgcggaccatcttccccctcttcatgaagagccccaggaagatcaagaaggtgggcaccacagagaaggagcacgaggagcacgtgtgcagcatcctggccagcctgctgaggaacctgcggggccagcagaggacccggctgctgaacaagttcacagaaaatgattctgagaaggtggaccggctgatggagctgcacttcaagtacctgggcgccatgcaggtggccgacaagaagattgaaggagagaagcatgacatggtgcggcggggggagatcatcgacaatgacacagaggaggagttctacctgcggcggctggatgctggcctgtttgtgctgcagcacatctgctacatcatggccgagatctgcaatgccaacgtgccccagatccggcagagggtgcaccagatcctgaacatgaggggcagcagcatcaagatcgtgcgccacatcatcaaggagtatgcagagaacattggagatggccgcagccctgagttccgggagaatgagcagaagaggatcctgggcctgctggagaacttctag

SEQ ID NO: 146508 - DNA, 1611 bp, synthetic construct
  misc_feature 1..1611: note = Description of Artificial Sequence: Synthetic coding sequence
  source 1..1611: mol_type = other DNA
atgaggaggaagcagacaggcacccgggagcggggccgctaccgggaggaggagatgacagtggtggaggaggctgatgatgacaagaagaggctgctgcagatcatcgacagagatggagaggaggaggaggaggaggaggagcccctggatgagagctctgtgaagaagatgatcctgacctttgagaagaggagctacaagaaccaggagctgcgcatcaagttcccagacaaccctgagaagttcatggagagcgagctggacctgaatgacatcatccaggagatgcacgtggtggccaccatgccagacctgtaccacctgctggtggagctgaatgctgtgcagagcctgctgggcctgctgggccatgacaacacagatgtgtccattgctgtggtggacctgctgcaggagctgacagacatcgacaccctgcacgagagcgaggagggcgctgaggtgctgattgatgccctggtggatggccaggtggtggccctgctggtgcagaacctggagcggctggatgagagcgtgaaggaggaggctgatggagtgcacaacaccctggccatcgtggagaacatggccgagttccggcctgagatgtgcacagaaggagcccagcagggcctgctgcagtggctgctgaagaggctgaaggccaagatgccctttgatgccaacaagctgtactgcagcgaggtgctggccatcctgctgcaggacaatgatgagaaccgggagctgctgggggagctggatggcattgatgtgctgctgcagcagctgtctgtgttcaagaggcacaaccccagcacagctgaggagcaggagatgatggagaacctgtttgacagcctgtgcagctgcctgatgctgagcagcaaccgggagcgcttcctgaagggggagggcctgcagctgatgaacctgatgctgcgggagaagaagatcagccgcagcagcgccctgaaggtgctggaccacgccatgattggccctgagggcacagacaactgccacaagtttgtggacatcctgggcctgcggaccatcttccccctcttcatgaagagccccaggaagatcaagaaggtgggcaccacagagaaggagcacgaggagcacgtgtgcagcatcctggccagcctgctgaggaacctgcggggccagcagaggacccggctgctgaacaagttcacagaaaatgacagcgagaaggtggaccggctgatggagctgcacttcaagtacctgggcgccatgcaggtggccgacaagaagattgaaggagagaagcatgacatggtgagaagaggagagatcatcgacaatgacacagaggaggagttctacctgcggcggctggatgctggcctgtttgtgctgcagcacatctgctacatcatggccgagatctgcaatgccaacgtgccccagatccggcagagggtgcaccagatcctgaacatgaggggcagcagcatcaagatcgtgcgccacatcatcaaggagtatgcagaaaatattggagatggccgcagccctgagttcagagaaaatgagcagaagaggatcctgggcctgctggagaacttctag

SEQ ID NO: 146509 - DNA, 501 bp, synthetic construct
  misc_feature 1..501: note = Description of Artificial Sequence: Synthetic coding sequence
  source 1..501: mol_type = other DNA
atgaggaggaagcagacaggcacccgggagcggggccgctaccgggaggaggagatgacagtggtggaggaggctgatgatgacaagaagaggctgctgcagatcatcgacagagatggagaggaggaggaggaggaggaggagcccctggatgagagctctgtgaagaagatgatcctgacctttgagaagaggagctacaagaaccaggagctgcgcatcaagttcccagacaaccctgagaagttcatggagagcgagctggacctgaatgacatcatccaggagatgcacgtggtggccaccatgccagacctgtaccacctgctggtggagctgaatgctgtgcagagcctgctgggcctgctgggccatgacaacacagatgtgtccattgctgtggtggacctgctgcaggagctgacagacatcgacaccctgcacgagagcgaggagggcgctgaggtgctgattgatgccctggtggatggccaggtgtag

SEQ ID NO: 146510 - DNA, 1443 bp, synthetic construct
  misc_feature 1..1443: note = Description of Artificial Sequence: Synthetic coding sequence
  source 1..1443: mol_type = other DNA
atgatccgggccgcccctcctcctctcttcctgctgctgctgctgctgctgctgctggtgtcctgggccagcagaggagaggccgccccagaccaggatgagatccagaggctgcccggcctggccaagcagcccagcttccggcagtacagcggctacctgaagggcagcggcagcaagcacctgcactactggtttgtggagagccagaaggaccctgagaacagccctgtggtgctgtggctgaatggaggccctggctgcagcagcctggatggcctgctgacagagcacggccccttcctggtgcagccagatggagtgaccctggagtacaacccctacagctggaacctgattgccaacgtgctgtacctggagagccctgctggggtgggcttctcctacagtgatgacaagttctacgccaccaatgacacagaggtggcccagagcaactttgaggccctgcaggacttcttccgcctcttccctgagtacaagaacaacaagctgttcctgactggagagagctatgccggcatctacatccccaccctggccgtgctggtgatgcaggaccccagcatgaacctgcagggcctggccgtgggcaatggcctgagcagctatgagcagaatgacaacagcctggtgtactttgcctactaccacggcctgctgggcaaccggctgtggagcagcctgcagacccactgctgcagccagaacaagtgcaacttctatgacaacaaggacctggagtgtgtgaccaacctgcaggaggtggcccgcatcgtgggcaacagcggcctgaacatctacaacctgtatgccccctgtgccggcggcgtgcccagccacttccgctatgagaaggacacagtggtggtgcaggacctgggcaacatcttcacccggctgcccctgaagaggatgtggcaccaggccctgctgcggagcggggacaaggtgaggatggaccccccctgcaccaacaccacagctgccagcacctacctgaacaacccctacgtgaggaaggccctgaacatccctgagcagctgccccagtgggacatgtgcaacttcctggtgaacctgcagtacagaagactctaccgctccatgaacagccagtacctgaagctgctgagcagccagaagtaccagatcctgctgtacaatggagatgtggacatggcctgcaacttcatgggagatgagtggtttgtggacagcctgaaccagaagatggaggtgcagaggcggccctggctggtgaagtacggggacagcggggagcagattgctggctttgtgaaggagttcagccacatcgccttcctgaccatcaagggagctggccacatggtgcccacagacaagcccctggccgccttcaccatgttcagccgcttcctgaacaagcagccctactag

SEQ ID NO: 146511 - DNA, 1446 bp, synthetic construct
  misc_feature 1..1446: note = Description of Artificial Sequence: Synthetic coding sequence
  source 1..1446: mol_type = other DNA
atgaccagcagcccccgggcccctcctggagagcagggccggggcggcgctgagatgatccgggccgcccctcctcctctcttcctgctgctgctgctgctgctgctgctggtgtcctgggccagcagaggagaggccgccccagaccaggatgagatccagaggctgcccggcctggccaagcagcccagcttccggcagtacagcggctacctgaagggcagcggcagcaagcacctgcactactggtttgtggagagccagaaggaccctgagaacagccctgtggtgctgtggctgaatggaggccctggctgcagcagcctggatggcctgctgacagagcacggccccttcctgattgccaacgtgctgtacctggagagccctgctggggtgggcttctcctacagtgatgacaagttctacgccaccaatgacacagaggtggcccagagcaactttgaggccctgcaggacttcttccgcctcttccctgagtacaagaacaacaagctgttcctgaccggggagagctatgccggcatctacatccccaccctggccgtgctggtgatgcaggaccccagcatgaacctgcagggcctggccgtgggcaatggcctgagcagctatgagcagaatgacaacagcctggtgtactttgcctactaccacggcctgctgggcaaccggctgtggagcagcctgcagacccactgctgcagccagaacaagtgcaacttctatgacaacaaggacctggagtgtgtgaccaacctgcaggaggtggccagaattgtgggcaacagcggcctgaacatctacaacctgtatgccccctgtgccggcggcgtgcccagccacttccgctatgagaaggacacagtggtggtgcaggacctgggcaacatcttcacccggctgcccctgaagaggatgtggcaccaggccctgctgcggagcggggacaaggtgaggatggaccccccctgcaccaacaccacagctgccagcacctacctgaacaacccctacgtgaggaaggccctgaacatccctgagcagctgccccagtgggacatgtgcaacttcctggtgaacctgcagtaccgccgcctgtaccgctccatgaacagccagtacctgaagctgctgagcagccagaagtaccagatcctgctgtacaatggagatgtggacatggcctgcaacttcatgggagatgagtggtttgtggacagcctgaaccagaagatggaggtgcagaggcggccctggctggtgaagtatggagacagcggggagcagattgctggctttgtgaaggagttcagccacatcgccttcctgaccatcaagggggccggccacatggtgcccacagacaagcccctggccgccttcaccatgttcagccgcttcctgaacaagcagccctactag

SEQ ID NO: 146512 - DNA, 870 bp, synthetic construct
  misc_feature 1..870: note = Description of Artificial Sequence: Synthetic coding sequence
  source 1..870: mol_type = other DNA
atgatccgggccgcccctcctcctctcttcctgctgctgctgctgctgctgctgctggtgtcctgggccagcagaggagaggccgccccagaccaggatgagatccagaggctgcccggcctggccaagcagcccagcttccggcagtacagcggctacctgaagggcagcggcagcaagcacctgcactactggtttgtggagagccagaaggaccctgagaacagccctgtggtgctgtggctgaatggaggccctggctgcagcagcctggatggcctgctgacagagcacggccccttcctggtgcagccagatggagtgaccctggagtacaacccctacagctggaacctgattgccaacgtgctgtacctggagagccctgctggggtgggcttctcctacagtgatgacaagttctacgccaccaatgacacagaggtggcccagagcaactttgaggccctgcaggacttcttccgcctcttccctgagtacaagaacaacaagctgttcctgactggagagagctatgccggcatctacatccccaccctggccgtgctggtgatgcaggaccccagcatgaacctgcagggcctggccgtgggcaatggcctgagcagctatgagcagaatgacaacagcctggtgtactttgcctactaccacggcctgctgggcaaccggctgtggagcagcctgcagacccactgctgcagccagaacaagtgcaacttctatgacaacaaggacctggagtgtgtgaccaacctgcaggaggtggcccgcatcgtgggcaacagcggcctgaacatctacaacctgtatgccccctgtgccggcggcgtgcccagccacttctag

SEQ ID NO: 146513 - DNA, 1497 bp, synthetic construct
  misc_feature 1..1497: note = Description of Artificial Sequence: Synthetic coding sequence
  source 1..1497: mol_type = other DNA
atgaccagcagcccccgggcccctcctggagagcagggccggggcggcgctgagatgatccgggccgcccctcctcctctcttcctgctgctgctgctgctgctgctgctggtgtcctgggccagcagaggagaggccgccccagaccaggatgagatccagaggctgcccggcctggccaagcagcccagcttccggcagtacagcggctacctgaagggcagcggcagcaagcacctgcactactggtttgtggagagccagaaggaccctgagaacagccctgtggtgctgtggctgaatggaggccctggctgcagcagcctggatggcctgctgacagagcacggccccttcctggtgcagccagatggagtgaccctggagtacaacccctacagctggaacctgattgccaacgtgctgtacctggagagccctgctggggtgggcttctcctacagtgatgacaagttctacgccaccaatgacacagaggtggcccagagcaactttgaggccctgcaggacttcttccgcctcttccctgagtacaagaacaacaagctgttcctgactggagagagctatgccggcatctacatccccaccctggccgtgctggtgatgcaggaccccagcatgaacctgcagggcctggccgtgggcaatggcctgagcagctatgagcagaatgacaacagcctggtgtactttgcctactaccacggcctgctgggcaaccggctgtggagcagcctgcagacccactgctgcagccagaacaagtgcaacttctatgacaacaaggacctggagtgtgtgaccaacctgcaggaggtggcccgcatcgtgggcaacagcggcctgaacatctacaacctgtatgccccctgtgccggcggcgtgcccagccacttccgctatgagaaggacacagtggtggtgcaggacctgggcaacatcttcacccggctgcccctgaagaggatgtggcaccaggccctgctgcggagcggggacaaggtgaggatggaccccccctgcaccaacaccacagctgccagcacctacctgaacaacccctacgtgaggaaggccctgaacatccctgagcagctgccccagtgggacatgtgcaacttcctggtgaacctgcagtacagaagactctaccgctccatgaacagccagtacctgaagctgctgagcagccagaagtaccagatcctgctgtacaatggagatgtggacatggcctgcaacttcatgggagatgagtggtttgtggacagcctgaaccagaagatggaggtgcagaggcggccctggctggtgaagtacggggacagcggggagcagattgctggctttgtgaaggagttcagccacatcgccttcctgaccatcaagggagctggccacatggtgcccacagacaagcccctggccgccttcaccatgttcagccgcttcctgaacaagcagccctactag

SEQ ID NO: 146514 - DNA, 1038 bp, synthetic construct
  misc_feature 1..1038: note = Description of Artificial Sequence: Synthetic coding sequence
  source 1..1038: mol_type = other DNA
atgatccgggccgcccctcctcctctcttcctgctgctgctgctgctgctgctgctggtgtcctgggccagcagaggagaggccgccccagaccaggatgagatccagaggctgcccggcctggccaagcagcccagcttccggcagtacagcggctacctgaagggcagcggcagcaagcacctgcactactggtttgtggagagccagaaggaccctgagaacagccctgtggtgctgtggctgaatggaggccctggctgcagcagcctggatggcctgctgacagagcacggccccttcctgattgccaacgtgctgtacctggagagccctgctggggtgggcttctcctacagtgatgacaagttctacgccaccaatgacacagaggtggcccagagcaactttgaggccctgcaggacttcttccgcctcttccctgagtacaagaacaacaagctgttcctgaccggggagagctatgccggcatctacatccccaccctggccgtgctggtgatgcaggaccccagcatgaacctgcagggcctggccgtgggcaatggcctgagcagctatgagcagaatgacaacagcctggtgtactttgcctactaccacggcctgctgggcaaccggctgtggagcagcctgcagacccactgctgcagccagaacaagtgcaacttctatgacaacaaggacctggagtgtgtgaccaacctgcaggaggtggccagaattgtgggcaacagcggcctgaacatctacaacctgtatgccccctgtgccggcggcgtgcccagccacttccgctatgagaaggacacagtggtggtgcaggacctgggcaacatcttcacccggctgcccctgaagaggatgtggcaccaggccctgctgcggagcggggacaaggtgaggatggaccccccctgcaccaacaccacagctgccagcacctacctgaacaacccctacgtgaggaaggccctgaacatccctgagcagctgccccagtgggacatgtgctag

SEQ ID NO: 146515 - DNA, 1149 bp, synthetic construct
  misc_feature 1..1149: note = Description of Artificial Sequence: Synthetic coding sequence
  source 1..1149: mol_type = other DNA
atgatgtttcctggcctgctggcccctcctgctggctaccccagcctgctgcggcccacccccaccctgaccctgccccagagcctgcagagcgccttcagcggccacagcagcttcctggtggaggacctgatccgcatcagccggcccccagcctacctgcccaggtctgtgcccacagcctccatgagccccccccggcagggcgcccccacagccctgacagacacaggagccagtgacctgggcagccctggccctggcagccggcggggcggcagccccccaacagccttctccccagccagcgagaccaccttcctgaagtttggagtgaatgccatcctgagcagcggccccaggacagagaccagccctgccctgctgcagagcgtgccccccaagacctttgccttcccctactttgagggcagcttccagcccttcatccgcagcagctacttccctgccagcagctctgtggtgcccatccctggcaccttctcctggcccctggccgcccggggcaagccccggcggggcatgctgcggcgggctgtgttcagtgatgtgcagaggaaggccctggagaagatgttccagaagcagaagtacatcagcaagccagacaggaagaagctggccgccaagctgggcctgaaggacagccaggacacagcccggaggacagagcccgccccagacagcaccccccggccccgggccagccctggggccccagacctgaccagcgccagccccttcttcagccctgctggcaccttccaggtgaagatctggttccagaacagaaggatgaagtggaggaacagcaaggagcgggagctgctgagcagcggcggctgccgggagcagaccctgcccaccaagctgaacccccacccagacctgagtgatgtgggccagaagggccctggaaatgaggaggaggaggagggccctggcagccccagccaccggctggcctaccacgccagcagtgacccccagcacctgcgggacccccggctgcccggccccctgccccccagccctgcccacagcagcagccctgggaagcccagcgacttcagtgacagcgaggaggaggaggagggggaggagcaggaggagatcaccgtgtcctag

SEQ ID NO: 146516 - DNA, 1341 bp, synthetic construct
  misc_feature 1..1341: note = Description of Artificial Sequence: Synthetic coding sequence
  source 1..1341: mol_type = other DNA
atgggcgccggccccagctgtgacaccccagccaactgcacctacctggacctgctgggcacctgggtgttccaggtgggcagcagcggcagccagagagatgtgaactgcagcgtgatgggcccccaggagaagaaggtggtggtgtacctgcagaagctggacacagcctatgatgacctgggcaacagcggccacttcaccatcatctacaaccagggctttgaaattgtgctgaatgactacaagtggtttgccttcttcaagtacaaggaggagggcagcaaggtgaccacctactgcaatgagaccatgacaggctgggtgcatgatgtgctgggcaggaactgggcctgcttcaccgggaagaaggtgggcacagcctctgaaaatgtgtatgtgaacatcgcccacctgaagaacagccaggagaagtacagcaaccggctgtacaagtatgaccacaactttgtgaaggccatcaatgccatccagaagtcctggacagccaccacctacatggagtatgagaccctgaccctgggggacatgatccgccgcagcggcggccacagcaggaagatcccccggcccaagccagcccccctgacagctgagatccagcagaagatcctgcacctgcccacctcctgggactggagaaatgtgcacggcatcaactttgtgtcccctgtgaggaaccaggccagctgtggcagctgctacagctttgcctccatgggcatgctggaggcccgcatccgcatcctgaccaacaacagccagacccccatcctgagcccccaggaggtggtgtcctgcagccagtatgcccagggctgtgagggcggcttcccctacctgattgctgggaagtatgcccaggactttggcctggtggaggaggcctgcttcccctacacaggaacagacagcccctgcaagatgaaggaggactgcttccgctactacagcagcgagtaccactacgtgggcggcttctatggaggctgcaatgaggccctgatgaagctggagctggtgcaccacggccccatggctgtggcctttgaggtgtatgatgacttcctgcactacaagaagggcatctaccaccacacaggcctgcgggaccccttcaacccctttgagctgaccaaccacgctgtgctgctggtgggctatggaacagattctgccagcggcatggactactggatcgtgaagaacagctggggcaccggctggggagaaaatggctacttccgcatcagaagaggaacagatgaatgtgccatcgagagcattgctgtggccgccacccccatccccaagctgtag

SEQ ID NO: 146517 - DNA, 414 bp, synthetic construct
  misc_feature 1..414: note = Description of Artificial Sequence: Synthetic coding sequence
  source 1..414: mol_type = other DNA
atgggcgccggccccagcctgctgctggccgccctgctgctgctgctgtctggagatggagctgtgcgctgtgacaccccagccaactgcacctacctggacctgctgggcacctgggtgttccaggtgggcagcagcggcagccagagagatgtgaactgcagcgtgatgggcccccaggagaagaaggtggtggtgtacctgcagaagctggacacagcctatgatgacctgggcaacagcggccacttcaccatcatctacaaccagggctttgagatcgtgctgaatgactacaagtggtttgccttcttcaaggatgtgacagacttcatcagccacctgttcatgcagctgggcaccgtgggcatctatgacctgccccacctgaggaacaagctggtgatcaagtag

SEQ ID NO: 146518 - DNA, 426 bp, synthetic construct
  misc_feature 1..426: note = Description of Artificial Sequence: Synthetic coding sequence
  source 1..426: mol_type = other DNA
atgggcgccggccccagcctgctgctggccgccctgctgctgctgctgtctggagatggagctgtgcgctgtgacaccccagccaactgcacctacctggacctgctgggcacctgggtgttccaggtgggcagcagcggcagccagagagatgtgaactgcagcgtgatgggcccccaggagaagaaggtggtggtgtacctgcagaagctggacacagcctatgatgacctgggcaacagcggccacttcaccatcatctacaaccagggctttgagatcgtgctgaatgactacaagtggtttgccttcttcaaggatgtgacagacttcatcagccacctgttcatgcagctgggcaccgtgggcatctatgacctgccccacctgaggaacaagctggccatgaacagacgctggggctag

SEQ ID NO: 146519 - DNA, 1191 bp, synthetic construct
  misc_feature 1..1191: note = Description of Artificial Sequence: Synthetic coding sequence
  source 1..1191: mol_type = other DNA
atgaagaccctgctgctgctgctgctggtgctgctggagctgggggaggcccagggcagcctgcaccgggtgcccctgcggcggcaccccagcctgaagaagaagctgcgggcccggagccagctgtctgagttctggaagagccacaacctggacatgatccagttcacagagagctgcagcatggaccagagcgccaaggagcccctcatcaactacctggacatggagtacttcggcaccatcagcatcggcagccccccccagaacttcaccgtcatctttgacaccggcagcagcaacctgtgggtgcccagcgtgtactgcaccagccctgcctgcaagacccacagccgcttccagcccagccagagcagcacctacagccagcccggccagagcttcagcatccagtatggaacaggcagcctgagcggcatcatcggggctgaccaggtgtctgtggagggcctgactgtggtgggccagcagtttggagagagcgtgacagagcccggccagacctttgtggatgctgagtttgatggcatcctgggcctgggctaccccagcctggccgtgggcggcgtgacccctgtgtttgacaacatgatggcccagaacctggtggacctgcccatgttttctgtgtacatgagcagcaaccctgagggcggggccggcagcgagctgatctttggaggctatgaccacagccacttcagcggcagcctgaactgggtgcctgtgaccaagcaggcctactggcagatcgccctggacaacatccaggtgggcggcaccgtgatgttctgcagcgagggctgccaggccatcgtggacaccggcaccagcctcatcaccggccccagcgacaagatcaagcagctgcagaatgccatcggggccgcccctgtggatggagaatatgctgtggagtgtgccaacctgaatgtgatgccagatgtgaccttcaccatcaacggggtgccctacaccctgagccccacagcctacaccctgctggactttgtggatggcatgcagttctgcagcagcggcttccagggcctggacatccaccccccagctggccccctgtggatcctgggagatgtgttcatccggcagttctacagcgtgtttgaccggggcaacaacagagtgggcctggccccagctgtgccctag

SEQ ID NO: 146520 - DNA, 1092 bp, synthetic construct
  misc_feature 1..1092: note = Description of Artificial Sequence: Synthetic coding sequence
  source 1..1092: mol_type = other DNA
atgaagaccctgctgctgctgctgctggtgctgctggagctgggggaggcccagggcagcctgcaccgggtgcccctgcggcggcaccccagcctgaagaagaagctgcgggcccggagccagctgtctgagttctggaagagccacaacctggacatgatccagttcacagagagctgcagcatggaccagagcgccaaggagcccctcatcaactacctggacatggagtacttcggcaccatcagcatcggcagccccccccagaacttcaccgtcatctttgacaccggcagcagcaacctgtgggtgcccagcgtgtactgcaccagccctgcctgcaagacccacagccgcttccagcccagccagagcagcacctacagccagcccggccagagcttcagcatccagtatggaacaggcagcctgagcggcatcatcggggctgaccaggtgtctgtggagggcctgactgtggtgggccagcagtttggagagagcgtgacagagcccggccagacctttgtggatgctgagtttgatggcatcctgggcctgggctaccccagcctggccgtgggcggcgtgacccctgtgtttgacaacatgatggcccagaacctggtggacctgcccatgttttctgtgtacatgagcagcaaccctgagggcggggccggcagcgagctgatctttggaggctatgaccacagccacttcagcggcagcctgaactgggtgcctgtgaccaagcaggcctactggcagatcgccctggacaacatgctgtggagcgtgcccaccctgaccagctgcaggatgagccccagccccctgacagagagccccatccccagcgcccagctgcccaccccctactggacctcctggatggagtgcagcagcgctgctgtggccttcaaggacctgaccagcaccctgcagctgggccccagcggctcctggggcatgagcagctttgacagcttcacccagagcctgactgtgggcatcaccgtgtgggactggccccagcagagccccaaggagggcccctgtgtgtgtgcctgcctgagtgaccggccctag

SEQ ID NO: 146521 - DNA, 1206 bp, synthetic construct
  misc_feature 1..1206: note = Description of Artificial Sequence: Synthetic coding sequence
  source 1..1206: mol_type = other DNA
atgaagaccctgctgctgctgctgctggtgctgctggagctgggggaggcccagggcagcctgcaccgggtgcccctgcggcggcaccccagcctgaagaagaagctgcgggcccggagccagctgtctgagttctggaagagccacaacctggacatgatccagttcacagagagctgcagcatggaccagagcgccaaggagcccctcatcaactacctggacatggagtacttcggcaccatcagcatcggcagccccccccagaacttcaccgtcatctttgacaccggcagcagcaacctgtgggtgcccagcgtgtactgcaccagccctgcctgcaagacccacagccgcttccagcccagccagagcagcacctacagccagcccggccagagcttcagcatccagtatggaacaggcagcctgagcggcatcatcggggctgaccaggtgtctgccttctcctaccaggtggagggcctgactgtggtgggccagcagtttggagagagcgtgacagagcccggccagacctttgtggatgctgagtttgatggcatcctgggcctgggctaccccagcctggccgtgggcggcgtgacccctgtgtttgacaacatgatggcccagaacctggtggacctgcccatgttttctgtgtacatgagcagcaaccctgagggcggggccggcagcgagctgatctttggaggctatgaccacagccacttcagcggcagcctgaactgggtgcctgtgaccaagcaggcctactggcagatcgccctggacaacatccaggtgggcggcaccgtgatgttctgcagcgagggctgccaggccatcgtggacaccggcaccagcctcatcaccggccccagcgacaagatcaagcagctgcagaatgccatcggggccgcccctgtggatggagaatatgctgtggagtgtgccaacctgaatgtgatgccagatgtgaccttcaccatcaatggagtgccctacaccctgagccccacagcctacaccctgctggactttgtggatggcatgcagttctgcagcagcggcttccagggcctggacatccaccccccagctggccccctgtggatcctgggagatgtgttcatccggcagttctacagcgtgtttgaccggggcaacaacagagtgggcctggccccagctgtgccctag

SEQ ID NO: 146522 - DNA, 867 bp, synthetic construct
  misc_feature 1..867: note = Description of Artificial Sequence: Synthetic coding sequence
  source 1..867: mol_type = other DNA
atggagtacttcggcaccatcagcatcggcagccccccccagaacttcaccgtcatctttgacaccggcagcagcaacctgtgggtgcccagcgtgtactgcaccagccctgcctgcaagacccacagccgcttccagcccagccagagcagcacctacagccagcccggccagagcttcagcatccagtatggcaccggcagcctgagcggcatcattggagctgaccaggtgtctgtggagggcctgactgtggtgggccagcagtttggagagagcgtgacagagcccggccagacctttgtggatgctgagtttgatggcatcctgggcctgggctaccccagcctggccgtgggcggcgtgacccctgtgtttgacaacatgatggcccagaacctggtggacctgcccatgttttctgtgtacatgagcagcaaccctgagggcggggccggcagcgagctgatctttggaggctatgaccacagccacttcagcggcagcctgaactgggtgcctgtgaccaagcaggcctactggcagatcgccctggacaacatgctgtggagcgtgcccaccctgaccagctgcaggatgagccccagccccctgacagagagccccatccccagcgcccagctgcccaccccctactggacctcctggatggagtgcagcagcgctgctgtggccttcaaggacctgaccagcaccctgcagctgggccccagcggctcctggggcatgagcagctttgacagcttcacccagagcctgactgtgggcatcaccgtgtgggactggccccagcagagccccaaggagggcccctgtgtgtgtgcctgcctgagtgaccggccctag

SEQ ID NO: 146523 - DNA, 1455 bp, synthetic construct
  misc_feature 1..1455: note = Description of Artificial Sequence: Synthetic coding sequence
  source 1..1455: mol_type = other DNA
atggccccctggctgcagctgctgagcctgctgggcctgctgcctggagctgtggccgccccagcccagccccgggccgccagcttccaggcctggggcccccccagccctgagctgctggcccccaccaggtttgccctggagatgttcaacagaggccgggccgccggcaccagggctgtgctgggcctggtgcggggccgggtgcggcgggccggccagggcagcctgtacagcctggaggccaccctggaggagcccccctgcaatgaccccatggtgtgccgcctgcctgtgtccaagaagaccctgctgtgcagcttccaggtgctggatgagctgggcagacatgtgctgctgaggaaggactgtggccctgtggacaccaaggtgcctggggccggggagcccaagagcgccttcacccagggcagcgccatgatcagcagcctgagccagaaccacccagacaacagaaatgagaccttcagcagcgtcatcagcctgctgaatgaagaccccctgagccaggacctgcctgtgaagatggccagcatcttcaagaacttcgtcatcacctacaacagaacctatgagagcaaggaggaggcccgctggaggctgtctgtgtttgtgaacaacatggtgcgggcccagaagatccaggccctggaccggggcacagcccagtatggagtgaccaagttcagtgacctgacagaggaggagttccgcaccatctacctgaacaccctgctgaggaaggagcccggcaacaagatgaagcaggccaagtctgtgggggacctggcccctcctgagtgggactggaggagcaaaggagctgtgaccaaggtgaaggaccagggcatgtgtggcagctgctgggccttctctgtgactggaaatgtggagggccagtggttcctgaaccagggcaccctgctgagcctgtctgagcaggagctgctggactgtgacaagatggacaaggcctgcatgggcggcctgcccagcaatgcctacagcgccatcaagaacctgggcggcctggagacagaagatgactacagctaccagggccacatgcagagctgcaacttctctgctgagaaggccaaggtgtacatcaatgacagcgtggagctgagccagaatgagcagaagctggccgcctggctggccaagaggggccccatctctgtggccatcaatgccttcggcatgcagttctaccgccacggcatcagccggcccctgcggcccctgtgcagcccctggctgattgaccatgctgtgctgctggtgggctacggcaacagaagtgatgtgcccttctgggccatcaagaacagctggggcacagactggggcgagaagggctactactacctgcaccggggcagcggggcctgtggggtgaacaccatggccagcagcgctgtggtggactag

SEQ ID NO: 146524 - DNA, 675 bp, synthetic construct
  misc_feature 1..675: note = Description of Artificial Sequence: Synthetic coding sequence
  source 1..675: mol_type = other DNA
atggctgctgctgtgccccagagggcctggacagtggagcagctgcggtctgagcagctgcccaagaaggacatcatcaagttcctgcaggagcacggcagtgacagcttcctggccgagcacaagctgctgggcaacatcaagaatgtggccaagacagccaacaaggaccacctggtgacagcctacaaccacctgtttgagaccaagcgcttcaagggcacagagagcatcagcaaggtgtctgagcaggtgaagaatgtgaagctgaatgaagacaagcccaaggagaccaagtctgaggagaccctggatgagggcccccccaagtacaccaagtctgtgctgaagaagggggacaagaccaacttccccaagaagggagatgtggtgcactgctggtacacaggcaccctgcaggacggcaccgtgtttgacaccaacatccagaccagcgccaagaagaagaagaatgccaagcccctgtccttcaaggtgggcgtgggcaaggtgatccggggctgggatgaggccctgctgaccatgagcaagggggagaaggcccggctggagattgagcctgagtgggcctacggcaagaagggccagccagatgccaagatccccccaaatgccaagctgacctttgaggtggagctggtggacattgattag

SEQ ID NO: 146525 - DNA, 801 bp, synthetic construct
  misc_feature 1..801: note = Description of Artificial Sequence: Synthetic coding sequence
  source 1..801: mol_type = other DNA
atgagctctgtgtttgggaagccccgggccggcagcggcccccagagcgcccccctggaggtgaacctggccatcctgggcagaagaggagctgggaagagcgccctgactgtgaagttcctgaccaagcgcttcatcagtgaatatgaccccaacctggaggacacctacagcagcgaggagaccgtggaccaccagcctgtgcacctgcgggtgatggacacagctgacctggacacccccaggaactgtgagcgctacctgaactgggcccacgccttcctggtggtgtacagcgtggacagccggcagagctttgacagcagcagcagctacctggagctgctggccctgcacgccaaggagacccagaggagcatcccagccctgctgctgggcaacaagctggacatggcccagtaccggcaggtgaccaaggccgagggcgtggccctggccggccgcttcggctgcctcttctttgaggtgtctgcctgcctggactttgaacatgtgcagcacgtgttccatgaagctgtgcgggaggcccggcgggagctggagaagagccccctgacccggcccctcttcatcagcgaggagcgggccctgccccaccaggcccccctgacagcccggcacggcctggccagctgcaccttcaacaccctgagcaccatcaacctgaaggagatgcccaccgtggcccaggccaagctggtgacagtgaagagcagccgggcccagagcaagaggaaggcccccaccctgaccctgctgaagggcttcaagatcttctag

SEQ ID NO: 146526 - DNA, 972 bp, synthetic construct
  misc_feature 1..972: note = Description of Artificial Sequence: Synthetic coding sequence
  source 1..972: mol_type = other DNA
atgtgggccaccctgcccctgctgtgtgccgctgagctgtgtgtgaacagcctggagaagttccacttcaagtcctggatgagcaagcacaggaagacctacagcacagaggagtaccaccaccggctgcagacctttgccagcaactggaggaagatcaatgcccacaacaacggcaaccacaccttcaagatggccctgaaccagttcagtgacatgagctttgctgagatcaagcacaagtacctgtggagcgagccccagaactgcagcgccaccaagagcaactacctgcggggcaccggcccctacccaccttctgtggactggaggaagaagggcaactttgtgtcccctgtgaagaaccagggcgcctgtggcagctgctggaccttcagcaccactggagccctggagagcgccatcgccatcgccaccgggaagatgctgagcctggccgagcagcagctggtggactgtgcccaggacttcaacaaccacggctgccagggcggcctgcccagccaggcctttgagtacatcctgtacaacaagggcatcatgggagaggacacctacccctaccagggcaaggatggctactgcaagttccagcccgggaaggccatcggctttgtgaaggatgtggccaacatcaccatctatgatgaggaggccatggtggaggccgtggccctgtacaaccctgtgtcctttgcctttgaggtgacccaggacttcatgatgtacagaacaggcatctacagcagcaccagctgccacaagaccccagacaaggtgaaccacgctgtgctggccgtgggctacggggagaagaatggcatcccctactggatcgtgaagaacagctggggcccccagtggggcatgaatggctacttcctgattgagcggggcaagaacatgtgtggcctggccgcctgtgccagctaccccatccccctggtgtag

SEQ ID NO: 146527 - DNA, 621 bp, synthetic construct
  misc_feature 1..621: note = Description of Artificial Sequence: Synthetic coding sequence
  source 1..621: mol_type = other DNA
atgtgggccaccctgcccctgctgtgtgccggggcctggctgctgggcgtgcctgtgtgtggggctgctgagctgtgtgtgaacagcctggagaagttccacttcaagtcctggatgagcaagcacaggaagacctacagcacagaggagtaccaccaccggctgcagacctttgccagcaactggaggaagatcaatgcccacaacaacggcaaccacaccttcaagatggccctgaaccagttcagtgacatgagctttgctgagatcaagcacaagtacctgtggagcgagccccagaactgcagcgccaccaagagcaactacctgcggggcaccggcccctacccaccttctgtggactggaggaagaagggcaactttgtgtcccctgtgaagaaccaggtgtgcctggccatcagcatcctgagcctgcagaatggccacaccccccggcagtacaccaggaagaacaacagcaagggcccccagaaccaccacaagcacatcccagcctctgtgagcagccgccacctgagccctggccggcccagcctgccccagctgcgggagatctgtgagggcaagaggctgggggaggcctctgtgaacctgggctag

SEQ ID NO: 146528 - DNA, 990 bp, synthetic construct
  misc_feature 1..990: note = Description of Artificial Sequence: Synthetic coding sequence
  source 1..990: mol_type = other DNA
atgtggggcctgaaggtgctgctgctgcctgtggtgtcctttgccctgtacccagaggagatcctggacacccactgggagctgtggaagaagacccacaggaagcagtacaacaacaaggtggatgagatcagccggcggctcatctgggagaagaacctgaagtacatcagcatccacaacctggaggccagcctgggcgtgcacacctatgagctggccatgaaccacctgggggacatgaccagcgaggaggtggtgcagaagatgacaggcctgaaggtgcccctgagccacagccgcagcaatgacaccctgtacatccctgagtgggagggccgggccccagacagcgtggactacaggaagaagggctacgtgacccctgtgaagaaccagggccagtgtggcagctgctgggccttcagctctgtgggcgccctggagggccagctgaagaagaagacaggcaagctgctgaacctgagcccccagaacctggtggactgtgtgtctgaaaatgatggctgcggcggcggctacatgaccaatgccttccagtatgtgcagaagaacagaggaattgattctgaagatgcctacccctacgtgggccaggaggagagctgcatgtacaaccccaccgggaaggccgccaagtgccggggctaccgggagatccctgagggcaatgagaaggccctgaagagagctgtggcccgggtgggccctgtgtctgtggccattgatgccagcctgaccagcttccagttctacagcaaaggagtgtactatgatgagagctgcaacagcgacaacctgaaccacgctgtgctggccgtgggctacggcatccagaagggcaacaagcactggatcatcaagaacagctggggcgagaactggggcaacaagggctacatcctgatggccaggaacaagaacaatgcctgtggcatcgccaacctggccagcttccccaagatgtag

SEQ ID NO: 146529 - DNA, 777 bp, synthetic construct
  misc_feature 1..777: note = Description of Artificial Sequence: Synthetic coding sequence
  source 1..777: mol_type = other DNA
atgcacaaggaaaatgaggagatctacaacgtgtctgaaaataggaagcactgccccatcttcccctgccccctgctgaccaggtctgggaaggtgcctgagttcagacatgagcgggaggagcggctggaggagatgatccggcggcagaacctggatggcaacctgagctttgtgatgtggggcctgaaggtgctgctgctgcctgtggtgtcctttgccctgtacccagaggagatcctggacacccactgggagctgtggaagaagacccacaggaagcagtacaacaacaaggtggatgagatcagcagaagactcatctgggagaagaacctgaagtacatcagcatccacaacctggaggccagcctgggcgtgcacacctatgagctggccatgaaccacctgggggacatgaccagcgaggaggtggtgcagaagatgacaggcctgaaggtgcccctgagccacagccgcagcaatgacaccctgtacatccctgagtgggagggccgggccccagattctgtggactacaggaagaagggctacgtgacccctgtgaagaaccagggccagtgtggcagctgctgggccttcagctctgtgggcgccctggagggccagctgaagaagaagacaggcaagctgctgaacctgagcccccagaacctggtggactgtgtgtctgaaaatgatggctgcggcggcggctacatgaccaatgccttccagtatgtgcagaagaacagaggcatcgacagtgaagattag

SEQ ID NO: 146530 - DNA, 1005 bp, synthetic construct
  misc_feature 1..1005: note = Description of Artificial Sequence: Synthetic coding sequence
  source 1..1005: mol_type = other DNA
atgaacctgagcctggtgctggccgccttctgcctgggcatcgccagcgctgtgcccaagtttgaccagaacctggacaccaagtggtaccagtggaaggccacccacagaagactctacggggccaatgaggagggctggaggagagctgtgtgggagaagaacatgaagatgattgagctgcacaatggagagtacagccagggcaagcacggcttcaccatggccatgaatgccttcggggacatgaccaatgaggagttccggcagatgatgggctgcttcaggaaccagaagttcaggaagggcaaggtgttccgggagcccctcttcctggacctgcccaagtctgtggactggaggaagaagggctacgtgacccctgtgaagaaccagaagcagtgtggcagctgctgggccttcagcgccaccggggccctggagggccagatgttcaggaagacaggcaagctggtgtccctgtctgagcagaacctggtggactgcagccggccccagggcaaccagggctgcaatggaggcttcatggcccgggccttccagtatgtgaaggaaaatggaggcctggacagcgaggagagctacccctacgtggccgtggatgagatctgcaagtacagacctgagaacagcgtggccaatgacaccggcttcaccgtggtggcccctgggaaggagaaggccctgatgaaggctgtggccaccgtgggccccatctctgtggccatggatgctggccacagcagcttccagttctacaagagcggcatctactttgagccagactgcagcagcaagaacctggaccatggagtgctggtggtgggctacggctttgagggcgccaacagcaacaacagcaagtactggctggtgaagaacagctggggccctgagtggggcagcaatggctacgtgaagatcgccaaggacaagaacaaccactgcggcatcgccacagctgccagctacccaaatgtgtag

SEQ ID NO: 146531 - DNA, 1005 bp, synthetic construct; identical to SEQ ID NO: 146530
  misc_feature 1..1005: note = Description of Artificial Sequence: Synthetic coding sequence
  source 1..1005: mol_type = other DNA

SEQ ID NO: 146532 - DNA, 996 bp, synthetic construct
  misc_feature 1..996: note = Description of Artificial Sequence: Synthetic coding sequence
  source 1..996: mol_type = other DNA
atgaagaggctggtgtgtgtgctgctggtgtgcagcagcgctgtggcccagctgcacaaggaccccaccctggaccaccactggcacctgtggaagaagacctacggcaagcagtacaaggagaagaatgaggaggccgtgcggcggctcatctgggagaagaacctgaagtttgtgatgctgcacaacctggagcacagcatgggcatgcacagctatgacctgggcatgaaccacctgggggacatgaccagcgaggaggtgatgagcctgatgagcagcctgcgggtgcccagccagtggcagaggaacatcacctacaagagcaaccccaaccgcatcctgcctgacagcgtggactggagggagaagggctgtgtgacagaggtgaagtaccagggcagctgtggggcctgctgggccttctctgctgtgggcgccctggaggcccagctgaagctgaagacaggcaagctggtgtccctgagcgcccagaacctggtggactgcagcacagagaagtatggcaacaagggctgcaatggaggcttcatgaccacagccttccagtacatcatcgacaacaagggcatcgacagtgatgccagctacccctacaaggccatggaccagaagtgccagtatgacagcaagtacagagctgccacctgcagcaagtacacagagctgccctacggcagagaagatgtgctgaaggaggccgtggccaacaagggccctgtgtctgtgggcgtggatgcccggcaccccagcttcttcctgtaccgcagcggcgtgtactatgagcccagctgcacccagaatgtgaaccacggcgtgctggtggtgggctatggagacctgaatggcaaggagtactggctggtgaagaacagctggggccacaactttggagaggagggctacatccgcatggccaggaacaagggcaaccactgcggcatcgccagcttccccagctacccagagatctag

SEQ ID NO: 146533 - DNA, 846 bp, synthetic construct
  misc_feature 1..846: note = Description of Artificial Sequence: Synthetic coding sequence
  source 1..846: mol_type = other DNA
atgaagaggctggtgtgtgtgctgctggtgtgcagcagcgctgtggcccagctgcacaaggaccccaccctggaccaccactggcacctgtggaagaagacctacggcaagcagtacaaggagaagaatgaggaggccgtgcggcggctcatctgggagaagaacctgaagtttgtgatgctgcacaacctggagcacagcatgggcatgcacagctatgacctgggcatgaaccacctgggggacatgggcagctgtggggcctgctgggccttctctgctgtgggcgccctggaggcccagctgaagctgaagacaggcaagctggtgtccctgagcgcccagaacctggtggactgcagcacagagaagtatggcaacaagggctgcaatggaggcttcatgaccacagccttccagtacatcatcgacaacaagggcatcgacagtgatgccagctacccctacaaggccatggaccagaagtgccagtatgacagcaagtacagagctgccacctgcagcaagtacacagagctgccctacggcagagaagatgtgctgaaggaggccgtggccaacaagggccctgtgtctgtgggcgtggatgcccggcaccccagcttcttcctgtaccgcagcggcgtgtactatgagcccagctgcacccagaatgtgaaccacggcgtgctggtggtgggctatggagacctgaatggcaaggagtactggctggtgaagaacagctggggccacaactttggagaggagggctacatccgcatggccaggaacaagggcaaccactgcggcatcgccagcttccccagctacccagagatctag

SEQ ID NO: 146534 - DNA, 1131 bp, synthetic construct
  misc_feature 1..1131: note = Description of Artificial Sequence: Synthetic coding sequence
  source 1..1131: mol_type = other DNA
atggccctgacagcccaccccagctgcctgctggccctgctggtggccggcctggcccagggcatccggggccccctgcgggcccaggacctgggcccccagcccctggagctgaaggaggccttcaagctgttccagatccagttcaacagaagctacctgagccctgaggagcacgcccaccggctggacatctttgcccacaacctggcccaggcccagaggctgcaggaggaggacctgggcacagctgagtttggagtgacccccttcagtgacctgacagaggaggagtttggccagctgtatggctaccgccgggctgctggaggagtgcccagcatgggccgggagatccgctctgaggagcctgaggagagcgtgcccttcagctgtgactggaggaaggtggccagcgccatcagccccatcaaggaccagaagaactgcaactgctgctgggccatggctgctgctggcaacatcgagaccctgtggaggatctccttctgggactttgtggatgtgtctgtgcaggagctgctggactgtggccgctgtggagatggctgccacggcggctttgtgtgggatgccttcatcaccgtgctgaacaacagcggcctggccagcgagaaggactaccccttccagggcaaggtgcgggcccaccgctgccaccccaagaagtaccagaaggtggcctggatccaggacttcatcatgctgcagaacaatgagcaccgcatcgcccagtacctggccacctacggccccatcaccgtgaccatcaacatgaagcccctgcagctgtacaggaagggcgtcatcaaggccacccccaccacctgtgacccccagctggtggaccacagcgtgctgctggtgggcttcggctctgtgaagtctgaggagggcatctgggccgagaccgtgagcagccagagccagccccagcccccccaccccaccccctactggatcctgaagaacagctggggcgcccagtggggcgagaagggctacttccggctgcaccggggcagcaacacctgtggcatcaccaagttccccctgacagcccgggtgcagaagccagacatgaagccccgggtgtcctgccccccatag

SEQ ID NO: 146535 - DNA, 2679 bp, synthetic construct
  misc_feature 1..2679: note = Description of Artificial Sequence: Synthetic coding sequence
  source 1..2679: mol_type = other DNA
atgacagaccccttctgtgtgggcggccggcggctgcccggcagcagcaagagcggccctgggaaggatggcagcaggaaggaggtgcggctgcccatgctgcatgacccccccaagatgggcatgcctgtggtgcggggcggccagacagtgcccggccaggcccccctgtgctttgatcctggcagccctgccagtgacaagacagagggcaagaagaagggccggcccaaggccgagaaccaggccctgcgggacatccccctgagcctgatgaatgactggaaggatgagttcaaggcccacagccgggtgaagtgccccaacagcggctgctggctggagttccccagcatctacggcctgaagtaccactaccagcgctgccagggcggggccatcagtgaccggctggccttcccctgccccttctgtgaggccgccttcaccagcaagacccagctggagaagcaccgcatctggaaccacatggaccggcccctgcctgccagcaagccaggccccatcagcaggcctgtgaccatcagcaggcctgtgggcgtgtccaagcccatcggcgtgtccaagcctgtgaccatcggcaagcctgtgggcgtgtccaagcccatcggcatcagcaagcctgtgtctgtgggccggcccatgcctgtgaccaaggccatccctgtgaccaggcctgtgcctgtgaccaagcctgtgacagtgtcccggcccatgcctgtgaccaaggccatgcctgtgaccaagcccatcaccgtgaccaagtctgtgcctgtgaccaagcctgtgcctgtgaccaagcccatcaccgtgaccaagctggtgacagtgaccaagcctgtgcctgtgaccaagcctgtgacagtgtcccggcccatcgtggtgtccaagcctgtgacagtgtcccggcccatcgccatcagccgccacaccccaccctgcaagatggtgctgctgaccaggtctgagaacaaggccccccgggccactggaagaaattctgggaagaagagagctgctgacagcctggacacctgccccatcccccccaagcaggcccggccagaaaatggagaatatggccccagctccatgggccagagcagcgccttccagctgtctgctgacaccagcagcggcagcctgagccctggcagccggcccagcggcggcatggaggccctgaaggctgctggccctgccagccccccagaagaagatcctgagaggaccaagcacaggaggaagcagaagacccccaagaagttcaccggggagcagcccagcatcagcggcaccttcggcctgaagggcctggtgaaggccgaggacaaggcccgggtgcacaggagcaagaagcaggagggccctggcccagaagatgccaggaagaaggtgcctgctgcccccatcaccgtgtccaaggaggccccagcccctgtggcccacccagcccctgggggccctgaggagcagtggcagagggccatccacgagcggggggaggccgtgtgccccacctgcaatgtggtgaccaggaagaccctggtgggcctgaagaagcacatggaggtgtgccagaagctgcaggatgccctgaagtgccagcactgcaggaagcagttcaagagcaaggccggcctgaactaccacaccatggccgagcacagcgccaagcccagtgatgctgaggccagcgagggcggggagcaggaggagcgggagcggctgaggaaggtgctgaagcagatgggccgcctgcgctgcccccaggagggctgtggggccgccttcagcagcctgatgggctaccagtaccaccagaggcgctgtgggaagccaccctgtgaggtggacagccccagcttcccctgcacccactgcggcaagacctaccgcagcaaggccggccatgactaccacgtgcgctctgagcacacagcccctcctcctgaggagcccacagacaagagccctgaggccgaggaccccctgggcgtggagaggaccccatctggccgggtgcggaggaccagcgcccaggtggccgtgttccacctgcaggagattgctgaagatgagctggcccgggactggaccaagaggaggatgaaggatgacctggtgcctgagacagcccggctgaactacaccaggcctggcctgcccaccctgaacccccagctgctggaggcctggaagaatgaggtgaaggagaagggccacgtgaactgccccaatgactgctgtgaggccatctacagctctgtgtctggcctgaaggcccacctggccagctgcagcaagggggcccacctggccggcaagtaccgctgcctgctgtgccccaaggagttcagcagcgagagcggcgtgaagtaccacatcctgaagacccatgctgagaactggttccgcaccagcgctgaccccccacccaagcacaggagccaggacagcctggtgcccaagaaggagaagaagaagaacctggccggcggcaagaagaggggcaggaagcccaaggagaggaccccagaggagcctgtggccaagctgcccccaagaagagatgactggcccccaggctgccgggacaagggggcccggggcagcacaggcaggaaggtgggcgtgtccaaggcccctgagaagtag

SEQ ID NO: 146536 - DNA, 2343 bp, synthetic construct
  misc_feature 1..2343: note = Description of Artificial Sequence: Synthetic coding sequence
  source 1..2343: mol_type = other DNA
atggaccagaacagcgtgcctgagaaggcccagaatgaggccgacaccaacaatgctgaccgcttcttccgcagccacagcagccccccccaccaccggcccggccacagccgggccctgcaccactatgagctgcaccaccacggcgtgccccaccagagaggagagagccaccaccccccagagttccaggacttccatgaccaggccctgagcagccacgtgcaccagagccaccaccacagcgaggccagaaatcatggccgggcccacggccccaccggcttcggcctggcccccagccagggcgctgtgcccagccacaggagctatggagaggactaccatgatgagctgcagagagatggccgccgccaccatgatggcagccagtatggaggcttccaccagcagagcgacagccactaccaccggggcagccaccacggccggccccagtacctgggggagaacctgagccactacagcagcggcgtgccccaccacggggaggccagccaccacggcggcagctacctgccccacggccccaacccctacagcgagagcttccaccacagcgaggccagccacctgagcggcctgcagcatgatgagagccagcaccaccaggtgccccaccggggctggccccaccaccaccaggtgcaccaccacggccgcagccgccaccacgaggcccaccagcacggcaagagcccccaccacggggagaccatcagcccccacagctctgtgggcagctaccagaggggcatcagtgactaccacagcgagtaccaccagggcgaccaccaccccagcgagtaccaccacggggaccacccccaccacacccagcaccactaccaccagacccaccgccaccgggactaccaccagcaccaggaccaccacggggcctaccacagcagctacctgcatggagactatgtgcagagcaccagccagctgagcatcccccacaccagccgcagcctcatccatgatgcccctggccctgctgccagcaggactggagtcttcccctaccacgtggcccacccccggggcagcgcccacagcatgaccaggagcagcagcaccatccgcagccgggtgacccagatgagcaagaaggtgcacacccaggacatcagcaccaagcacagcgaggactggggcaaggaggagggccagttccagaagaggaagacaggccgcctgcagaggaccaggaagaagggccacagcaccaacctcttccagtggctgtgggagaagctgaccttcctgatccagggcttccgggagatgatccggaacctgacccagagcctggcctttgagaccttcatcttctttgtggtgtgcctgaacacagtgatgctggtggcccagacctttgctgaggtggagatccggggggagtggtacttcatggccctggacagcatcttcttctgcatctacgtggtggaggccctgctgaagatcatcgccctgggcctgagctacttctttgacttctggaacaacctggacttcttcatcatggccatggctgtgctggacttcctgctgatgcagacccacagctttgccatctaccaccagagcctcttccgcatcctgaaggtgttcaagagcctgcgggccctgcgggccatccgggtgctgcggcggctgtccttcctgacctctgtgcaggaggtgacaggcaccctgggccagagcctgcccagcattgctgccatcctgatcctgatgttcacctgcctcttcctgttctctgctgtgctgcgggccctcttcaggaagagtgaccccaagcgcttccagaacatcttcaccaccatcttcaccctcttcaccctgctgaccctggatgactggagcctcatctacatggacagccgggcccagggcgcctggtacatcatccccatcctggtgatctacatcatcatccagtacttcatcttcctgaacctggtgatcaccgtgctggtggacagcttccagacagccctcttcaagggcctggagaaggccaagcaggagcgggccgcccgcatccaggagaagctgctggaggacagcctgacagagctgcgggctgctgagcccaaggaggtggccagcgagggcaccatgctgaagaggctcatcgagaagaagtttggcaccatgacagagaagcagcaggagctgctcttccactacctgcagctggtggcctctgtggagcaggagcagcagaagttccgcagccaggccgctgtgattgatgagatcgtggacaccacctttgaagctggggaggaggacttcagaaattag

SEQ ID NO: 146537 - DNA, 1197 bp, synthetic construct
  misc_feature 1..1197: note = Description of Artificial Sequence: Synthetic coding sequence
  source 1..1197: mol_type = other DNA
atgagccagcaccgccaccagaggcacagcagggtcatcagcagcagccctgtggacaccacctctgtgggcttctgccccaccttcaagaagttcaagagaaatgatgatgagtgccgggcctttgtgaagagggtcatcatgagccgcttcttcaagatcatcatgatcagcacagtgaccagcaatgccttcttcatggccctgtggaccagctatgacatccgctaccgcctcttccggctgctggagttcagcgagatcttctttgtgtccatctgcaccagcgagctgtccatgaaggtgtatgtggaccccatcaactactggaagaatggctacaacctgctggatgtgatcatcatcatcgtgatgttcctgccctatgccctgcggcagctgatgggcaagcagttcacctacctgtacatcgcagatggcatgcagagcctgcgcatcctgaagctgattggctacagccagggcatccgcaccctcatcacagctgtgggccagacagtgtacacagtggcctctgtgctgctgctgctcttcctgctgatgtacatctttgccatcctgggcttctgcctgtttggcagcccagacaacggggaccatgacaactggggcaacctggccgccgccttcttcaccctcttcagcctggccaccgtggatggctggacagacctgcagaagcagctggacaaccgggagtttgccctgagccgggccttcaccatcatcttcatcctgctggccagcttcatcttcctgaacatgtttgtgggcgtgatgatcatgcacacagaggacagcatcaggaagtttgagcgggagctgatgctggagcagcaggagatgctgatgggagagaagcaggtgatcctgcagaggcagcaggaggagatcagccggctgatgcacatccagaagaatgctgactgcaccagcttcagcgagctggtggagaacttcaagaagaccctgagccacacagaccccatggtgctggatgactttggcaccagcctgcccttcatcgacatctacttcagcaccctggactaccaggacaccaccgtgcacaagctgcaggagctgtactatgaaattgtgcacgtgctgagcctgatgctggaggacctgccccaggagaagccccagagcctggagaaggtggatgagaagtag

SEQ ID NO: 146538 - DNA, 1419 bp, synthetic construct
  misc_feature 1..1419: note = Description of Artificial Sequence: Synthetic coding sequence
  source 1..1419: mol_type = other DNA
atgagggacaatgagaaggcctggtggcagcagtggaccagccacacaggcctggagggctggggcggcacccaggaggacaggatgggctttggaggagctgtggccgccctgcggggccggcccagccccctgcagagcaccatccacgagagctatggccggcctgaggagcaggtgctgatcaaccggcaggagatcaccaacaaggcagatgcctgggacatgcaggagttcatcacccacatgtacatcaagcagctgctgcggcacccagccttccagctgctgctggccctgctgctggtgatcaatgccatcaccatcgccctgcggaccaacagctacctggaccagaagcactatgagctgttcagcaccattgatgacatcgtgctgaccatcctgctgtgtgaggtgctgctgggctggctgaatggcttctggatcttctggaaggatggctggaacatcctgaacttcatcatcgtgttcatcctgctgctgcgcttcttcatcaatgagatcaacatccccagcatcaactacaccctgcgggccctgcggctggtgcacgtgtgcatggctgtggagcccctggcccgcatcatccgggtcatcctgcagagcgtgcctgacatggccaacatcatggtgctgatcctcttcttcatgctggtgttttctgtgtttggagtgaccctgtttggagcctttgtgcccaagcacttccagaacatccaggtggccctgtacaccctcttcatctgcatcacccaggacggctgggtggacatctacagcgacttccagacagagaagcgggagtatgccatggagattggaggagccatctacttcaccatcttcatcaccatcggggccttcatcggcatcaacctcttcgtcatcgtggtgaccaccaacctggagcagatgatgaaggccggggagcagggccagcagcagaggatcaccttcagcgagaccggggctgaggaggaggaggagaatgaccagctgcccctggtgcactgtgtggtggcccggtctgagaagagcggcctgctgcaggagcccctggccggcggccccctgagcaacctgtctgagaacacctgtgacaacttctgcctggtgctggaggccatccaggagaacctgcggcagtacaaggagatcagagatgagctgaacatgattgtggaggaggtgcgggccatccgcttcaaccaggagcaggagagcgaggtgctgaacagaagaagcagcaccagcggcagcctggagaccaccagcagcaaggacatccggcagatgagccagcagcaggacctgctgagcgccctggtgtccatggagaaggtgcatgacagcagcagccagatcctgctgaagaagcacaagagcagccactag

SEQ ID NO: 146539 - DNA, 3351 bp, synthetic construct
  misc_feature 1..3351: note = Description of Artificial Sequence: Synthetic coding sequence
  source 1..3351: mol_type = other DNA
atggagagccccctcatctacgtgtctgtgctgctgctgaacatctttgagttcagcagcggcatcgtgtacaacaaggatgacacagagaagagatttgcctgcagcaacaagggcttcccccaggagaatgagatcatcaagctgtacctgttcctggagaacctgaagatccagtgcttcttccagacagaaaatgagatcgccagcaaggccatgctgtctgtgttcaccagcggcggcctggcccccagcctgggcatcatgaacagcacctacaacggcatcttccacttcaacctgaccctcttcagtgaccgcatcctgtggctggtggacatcccccgggagaacatcacccagagcacagacattgctgctgtggaggagtggctggtgcgcatcaccctgcaccacggcctgaacatctatgccacagagggcaccctgctggatgtgatccgggagcccatcctgcagtggaccccaggagatgtgattcctgagagcgagatcagcaagctgtacccccacgtggtggacctgaaggtgaccaagtgcccctgtgccaatgatgtggccctgctgggcttcatcgtggacaccatcgtggatggagtgtacatcggcatcacctttggaggcttctggcatgactatgacaccacctggttcaacatgacccagaccatctacagccagctgcaggaggagtatgaggacctgagcctggtggacatggtgctgaccaaccacttcctggtgatcctgaccagcctgggcctgtttgtgtctgaggacctgcgctaccccagccgccacagcctgtccttcagcagagctgacttctgtggctttgagcgggtggactatgtgaagggcaagctgtggtacaatgaacgctgctttgccaaccgggagcactttgaggtggactatgtgacagtgacctttgagaggaacagaaccctgtctgagagcagcagctgcttctacagccaggagcccttcctggagtgggtgccctgcctgccccacatcttcaagggcatcaagatcttccccaccgtgctgaccttcctggtggaccaggagcggggcaccggggtgtacctgttctacaacaaggtgaggaagacagccatcgcctctgtgtccaccctgagaaataatgagcccaacagccagagcaagttccccatcttccgcttccccagcagcttcagcagccctgtgggcatggtgttccaccccaggagccacttcctgtatgcctacggcaaccagatctggctgtctgtggatggcggcaacaccttccagctgattgccaacttccatgatgacatcatcaagaagaccttccacagcttctacaccagcgccatcacctttgtgtcccagaggggcaaggtgtacagcaccaaggccggcatgggccgctacagcgctgtgggctctgtgacagagcgcatcttcaccctgtactatgaccacctgggcttcctgcacaagctgaccctgggccgctttgaggccagcggccccccaacagccttcggcaacagcaggaacctgtttggccagcccccagacatgggctttgaaacagccctggccccccagcacaccagcctggatgagatcatcttctttgcctacgtgcctgaaaatgagccccaggagaccatctacagcaagaagtttggaaacatccactacggcaaggtgatccacagcggcaagacaggccgggcctacatcaggaaggtgctgcagcacaccacccccaagggcttcctgagctctgtgattgctgagatgaaggagcccttcggcctggaggaggtgaatgaaagcagctgcctgagcagcagcctgctgatcaacaaggctggaaatgtgtacaagctgaccctggacagccaggtggtgcaggccctgtttgaggacacagacatcgagaagacagtggtgctgcccggctacagcagcttcctgatcaccagcatcctggacaacaagaatgccctggccatcgccaccatgcctgagagcgcccccaacaacatgaccttcctgaagagcacctggttcctgtacaactttggccagagaaatggaagaacctggaagatctacagcaagccctgcaactactggttccagcatgatgacagccccagcctgaacatcgtgaagtacatcgacctgggcaacagctatgtgctgaaggccaaggtgatcagaaatgccaagggcttcaggatgctggagatccccctgctgactgtgtttgtgggcaaccccaacctgctggaggtgacagctgaggtgacctttgatgacacagacagctatgtgatcaccatctctgctgccagcaaggtgctgcaccagggcagcaccagcctggccttcatcatgtggagcgccagcacagaatgttttgtgaccaccatggtgcccaccctgaagagcagctgcagctacctgcgctccatgcaccacatccccagcaagttcatcccctttgaggactggatcagcggcgtgcacaaggacagccagggcttcaacctgatcaagaccctgcccatcaactacagaccacccagcaacatgggcatcgccatccccctgacagacaacttctaccacgccgaccccagcaagcccatccccaggaacatgttccacatgagcaagaagacaggcaagttcaagcagtgtgccaacgtgtccacccgggaggagtgcaactgcaccaaggaccagaagttcagccatgctgtggccttcagtgactgccgggagaaggtgccccgcttcaagttccccatcacccagtaccctgtgtccctggagatcatcaatgaagatggccgggtgcccctgcagagcccctacctggtgacagtgacagaggtgaacatgaggcacaactggaagctgaagcacacagtgcctgagaacatcaagaggatgaagcagctggtggagcccatcctgggcgctgctgtgtacaaccccagcggcctgaacctgagcatcaagggcagcgagctgttccacttccgggtgaccgtcatcagcggcgtgaccttctgcaacctgattgaggagttccagatctacgtggatgaggcccccctgcccttccctggccacaccctgattgctgtggccacagctgtggtgctgggcggcctcatcttcatcgccttcatgttccagctgcagggcatccacccctggaggaccttccagcgctggatcagaagaaaccaggagaagttcagcagcatcagcctgtctgagctgatccacaggagcaagtctgaggagtag

SEQ ID NO: 146540 - DNA, 225 bp, synthetic construct
  misc_feature 1..225: note = Description of Artificial Sequence: Synthetic coding sequence
  source 1..225: mol_type = other DNA
atggagagccccctcatctacgtgtctgtgctgctgctgaacatctttgagttcagcagcggcatcgtgtacaacaaggatgacacagagaagagatttgcctgcagcaacaagggcttcccccaggagaatgagatcatcaagctgtacctgttcctggagaacctgaagatccagtgcttcttccagacagaaaatgagatcgccagcaaggccatgctgtag

SEQ ID NO: 146541 - DNA, 303 bp, synthetic construct
  misc_feature 1..303: note = Description of Artificial Sequence: Synthetic coding sequence
  source 1..303: mol_type = other DNA
atggagagccccctcatctacgtgtctgtgctgctgctgaacatctttgagttcagcagcggcatcgtgtacaacaaggatgacacagagaagagatttgcctgcagcaacaagggcttcccccaggagaatgagatcatcaagctgtacctgttcctggagaacctgaagatccagtgcttcttccagacagaaaatgagatcgccagcaaggccatgctgtctgtgttcaccagcggcggcctggcccccagcctgggcatcatgaacagcacctacaacggcatcttccacttcaactag

SEQ ID NO: 146542 - DNA, 225 bp, synthetic construct; identical to SEQ ID NO: 146540
  misc_feature 1..225: note = Description of Artificial Sequence: Synthetic coding sequence
  source 1..225: mol_type = other DNA

SEQ ID NO: 146543 - DNA, 795 bp, synthetic construct
  misc_feature 1..795: note = Description of Artificial Sequence: Synthetic coding sequence
  source 1..795: mol_type = other DNA
atgcacaacccagatggcagcgccagccccacagctgaccccggcagcgagctgcagaccctgggccaggccgcccggcggcccccaccacccagggctggccatgatgcccccaggaggacccggcccagcgccaggaagcccctgagctgcttcagccggcggcccatgcccacccgggagccccccaagacccggggcagccggggccacctgcacacccaccccccaggccctggcccccccctgcagggcctggccccccggggcctgaagaccagcgccccccggcccccctgccagccccagcccggcccccacaaggccaagaccaagaagatcgtgtttgaagatgagctgctgagccaggccctgctgggcgccaagaagcccatcggggccatccccaagggccacaagccccggccccaccctgtgcctgactatgagctgaagtacccacctgtgagcagcgagcgggagaggagccgctacgtggccgtgttccaggaccagtatggagagttcctggagctgcagcacgaggtgggctgtgcccaggccaagctgcggcagctggaggccctgctgagcagcctgcccccaccccagagccagaaggaggcccaggtggccgcccgggtgtggagggagtttgagatgaagaggatggaccccggcttcctggacaagcaggcccgctgccactacctgaagggcaagctgcggcacctgaagacccagatccagaagtttgatgaccagggcgacagcgagggctctgtgtacttctag

SEQ ID NO: 146544 - DNA, 3480 bp, synthetic construct
  misc_feature 1..3480: note = Description of Artificial Sequence: Synthetic coding sequence
  source 1..3480: mol_type = other DNA
atgtgtggccctgccatgtttcctgctggccccccctggccccgggtgcgggtggtgcaggtgctgtgggccctgctggccgtgctgctggcctcctggaggctgtgggccatcaaggacttccaggagtgcacctggcaggtggtgctgaatgagttcaagagggtgggggagagcggcgtgtctgacagcttctttgagcaggagcctgtggacacagtgagcagcctcttccacatgctggtggacagccccatcgaccccagcgagaagtacctgggcttcccctactacctgaagatcaactacagctgtgaggagaagcccagcgaggacctggtgaggatgggccacctgaccggcctgaagcccctggtgctggtgaccttccagagccctgtgaacttctaccgctggaagattgagcagctgcagatccagatggaggccgcccccttccgcagcaaggagccctgcatggccgaggaggtgtgcagcatgtcctggtacacccccatgcccatcaagaagggctctgtggtgatgagggtggacatcagcagcaatggcctgggcaccttcatcccagacaagcgcttccagatgaacatcaatggcttcctgaagagggaccgggacaacaacatccagttcaccgtgggggaggagctgttcaacctgatgccccagtactttgtgggcgtgagcagccggcccctgtggcacacagtggaccagagccctgtgctgatcctgggcggcatccccaatgagaagtatgtgctgatgacagacaccagcttcaaggacttcagcctggtggagctgagcattgacagctgctgggtgggcagcttctactgcccccacagcggcttcaccgccaccatctatgacaccatcgccacagagagcaccctcttcatccggcagaaccagctggtgtactacttcaccggcacctacaccaccctgtatgaaagaaacagaggcagcggctcctggatccgggtgctggccagcgagtgcatcaagaagctgtgccctgtgtacttccacagcaatggaagtgagtacatcatggccctgaccaccgggaagcatgagggctacgtgcacttcggcaccatcagagatggccaggtgtcctttgagatgctgccccggcagtggagcgtgtgtgagcagattggagtgaccacctgcagcatcatctggagcgagtacatcgccggggagtacaccctgctgctgctggtggagagcggctatggaaatgccagcaagcgcttccaggtggtgtcctacaacacagccagtgatgacctggagctgctgtaccacatccctgagttcatccctgaggcccggggcctggagttcctgatgatcctgggcacagagagctacaccagcacagccatggcccccaagggcatcttctgcaacccctacaacaacctgatcttcatctggggcaacttcctgctgcagagcagcaacaaggagaacttcatctacctggccgacttccccaaggagctgagcatcaagtacatggcccgctccttcagaggagctgtggccatcgtgacagaaacagaggagatctggtacctgctggagggcagctacagagtgtaccagctgttccccagcaagggctggcaggtgcacatcagcctgaagctgatgcagcagagcagcctgtatgccagcaatgagaccatgctgaccctcttctatgaggacagcaagctgtaccagctggtgtacctgatgaacaaccagaagggccagctggtgaagaggctggtgcctgtggagcagctgctgatgtaccagcagcacaccagccactatgacctggagaggaagggcggctacctgatgctgtccttcatcgacttctgccccttctctgtgatgaggctgcggagcctgcccagcccccagcgctacacccggcaggagcgctaccgggcccggcccccccgggtgctggagaggagcggcttccacaatgaaaacagcctggccatctaccagggcctggtgtactacctgctgtggctgcacagcgtgtatgacaagccctatgctgaccctgtgcatgaccccacctggcgctggtgggccaacaacaagcaggaccaggactactacttcttcctggccagcaactggaggtctgctgggggcgtgtccattgagatggacagctatgagaagatctacaacctggagagcgcctatgagctgcctgagcgcatcttcctggacaagggcacagagtacagctttgccatcttcctgagcgcccagggccacagcttccgcacccagagcgagctgggcacagccttccagctgcacagccaggtggatgtgggcgtggtgctggccgaccccggctgcatcgaggcctctgtgaagcaggaggtgctgatcaacagaaattctgtgctcttcagcatcaccctgaaggacaagaagctgtgctatgaccagggcatcagcggccaccacctgatggagacctccatgacagtgaatgtggtgggcagcagcggcctgtgcttccaggagacccacctgggcccccacatgcagggcaacctgatggtgcctgtgttcatcggctgccccccaggcaagaggctggcctttgacatcacctacaccctggagtacagccggctgaagaacaagcactactttgactgtgtgaatgtgaaccctgagatgccctgcttcctgttccgggacatcttctaccccttcttcctgatccaggacctggtgactggagacagcggcagcttccagggcagctatgtgctgctggtggtgggcggcggccccaccctggacagcctgaaggactacagtgaagatgagatctaccgcttcaacagccccctggacaagaccaacagcctcatctggaccaccaggaccaccaggaccaccaaggacagcgccttccacatcatgagccatgagagccctggcatcgagtggctgtgcctggagaatgccccctgctatgacaacgtgccccagggcatctttgcccctgagttcttcttcaaggtgctggtgagcaacagaggagtggacaccagcacctactgcaactaccagctgaccttcctgctgcacatccacggcctgcccctgagccccaagagggccctcttcatcatcatggtgtctgcctctgtgtttgtgggcctggtgatcttctacatcgccttctgcctgctgtggcccctggtggtgaagggctgcaccatgatccgctggaagatcaacaacctgattgccagcgagagctactacacctacgccagcatcagcggcatcagctccatgcccagcctgcggcacagcaggatgggctccatgttcagcagcaggatgacagaggacagagctgagcccaaggaggccgtggagcggcagctgatgacctag

SEQ ID NO: 146545 - DNA, 3480 bp, synthetic construct; identical to SEQ ID NO: 146544
  misc_feature 1..3480: note = Description of Artificial Sequence: Synthetic coding sequence
  source 1..3480: mol_type = other DNA

SEQ ID NO: 146546 - DNA, 1983 bp, synthetic construct
  misc_feature 1..1983: note = Description of Artificial Sequence: Synthetic coding sequence
  source 1..1983: mol_type = other DNA
atggatgtgctggtgtctgaatgttctgcccggctgctgcagcaggaggaggagatcaagagcctgacagctgagattgaccggctgaagaactgtggctgcctgggcgccagccccaacctggagcagctgcaggaggagaacctgaagctgaagtaccgcctgaacatcctgaggaagagcctgcaggccgagaggaacaagcccaccaagaacatgatcaacatcatcagccggctgcaggaggtgtttggccacgccatcaaggccgcctacccagacctggagaacccccccctgctggtgacccccagccagcaggccaagtttggagactaccagtgcaacagcgccatgggcatcagccagatgctgaagaccaaggagcagaaggtgaacccccgggagattgctgagaacatcaccaagcacctgcctgacaatgaatgtattgagaaggtggagattgctggccctggcttcatcaacgtgcacctgaggaaggactttgtgtctgagcagctgaccagcctgctggtgaatggagtgcagctgcctgccctgggggagaacaagaaggtgattgtggacttcagcagccccaacatcgccaaggagatgcacgtgggccacctgcggagcaccatcattggagagagcatcagccggctgtttgaatttgctggctatgatgtgctgcggctgaaccacgtgggggactggggcacccagtttggcatgctgattgcccacctgcaggacaagttcccagactacctgactgtgagcccccccatcggggacctgcaggtgttctacaaggagagcaagaagagatttgacacagaggaggagttcaagaagagggcctaccagtgtgtggtgctgctgcagggcaagaacccagacatcaccaaggcctggaagctgatctgtgatgtgtcccggcaggagctgaacaagatctatgatgccctggatgtgtccctgattgagcggggggagagcttctaccaggacaggatgaatgacatcgtgaaggagtttgaggaccggggctttgtgcaggtggatgatggcaggaagatcgtgtttgtgcccggctgcagcatccccctgaccatcgtgaagagtgatggcggctacacctatgacaccagtgacctggccgccatcaagcagaggctgtttgaggagaaggctgacatgatcatctacgtggtggacaatggccagagcgtgcacttccagaccatctttgctgctgcccagatgattggctggtatgaccccaaggtgaccagggtcttccacgccggctttggagtggtgctgggggaggacaagaagaagttcaagaccaggtctggagaaacagtgcggctgatggacctgctgggggagggcctgaagaggtccatggacaagctgaaggagaaggagcgggacaaggtgctgacagctgaggagctgaatgctgcccagacctctgtggcctacggctgcatcaagtatgctgacctgagccacaaccggctgaatgactacatcttctcctttgacaagatgctggatgaccggggcaacacagctgcctacctgctgtatgccttcacccgcatccgcagcatcgcccggctggccaacattgatgaggagatgctgcagaaggccgcccgggagaccaagatcctgctggaccacgagaaggagtggaagctgggccgctgcatcctgcgcttccctgagatcctgcagaagatcctggatgacctcttcctgcacaccctgtgtgactacatctatgagctggccacagccttcacagagttctatgacagctgctactgtgtggagaaggaccggcagacaggcaagatcctgaaggtgaacatgtggaggatgctgctgtgtgaggccgtggccgctgtgatggccaagggctttgacatcctgggcatcaagcctgtgcagaggatgtag

SEQ ID NO: 146547 - DNA, 465 bp, synthetic construct
  misc_feature 1..465: note = Description of Artificial Sequence: Synthetic coding sequence
  source 1..465: mol_type = other DNA
atgtgctggacccgcatccggcccggcacccccagcagccctggggcccagaggcccaccccctatgagtggatgagaagatctgtggccgccggcggcggcggcggcagcggcaagaccaggaccaaggacaagtacagagtggtgtacacagaccaccagaggctggagctggagaaggagttccactacagccgctacatcaccatccggaggaagtctgagctggccgccaacctgggcctgacagagcggcaggtgaagatctggttccagaacagaagagccaaggagaggaaggtgaacaagaagaagcagcagcagcagcagcccccccagccccccatggcccatgacatcacagccaccccagctggccccagcctgggcggcctgtgccccagcaacaccagcctgctggccaccagcagccccatgcctgtgaaggaggagttcctgccctag

SEQ ID NO: 146548 - DNA, 183 bp, synthetic construct
  misc_feature 1..183: note = Description of Artificial Sequence: Synthetic coding sequence
  source 1..183: mol_type = other DNA
atgagaggaggcccccggggccaccacgtgtgtggcctgtgtgccggccagggctttgcccgggtgccccggcccagccaggccagccagcccaggcctggccctgccagcctgtgccccagcaacaccagcctgctggccaccagcagccccatgcctgtgaaggaggagttcctgccctag

SEQ ID NO: 146549 - DNA, 942 bp, synthetic construct
  misc_feature 1..942: note = Description of Artificial Sequence: Synthetic coding sequence
  source 1..942: mol_type = other DNA
atgtatgtgtcctacctgctggacaaggatgtgtccatgtaccccagctctgtgcgccacagcggcggcctgaacctggccccccagaactttgtgagccccccccagtacccagactatggaggctaccacgtggccgctgctgctgctgctgctgccaacctggacagcgcccagagccctggccccagctggccagctgcctatggagcccccctgcgggaggactggaatggctacgcccctgggggcgctgctgctgctgccaatgctgtggcccacggcctgaatggaggcagccctgctgctgccatgggctacagcagccctgctgactaccacccccaccaccacccccaccaccacccccaccaccctgctgctgcccccagctgtgccagcggcctgctgcagaccctgaaccctggccccccaggccctgctgccacagctgctgctgagcagctgagccctgggggccagaggaggaacctgtgtgagtggatgaggaagccagcccagcagagcctgggcagccaggtgaagaccaggaccaaggacaagtacagagtggtgtacacagaccaccagaggctggagctggagaaggagttccactacagccgctacatcaccatccggaggaaggccgagctggccgccaccctgggcctgtctgagcggcaggtgaagatctggttccagaacagaagagccaaggagaggaagatcaacaagaagaagctgcagcagcagcagcagcagcagcccccccagcccccacctcctccaccccagcccccccagccccagcccggccccctgcggtctgtgcctgagcccctgagccctgtgagcagcctgcaggcctctgtgcccggctctgtgcctggggtgctgggccccactggaggagtgctgaaccccaccgtgacccagtag

SEQ ID NO: 146550 - DNA, 855 bp, synthetic construct
  misc_feature 1..855: note = Description of Artificial Sequence: Synthetic coding sequence
  source 1..855: mol_type = other DNA
atgtatggcagctgcctgctggagaaggaggccggcatgtacccaggcaccctgatgagccctggaggagatggaacagctggcactggaggcaccggcggcggcggcagccccatgcctgccagcaactttgctgctgccccagccttcagccactacatgggctacccccacatgcccagcatggacccccactggcccagcctgggcgtgtggggcagcccctacagccccccccgggaggactggagcgtgtacccaggccccagcagcaccatgggcaccgtgcctgtgaatgatgtgaccagcagccctgctgccttctgcagcacagactacagcaacctgggccctgtgggcggcggcaccagcggcagcagcctgcccggccaggccggcggcagcctggtgcccacagatgctggagctgccaaggccagcagccccagccgcagccgccacagcccctatgcctggatgaggaagacagtgcaggtgacaggcaagaccaggaccaaggagaagtacagagtggtgtacacagaccaccagaggctggagctggagaaggagttccactgcaaccgctacatcaccatccagaggaagtctgagctggccgtgaacctgggcctgtctgagcggcaggtgaagatctggttccagaacagaagagccaaggagaggaagatgatcaagaagaagatcagccagtttgagaacagcggcggctctgtgcagagcgacagcgacagcatcagccctggagagctgcccaacaccttcttcaccaccccatctgctgtgcggggcttccagcccatcgagatccagcaggtgattgtgtctgagtag

SEQ ID NO: 146551 - DNA, 456 bp, synthetic construct
  misc_feature 1..456: note = Description of Artificial Sequence: Synthetic coding sequence
  source 1..456: mol_type = other DNA
atgatggccgaggagcacacagacctggaggcccagatcgtgaaggacatccactgcaaggagattgacctggtgaacagagaccccaagaacatcaatgaagacatcgtgaaggtggactttgaagatgtgattgctgagcctgtgggcacctacagctttgatggagtgtggaaggtgtcctacaccaccttcaccgtgtccaagtactggtgctaccgcctgctgagcaccctgctgggcgtgcccctggccctgctgtggggcttcctgtttgcctgcatctccttctgccacatctgggccgtggtgccctgcatcaagagctacctgattgagatccagtgcatcagccacatctacagcctgtgcatccgcaccttctgcaaccccctgtttgctgccctgggccaggtgtgcagcagcatcaaggtggtgctgaggaaggaggtgtag

SEQ ID NO: 146552 - DNA, 456 bp, synthetic construct; identical to SEQ ID NO: 146551
  misc_feature 1..456: note = Description of Artificial Sequence: Synthetic coding sequence
  source 1..456: mol_type = other DNA

SEQ ID NO: 146553 - DNA, 813 bp, synthetic construct
  misc_feature 1..813: note = Description of Artificial Sequence: Synthetic coding sequence
  source 1..813: mol_type = other DNA
atggctgaccacatgatggccatgaaccacggccgcttcccagatggcaccaacggcctgcaccaccacccagcccacaggatgggcatgggccagttccccagcccccaccaccaccagcagcagcagccccagcacgccttcaatgccctgatgggagagcacatccactacggggccggcaacatgaatgccaccagcggcatcagacatgccatgggccctggcaccgtgaatggaggccaccccccatctgccctggccccagctgcccgcttcaacaacagccagttcatgggcccccctgtggccagccagggcggcagcctgcctgcctccatgcagctgcagaagctgaacaaccagtacttcaaccaccacccctacccccacaaccactacatgccagacctgcaccctgctgctggccaccagatgaatggcaccaaccagcacttccgggactgcaaccccaagcacagcggcggcagcagcaccccaggcggcagcggcggcagcagcacccctgggggcagcggcagcagcagcggcggcggggccggcagcagcaacagcggcggcggcagcggcagcggcaacatgcctgcctctgtggcccacgtgcctgctgccatgctgccccccaacgtcatcgacacagacttcattgatgaggaggtgctgatgagcctggtgattgagatgggcctggaccgcatcaaggagctgcctgagctgtggctgggccagaatgaatttgacttcatgacagactttgtgtgcaagcagcagcccagccgggtgtcctgctag

SEQ ID NO: 146554 - DNA, 645 bp, synthetic construct
  misc_feature 1..645: note = Description of Artificial Sequence: Synthetic coding sequence
  source 1..645: mol_type = other DNA
atggctgaccacatgatggccatgaaccacggccgcttcccagatggcaccaacggcctgcaccaccacccagcccacaggatgggcatgggccagttccccagcccccaccaccaccagcagcagcagccccagcacgccttcaatgccctgatgggagagcacatccactacggggccggcaacatgaatgccaccagcggcatcagacatgccatgggccctggcaccgtgaatggaggccaccccccatctgccctggccccagctgcccgcttcaacaacagccagttcatgggcccccctgtggccagccagggcggcagcctgcctgcctccatgcagctgcagaagctgaacaaccagtacttcaaccaccacccctacccccacaaccactacatgccagacctgcaccctgctgctggccaccagatgaatggcaccaaccagcacttccgggactgcaacccccccaacgtcatcgacacagacttcattgatgaggaggtgctgatgagcctggtgattgagatgggcctggaccgcatcaaggagctgcctgagctgtggctgggccagaatgaatttgacttcatgacagactttgtgtgcaagcagcagcccagccgggtgtcctgctag

SEQ ID NO: 146555 - DNA, 813 bp, synthetic construct; identical to SEQ ID NO: 146553
  misc_feature 1..813: note = Description of Artificial Sequence: Synthetic coding sequence
  source 1..813: mol_type = other DNA

SEQ ID NO: 146556 - DNA, 813 bp, synthetic construct; identical to SEQ ID NO: 146553
  misc_feature 1..813: note = Description of Artificial Sequence: Synthetic coding sequence
  source 1..813: mol_type = other DNA

SEQ ID NO: 146557 - DNA, 1797 bp, synthetic construct
  misc_feature 1..1797: note = Description of Artificial Sequence: Synthetic coding sequence
  source 1..1797: mol_type = other DNA
atggagaacagcagcgctgccagcgccagcagcgaggccggcagcagccgcagccaggagattgaggagctggagcgcttcatcgacagctatgtgctggagtaccaggtgcagggcctgctggccgacaagacagaaggagatggagagagcgagaggacccagagccacatcagccagtggacagctgactgcagcgagcccctggacagcagctgcagcttcagccggggccgggccccaccccagcagaatggcagcaaggacaacagcctggacatgctgggcacagacatctgggccgccaacacctttgacagcttcagcggggccacctgggacctgcagcctgagaagctggacttcacccagttccacaggaaggtgcgccacacccccaagcagcccctgccccacatcgaccgggagggctgtgggaagggcaagctggaggatggagatggcatcaacctgaatgacatcgagaaggtgctgcctgcctggcagggctaccaccccatgcctcatgaggtggagatcgcccacaccaagaagctgttcagaagaagaagaaatgacagaagacggcagcagaggcctcctgggggcaacaagccccagcagcacggggaccaccagcccggcagcgccaagcacaacagagaccaccagaagagctaccagggcggcagcgccccccaccccagcggccggcccacccaccacggctacagccagaacagacgctggcaccacggcaacatgaagcaccccccaggggacaagggggaggccggggcccacagaaatgccaaggagaccatgaccatcgagaaccccaagctggaggacacagctggggacaccggccacagcagcctggaggcccccaggagcccagacaccctggcccctgtggccagcgagcggctgcccccccagcagagcggcggccctgaggtggagaccaagaggaaggacagcatcctgcctgagcgcatcggggagcggcccaagatcaccctgctgcagagcagcaaggaccggctgcggcggcggctgaaggagaaggatgaggtggccgtggagaccaccaccccccagcagaacaagatggacaagctgattgagatcctgaacagcatgaggaacaacagcagtgatgtggacaccaagctgaccaccttcatggaggaggcccagaacagcaccaacagcgaggagatgctgggggagatcgtgaggaccatctaccagaaggctgtgtctgacaggagctttgccttcaccgctgccaagctgtgtgacaagatggccctcttcatggtggagggcaccaagttccgcagcctgctgctgaacatgctgcagaaggacttcaccgtgcgggaggagctgcagcagcaggatgtggagcgctggctgggcttcatcaccttcctgtgtgaggtgtttggcaccatgaggagcagcactggagagcccttccgggtgctggtgtgccccatctacacctgcctgcgggagctgctgcagagccaggatgtgaaggaggatgctgtgctgtgctgcagcatggagctgcagagcacaggccgcctgctggaggagcagctgcctgagatgatgacagagctgctggccagcgcccgggacaagatgctgtgccccagcgagagcatgctgaccaggagcctgctgctggaggtgattgagctgcacgccaacagctggaaccccctgaccccacccatcacccagtactacaacagaaccatccagaagctgacagcctag

SEQ ID NO: 146558 - DNA, 1803 bp, synthetic construct
  misc_feature 1..1803: note = Description of Artificial Sequence: Synthetic coding sequence
  source 1..1803: mol_type = other DNA
atggagaacagcagcgctgccagcgccagcagcgaggccggcagcagccgcagccaggagattgaggagctggagcgcttcatcgacagctatgtgctggagtaccaggtgcagggcctgctggccgacaagacagaaggagatggagagagcgagaggacccagagccacatcagccagtggacagctgactgcagcgagcccctggacagcagctgcagcttcagccggggccgggccccaccccagcagaatggcagcaaggacaacagcctggacatgctgggcacagacatctgggccgccaacacctttgacagcttcagcggggccacctgggacctgcagcctgagaagctggacttcacccagttccacaggaaggtgcgccacacccccaagcagcccctgccccacatcgaccgggagggctgtgggaagggcaagctggaggatggagatggcatcaacctgaatgacatcgagaaggtgctgcctgcctggcagggctaccaccccatgcctcatgaggtggagatcgcccacaccaagaagctgttcagaagaagaagaaatgacagaagacggcagcagaggcctcctgggggcaacaagccccagcagcacggggaccaccagcccggcagcgccaagcacaacagagaccaccagaagagctaccagggcggcagcgccccccaccccagcggccggcccacccaccacggctacagccagaacagacgctggcaccacggcaacatgaagcaccccccaggggacaagggggaggccggggcccacagaaatgccaaggagaccatgaccatcgagaaccccaagctggaggacacagctggggacaccggccacagcagcctggaggcccccaggagcccagacaccctggcccctgtggccagcgagcggctgcccccccagcagagcggcggccctgaggtggagaccaagaggaaggacagcatcctgcctgagcgcatcggggagcggcccaagatcaccctgctgcagagcagcaaggaccggctgcggcggcggctgaaggagaaggtgcctgatgaggtggccgtggagaccaccaccccccagcagaacaagatggacaagctgattgagatcctgaacagcatgaggaacaacagcagtgatgtggacaccaagctgaccaccttcatggaggaggcccagaacagcaccaacagcgaggagatgctgggggagatcgtgaggaccatctaccagaaggctgtgtctgacaggagctttgccttcaccgctgccaagctgtgtgacaagatggccctcttcatggtggagggcaccaagttccgcagcctgctgctgaacatgctgcagaaggacttcaccgtgcgggaggagctgcagcagcaggatgtggagcgctggctgggcttcatcaccttcctgtgtgaggtgtttggcaccatgaggagcagcactggagagcccttccgggtgctggtgtgccccatctacacctgcctgcgggagctgctgcagagccaggatgtgaaggaggatgctgtgctgtgctgcagcatggagctgcagagcacaggccgcctgctggaggagcagctgcctgagatgatgacagagctgctggccagcgcccgggacaagatgctgtgccccagcgagagcatgctgaccaggagcctgctgctggaggtgattgagctgcacgccaacagctggaaccccctgaccccacccatcacccagtactacaacagaaccatccagaagctgacagcctag

SEQ ID NO: 146559 - DNA, 1947 bp, synthetic construct
  misc_feature 1..1947: note = Description of Artificial Sequence: Synthetic coding sequence
  source 1..1947: mol_type = other DNA
atgggccgcctgccctgtggccccctgcccggccagtggacagctgactgcagcgagcccctggacagcagctgcagcttcagccggggccgggccccaccccagcagaatggcagcaaggacaacagcctggacatgctgggcacagacatctgggccgccaacacctttgacagcttcagcggggccacctgggacctgcagcctgagaagctggacttcacccagttccacaggaaggtgcgccacacccccaagcagcccctgccccacatcgaccgggagggctgtgggaagggcaagctggaggatggagatggcatcaacctgaatgacatcgagaaggtgctgcctgcctggcagggctaccaccccatgcctcatgaggtggagatcgcccacaccaagaagctgttcagaagaagaagaaatgacagaagacggcagcagaggcctcctgggggcaacaagccccagcagcacggggaccaccagcccggcagcgccaagcacaacagagaccaccagaagagctaccagggcggcagcgccccccaccccagcggccggcccacccaccacggctacagccagaacagacgctggcaccacggcaacatgaagcaccccccaggggacaagggggaggccggggcccacagaaatgccaaggagaccatgaccatcgagaaccccaagctggaggacacagctggggacaccggccacagcagcctggaggcccccaggagcccagacaccctggcccctgtggccagcgagcggctgcccccccagcagagcggcggccctgaggtggagaccaagaggaaggacagcatcctgcctgagcgcatcggggagcggcccaagatcaccctgctgcagagcagcaaggaccggctgcggcggcggctgaaggagaaggatgaggtggccgtggagaccaccaccccccagcagaacaagatggacaagctgattgagatcctgaacagcatgaggaacaacagcagtgatgtggacaccaagctgaccaccttcatggaggaggcccagaacagcaccaacagcgaggagatgctgggggagatcgtgaggaccatctaccagaaggctgtgtctgacaggagctttgccttcaccgctgccaagctgtgtgacaagatggccctcttcatggtggagggcaccaagttccgcagcctgctgctgaacatgctgcagaaggacttcaccgtgcgggaggagctgcagcagcaggatgtggagcgctggctgggcttcatcaccttcctgtgtgaggtgtttggcaccatgaggagcagcactggagagcccttccgggtgctggtgtgccccatctacacctgcctgcgggagctgctgcagagccaggatgtgaaggaggatgctgtgctgtgctgcagcatggagctgcagagcacaggccgcctgctggaggagcagctgcctgagatgatgacagagctgctggccagcgcccgggacaagatgctgtgccccagcgagagcatgctgaccaggagcctgctgctggaggtgattgagctgcacgccaacagctggaaccagggcgcctggcaggccgcccacggccagctgggcccctggtgcaccggcccagatggccaggccggcggccagggctggccctggagggagaaggagatgggcagaagagctggccgggtgggcggccagagcggggcccgggcctgcaagctgacccccatccgggaggcctgcttcttcttcctggtggccctggccctgcccttcctgaccccagccagccccctgcccatccggcccatcccccatggagccctgtgtgagggcagccaccgctgtgacagcagcgagaccctggccgccagccacgccggggcccccctgggcagcgagaggaccagcgagggctag

SEQ ID NO: 146560 - DNA, 1077 bp, synthetic construct
  misc_feature 1..1077: note = Description of Artificial Sequence: Synthetic coding sequence
  source 1..1077: mol_type = other DNA
atggagagcgctgacttctatgaagctgagcccaggcctcccatgagcagccacctgcagagccccccccacgcccccagcagcgctgccttcggcttccccagaggagctggccctgcccagcccccagcccctcctgctgcccctgagcccctgggcggcatctgtgagcacgagaccagcattgacatcagcgcctacatcgaccctgctgccttcaatgatgagttcctggccgacctcttccagcacagccggcagcaggagaaggccaaggctgctgtgggccccaccggcggcggcggcggcggggactttgactacccaggggccccagctggccctggaggagctgtgatgcctggaggagcccacggccccccacctggctacggctgtgccgccgccggctacctggatggccgcctggagcccctgtatgagcgggtgggcgccccagccctgcggcccctggtgatcaagcaggagccccgggaggaggatgaggccaagcagctggccctggccggcctcttcccctaccagcccccacctcctcctccacccagccacccccacccccaccccccaccagcccacctggccgccccccacctgcagttccagatcgcccactgcggccagaccaccatgcacctgcagcccggccaccccaccccaccacccacccctgtgcccagcccccacccagccccagccctgggcgccgccggcctgcccggccctggcagcgccctgaagggcctgggcgccgcccacccagacctgcgggccagcggcggcagcggggccggcaaggccaagaagtctgtggacaagaacagcaatgagtacagagtgcggcgggagaggaacaacattgctgtgaggaagagccgggacaaggccaagcagagaaatgtggagacccagcagaaggtgctggagctgaccagtgacaatgaccggctgaggaagagggtggagcagctgagccgggagctggacaccctgcggggcatcttccggcagctgcctgagagcagcctggtgaaggccatgggcaactgtgcctag

SEQ ID NO: 146561 - DNA, 810 bp, synthetic construct
  misc_feature 1..810: note = Description of Artificial Sequence: Synthetic coding sequence
  source 1..810: mol_type = other DNA
atgtctgctgccctcttcagcctggatggccctgcccggggggccccctggccagctgagcccgcccccttctatgagcccggccgggccggcaagccaggaagaggagctgagcccggggccctgggggagcctggagctgctgccccagccatgtatgatgatgaaagtgccatcgacttcagcgcctacatcgacagcatggctgctgtgcccaccctggagctgtgccatgatgagctgtttgctgacctcttcaacagcaaccacaaggccggcggggccggccccctggagctgctgcccggcggccctgcccggcccctgggccctggccctgctgccccccggctgctgaagcgggagccagactggggagatggagatgcccctggcagcctgctgcctgcccaggtggccgcctgtgcccagacagtggtgtccctggccgccgccggccagcccaccccacccaccagccctgagcccccaagaagcagcccccggcagaccccagcccctggccctgcccgggagaagtctgctgggaagaggggccctgaccggggcagccctgagtaccggcagaggcgggagaggaacaacattgctgtgaggaagagccgggacaaggccaagagaagaaaccaggagatgcagcagaagctggtggagctgtctgcagaaaatgagaagctgcaccagagggtggagcagctgacccgggacctggccggcctgcggcagttcttcaagcagctgcccagcccccccttcctgcctgctgctggaacagctgactgcaggtag

SEQ ID NO: 146562 - DNA, 402 bp, synthetic construct
  misc_feature 1..402: note = Description of Artificial Sequence: Synthetic coding sequence
  source 1..402: mol_type = other DNA
atgtctgctgccctcttcagcctggatggccctgcccggggggccccctggccagctgagcccgcccccttctatgagcccggccgggccggcaagccaggaagaggagctgagcccggggccctgggggagcctggagctgctgccccagccatgtatgatgatgaaagtgccatcgacttcagcgcctacatcgacagcatggctgctgtgcccaccctggagctgtgccatgatgagctgtttgctgacctcttcaacagcaaccacaaggcccgggccccctgggcccgggccctgcccctgcctgcctgcagcagcgccagccccactggagccacagccaccaggcctgcccgctgctgcccccggcgctggccccgggcccaccggccctggtag

SEQ ID NO: 146563 - DNA, 1092 bp, synthetic construct
  misc_feature 1..1092: note = Description of Artificial Sequence: Synthetic coding sequence
  source 1..1092: mol_type = other DNA
atggccagcggggacttctgcagccctggagagggcatggagatcctgcagcaggtgtgcagcaagcagctgcccccctgcaacctgagcaaggaggacctgctgcagaacccctacttcagcaagctgctgctgaacctgagccagcacgtggatgagagcggcctgagcctgaccctggccaaggagcaggcccaggcctggaaggaggtgcggctgcacaagaccacctggctgcggtctgagatcctgcacagggtcatccaggagctgctggtggactactacgtgaagatccaggacaccaacgtgaccagcgaggacaagaagttccacgagaccctggagcagaggctgctggtgacagagctgatgaggctgctgggccccagccaggagcgggagatcccccccctgctgggcctggagaaggctgacctgctggagctgatgcccctgtctgaagattttgtgtggatgagggcccggctgcagcaggaggtggaggagcagctgaagaagaagtgcttcaccctgctgtgctactatgaccccaacagtgatgctgacagcgagaccgtgaaggccgccaaggtgtggaagctggccgaggtgctggtgggggagcagcagcagtgccaggatgccaagagccagcagaaggagcagatgctgctgctggagaagaagtctgctgcctacagccaggtgctgctgcgctgcctgaccctgctgcagaggctgctgcaggagcaccggctgaagacccagagcgagctggaccgcatcaatgcccagtacctggaggtgaagtgtggggccatgatcctgaagctgaggatggaggagctgaagatcctgagtgacacctacacagtggagaaggtggaggtgcacaggctcatccgggaccggctggagggcgccatccacctgcaggagcaggacatggagaacagccggcaggtgctgaacagctatgaggtgctgggggaggagtttgaccggctggtgaaggagtacacagtgctgaagcaggccacagagaacaagcgctgggccctgcaggagttcagcaaggtgtacagatag

SEQ ID NO: 146564 - DNA, 1359 bp, synthetic construct
  misc_feature 1..1359: note = Description of Artificial Sequence: Synthetic coding sequence
  source 1..1359: mol_type = other DNA
atgggcagcagccagagcgtggagatccctgggggcggcacagagggctaccacgtgctgcgggtgcaggagaacagccctggccacagagctggcctggagcccttctttgacttcatcgtgtccatcaatggcagccggctgaacaaggacaatgacaccctgaaggacctgctgaaggccaacgtggagaagcctgtgaagatgctgatctacagcagcaagaccctggagctgcgggagacctctgtgacccccagcaacctgtggggcggccagggcctgctgggcgtgtccatccgcttctgcagctttgatggagccaatgaaaatgtgtggcacgtgctggaggtggagagcaacagccctgctgccctggccggcctgcggccccacagcgactacatcattggagctgacacagtgatgaatgaaagtgaagatctcttcagcctgattgagacccatgaggccaagcccctgaagctgtatgtgtacaacacagacacagacaactgccgggaggtgatcatcacccccaacagcgcctggggcggggagggcagcctgggctgcggcatcggctacggctacctgcaccgcatccccacccggccctttgaggagggcaagaagatcagcctgcccggccagatggccggcacccccatcacccccctgaaggatggcttcacagaggtgcagctgagctctgtgaacccccccagcctgagccccccaggcaccaccggcatcgagcagagcctgaccggcctgagcatcagcagcaccccacctgctgtgtcctctgtgctgagcactggagtgcccaccgtgcccctgctgcccccccaggtgaaccagagcctgacctctgtgccccccatgaacccagccaccaccctgcccggcctgatgcccctgcctgctggcctgcccaacctgcccaacctgaacctgaacctgcctgccccccacatcatgcctggggtgggcctgcctgagctggtgaaccctggcctgccccccctgcccagcatgccacccaggaacctgcccggcatcgcccccctgcccctgcccagcgagttcctgcccagcttccccctggtgcctgagagcagcagcgctgccagcagcggggagctgctgagcagcctgccccccaccagcaatgcccccagcgaccctgccaccaccacagccaaggcagatgctgccagcagcctgactgtggatgtgaccccacccacagccaaggcccccaccaccgtggaggacagagtgggggacagcacccctgtgtctgagaagcctgtgtctgctgctgtggatgccaatgccagcgagagcccctag

SEQ ID NO: 146565 - DNA, 2997 bp, synthetic construct
  misc_feature 1..2997: note = Description of Artificial Sequence: Synthetic coding sequence
  source 1..2997: mol_type = other DNA
atggctgctgtgaaggagcccctggagttccacgccaagaggccctggaggcctgaggaggccgtggaggaccctgatgaggaggatgaggacaacaccagcgaggctgaaaatggcttcagcctggaggaggtgctgcggctgggcggcaccaagcaggactacctgatgctggccaccctggatgaaaatgaggaggtgattgatggcggcaagaagggggccattgatgacctgcagcagggcgagctggaggccttcatccagaacctgaacctggccaagtacaccaaggccagcctggtggaggaggatgagcctgctgagaaggagaacagcagcaagaaggaggtgaagatccccaagatcaacaacaagaacacagctgagagccagaggacctctgtgaacaaggtgaagaacaagaacagacctgagccccacagtgatgaaaatggcagcaccacccccaaggtgaagaaggacaagcagaacatctttgagttctttgagcggcagaccctgctgctgcggcctgggggcaagtggtatgacctggagtacagcaatgagtacagcctgaagccccagccccaggatgtggtgtccaagtacaagaccctggcccagaagctgtaccagcacgagatcaacctcttcaagagcaagaccaacagccagaagggggccagcagcacctggatgaaggccatcgtgagcagcggcaccctgggggacaggatggccgccatgatcctgctgatccaggatgatgctgtgcacaccctgcagtttgtggagaccctggtgaacctggtgaagaagaagggcagcaagcagcagtgcctgatggccctggacaccttcaaggagctgctgatcacagacctgctgcctgacaacaggaagctgcgcatcttcagccagaggccctttgacaagctggagcagctgagcagcggcaacaaggacagccgggaccggcggctcatcctgtggtactttgagcaccagctgaagcacctggtggccgagtttgtgcaggtgctggagaccctgagccatgacaccctggtgaccaccaagacccgggccctgactgtggcccacgagctgctgtgcaacaagccagaggaggagaaggccctgctggtgcaggtggtgaacaagctgggggacccccagaaccgcatcgccaccaaggccagccacctgctggagaccctgctgtgcaagcaccccaacatgaagggcgtggtgtctggagaggtggagcggctgctcttccgcagcaacatcagcagcaaggcccagtactatgccatctgcttcctgaaccagatggccctgagccatgaggagagcgagctggccaacaagctgatcaccgtgtacttctgcttcttccgcacctgtgtgaagaagaaggatgtggagagcaagatgctgagcgccctgctgactggagtgaacagagcctacccctacagccagacaggagatgacaaggtgcgggagcagattgacaccctcttcaaggtgctgcacatcgtgaacttcaacacctctgtgcaggccctgatgctgctcttccaggtgatgaacagccagcagaccatcagtgaccgctactacacagccctgtacaggaagatgctggaccccggcctgatgacctgcagcaagcaggccatgttcctgaacctggtgtacaagagcctgaaggctgacatcgtgctgcggcgggtgaaggcctttgtgaagaggctgctgcaggtgacctgccagcagatgccacccttcatctgtggggccctgtacctggtgtctgagatcctgaaggccaagccaggcctgcggagccagctggatgaccaccctgagagtgatgatgaggagaacttcattgatgccaatgatgatgaggacatggagaagttcacagatgctgacaaggagacagagatcgtgaagaagctggagacagaggagaccgtgcctgagacagatgtggagaccaagaagccagaggtggcctcctgggtgcactttgacaacctgaagggcggcaagcagctgaacaagtatgaccccttcagcaggaaccccctcttctgtggggctgagaacaccagcctgtgggagctgaagaagctgtctgtgcacttccaccccagcgtggccctgtttgccaagaccatcctgcagggcaactacatccagtacagcggggaccccctgcaggacttcaccctgatgaggttcctggacagatttgtgtacagaaaccccaagccccacaagggcaaggaaaatacagattctgtggtgatgcagcccaagaggaagcacttcatcaaggacatccgccacctgcctgtgaacagcaaggagttcctggccaaggaggagagccagatccctgtggatgaggtgttcttccaccgctactacaagaaggtggccgtgaaggagaagcagaagagagatgctgatgaggagagcattgaagatgtggatgatgaggagtttgaggagctgattgacacctttgaagatgacaactgcttcagcagcggcaaggatgacatggactttgctggaaatgtgaagaagaggaccaagggggccaaggacaacaccctggatgaggacagcgagggcagtgatgatgagctgggcaacctggatgatgatgaggtgtccctgggctccatggatgatgaggagtttgctgaggtggatgaagatggcggcaccttcatggatgtgctggatgatgaaagtgaatctgtgcctgagctggaggtgcacagcaaggtgtccaccaagaagagcaagaggaaaggaacagatgactttgattttgctggcagcttccagggccccaggaagaagaagaggaacctgaatgacagcagcctgtttgtgtctgctgaggagtttggccacctgctggatgagaacatgggcagcaagtttgacaacatcgcctag

SEQ ID NO: 146566 - DNA, 1992 bp, synthetic construct
  misc_feature 1..1992: note = Description of Artificial Sequence: Synthetic coding sequence
  source 1..1992: mol_type = other DNA
atggccgccacagagatctctgtgctgtctgagcagttcaccaagatcaaggagctggagctgatgcctgagaagggcctgaaggaggaggagaaggatggagtgtgccgggagaaggaccacaggagccccagcgagctggaggccgagaggaccagcggggccttccaggacagcgtgctggaggaggaggtggagctggtgctggcccccagcgaggagagcgagaagtacatcctgaccctgcagacagtgcacttcaccagcgaggccgtggagctgcaggacatgagcctgctgagcatccagcagcaggagggcgtgcaggtggtggtgcagcagcccggccctggcctgctgtggctggaggagggcccccggcagagcctgcagcagtgtgtggccatcagcatccagcaggagctgtacagcccccaggagatggaggtgctgcagttccacgccctggaggagaatgtgatggtggccagcgaggacagcaagctggccgtgtccctggccgagaccaccggcctcatcaagctggaggaggagcaggagaagaaccagctgctggccgagaggaccaaggagcagctgttctttgtggagaccatgtctggagatgagaggagtgatgaaattgtgctgactgtgagcaacagcaatgtggaggagcaggaggaccagcccacagctggccaggctgatgctgagaaggccaagagcaccaagaaccagaggaagaccaagggggccaagggcaccttccactgtgatgtgtgcatgttcaccagcagcaggatgagcagcttcaacagacacatgaagacccacaccagcgagaagccccacctgtgccacctgtgcctgaagaccttcagaacagtgaccctgctgagaaatcatgtgaacacccacacaggcacccggccctacaagtgcaatgactgcaacatggcctttgtgaccagcggggagctggtgcgccaccggcgctacaagcacacccatgagaagcccttcaagtgcagcatgtgcaagtatgcctctgtggaggccagcaagctgaagagacatgtgcgcagccacactggagagcggcccttccagtgctgccagtgcagctatgccagccgggacacctacaagctgaagaggcacatgaggacccacagcggggagaagccctatgagtgccacatctgccacacccgcttcacccagagcggcaccatgaagatccacatcctgcagaagcatggagaaaatgtgcccaagtaccagtgcccccactgtgccaccatcatcgccaggaagagtgacctgcgggtgcacatgaggaacctgcacgcctacagcgctgctgagctgaagtgccgctactgcagcgctgtgttccacgagagatatgccctgatccagcaccagaagacccacaagaatgagaagcgcttcaagtgcaagcactgcagctatgcctgcaagcaggagcggcacatgacagcccacatccgcacccacactggagagaagcccttcacctgcctgagctgcaacaagtgcttccggcagaagcagctgctgaatgcccacttcaggaagtaccatgatgccaacttcatccccaccgtgtacaagtgcagcaaatgtgggaagggcttcagccgctggatcaacctgcaccgccacagcgagaagtgtggcagcggggaggccaagtctgctgccagcggcaagggccgccgcaccaggaagaggaagcagaccatcctgaaggaggccaccaagggccagaaggaggccgccaagggctggaaggaggccgccaatggagatgaagctgctgctgaggaggccagcaccaccaagggggagcagtttcctggagagatgtttcctgtggcctgccgggagaccacagcccgggtgaaggaggaggtggatgaaggagtgacctgtgagatgctgctgaacaccatggacaagtag

SEQ ID NO: 146567 - DNA, 1992 bp, synthetic construct; identical to SEQ ID NO: 146566
  misc_feature 1..1992: note = Description of Artificial Sequence: Synthetic coding sequence
  source 1..1992: mol_type = other DNA

SEQ ID NO: 146568 - DNA, 1284 bp, synthetic construct
  misc_feature 1..1284: note = Description of Artificial Sequence: Synthetic coding sequence
  source 1..1284: mol_type = other DNA
atggccgccacagagatctctgtgctgtctgagcagttcaccaagatcaaggagctggagctgatgcctgagaagggcctgaaggaggaggagaaggatggagtgtgccgggagaaggaccacaggagccccagcgagctggaggccgagaggaccagcggggccttccaggacagcgtgctggaggaggaggtggagctggtgctggcccccagcgaggagagcgagaagtacatcctgaccctgcagacagtgcacttcaccagcgaggccgtggagctgcaggacatgagcctgctgagcatccagcagcaggagggcgtgcaggtggtggtgcagcagcccggccctggcctgctgtggctggaggagggcccccggcagagcctgcagcagtgtgtggccatcagcatccagcaggagctgtacagcccccaggagatggaggtgctgcagttccacgccctggaggagaatgtgatggtggccagcgaggacagcaagctggccgtgtccctggccgagaccaccggcctcatcaagctggaggaggagcaggagaagaaccagctgctggccgagaggaccaaggagcagctgttctttgtggagaccatgtctggagatgagaggagtgatgaaattgtgctgactgtgagcaacagcaatgtggaggagcaggaggaccagcccacagctggccaggctgatgctgagaaggccaagagcaccaagaaccagaggaagaccaagggggccaagggcaccttccactgtgatgtgtgcatgttcaccagcagcaggatgagcagcttcaacagacacatgaagacccacaccagcgagaagccccacctgtgccacctgtgcctgaagaccttcagaacagtgaccctgctgagaaatcatgtgaacacccacacaggcacccggccctacaagtgcaatgactgcaacatggcctttgtgaccagcggggagctggtgcgccaccggcgctacaagcacacccatgagaagcccttcaagtgcagcatgtgcaagtatgcctctgtggaggccagcaagctgaagagacatgtgcgcagccacactggagagcggcccttccagtgctgccagtgcagctatgccagccgggacacctacaagctgaagaggcacatgaggacccacagcgaggccaccagcaagaggagcctgcaggagatcccccgctgcaagttccacccagactgcctgcagatgctgcaggtgtggcagaggctcttccccctggactag

SEQ ID NO: 146569 - DNA, 1722 bp, synthetic construct
  misc_feature 1..1722: note = Description of Artificial Sequence: Synthetic coding sequence
  source 1..1722: mol_type = other DNA
atggccgccacagagatctctgtgctgtctgagcagttcaccaagatcaaggagctggagctgatgcctgagaagggcctgaaggaggaggagaaggatggagtgtgccgggagaaggaccacaggagccccagcgagctggaggccgagaggaccagcggggccttccaggacagcgtgctggaggaggaggtggagctggtgctggcccccagcgaggagagcgagaagtacatcctgaccctgcagacagtgcacttcaccagcgaggccgtggagctgcaggacatgagcctgctgagcatccagcagcaggagggcgtgcaggtggtggtgcagcagcccggccctggcctgctgtggctggaggagggcccccggcagagcctgcagcagtgtgtggccatcagcatccagcaggagctgtacagcccccaggagatggaggtgctgcagttccacgccctggaggagaatgtgatggtggccagcgaggacagcaagctggccgtgtccctggccgagaccaccggcctcatcaagctggaggaggagcaggagaagaaccagctgctggccgagaggaccaaggagcagctgttctttgtggagaccatgtctggagatgagaggagtgatgaaattgtgctgactgtgagcaacagcaatgtggaggagcaggaggaccagcccacagctggccaggctgatgctgagaaggccaagagcaccaagaaccagaggaagaccaagggggccaagggcaccttccactgtgatgtgtgcatgttcaccagcagcaggatgagcagcttcaacagacacatgaagacccacaccagcgagaagccccacctgtgccacctgtgcctgaagaccttcagaacagtgaccctgctgagaaatcatgtgaacacccacacaggcacccggccctacaagtgcaatgactgcaacatggcctttgtgaccagcggggagctggtgcgccaccggcgctacaagcacacccatgagaagcccttcaagtgcagcatgtgcaagtatgcctctgtggaggccagcaagctgaagagacatgtgcgcagccacactggagagcggcccttccagtgctgccagtgcagctatgccagccgggacacctacaagctgaagaggcacatgaggacccacagcggggagaagccctatgagtgccacatctgccacacccgcttcacccagagcggcaccatgaagatccacatcctgcagaagcatggagaaaatgtgcccaagtaccagtgcccccactgtgccaccatcatcgccaggaagagtgacctgcgggtgcacatgaggaacctgcacgcctacagcgctgctgagctgaagtgccgctactgcagcgctgtgttccacgagagatatgccctgatccagcaccagaagacccacaagaatgagaagcgcttcaagtgcaagcactgcagctatgcctgcaagcaggagcggcacatgacagcccacatccgcacccacactggagagaagcccttcacctgcctgagctgcaacaagtgcttccggcagaagcagctgctgaatgcccacttcaggaagtaccatgatgccaacttcatccccaccgtgtacaagtgcagcaaatgtgggaagggcttcagccgctggatcaccagcaagtggagcggcctgaagccccagaccttcatcacctag

SEQ ID NO: 146570 - DNA, 2103 bp, synthetic construct
  misc_feature 1..2103: note = Description of Artificial Sequence: Synthetic coding sequence
  source 1..2103: mol_type = other DNA
atggccgccacagagatctctgtgctgtctgagcagttcaccaagatcaaggagctggagctgatgcctgagaagggcctgaaggaggaggagaaggatggagtgtgccgggagaaggaccacaggagccccagcgagctggaggccgagaggaccagcggggccttccaggacagcgtgctggaggaggaggtggagctggtgctggcccccagcgaggagagcgagaagtacatcctgaccctgcagacagtgcacttcaccagcgaggccgtggagctgcaggacatgagcctgctgagcatccagcagcaggagggcgtgcaggtggtggtgcagcagcccggccctggcctgctgtggctggaggagggcccccggcagagcctgcagcagtgtgtggccatcagcatccagcaggagctgtacagcccccaggagatggaggtgctgcagttccacgccctggaggagaatgtgatggtggccagcgaggacagcaagctggccgtgtccctggccgagaccaccggcctcatcaagctggaggaggagcaggagaagaaccagctgctggccgagaggaccaaggagcagctgttctttgtggagaccatgtctggagatgagaggagtgatgaaattgtgctgactgtgagcaacagcaatgtggaggagcaggaggaccagcccacagctggccaggctgatgctgagaaggccaagagcaccaagaaccagaggaagaccaagggggccaagggcaccttccactgtgatgtgtgcatgttcaccagcagcaggatgagcagcttcaacagacacatgaagacccacaccagcgagaagccccacctgtgccacctgtgcctgaagaccttcagaacagtgaccctgctgagaaatcatgtgaacacccacacaggcacccggccctacaagtgcaatgactgcaacatggcctttgtgaccagcggggagctggtgcgccaccggcgctacaagcacacccatgagaagcccttcaagtgcagcatgtgcaagtatgcctctgtggaggccagcaagctgaagagacatgtgcgcagccacactggagagcggcccttccagtgctgccagtgcagctatgccagccgggacacctacaagctgaagaggcacatgaggacccacagcggggagaagccctatgagtgccacatctgccacacccgcttcacccagagcggcaccatgaagatccacatcctgcagaagcatggagaaaatgtgcccaagtaccagtgcccccactgtgccaccatcatcgccaggaagagtgacctgcgggtgcacatgaggaacctgcacgcctacagcgctgctgagctgaagtgccgctactgcagcgctgtgttccacgagagatatgccctgatccagcaccagaagacccacaagaatgagaagcgcttcaagtgcaagcactgcagctatgcctgcaagcaggagcggcacatgacagcccacatccgcacccacactggagagaagcccttcacctgcctgagctgcaacaagtgcttccggcagaagcagctgctgaatgcccacttcaggaagtaccatgatgccaacttcatccccaccgtgtacaagtgcagcaaatgtgggaagggcttcagccgctggatcaacctgcaccgccacagcgagaagtgtggcagcggggaggccaagtctgctgccagcggcaagggccgccgcaccaggaagaggaagcagaccatcctgaaggaggccaccaagggccagaaggaggccgccaagggctggaaggaggccgccaatggagatgaagctgctgctgaggaggccagcaccaccaagggggagcagtttcctggagagatgtttcctgtggcctgccgggagaccacagcccgggtgaaggaggaggtggatgaaggagtgacctgtgagatgctgctgaacaccatggacaacagcgctggctgcaccggccgcatgatgctggtgtctgcctggctgctgggccggccccaggagacctacaaccagggcagaagaagaagaggcagccggcgggtgacctggtag

SEQ ID NO: 146571 - DNA, 1356 bp, synthetic construct
  misc_feature 1..1356: note = Description of Artificial Sequence: Synthetic coding sequence
  source 1..1356: mol_type = other DNA
atggccgccacagagatctctgtgctgtctgagcagttcaccaagatcaaggagctggagctgatgcctgagaagggcctgaaggaggaggagaaggatggagtgtgccgggagaaggaccacaggagccccagcgagctggaggccgagaggaccagcggggccttccaggacagcgtgctggaggaggaggtggagctggtgctggcccccagcgaggagagcgagaagtacatcctgaccctgcagacagtgcacttcaccagcgaggccgtggagctgcaggacatgagcctgctgagcatccagcagcaggagggcgtgcaggtggtggtgcagcagcccggccctggcctgctgtggctggaggagggcccccggcagagcctgcagcagtgtgtggccatcagcatccagcaggagctgtacagcccccaggagatggaggtgctgcagttccacgccctggaggagaatgtgatggtggccagcgaggacagcaagctggccgtgtccctggccgagaccaccggcctcatcaagctggaggaggagcaggagaagaaccagctgctggccgagaggaccaaggagcagctgttctttgtggagaccatgtctggagatgagaggagtgatgaaattgtgctgactgtgagcaacagcaatgtggaggagcaggaggaccagcccacagctggccaggctgatgctgagaaggccaagagcaccaagaaccagaggaagaccaagggggccaagggcaccttccactgtgatgtgtgcatgttcaccagcagcaggatgagcagcttcaacagacacatgaagacccacaccagcgagaagccccacctgtgccacctgtgcctgaagaccttcagaacagtgaccctgctgagaaatcatgtgaacacccacacaggcacccggccctacaagtgcaatgactgcaacatggcctttgtgaccagcggggagctggtgcgccaccggcgctacaagcacacccatgagaagcccttcaagtgcagcatgtgcaagtatgcctctgtggaggccagcaagctgaagagacatgtgcgcagccacactggagagcggcccttccagtgctgccagtgcagctatgccagccgggacacctacaagctgaagaggcacatgaggacccacagcggggagaagccctatgagtgccacatctgccacacccgcttcacccagagcggcaccatgaagatccacatcctgcagaagcatggagaaaatgtgcccaagtaccagtgcccccactgtgccaccatcatcgccaggaagagtgacctgcgcttcctgggcctgcccttcccctag

SEQ ID NO: 146572 - DNA, 1842 bp, synthetic construct
  misc_feature 1..1842: note = Description of Artificial Sequence: Synthetic coding sequence
  source 1..1842: mol_type = other DNA
atggccgccacagagatctctgtgctgtctgagcagttcaccaagatcaaggagctggagctgatgcctgagaagggcctgaaggaggaggagaaggatggagtgtgccgggagaaggaccacaggagccccagcgagctggaggccgagaggaccagcggggccttccaggacagcgtgctggaggaggaggtggagctggtgctggcccccagcgaggagagcgagaagtacatcctgaccctgcagacagtgcacttcaccagcgaggccgtggagctgcaggacatgagcctgctgagcatccagcagcaggagggcgtgcaggtggtggtgcagcagcccggccctggcctgctgtggctggaggagggcccccggcagagcctgcagcagtgtgtggccatcagcatccagcaggagctgtacagcccccaggagatggaggtgctgcagttccacgccctggaggagaatgtgatggtggccagcgaggacagcaagctggccgtgtccctggccgagaccaccggcctcatcaagctggaggaggagcaggagaagaaccagctgctggccgagaggaccaaggagcagctgttctttgtggagaccatgtctggagatgagaggagtgatgaaattgtgctgactgtgagcaacagcaatgtggaggagcaggaggaccagcccacagctggccaggctgatgctgagaaggccaagagcaccaagaaccagaggaagaccaagggggccaagggcaccttccactgtgatgtgtgcatgttcaccagcagcaggatgagcagcttcaacagacacatgaagacccacaccagcgagaagccccacctgtgccacctgtgcctgaagaccttcagaacagtgaccctgctgagaaatcatgtgaacacccacacaggcacccggccctacaagtgcaatgactgcaacatggcctttgtgaccagcggggagctggtgcgccaccggcgctacaagcacacccatgagaagcccttcaagtgcagcatgtgcaagtatgcctctgtggaggccagcaagctgaagagacatgtgcgcagccacactggagagcggcccttccagtgctgccagtgcagctatgccagccgggacacctacaagctgaagaggcacatgaggacccacagcggcgtgcacatgaggaacctgcacgcctacagcgctgctgagctgaagtgccgctactgcagcgctgtgttccacgagagatatgccctgatccagcaccagaagacccacaagaatgagaagcgcttcaagtgcaagcactgcagctatgcctgcaagcaggagcggcacatgacagcccacatccgcacccacactggagagaagcccttcacctgcctgagctgcaacaagtgcttccggcagaagcagctgctgaatgcccacttcaggaagtaccatgatgccaacttcatccccaccgtgtacaagtgcagcaaatgtgggaagggcttcagccgctggatcaacctgcaccgccacagcgagaagtgtggcagcggggaggccaagtctgctgccagcggcaagggccgccgcaccaggaagaggaagcagaccatcctgaaggaggccaccaagggccagaaggaggccgccaagggctggaaggaggccgccaatggagatgaagctgctgctgaggaggccagcaccaccaagggggagcagtttcctggagagatgtttcctgtggcctgccgggagaccacagcccgggtgaaggaggaggtggatgaaggagtgacctgtgagatgctgctgaacaccatggacaagtag

SEQ ID NO: 146573 - DNA, 1452 bp, synthetic construct
  misc_feature 1..1452: note = Description of Artificial Sequence: Synthetic coding sequence
  source 1..1452: mol_type = other DNA
atggccgccacagagatctctgtgctgtctgagcagttcaccaagatcaaggagctggagctgatgcctgagaagggcctgaaggaggaggagaaggatggagtgtgccgggagaaggaccacaggagccccagcgagctggaggccgagaggaccagcggggccttccaggacagcgtgctggaggaggaggtggagctggtgctggcccccagcgaggagagcgagaagtacatcctgaccctgcagacagtgcacttcaccagcgaggccgtggagctgcaggacatgagcctgctgagcatccagcagcaggagggcgtgcaggtggtggtgcagcagcccggccctggcctgctgtggctggaggagggcccccggcagagcctgcagcagtgtgtggccatcagcatccagcaggagctgtacagcccccaggagatggaggtgctgcagttccacgccctggaggagaatgtgatggtggccagcgaggacagcaagctggccgtgtccctggccgagaccaccggcctcatcaagctggaggaggagcaggagaagaaccagctgctggccgagaggaccaaggagcagctgttctttgtggagaccatgtctggagatgagaggagtgatgaaattgtgctgactgtgagcaacagcaatgtggaggagcaggaggaccagcccacagctggccaggctgatgctgagaaggccaagagcaccaagaaccagaggaagaccaagggggccaagggcaccttccactgtgatgtgtgcatgttcaccagcagcaggatgagcagcttcaacagacacatgaagacccacaccagcgagaagccccacctgtgccacctgtgcctgaagaccttcagaacagtgaccctgctgagaaatcatgtgaacacccacacaggcacccggccctacaagtgcaatgactgcaacatggcctttgtgaccagcggggagctggtgcgccaccggcgctacaagcacacccatgagaagcccttcaagtgcagcatgtgcaagtatgcctctgtggaggagcggcacatgacagcccacatccgcacccacactggagagaagcccttcacctgcctgagctgcaacaagtgcttccggcagaagcagctgctgaatgcccacttcaggaagtaccatgatgccaacttcatccccaccgtgtacaagtgcagcaaatgtgggaagggcttcagccgctggatcctgtgggtgggcaacagcgaggtggccgagctgggcggccctggcagcggccccctgctgcggctgcagagcggctgccccccaggcctgcaccaccccaaggccggcctgggccctgaggaccccctgcccggccagctgcggcacaccacagctggcaccggcctgagcagcctgctgcagggccccctgtgccgggccgcctag

SEQ ID NO: 146574 - DNA, 1998 bp, synthetic construct
  misc_feature 1..1998: note = Description of Artificial Sequence: Synthetic coding sequence
  source 1..1998: mol_type = other DNA
atggccgccacagagatctctgtgctgtctgagcagttcaccaagatcaaggagctggagctgatgcctgagaagggcctgaaggaggaggagaaggatggagtgtgccgggagaaggaccacaggagccccagcgagctggaggccgagaggaccagcggggccttccaggacagcgtgctggaggaggaggtggagctggtgctggcccccagcgaggagagcgagaagtacatcctgaccctgcagacagtgcacttcaccagcgaggccgtggagctgcaggacatgagcctgctgagcatccagcagcaggagggcgtgcaggtggtggtgcagcagcccggccctggcctgctgtggctggaggagggcccccggcagagcctgcagcagtgtgtggccatcagcatccagcaggagctgtacagcccccaggagatggaggtgctgcagttccacgccctggaggagaatgtgatggtggccagcgaggacagcaagctggccgtgtccctggccgagaccaccggcctcatcaagctggaggaggagcaggagaagaaccagctgctggccgagaggaccaaggagcagctgttctttgtggagaccatgtctggagatgagaggagtgatgaaattgtgctgactgtgagcaacagcaatgtggaggagcaggaggaccagcccacagctggccaggctgatgctgagaaggccaagagcaccaagaaccagaggaagaccaagggggccaagggcaccttccactgtgatgtgtgcatgttcaccagcagcaggatgagcagcttcaacagacacatgaagacccacaccagcgagaagccccacctgtgccacctgtgcctgaagaccttcagaacagtgaccctgctgagaaatcatgtgaacacccacacaggcacccggccctacaagtgcaatgactgcaacatggcctttgtgaccagcggggagctggtgcgccaccggcgctacaagcacacccatgagaagcccttcaagtgcagcatgtgcaagtatgcctctgtggaggccagcaagctgaagagacatgtgcgcagccacactggagagcggcccttccagtgctgccagtgcagctatgccagccgggacacctacaagctgaagaggcacatgaggacccacagcggggagaagccctatgagtgccacatctgccacacccgcttcacccagagcggcaccatgaagatccacatcctgcagaagcatggagaaaatgtgcccaagtaccagtgcccccactgtgccaccatcatcgccaggaagagtgacctgcgggtgcacatgaggaacctgcacgcctacagcgctgctgagctgaagtgccgctactgcagcgctgtgttccacgagagatatgccctgatccagcaccagaagacccacaagaatgagaagcgcttcaagtgcaagcactgcagctatgcctgcaagcaggagcggcacatgacagcccacatccgcacccacactggagagaagcccttcacctgcctgagctgcaacaagtgcttccggcagaagcagctgctgaatgcccacttcaggaagtaccatgatgccaacttcatccccaccgtgtacaagtgcagcaaatgtgggaagggcttcagccgctggatcaacctgcaccgccacagcgagaagtgtggcagcggggaggccaagtctgctgccagcggcaagggccgccgcaccaggaagaggaagcagaccatcctgaaggaggccaccaagggccagaaggaggccgccaagggctggaaggaggccgccaatggagatggagtcatcagcgcccacaggaacctgtgcctgctgggcagcagtgacagccacgcctctgtgtctggagctggcatcacagatgcccggcaccacgcctggctgattgtgctgctcttcctggtggagatgggcttctaccacgtgagccacagctag

SEQ ID NO: 146575 - DNA, 1212 bp, synthetic construct
  misc_feature 1..1212: note = Description of Artificial Sequence: Synthetic coding sequence
  source 1..1212: mol_type = other DNA
atgttcaccagcagcaggatgagcagcttcaacagacacatgaagacccacaccagcgagaagccccacctgtgccacctgtgcctgaagaccttcagaacagtgaccctgctgagaaatcatgtgaacacccacacaggcacccggccctacaagtgcaatgactgcaacatggcctttgtgaccagcggggagctggtgcgccaccggcgctacaagcacacccatgagaagcccttcaagtgcagcatgtgcaagtatgcctctgtggaggccagcaagctgaagagacatgtgcgcagccacactggagagcggcccttccagtgctgccagtgcagctatgccagccgggacacctacaagctgaagaggcacatgaggacccacagcggggagaagccctatgagtgccacatctgccacacccgcttcacccagagcggcaccatgaagatccacatcctgcagaagcatggagaaaatgtgcccaagtaccagtgcccccactgtgccaccatcatcgccaggaagagtgacctgcgggtgcacatgaggaacctgcacgcctacagcgctgctgagctgaagtgccgctactgcagcgctgtgttccacgagagatatgccctgatccagcaccagaagacccacaagaatgagaagcgcttcaagtgcaagcactgcagctatgcctgcaagcaggagcggcacatgacagcccacatccgcacccacactggagagaagcccttcacctgcctgagctgcaacaagtgcttccggcagaagcagctgctgaatgcccacttcaggaagtaccatgatgccaacttcatccccaccgtgtacaagtgcagcaaatgtgggaagggcttcagccgctggatcaacctgcaccgccacagcgagaagtgtggcagcggggaggccaagtctgctgccagcggcaagggccgccgcaccaggaagaggaagcagaccatcctgaaggaggccaccaagggccagaaggaggccgccaagggctggaaggaggccgccaatggagatggagtcatcagcgcccacaggaacctgtgcctgctgggcagcagtgacagccacgcctctgtgtctggagctggcatcacagatgcccggcaccacgcctggctgattgtgctgctcttcctggtggagatgggcttctaccacgtgagccacagctag

SEQ ID NO: 146576 - DNA, 1269 bp, synthetic construct
  misc_feature 1..1269: note = Description of Artificial Sequence: Synthetic coding sequence
  source 1..1269: mol_type = other DNA
atgtctggagatgagaggagtgatgagatcgtgctgactgtgagcaacagcaatgtggaggagcaggaggaccagcccacagctggccaggctgatgctgagaaggccaagagcaccaagaaccagaggaagaccaagggggccaagggcaccttccactgtgatgtgtgcatgttcaccagcagcaggatgagcagcttcaacagacacatgaagacccacaccagcgagaagccccacctgtgccacctgtgcctgaagaccttcagaacagtgaccctgctgaggaaccacgtgaacacccacacaggcacccggccctacaagtgcaatgactgcaacatggcctttgtgaccagcggggagctggtgcgccaccggcgctacaagcacacccatgagaagcccttcaagtgcagcatgtgcaagtatgcctctgtggaggccagcaagctgaagagacatgtgcgcagccacactggagagcggcccttccagtgctgccagtgcagctatgccagccgggacacctacaagctgaagaggcacatgaggacccacagcggggagaagccctatgagtgccacatctgccacacccgcttcacccagagcggcaccatgaagatccacatcctgcagaagcacggggagaatgtgcccaagtaccagtgcccccactgtgccaccatcatcgccaggaagagtgacctgcgggtgcacatgaggaacctgcacgcctacagcgctgctgagctgaagtgccgctactgcagcgctgtgttccacgagagatatgccctgatccagcaccagaagacccacaagaatgagaagcgcttcaagtgcaagcactgcagctatgcctgcaagcaggagcggcacatgacagcccacatccgcacccacactggagagaagcccttcacctgcctgagctgcaacaagtgcttccggcagaagcagctgctgaatgcccacttcaggaagtaccatgatgccaacttcatccccaccgtgtacaagtgcagcaaatgtgggaagggcttcagccgctggatcctgtgggtgggcaacagcgaggtggccgagctgggcggccctggcagcggccccctgctgcggctgcagagcggctgccccccaggcctgcaccaccccaaggccggcctgggccctgaggaccccctgcccggccagctgcggcacaccacagctggcaccggcctgagcagcctgctgcagggccccctgtgcagagctgcctag

SEQ ID NO: 146577 - DNA, 1296 bp, synthetic construct
  misc_feature 1..1296: note = Description of Artificial Sequence: Synthetic coding sequence
  source 1..1296: mol_type = other DNA
atgttccacagcccccggcggctgtgcagcgccctgctgcagagagatgcccctggcctgcggcggctgcctgcccctggcctgcggcggcccctgagccccccagctgctgtgcccaggcctgccagcccccggctgctggccgccgccagcgctgccagcggggccgcccggagctgcagcaggacagtgtgcagcatgggcaccggcaccagccggctgtacagcgccctggccaagaccctgaacagcagcgctgccagccagcaccctgagtacctggtgtccccagaccctgagcacctggagcccatcgaccccaaggagctgctggaggagtgcagagctgtgctgcacacccggcccccacgcttccagagggactttgtggacctgaggacagactgccccagcacccacccccccatccgggtgatgcagtggaacatcctggcccaggccctgggggagggcaaggacaactttgtgcagtgccctgtggaggccctgaagtgggaggagaggaagtgcctgatcctggaggagatcctggcctaccagcctgacatcctgtgcctgcaggaggtggaccactactttgacaccttccagcccctgctgagccggctgggctaccagggcaccttcttccccaagccctggagcccctgcctggatgtggagcacaacaatggaccagatggctgtgccctcttcttcctgcagaaccgcttcaagctggtgaacagcgccaacatccggctgacagccatgaccctgaagaccaaccaggtggccatcgcccagaccctggagtgcaaggagagcggccggcagttctgcatcgctgtgacccacctgaaggccaggacaggctgggagcgcttccgcagcgcccagggctgtgacctgctgcagaacctgcagaacatcacccagggcgccaagatccccctcatcgtgtgtggggacttcaatgctgagcccacagaggaggtgtacaagcactttgccagcagcagcctgaacctgaacagcgcctacaagctgctgtctgcagatggccagagcgagcccccctacaccacctggaagatccgcaccagcggagaatgtcgccacaccctggactacatctggtacagcaagcacgccctgaatgtgcgcagcgccctggacctgctgacagaggagcagatcggccccaaccggctgcccagcttcaactaccccagcgaccacctgagcctggtgtgtgacttctccttcacagaggagagtgatggcctgtcctag

SEQ ID NO: 146578 - DNA, 2133 bp, synthetic construct
  misc_feature 1..2133: note = Description of Artificial Sequence: Synthetic coding sequence
  source 1..2133: mol_type = other DNA
atgagccgcagcccagatgccaaggaggaccctgtggagtgccccctgtgcatggagcccctggagattgatgacatcaacttcttcccctgcacctgtggctaccagatctgccgcttctgctggcaccgcatcagaacagatgaaaatggcctgtgcccagcctgcaggaagccctacccagaggaccctgctgtgtacaagcccctgagccaggaggagctgcagaggatcaagaatgagaagaagcagaagcagaatgaaaggaagcagaagatcagtgaaaataggaagcacctggcctctgtgcgggtggtgcagaagaacctggtgtttgtggtgggcctgagccagaggctggccgaccctgaggtgctgaagaggcctgagtactttgggaagtttgggaagatccacaaggtggtgatcaacaacagcaccagctatgccggcagccagggccccagcgccagcgcctacgtgacctacatccgctcagaagatgccctgcgggccatccagtgtgtgaacaacgtggtggtggatggccgcaccctgaaggccagcctgggcaccaccaagtactgcagctacttcctgaagaacatgcagtgccccaagccagactgcatgtacctgcacgagctgggagatgaggccgccagcttcaccaaggaggagatgcaggccggcaagcaccaggagtatgagcagaagctgctgcaggagctgtacaagctgaaccccaacttcctgcagctgagcacaggctctgtggacaagaacaagaacaaggtgacccccctgcagagccccatcgacaagcccagcgacagcctgagcattggaaatggagacaacagccagcagatcagcaacagcgacacccccagccccccacctggcctgagcaagagcaaccctgtgatccccatcagcagcagcaaccacagcgcccggagcccctttgaaggagctgtgacagagagccagagcctcttcagtgacaacttccgccaccccaaccccatccccagcggcctgccccccttccccagcagcccccagaccagcagtgactggcccacagcccctgagccccagagcctcttcaccagcgagaccatccctgtgagcagcagcacagactggcaggccgccttcggcttcggcagcagcaagcagccagaagatgacctgggctttgacccctttgatgtgaccaggaaggccctggccgacctgattgagaaggagctgtctgtgcaggaccagcccagcctgagccccaccagcctgcagaacagcagcagccacaccaccacagccaagggccctggcagcggcttcctgcaccctgctgctgccaccaatgccaacagcctgaacagcaccttctctgtgctgccccagcgcttcccccagttccagcagcacagagctgtgtacaacagcttctccttccctggccaggccgcccgctacccctggatggccttccccaggaacagcatcatgcacctgaaccacacagccaaccccaccagcaacagcaacttcctggacctgaacctgcccccccagcacaacacaggcctgggcggcatccctgtggccgacaacagcagctctgtggagagcctgaacatgaaggagtggcaggacggcctgcgggccctgctgcccaacatcaacatcaactttggaggcctgcccaacagcagcagccccagcaatgccaaccacagcgcccccaccagcaacacagccaccacagacagcctgtcctgggacagccctggctcctggacagatcctgccatcatcaccggcatcccagccagcagcggcaacagcctggacagcctgcaggatgacaaccccccccactggctgaagagcctgcaggccctgacagagatggatggccccagcgctgcccccagccagacccaccacagcgcccccttcagcacccagatccccctgcaccgggcctcctggaacccctaccccccacccagcaaccccagcagcttccacagccccccacctggcttccagacagccttccggccccccagcaagacccccacagacctgctgcagagcagcaccctggacagacactag

SEQ ID NO: 146579 - DNA, 3684 bp, synthetic construct
  misc_feature 1..3684: note = Description of Artificial Sequence: Synthetic coding sequence
  source 1..3684: mol_type = other DNA
atgacccagaaggtggaggagctgaaggagaccgtgaaggaggagttcatgccctgggtgtcccagtacctggtgatgaagagggtgtccattgagcccaacttccacagcctgtacagcaacttcctggacaccctgaagaaccctgagttcaacaagatggtgctgaatgagacctacagaaacatcaaggacctggatgtgaagagcctgctgctggaggcctacgtgaagggccagcaggagctgctgtatgtggtgccctttgtggccaaggtgctggagagcagcatccgctctgtggtgttccggccccccaacccctggaccatggccatcatgaatgtgctggccgagctgcaccaggagcatgacctgaagctgaacctgaagtttgaaattgaggtgctgtgcaagaacctggccctggacatcaatgagctgaagccaggcaacctgctgaaggacaaggaccggctgaagaacctggatgagcagctgagcgcccccaagaaggatgtgaagcagcctgaggagctgccccccatcaccaccaccaccaccagcaccaccccagccaccaacaccacctgcacagccaccgtgcccccccagccccagtacagctaccatgacatcaacgtgtacagcctggccggcctggccccccacatcaccctgaaccccaccatccccctcttccaggcccacccccagctgaagcagtgtgtgcggcaggccatcgagagagctgtgcaggagctggtgcaccctgtggtggacaggagcatcaagatcgccatgaccacctgtgagcagatcgtgaggaaggactttgccctggacagcgaggagagcaggatgagaattgctgcccaccacatgatgaggaacctgacagctggcatggccatgatcacctgccgggagcccctgctgatgagcatcagcaccaacctgaagaacagctttgccagcgccctgaggacagccagcccccagcagcgggagatgatggaccaggccgccgcccagctggcccaggacaactgtgagctggcctgctgcttcatccagaagacagctgtggagaaggccggccctgagatggacaagaggctggccacagaatttgagctgaggaagcacgcccggcaggagggccgccgctactgtgaccctgtggtgctgacctaccaggccgagaggatgcctgagcagatccggctgaaggtgggcggcgtggaccccaagcagctggccgtgtatgaggagtttgccagaaatgtgcccggcttcctgcccaccaatgacctgagccagcccaccggcttcctggcccagcccatgaagcaggcctgggccacagatgatgtggcccagatctatgacaagtgcatcacagagctggagcagcacctgcacgccatcccccccaccctggccatgaacccccaggcccaggccctgcggagcctgctggaggtggtggtgctgagcaggaacagcagagatgccatcgccgccctgggcctgctgcagaaggctgtggagggcctgctggatgccaccagcggggctgatgctgacctgctgctgcgctaccgggagtgccacctgctggtgctgaaggccctgcaggacggccgggcctacggcagcccctggtgcaacaagcagatcacccgctgcctgattgaatgtagagatgagtacaagtacaacgtggaggccgtggagctgctgatccggaaccacctggtgaacatgcagcagtatgacctgcacctggcccagagcatggagaatggcctgaactacatggctgtggcctttgccatgcagctggtgaagatcctgctggtggatgagaggtctgtggcccacgtgacagaagctgacctcttccacaccatcgagaccctgatgaggatcaatgcccacagcagaggaaatgcccctgagggcctgccccagctgatggaggtggtgcgcagcaactatgaggccatgattgaccgggcccacggcggccccaacttcatgatgcacagcggcatcagccaggcctctgaatatgatgaccccccaggcctgcgggagaaggccgagtacctgctgcgggagtgggtgaacctgtaccacagcgctgctgctggccgggacagcaccaaggccttcagcgcctttgtgggccagatgcaccagcagggcatcctgaagacagatgacctgatcacccgcttcttccggctgtgcacagagatgtgtgtggagatctcctaccgggcccaggccgagcagcagcacaacccagctgccaaccccaccatgatccgggccaagtgctaccacaacctggatgcctttgtgcggctcatcgccctgctggtgaagcacagcggggaggccaccaacacagtgaccaagatcaacctgctgaacaaggtgctgggcatcgtggtgggcgtgctgctgcaggaccatgatgtgcggcagagcgagttccagcagctgccctaccaccgcatcttcatcatgctgctgctggagctgaatgcccctgagcacgtgctggagaccatcaacttccagaccctgacagccttctgcaacaccttccacatcctgcggcccaccaaggcccctggctttgtgtatgcctggctggagctgatcagccaccgcatcttcatcgccaggatgctggcccacaccccccagcagaagggctggcccatgtatgcccagctgctgattgacctcttcaagtacctggcccccttcctgagaaatgtggagctgaccaagcccatgcagatcctgtacaagggcaccctgcgggtgctgctggtgctgctgcatgacttccctgagttcctgtgtgactaccactacggcttctgtgatgtgattcctcccaactgcatccagctgaggaacctgatcctgagcgccttccccaggaacatgaggctgcctgaccccttcacccccaacctgaaggtggacatgctgtctgagatcaacatcgccccccgcatcctgaccaacttcaccggggtgatgccaccccagttcaagaaggacctggacagctacctgaagaccaggagccctgtgaccttcctgagtgacctgcggagcaacctgcaggtgtccaatgaacctggcaaccgctacaacctgcagctgatcaatgccctggtgctgtatgtgggcacccaggccatcgcccacatccacaacaagggcagcacccccagcatgagcaccatcacccacagcgcccacatggacatcttccagaacctggccgtggacctggacacagagggccgctacctgttcctgaatgccatcgccaaccagctgcgctaccccaacagccacacccactacttcagctgcaccatgctgtacctgtttgctgaggccaacacagaggccatccaggagcagatcaccagggtgctgctggagcggctcatcgtgaaccggccccacccctggggcctgctgatcaccttcatcgagctgatcaagaacccagccttcaagttctggaaccatgaatttgtgcactgtgcccctgagattgagaagctgttccagagcgtggcccagtgctgcatgggccagaagcaggcccagcaggtgatggagggcaccggggccagctag

SEQ ID NO: 146580 - DNA, 7131 bp, synthetic construct
  misc_feature 1..7131: note = Description of Artificial Sequence: Synthetic coding sequence
  source 1..7131: mol_type = other DNA
atgaacctggacagcctgagcctggccctgagccagatctcctacctggtggacaacctgaccaagaagaactaccgggccagccagcaggagatccagcacatcgtgaacagacatggccctgaggccgacagacacctgctgcgctgcctcttcagccacgtggacttctctggagatggcaagagcagcggcaaggacttccaccagacccagttcctgatccaggagtgtgccctgctgatcaccaagcccaacttcatcagcaccctgtcctatgccatcgacaaccccctgcactaccagaagagcctgaagccagccccccacctgtttgcccagctgagcaaggtgctgaagctgagcaaggtgcaggaggtgatcttcggcctggccctgctgaacagcagcagcagtgacctgcggggctttgctgcccagttcatcaagcagaagctgcctgacctgctgcggagctacattgatgctgatgtgtctggcaaccaggagggcggcttccaggacatcgccatcgaggtgctgcacctgctgctgagccacctgctgtttggccagaagggggccttcggcgtgggccaggagcagattgatgccttcctgaagaccctgcggcgggacttcccccaggagcgctgccctgtggtgctggcccccctgctgtacccagagaagagggacatcctgatggaccgcatcctgcctgattctggaggagtggccaagaccatgatggagagcagcctggccgacttcatgcaggaggtgggctacggcttctgtgccagcattgaggagtgcaggaacatcatcgtgcagtttggagtgcgggaggtgacagctgcccaggtggcccgggtgctgggcatgatggcccggacccacagcggcctgacagatggcatccccctgcagagcatcagcgcccctggcagcggcatctggagcgatggcaaggacaagagtgatggagcccaggcccacacctggaatgtggaggtgctgattgatgtgctgaaggagctgaaccccagcctgaacttcaaggaggtgacctatgagctggaccaccctggcttccagatccgggacagcaagggcctgcacaacgtggtgtatggcatccagaggggcctgggcatggaggtgtttcctgtggacctgatctaccggccctggaagcacgccgagggccagctgtccttcatccagcacagcctcatcaaccctgagatcttctgctttgctgactacccctgccacacagtggccacagacatcctgaaggcccccccagaagatgacaaccgggagatcgccacctggaagagcctggacctgattgagagcctgctgcggctggccgaggtgggccagtatgagcaggtgaagcagctgttctccttccccatcaagcactgcccagacatgctggtgctggccctgctgcagatcaacacctcctggcacaccctgcggcatgagctgatcagcaccctgatgcccatcttcctgggcaaccaccccaacagcgccatcatcctgcactacgcctggcacggccagggccagagccccagcatccggcagctgatcatgcacgccatggccgagtggtacatgagaggagagcagtatgaccaggccaagctgagccgcatcctggatgtggcccaggacctgaaggccctgtccatgctgctgaatggcaccccatttgcctttgtgattgacctggccgccctggccagcagaagagagtacctgaagctggacaagtggctgacagacaagatccgggagcacggggagcccttcatccaggcctgcatgaccttcctgaagaggcgctgccccagcatcctgggcggcctggcccctgagaaggaccagcccaagagcgcccagctgcccccagagaccctggccaccatgctggcctgcctgcaggcctgtgccggctctgtgtcccaggagctgtctgagaccatcctgaccatggtggccaactgcagcaatgtgatgaacaaggcccggcagcccccacctggggtgatgcccaagggccggcccccatctgccagcagcctggatgccatcagccctgtgcagattgaccccctggccggcatgaccagcctgagcatcggcggcagcgctgccccccacacccagagcatgcagggcttcccccccaacctgggcagcgccttcagcaccccccagagccctgccaaggccttcccccccctgagcacccccaaccagaccacagccttctctggaattggaggcctgagcagccagctgcctgtgggcggcctgggcaccggcagcctgactggaattggaactggagccctgggcctgcctgctgtgaacaatgacccctttgtgcagaggaagctgggcaccagcggcctgaaccagcccaccttccagcagagcaagatgaagcccagcgacctgagccaggtgtggccagaggccaaccagcacttcagcaaggagattgatgatgaggccaacagctacttccagaggatctacaaccaccccccccaccccaccatgtctgtggatgaggtgctggagatgctgcagcgcttcaaggacagcaccatcaagcgggagcgggaggtgttcaactgcatgctgaggaacctgtttgaggagtaccgcttcttcccccagtacccagacaaggagctgcacatcacagcctgcctgtttggaggcatcatcgagaagggcctggtgacctacatggccctgggcctggccctgcgctacgtgctggaggccctgaggaagcccttcggcagcaagatgtactactttggaattgctgccctggaccgcttcaagaaccggctgaaggactacccccagtactgccagcacctggccagcatcagccacttcatgcagttcccccaccacctgcaggagtacatcgagtatggccagcagagccgggacccccctgtgaagatgcagggcagcatcaccaccccaggcagcatcgccctggcccaggcccaggcccaggcccaggtgcctgccaaggcccccctggccggccaggtgtccaccatggtgaccaccagcaccaccaccaccgtggccaagacagtgacagtgacccggcccaccggggtgtccttcaagaaggatgtgcccccatccatcaacaccaccaacatcgacaccctgctggtggccacagaccagacagagcgcatcgtggagcccccagagaacatccaggagaagatcgccttcatcttcaacaacctgagccagagcaacatgacccagaaggtggaggagctgaaggagaccgtgaaggaggagttcatgccctgggtgtcccagtacctggtgatgaagagggtgtccattgagcccaacttccacagcctgtacagcaacttcctggacaccctgaagaaccctgagttcaacaagatggtgctgaatgagacctacagaaacatcaaggtgctgctgaccagtgacaaggctgctgccaacttcagtgacaggagcctgctgaagaacctgggccactggctgggcatgatcaccctggccaagaacaagcccatcctgcacacagacctggatgtgaagagcctgctgctggaggcctacgtgaagggccagcaggagctgctgtatgtggtgccctttgtggccaaggtgctggagagcagcatccgctctgtggtgttccggccccccaacccctggaccatggccatcatgaatgtgctggccgagctgcaccaggagcatgacctgaagctgaacctgaagtttgaaattgaggtgctgtgcaagaacctggccctggacatcaatgagctgaagccaggcaacctgctgaaggacaaggaccggctgaagaacctggatgagcagctgagcgcccccaagaaggatgtgaagcagcctgaggagctgccccccatcaccaccaccaccaccagcaccaccccagccaccaacaccacctgcacagccaccgtgcccccccagccccagtacagctaccatgacatcaacgtgtacagcctggccggcctggccccccacatcaccctgaaccccaccatccccctcttccaggcccacccccagctgaagcagtgtgtgcggcaggccatcgagagagctgtgcaggagctggtgcaccctgtggtggacaggagcatcaagatcgccatgaccacctgtgagcagatcgtgaggaaggactttgccctggacagcgaggagagcaggatgagaattgctgcccaccacatgatgaggaacctgacagctggcatggccatgatcacctgccgggagcccctgctgatgagcatcagcaccaacctgaagaacagctttgccagcgccctgaggacagccagcccccagcagcgggagatgatggaccaggccgccgcccagctggcccaggacaactgtgagctggcctgctgcttcatccagaagacagctgtggagaaggccggccctgagatggacaagaggctggccacagaatttgagctgaggaagcacgcccggcaggagggccgccgctactgtgaccctgtggtgctgacctaccaggccgagaggatgcctgagcagatccggctgaaggtgggcggcgtggaccccaagcagctggccgtgtatgaggagtttgccagaaatgtgcccggcttcctgcccaccaatgacctgagccagcccaccggcttcctggcccagcccatgaagcaggcctgggccacagatgatgtggcccagatctatgacaagtgcatcacagagctggagcagcacctgcacgccatcccccccaccctggccatgaacccccaggcccaggccctgcggagcctgctggaggtggtggtgctgagcaggaacagcagagatgccatcgccgccctgggcctgctgcagaaggctgtggagggcctgctggatgccaccagcggggctgatgctgacctgctgctgcgctaccgggagtgccacctgctggtgctgaaggccctgcaggacggccgggcctacggcagcccctggtgcaacaagcagatcacccgctgcctgattgagtgcagagatgagtacaagtacaacgtggaggccgtggagctgctgatccggaaccacctggtgaacatgcagcagtatgacctgcacctggcccagagcatggagaatggcctgaactacatggctgtggcctttgccatgcagctggtgaagatcctgctggtggatgagaggtctgtggcccacgtgacagaggccgacctcttccacaccatcgagaccctgatgaggatcaatgcccacagcagaggaaatgcccctgagggcctgccccagctgatggaggtggtgcgcagcaactatgaggccatgattgaccgggcccatggaggccccaacttcatgatgcacagcggcatcagccaggcctctgaatatgatgatcctcctggcctgcgggagaaggccgagtacctgctgcgggagtgggtgaacctgtaccacagcgctgctgctggccgggacagcaccaaggccttcagcgcctttgtgggccagatgcaccagcagggcatcctgaagacagatgacctgatcacccgcttcttccggctgtgcacagagatgtgtgtggagatctcctaccgggcccaggccgagcagcagcacaacccagctgccaaccccaccatgatccgggccaagtgctaccacaacctggatgcctttgtgcggctgattgccctgctggtgaagcacagcggggaggccaccaacacagtgaccaagatcaacctgctgaacaaggtgctgggcatcgtggtgggcgtgctgctgcaggaccatgatgtgcggcagagcgagttccagcagctgccctaccaccgcatcttcatcatgctgctgctggagctgaatgcccctgagcacgtgctggagaccatcaacttccagaccctgacagccttctgcaacaccttccacatcctgcggcccaccaaggcccctggctttgtgtatgcctggctggagctgatcagccaccgcatcttcatcgccaggatgctggcccacaccccccagcagaagggctggcccatgtatgcccagctgctgattgacctcttcaagtacctggcccccttcctgagaaatgtggagctgaccaagcccatgcagatcctgtacaagggcaccctgcgggtgctgctggtgctgctgcatgacttccctgagttcctgtgtgactaccactacggcttctgtgatgtgatcccccccaactgcatccagctgaggaacctgatcctgagcgccttccccaggaacatgaggctgcctgaccccttcacccccaacctgaaggtggacatgctgtctgagatcaacatcgccccccgcatcctgaccaacttcaccggggtgatgccaccccagttcaagaaggacctggacagctacctgaagaccaggagccctgtgaccttcctgagtgacctgcggagcaacctgcaggtgtccaatgagcccggcaaccgctacaacctgcagctgatcaatgccctggtgctgtatgtgggcacccaggccatcgcccacatccacaacaagggcagcacccccagcatgagcaccatcacccacagcgcccacatggacatcttccagaacctggccgtggacctggacacagagggccgctacctgttcctgaatgccatcgccaaccagctgcgctaccccaacagccacacccactacttcagctgcaccatgctgtacctgtttgctgaggccaacacagaggccatccaggagcagatcaccagggtgctgctggagcggctgattgtgaaccggccccacccctggggcctgctgatcaccttcatcgagctgatcaagaacccagccttcaagttctggaaccacgagtttgtgcactgtgcccctgagattgagaagctgttccagagcgtggcccagtgctgcatgggccagaagcaggcccagcaggtgatggagggcactggagccagctag

SEQ ID NO: 146581 - DNA, 6453 bp, synthetic construct
  misc_feature 1..6453: note = Description of Artificial Sequence: Synthetic coding sequence
  source 1..6453: mol_type = other DNA
atgaacctggacagcctgagcctggccctgagccagatctcctacctggtggacaacctgaccaagaagaactaccgggccagccagcaggagatccagcacatcgtgaacagacatggccctgaggccgacagacacctgctgcgctgcctcttcagccacgtggacttctctggagatggcaagagcagcggcaaggacttccaccagacccagttcctgatccaggagtgtgccctgctgatcaccaagcccaacttcatcagcaccctgtcctatgccatcgacaaccccctgcactaccagaagagcctgaagccagccccccacctgtttgcccagctgagcaaggtgctgaagctgagcaaggtgcaggaggtgatcttcggcctggccctgctgaacagcagcagcagtgacctgcggggctttgctgcccagttcatcaagcagaagctgcctgacctgctgcggagctacattgatgctgatgtgtctggcaaccaggagggcggcttccaggacatcgccatcgaggtgctgcacctgctgctgagccacctgctgtttggccagaagggggccttcggcgtgggccaggagcagattgatgccttcctgaagaccctgcggcgggacttcccccaggagcgctgccctgtggtgctggcccccctgctgtacccagagaagagggacatcctgatggaccgcatcctgcctgattctggaggagtggccaagaccatgatggagagcagcctggccgacttcatgcaggaggtgggctacggcttctgtgccagcattgaggagtgcaggaacatcatcgtgcagtttggagtgcgggaggtgacagctgcccaggtggcccgggtgctgggcatgatggcccggacccacagcggcctgacagatggcatccccctgcagagcatcagcgcccctggcagcggcatctggagcgatggcaaggacaagagtgatggagcccaggcccacacctggaatgtggaggtgctgattgatgtgctgaaggagctgaaccccagcctgaacttcaaggaggtgacctatgagctggaccaccctggcttccagatccgggacagcaagggcctgcacaacgtggtgtatggcatccagaggggcctgggcatggaggtgtttcctgtggacctgatctaccggccctggaagcacgccgagggccagctgtccttcatccagcacagcctcatcaaccctgagatcttctgctttgctgactacccctgccacacagtggccacagacatcctgaaggcccccccagaagatgacaaccgggagatcgccacctggaagagcctggacctgattgagagcctgctgcggctggccgaggtgggccagtatgagcaggtgaagcagctgttctccttccccatcaagcactgcccagacatgctggtgctggccctgctgcagatcaacacctcctggcacaccctgcggcatgagctgatcagcaccctgatgcccatcttcctgggcaaccaccccaacagcgccatcatcctgcactacgcctggcacggccagggccagagccccagcatccggcagctgatcatgcacgccatggccgagtggtacatgagaggagagcagtatgaccaggccaagctgagccgcatcctggatgtggcccaggacctgaaggccctgtccatgctgctgaatggcaccccatttgcctttgtgattgacctggccgccctggccagcagaagagagtacctgaagctggacaagtggctgacagacaagatccgggagcacggggagcccttcatccaggcctgcatgaccttcctgaagaggcgctgccccagcatcctgggcggcctggcccctgagaaggaccagcccaagagcgcccagctgcccccagagaccctggccaccatgctggcctgcctgcaggcctgtgccggctctgtgtcccaggagctgtctgagaccatcctgaccatggtggccaactgcagcaatgtgatgaacaaggcccggcagcccccacctggggtgatgcccaagggccggcccccatctgccagcagcctggatgccatcagccctgtgcagattgaccccctggccggcatgaccagcctgagcatcggcggcagcgctgccccccacacccagagcatgcagggcttcccccccaacctgggcagcgccttcagcaccccccagagccctgccaaggccttcccccccctgagcacccccaaccagaccacagccttctctggaattggaggcctgagcagccagctgcctgtgggcggcctgggcaccggcagcctgactggaattggaactggagccctgggcctgcctgctgtgaacaatgacccctttgtgcagaggaagctgggcaccagcggcctgaaccagcccaccttccagcagacagacctgagccaggtgtggccagaggccaaccagcacttcagcaaggagattgatgatgaggccaacagctacttccagaggatctacaaccaccccccccaccccaccatgtctgtggatgaggtgctggagatgctgcagcgcttcaaggacagcaccatcaagcgggagcgggaggtgttcaactgcatgctgaggaacctgtttgaggagtaccgcttcttcccccagtacccagacaaggagctgcacatcacagcctgcctgtttggaggcatcatcgagaagggcctggtgacctacatggccctgggcctggccctgcgctacgtgctggaggccctgaggaagcccttcggcagcaagatgtactacttcggcattgctgccctggaccgcttcaagaaccggctgaaggactacccccagtactgccagcacctggccagcatcagccacttcatgcagttcccccaccacctgcaggagtacattgaatatggccagcagagccgggacccccctgtgaagatgcagggcagcatcaccaccccaggcagcatcgccctggcccaggcccaggcccaggcccaggtgcctgccaaggcccccctggccggccaggtgtccaccatggtgaccaccagcaccaccaccaccgtggccaagacagtgacagtgacccggcccactggagtgtccttcaagaaggatgtgccccccagcatcaacaccaccaacatcgacaccctgctggtggccacagaccagacagaaagaattgtggagcccccagagaacatccaggagaagatcgccttcatcttcaacaacctgagccagagcaacatgacccagaaggtggaggagctgaaggagaccgtgaaggaggagttcatgccctgggtgtcccagtacctggtgatgaagagggtgtccattgagcccaacttccacagcctgtacagcaacttcctggacaccctgaagaaccctgagttcaacaagatggtgctgaatgagacctacagaaacatcaaggtgctgctgaccagtgacaaggccgccgccaacttcagtgacaggagcctgctgaagaacctgggccactggctgggcatgatcaccctggccaagaacaagcccatcctgcacacagacctggatgtgaagagcctgctgctggaggcctacgtgaagggccagcaggagctgctgtatgtggtgccctttgtggccaaggtgctggagagcagcatccgctctgtggtgttccggccccccaacccctggaccatggccatcatgaatgtgctggccgagctgcaccaggagcatgacctgaagctgaacctgaagtttgaaattgaggtgctgtgcaagaacctggccctggacatcaatgagctgaagccaggcaacctgctgaaggacaaggaccggctgaagaacctggatgagcagctgagcgcccccaagaaggatgtgaagcagcctgaggagctgccccccatcaccaccaccaccaccagcaccaccccagccaccaacaccacctgcacagccaccgtgcccccccagccccagtacagctaccatgacatcaacgtgtacagcctggccggcctggccccccacatcaccctgaaccccaccatccccctcttccaggcccacccccagctgaagcagtgtgtgcggcaggccatcgagagagctgtgcaggagctggtgcaccctgtggtggacaggagcatcaagatcgccatgaccacctgtgagcagatcgtgaggaaggactttgccctggacagcgaggagagcaggatgagaattgctgcccaccacatgatgaggaacctgacagctggcatggccatgatcacctgccgggagcccctgctgatgagcatcagcaccaacctgaagaacagctttgccagcgccctgaggacagccagcccccagcagcgggagatgatggaccaggccgccgcccagctggcccaggacaactgtgagctggcctgctgcttcatccagaagacagctgtggagaaggccggccctgagatggacaagaggctggccacagaatttgagctgaggaagcacgcccggcaggagggccgccgctactgtgaccctgtggtgctgacctaccaggccgagaggatgcctgagcagatccggctgaaggtgggcggcgtggaccccaagcagctggccgtgtatgaggagtttgccagaaatgtgcccggcttcctgcccaccaatgacctgagccagcccaccggcttcctggcccagcccatgaagcaggcctgggccacagatgatgtggcccagatctatgacaagtgcatcacagagctggagcagcacctgcacgccatcccccccaccctggccatgaacccccaggcccaggccctgcggagcctgctggaggtggtggtgctgagcaggaacagcagagatgccatcgccgccctgggcctgctgcagaaggctgtggagggcctgctggatgccaccagcggggctgatgctgacctgctgctgcgctaccgggagtgccacctgctggtgctgaaggccctgcaggacggccgggcctacggcagcccctggtgcaacaagcagatcacccgctgcctgattgaatgtagagatgagtacaagtacaacgtggaggccgtggagctgctgatccggaaccacctggtgaacatgcagcagtatgacctgcacctggcccagagcatggagaatggcctgaactacatggctgtggcctttgccatgcagctggtgaagatcctgctggtggatgagaggtctgtggcccacgtgacagaagctgacctcttccacaccatcgagaccctgatgaggatcaatgcccacagcagaggaaatgcccctgagggcctgccccagctgatggaggtggtgcgcagcaactatgaggccatgattgaccgggcccacggcggccccaacttcatgatgcacagcggcatcagccaggcctctgaatatgatgaccccccaggcctgcgggagaaggccgagtacctgctgcgggagtgggtgaacctgtaccacagcgctgctgctggccgggacagcaccaaggccttcagcgcctttgtgggccagatgcaccagcagggcatcctgaagacagatgacctgatcacccgcttcttccggctgtgcacagagatgtgtgtggagatctcctaccgggcccaggccgagcagcagcacaacccagctgccaaccccaccatgatccgggccaagtgctaccacaacctggatgcctttgtgcggctcatcgccctgctggtgaagcacagcggggaggccaccaacacagtgaccaagatcaacctgctgaacaaggtgctgggcatcgtggtgggcgtgctgctgcaggaccatgatgtgcggcagagcgagttccagcagctgccctaccaccgcatcttcatcatgctgctgctggagctgaatgcccctgagcacgtgctggagaccatcaacttccagaccctgacagccttctgcaacaccttccacatcctgcggcccaccaaggcccctggctttgtgtatgcctggctggagctgatcagccaccgcatcttcatcgccaggatgctggcccacaccccccagcagaagggctggcccatgtatgcccagctgctgattgacctcttcaagtacctggcccccttcctgagaaatgtggagctgaccaagcccatgcagatcctgtacaagggcaccctgcgggtgctgctggtgctgctgcatgacttccctgagttcctgtgtgactaccactacggcttctgtgatgtgattcctcccaactgcatccagctgaggaacctgatcctgagcgccttccccaggaacatgaggctgcctgaccccttcacccccaacctgaaggagatcatgctgtag

SEQ ID NO: 146582 - DNA, 3213 bp, synthetic construct
  misc_feature 1..3213: note = Description of Artificial Sequence: Synthetic coding sequence
  source 1..3213: mol_type = other DNA
atgctgctgaatggcaccccatttgccttcgtcatcgacctggccgccctggccagccggcgggagtacctgaagctggacaagtggctgacagacaagatccgggagcacggggagcccttcatccaggcctgcatgaccttcctgaagaggcgctgccccagcatcctgggcggcctggcccctgagaaggaccagcccaagagcgcccagctgcccccagagaccctggccaccatgctggcctgcctgcaggcctgtgccggctctgtgtcccaggagctgtctgagaccatcctgaccatggtggccaactgcagcaatgtgatgaacaaggcccggcagcccccacctggggtgatgcccaagggccggccccccagcgccagcagcctggatgccatcagccctgtgcagattgaccccctggccggcatgaccagcctgagcattggaggcagcgctgccccccacacccagagcatgcagggcttcccccccaacctgggcagcgccttcagcaccccccagagccctgccaaggccttcccccccctgagcacccccaaccagaccacagccttcagcggcatcggcggcctgagcagccagctgcctgtgggcggcctgggcaccggcagcctgaccggcatcggcaccggggccctgggcctgcctgctgtgaacaatgacccctttgtgcagaggaagctgggcaccagcggcctgaaccagcccaccttccagcagagcaagatgaagcccagcgacctgagccaggtgtggccagaggccaaccagcacttcagcaaggagattgatgatgaggccaacagctacttccagaggatctacaaccaccccccccaccccaccatgtctgtggatgaggtgctggagatgctgcagcgcttcaaggacagcaccatcaagcgggagcgggaggtgttcaactgcatgctgaggaacctgtttgaggagtaccgcttcttcccccagtacccagacaaggagctgcacatcacagcctgcctgtttggaggcatcatcgagaagggcctggtgacctacatggccctgggcctggccctgcgctacgtgctggaggccctgaggaagcccttcggcagcaagatgtactacttcggcattgctgccctggaccgcttcaagaaccggctgaaggactacccccagtactgccagcacctggccagcatcagccacttcatgcagttcccccaccacctgcaggagtacattgaatatggccagcagagccgggacccccctgtgaagatgcagggcagcatcaccaccccaggcagcatcgccctggcccaggcccaggcccaggcccaggtgcctgccaaggcccccctggccggccaggtgtccaccatggtgaccaccagcaccaccaccaccgtggccaagacagtgacagtgacccggcccactggagtgtccttcaagaaggatgtgccccccagcatcaacaccaccaacatcgacaccctgctggtggccacagaccagacagaaagaattgtggagcccccagagaacatccaggagaagatcgccttcatcttcaacaacctgagccagagcaacatgacccagaaggtggaggagctgaaggagaccgtgaaggaggagttcatgccctgggtgtcccagtacctggtgatgaagagggtgtccattgagcccaacttccacagcctgtacagcaacttcctggacaccctgaagaacctgatcacccgcttcttccggctgtgcacagagatgtgtgtggagatctcctaccgggcccaggccgagcagcagcacaacccagctgccaaccccaccatgatccgggccaagtgctaccacaacctggatgcctttgtgcggctgattgccctgctggtgaagcacagcggggaggccaccaacacagtgaccaagatcaacctgctgaacaaggtgctgggcatcgtggtgggcgtgctgctgcaggaccatgatgtgcggcagagcgagttccagcagctgccctaccaccgcatcttcatcatgctgctgctggagctgaatgcccctgagcacgtgctggagaccatcaacttccagaccctgacagccttctgcaacaccttccacatcctgcggcccaccaaggcccctggctttgtgtatgcctggctggagctgatcagccaccgcatcttcatcgccaggatgctggcccacaccccccagcagaagggctggcccatgtatgcccagctgctgattgacctcttcaagtacctggcccccttcctgagaaatgtggagctgaccaagcccatgcagatcctgtacaagggcaccctgcgggtgctgctggtgctgctgcatgacttccctgagttcctgtgtgactaccactacggcttctgtgatgtgatcccccccaactgcatccagctgaggaacctgatcctgagcgccttccccaggaacatgaggctgcctgaccccttcacccccaacctgaaggtggacatgctgtctgagatcaacatcgccccccgcatcctgaccaacttcaccggggtgatgccaccccagttcaagaaggacctggacagctacctgaagaccaggagccctgtgaccttcctgagtgacctgcggagcaacctgcaggtgtccaatgagcccggcaaccgctacaacctgcagctgatcaatgccctggtgctgtatgtgggcacccaggccatcgcccacatccacaacaagggcagcacccccagcatgagcaccatcacccacagcgcccacatggacatcttccagaacctggccgtggacctggacacagagggccgctacctgttcctgaatgccatcgccaaccagctgcgctaccccaacagccacacccactacttcagctgcaccatgctgtacctgtttgctgaggccaacacagaggccatccaggagcagatcaccagggtgctgctggagcggctgattgtgaaccggccccacccctggggcctgctgatcaccttcatcgagctgatcaagaacccagccttcaagttctggaaccacgagtttgtgcactgtgcccctgagattgagaagctgttccagagcgtggcccagtgctgcatgggccagaagcaggcccagcaggtgatggagggcactggagccagctag

SEQ ID NO: 146583 - DNA, 4656 bp, synthetic construct
  misc_feature 1..4656: note = Description of Artificial Sequence: Synthetic coding sequence
  source 1..4656: mol_type = other DNA
atgaacctggacagcctgagcctggccctgagccagatctcctacctggtggacaacctgaccaagaagaactaccgggccagccagcaggagatccagcacatcgtgaacagacatggccctgaggccgacagacacctgctgcgctgcctcttcagccacgtggacttctctggagatggcaagagcagcggcaaggacttccaccagacccagttcctgatccaggagtgtgccctgctgatcaccaagcccaacttcatcagcaccctgtcctatgccatcgacaaccccctgcactaccagaagagcctgaagccagccccccacctgtttgcccagctgagcaaggtgctgaagctgagcaaggtgcaggaggtgatcttcggcctggccctgctgaacagcagcagcagtgacctgcggggctttgctgcccagttcatcaagcagaagctgcctgacctgctgcggagctacattgatgctgatgtgtctggcaaccaggagggcggcttccaggacatcgccatcgaggtgctgcacctgctgctgagccacctgctgtttggccagaagggggccttcggcgtgggccaggagcagattgatgccttcctgaagaccctgcggcgggacttcccccaggagcgctgccctgtggtgctggcccccctgctgtacccagagaagagggacatcctgatggaccgcatcctgcctgattctggaggagtggccaagaccatgatggagagcagcctggccgacttcatgcaggaggtgggctacggcttctgtgccagcattgaggagtgcaggaacatcatcgtgcagtttggagtgcgggaggtgacagctgcccaggtggcccgggtgctgggcatgatggcccggacccacagcggcctgacagatggcatccccctgcagagcatcagcgcccctggcagcggcatctggagcgatggcaaggacaagagtgatggagcccaggcccacacctggaatgtggaggtgctgattgatgtgctgaaggagctgaaccccagcctgaacttcaaggaggtgacctatgagctggaccaccctggcttccagatccgggacagcaagggcctgcacaacgtggtgtatggcatccagaggggcctgggcatggaggtgtttcctgtggacctgatctaccggccctggaagcacgccgagggccagctgtccttcatccagcacagcctcatcaaccctgagatcttctgctttgctgactacccctgccacacagtggccacagacatcctgaaggcccccccagaagatgacaaccgggagatcgccacctggaagagcctggacctgattgagagcctgctgcggctggccgaggtgggccagtatgagcaggtgaagcagctgttctccttccccatcaagcactgcccagacatgctggtgctggccctgctgcagatcaacacctcctggcacaccctgcggcatgagctgatcagcaccctgatgcccatcttcctgggcaaccaccccaacagcgccatcatcctgcactacgcctggcacggccagggccagagccccagcatccggcagctgatcatgcacgccatggccgagtggtacatgagaggagagcagtatgaccaggccaagctgagccgcatcctggatgtggcccaggacctgaaggccctgtccatgctgctgaatggcaccccatttgcctttgtgattgacctggccgccctggccagcagaagagagtacctgaagctggacaagtggctgacagacaagatccgggagcacggggagcccttcatccaggcctgcatgaccttcctgaagaggcgctgccccagcatcctgggcggcctggcccctgagaaggaccagcccaagagcgcccagctgcccccagagaccctggccaccatgctggcctgcctgcaggcctgtgccggctctgtgtcccaggagctgtctgagaccatcctgaccatggtggccaactgcagcaatgtgatgaacaaggcccggcagcccccacctggggtgatgcccaagggccggcccccatctgccagcagcctggatgccatcagccctgtgcagattgaccccctggccggcatgaccagcctgagcatcggcggcagcgctgccccccacacccagagcatgcagggcttcccccccaacctgggcagcgccttcagcaccccccagagccctgccaaggccttcccccccctgagcacccccaaccagaccacagccttctctggaattggaggcctgagcagccagctgcctgtgggcggcctgggcaccggcagcctgactggaattggaactggagccctgggcctgcctgctgtgaacaatgacccctttgtgcagaggaagctgggcaccagcggcctgaaccagcccaccttccagcagagcaagatgaagcccagcgacctgagccaggtgtggccagaggccaaccagcacttcagcaaggagattgatgatgaggccaacagctacttccagaggatctacaaccaccccccccaccccaccatgtctgtggatgaggtgctggagatgctgcagcgcttcaaggacagcaccatcaagcgggagcgggaggtgttcaactgcatgctgaggaacctgtttgaggagtaccgcttcttcccccagtacccagacaaggagctgcacatcacagcctgcctgtttggaggcatcatcgagaagggcctggtgacctacatggccctgggcctggccctgcgctacgtgctggaggccctgaggaagcccttcggcagcaagatgtactactttggaattgctgccctggaccgcttcaagaaccggctgaaggactacccccagtactgccagcacctggccagcatcagccacttcatgcagttcccccaccacctgcaggagtacatcgagtatggccagcagagccgggacccccctgtgaagatgcagggcagcatcaccaccccaggcagcatcgccctggcccaggcccaggcccaggcccaggtgcctgccaaggcccccctggccggccaggtgtccaccatggtgaccaccagcaccaccaccaccgtggccaagacagtgacagtgacccggcccaccggggtgtccttcaagaaggatgtgcccccatccatcaacaccaccaacatcgacaccctgctggtggccacagaccagacagagcgcatcgtggagcccccagagaacatccaggagaagatcgccttcatcttcaacaacctgagccagagcaacatgacccagaaggtggaggagctgaaggagaccgtgaaggaggagttcatgccctgggtgtcccagtacctggtgatgaagagggtgtccattgagcccaacttccacagcctgtacagcaacttcctggacaccctgaagaaccctgagttcaacaagatggtgctgaatgagacctacagaaacatcaaggtgctgctgaccagtgacaaggctgctgccaacttcagtgacaggagcctgctgaagaacctgggccactggctgggcatgatcaccctggccaagaacaagcccatcctgcacacagacctggatgtgaagagcctgctgctggaggcctacgtgaagggccagcaggagctgctgtatgtggtgccctttgtggccaaggtgctggagagcagcatccgctctgtggtgttccggccccccaacccctggaccatggccatcatgaatgtgctggccgagctgcaccaggagcatgacctgaagctgaacctgaagtttgaaattgaggtgctgtgcaagaacctggccctggacatcaatgagctgaagccaggcaacctgctgaaggacaaggaccggctgaagaacctggatgagcagctgagcgcccccaagaaggatgtgaagcagcctgaggagctgccccccatcaccaccaccaccaccagcaccaccccagccaccaacaccacctgcacagccaccgtgcccccccagccccagtacagctaccatgacatcaacgtgtacagcctggccggcctggccccccacatcaccctgaaccccaccatccccctcttccaggcccacccccagctgaagcagtgtgtgcggcaggccatcgagagagctgtgcaggagctggtgcaccctgtggtggacaggagcatcaagatcgccatgaccacctgtgagcagatcgtgaggaaggactttgccctggacagcgaggagagcaggatgagaattgctgcccaccacatgatgaggaacctgacagctggcatggccatgatcacctgccgggagcccctgctgatgagcatcagcaccaacctgaagaacagctttgccagcgccctgcgggtgtcctggctgttcccctggtaccgctacaagacctactactgcctgagcgtcatcatcttcttctttgtgtacatctggcactgggccctgcccctcatcctgaacaaccaccacatctgcctgatgagcagcatcatcctggactgcaacagcgtgcggcagagcatcatgtctgtgtgcttcttcttcttcctgctgtacagccagcatgatgtgtag

SEQ ID NO: 146584 - DNA, 951 bp, synthetic construct
  misc_feature 1..951: note = Description of Artificial Sequence: Synthetic coding sequence
  source 1..951: mol_type = other DNA
atgctgctgctggagctgaatgcccctgagcacgtgctggagaccatcaacttccagaccctgacagccttctgcaacaccttccacatcctgcggcccaccaaggcccctggctttgtgtatgcctggctggagctgatcagccaccgcatcttcatcgccaggatgctggcccacaccccccagcagaagggctggcccatgtatgcccagctgctgattgacctcttcaagtacctggcccccttcctgagaaatgtggagctgaccaagcccatgcagatcctgtacaagggcaccctgcgggtgctgctggtgctgctgcatgacttccctgagttcctgtgtgactaccactacggcttctgtgatgtgattcctcccaactgcatccagctgaggaacctgatcctgagcgccttccccaggaacatgaggctgcctgaccccttcacccccaacctgaaggtggacatgctgtctgagatcaacatcgccccccgcatcctgaccaacttcaccggggtgatgccaccccagttcaagaaggacctggacagctacctgaagaccaggagccctgtgaccttcctgagtgacctgcggagcaacctgcaggtgtccaatgaacctggcaaccgctacaacctgcagctgatcaatgccctggtgctgtatgtgggcacccaggccatcgcccacatccacaacaagggcagcacccccagcatgagcaccatcacccacagcgcccacatggacatcttccagaacctggccgtggacctggacacagagggccgctacctgttcctgaatgccatcgccaaccagagcggcacccagatcgccaccctgaccacctctgtggccccctgctgcaccttcctgcagaggcccatcaggaagcccagcaagaacagaagccaggagttctcctggaatggatag

SEQ ID NO: 146585 - DNA, 2778 bp, synthetic construct
  misc_feature 1..2778: note = Description of Artificial Sequence: Synthetic coding sequence
  source 1..2778: mol_type = other DNA
atggacaggagcggctttggagagatcagcagccctgtgatccgggaggccgaggtgaccaggacagccaggaagcagagcgcccagaagagggtgctgctgcaggccagccaggatgagaactttggaaacaccacccccaggaaccaggtgatccccaggacccccagcagcttccggcagcccttcacccccaccagccgcagcctgctgcggcagcctgacatcagctgcatcctgggcaccggcggcaagagcccccggctgacccagagcagcggcttcttcggcaacctgtccatggtgaccaacctggatgacagcaactgggccgccgccttcagcagccagaggagcggcctcttcaccaacacagagccccacagcatcacagaagatgtgaccatctctgctgtgatgctgagagaagatgaccccggggaggccgcctccatgtccatgttcagtgacttcctgcagagcttcctgaagcacagcagcagcacagtgtttgacctggtggaggagtatgagaacatctgtggcagccaggtgaacatcctgagcaagatcgtgtcccgggccaccccaggcctgcagaagttcagcaagacagcctccatgctgtggctgctgcagcaggagatggtgacctggaggctgctggccagcctgtacagagaccgcatccagagcgccctggaggaggagagcgtgtttgctgtgacagctgtgaatgccagcgagaagacagtggtggaggccctcttccagagggacagcctggtgcggcagagccagctggtggtggactggctggagagcatcgccaaggatgaaattggagagttcagtgacaacatcgagttctacgccaagtctgtgtactgggagaacaccctgcacaccctgaagcagaggcagctgaccagctatgtgggctctgtgcggcccctggtgacagagctggaccctgatgcccccatccggcagaagatgcccctggatgacctggacagagaagatgaggtgcggctgctgaagtacctgttcaccctcatccgggccggcatgacagaggaggcccagaggctgtgcaagagatgtggccaggcctggagggctgccaccctggagggctggaagctgtaccatgaccccaacgtgaatggaggaacagagctggagcctgtggagggcaacccctaccgccgcatctggaagatcagctgctggaggatggccgaggatgagctgttcaacagatatgagcgggccatctatgctgccctgagcggcaacctgaagcagctgctgcctgtgtgtgacacctgggaggacacagtgtgggcctacttccgggtgatggtggacagcctggtggagcaggagatccagacctctgtggccaccctggatgaaacagaggagctgccccgggagtacctgggcgccaactggaccctggagaaggtgtttgaggagctgcaggccacagacaagaagagggtgctggaggagaaccaggagcactaccacatcgtgcagaagttcctgatcctgggggacattgatggcctgatggatgagttcagcaagtggctgagcaagagcaggaacaacctgcccggccacctgctgcgcttcatgacccacctgatcctcttcttccgcaccctgggcctgcagaccaaggaggaggtgtccattgaggtgctgaagacctacatccagctgctgatccgggagaagcacaccaacctgattgccttctacacctgccacctgccccaggacctggccgtggcccagtatgccctcttcctggagagcgtgacagaatttgagcagaggcaccactgcctggagctggccaaggaggccgacctggatgtggccaccatcaccaagacagtggtggagaacatcaggaagaaggacaacggggagttcagccaccacgacctggccccagccctggacaccggcaccacagaagaagatcggctgaagattgatgtgattgactggctggtgtttgatcctgcccagagagctgaggccctgaagcagggcaatgccatcatgaggaagttcctggccagcaagaagcatgaagctgccaaggaggtgtttgtgaagatcccccaggacagcattgctgagatctacaaccagtgtgaggagcagggcatggagagccccctgcctgcagaagatgacaatgccatccgggagcacctgtgcatccgggcctacctggaggcccacgagaccttcaatgagtggttcaagcacatgaacagcgtgccccagaagccagccctgatcccccagcccaccttcacagagaaggtggcccacgagcacaaggagaagaagtatgagatggactttggcatctggaagggccacctggatgccctgacagcagatgtgaaggagaagatgtacaacgtgctgctgtttgtggatggcggctggatggtggatgtgcgggaggatgccaaggaggaccacgagaggacccaccagatggtgctgctgaggaagctgtgcctgcccatgctgtgcttcctgctgcacaccatcctgcacagcacaggccagtaccaggagtgcctgcagctggccgacatggtgtcctctgagcggcacaagctgtacctggtgttcagcaaggaggagctgaggaagctgctgcagaagctgcgggagagcagcctgatgctgctggaccagggcctggaccccctgggctatgagatccagctgtag

SEQ ID NO: 146586 - DNA, 1623 bp, synthetic construct
  misc_feature 1..1623: note = Description of Artificial Sequence: Synthetic coding sequence
  source 1..1623: mol_type = other DNA
atggtgaggacagatggccacaccctgtctgagaagaggaactaccaggtgaccaacagcatgtttggagccagcaggaagaagtttgtggagggcgtggacagcgactaccatgatgagaacatgtactacagccagagctccatgttcccccacaggtctgagaaggacatgctggccagccccagcaccagcggccagctgagccagtttggagccagcctgtatggccagcagagcgccctgggcctgcccatgaggggcatgagcaacaacaccccccagctgaacagaagcctgagccagggcacccagctgcccagccacgtgacccccaccaccggggtgcccaccatgagcctgcacaccccacccagccccagccggggcatcctgcccatgaaccccaggaacatgatgaaccacagccaggtgggccagggcatcggcatccccagcaggaccaacagcatgagcagcagcggcctgggcagccccaacagaagcagccccagcatcatctgcatgcccaagcagcagcccagccggcagcccttcaccgtgaacagcatgagcggcttcggcatgaacagaaaccaggccttcggcatgaacaacagcctgagcagcaacatcttcaacggcacagatggctctgaaaatgtgacaggcctggacctgagtgacttccctgccctggccgacaggaacagaagagagggcagcggcaaccccacccccctcatcaaccccctggccggccgggccccctacgtgggcatggtgaccaagccagccaatgagcagagccaggacttcagcatccacaatgaagacttccctgccctgcccggcagcagctacaaggaccccaccagcagcaatgatgacagcaagagcaacctgaacaccagcggcaagaccaccagcagcacagatggccccaagtttcctggggacaagagcagcaccacccagaacaacaaccagcagaagaagggcatccaggtgctgcctgatggccgggtgaccaacatcccccagggcatggtgacagaccagtttggcatgattggcctgctgaccttcatccgggctgctgagacagatcctggcatggtgcacctggccctgggcagtgacctgaccaccctgggcctgaacctgaacagcccagaaaatctctaccccaagtttgccagcccctgggccagcagcccctgccggccccaggacatcgacttccacgtgcccagcgagtacctgaccaacatccacatccgggacaagctggccgccatcaagctgggccgctatggagaggacctgctcttctacctgtactacatgaatggaggagatgtgctgcagctgctggccgctgtggagctgttcaacagagactggagataccacaaggaggagcgggtgtggatcacccgggcccctggcatggagcccaccatgaagaccaacacctatgaaagaggcacctactacttctttgactgcctgaactggaggaaggtggccaaggagttccacctggagtatgacaagctggaggagcggccccacctgcccagcaccttcaactacaacccagcccagcaggccttctag

SEQ ID NO: 146587 - DNA, 78 bp, synthetic construct
  misc_feature 1..78: note = Description of Artificial Sequence: Synthetic coding sequence
  source 1..78: mol_type = other DNA
atggtgaggacagatggccacaccctgtctgagaagaggaactaccaggtgaccaacagcatgtttggagccagctag

SEQ ID NO: 146588 - DNA, 552 bp, synthetic construct
  misc_feature 1..552: note = Description of Artificial Sequence: Synthetic coding sequence
  source 1..552: mol_type = other DNA
atggtgaggacagatggccacaccctgtctgagaagaggaactaccaggtgaccaacagcatgtttggagccagcaggaagaagtttgtggagggcgtggacagcgactaccatgatgagaacatgtactacagccagagctccatgttcccccacaggtctgagaaggacatgctggccagccccagcaccagcggccagctgagccagtttggagccagcctgtatggccagcagagcgccctgggcctgcccatgaggggcatgagcaacaacaccccccagctgaacagaagcctgagccagggcacccagctgcccagccacgtgacccccaccaccggggtgcccaccatgagcctgcacaccccacccagccccagccggggcatcctgcccatgaaccccaggaacatgatgaaccacagccaggtgggccagggcatcggcatccccagcaggaccaacagcatgagcagcagcggcctgggcagccccaacagaagcagccccagcatcatctgcatgcccaagcagcagcccagcaggtag

SEQ ID NO: 146589 - DNA, 1623 bp, synthetic construct; identical to SEQ ID NO: 146586
  misc_feature 1..1623: note = Description of Artificial Sequence: Synthetic coding sequence
  source 1..1623: mol_type = other DNA

SEQ ID NO: 146590 - DNA, 576 bp, synthetic construct
  misc_feature 1..576: note = Description of Artificial Sequence: Synthetic coding sequence
  source 1..576: mol_type = other DNA
atggtgacagaccagtttggcatgattggcctgctgaccttcatccgggctgctgagacagaccccggcatggtgcacctggccctgggcagtgacctgaccaccctgggcctgaacctgaacagccctgagaacctgtaccccaagtttgccagcccctgggccagcagcccctgccggccccaggacatcgacttccacgtgcccagcgagtacctgaccaacatccacatccgggacaagctggccgccatcaagctgggccgctacggggaggacctgctcttctacctgtactacatgaatggaggagatgtgctgcagctgctggccgctgtggagctgttcaacagagactggagataccacaaggaggagcgggtgtggatcacccgggcccctggcatggagcccaccatgaagaccaacacctatgagcggggcacctactacttctttgactgcctgaactggaggaaggtggccaaggagttccacctggagtatgacaagctggaggagcggccccacctgcccagcaccttcaactacaacccagcccagcaggccttctag

SEQ ID NO: 146591 - DNA, 966 bp, synthetic construct
  misc_feature 1..966: note = Description of Artificial Sequence: Synthetic coding sequence
  source 1..966: mol_type = other DNA
atggtgaggacagatggccacaccctgtctgagaagaggaactaccaggtgaccaacagcatgtttggagccagcaggaagaagtttgtggagggcgtggacagcgactaccatgatgagaacatgtactacagccagagctccatgttcccccacaggtctgagaaggacatgctggccagccccagcaccagcggccagctgagccagtttggagccagcctgtatggccagcagagcgccctgggcctgcccatgaggggcatgagcaacaacaccccccagctgaacagaagcctgagccagggcacccagctgcccagccacgtgacccccaccaccggggtgcccaccatgagcctgcacaccccacccagccccagccggggcatcctgcccatgaaccccaggaacatgatgaaccacagccaggtgggccagggcatcggcatccccagcaggaccaacagcatgagcagcagcggcctgggcagccccaacagaagcagccccagcatcatctgcatgcccaagcagcagcccagccggcagcccttcaccgtgaacagcatgagcggcttcggcatgaacagaaaccaggccttcggcatgaacaacagcctgagcagcaacatcttcaacggcacagatggctctgaaaatgtgacaggcctggacctgagtgacttccctgccctggccgacaggaacagaagagagggcagcggcaaccccacccccctcatcaaccccctggccggccgggccccctacgtgggcatggtgaccaagccagccaatgagcagagccaggacttcagcatccacaatgaagacttccctgccctgcccggcagcagctacaaggaccccaccagcagcaatgatgacagcaagagcaacctgaacaccagcggcaagaccaccagcagcacagatggccccaagtttcctggggacaagtag

SEQ ID NO: 146592 - DNA, 978 bp, synthetic construct
  misc_feature 1..978: note = Description of Artificial Sequence: Synthetic coding sequence
  source 1..978: mol_type = other DNA
atgagcacagcccgggagcagcccatcttcagcacccgggcccacgtgttccagattgatcctgccaccaagaggaactggatcccagctgggaagcacgccctgactgtgtcctacttctatgatgccaccagaaatgtgtaccgcatcatcagcattggaggagccaaggccatcatcaacagcacagtgacccccaacatgaccttcaccaagaccagccagaagtttggccagtgggccgacagccgggccaacacagtgtatggcctgggctttgccagcgagcagcacctgacccaggtgccccccagccccctggtgtctgccaatggacctggagaggagaagctgttccgcagccagagcgcagatgcccctggccccacagagcgggagcggctgaagaagatgctgtctgagggctctgtgggggaggtgcagtgggaggccgagttctttgccctgcaggacagcaacaacaagctggccggggccctgcgggaggccaatgctgctgctgcccagtggaggcagcagctggaggcccagagagctgaggccgagcggctgcggcagagggtggccgagctggaggcccaggccgccagcgaggtgacccccactggagagaaggagggcctgggccagggccagagcctggagcagctggaggccctggtgcagaccaaggaccaggagatccagaccctgaagagccagacaggaggcccccgggaggccctggaggccgctgagcgggaggagacccagcagaaggtgcaggacctggagaccagaaatgctgagctggagcaccagctgcgggccatggagaggagcctggaggaggcccgggcagagcgggagcgggcccgggcagaggtgggccgggccgcccagctgctggatgtgtccctgtttgagctgtctgagctgcgggagggcctggcccggctggccgaggccgccccctag

SEQ ID NO: 146593 - DNA, 1716 bp, synthetic construct
  misc_feature 1..1716: note = Description of Artificial Sequence: Synthetic coding sequence
  source 1..1716: mol_type = other DNA
atgctggagaccatcctgaggatgctggacaatgacagcatcctggtggatgccatcaggaagatcaaggatgatgtggagtactacgtggacagcagccaggaccctgactttgaggagaatgagttcctgtatgatgacctggacctggaggacatcccccaggccctggtggccaccagcccccccagccacagccacatggaggatgagatcttcaaccagagcagcagcacccccaccagcaccaccagcagcagccccatcccccccagccctgccaactgcaccacagaaaattctgaagatgacaagaagaggggccgcagcacagattctgaggtgtcccagagccctgccaagaatggcagcaagcctgtgcacagcaaccagcacccccagagccctgctgtgccccccacctaccccagcggccccccacctgctgccagcgccctgagcaccaccccaggcaacaacggggtgcctgccccagctgccccacccagcgccctgggccccaaggccagccctgcccccagccacaacagcggcaccccagccccctatgcccaggccgtggcccccccagcccccagcggccccagcaccacccagcccaggcctccttctgtgcagcccagcggcggcggcggcggcggcagcggcggcggcggcagcagcagcagcagcaacagcagcgctgggggcggggccggcaagcagaatggagccaccagctacagctctgtggtggccgacagccctgctgaggtggccctgagcagcagcggcggcaacaatgccagcagccaggccctgggcccccccagcggcccccacaaccccccacccagcaccagcaaggagcccagcgctgctgcccccactggagctggaggagtggcccctggcagcggcaacaacagcggcggccccagcctgctggtgcccctgcctgtgaacccccccagcagccccacccccagcttcagtgatgccaaggctgctggggccctgctgaatggccccccccagttcagcacagcccctgagatcaaggcccctgagcccctgagcagcctgaagtccatggccgagagagctgccatcagcagcggcatcgaggaccctgtgcccaccctgcacctgacagagcgggacatcatcctgagcagcaccagcgcccccccagccagcgcccagccccccctgcagctgtctgaggtgaacatccccctgagcctgggcgtgtgccccctgggccctgtgcccctgaccaaggagcagctgtaccagcaggccatggaggaggccgcctggcaccacatgccccaccccagcgacagcgagcgcatccggcagtacctgcccaggaacccctgccccaccccaccctaccaccaccagatgcccccaccccacagcgacacagtggagttctaccagaggctgagcacagagaccctcttcttcatcttctactacctggagcccagagatgtgaggacagcctgggtggacagcgaggccggccccctgcggcacaccagcgcccccctgcctgtggcccactggctgacccggggccccagccctgccctgctgcagcagccccagagccggcccacccccctgtgcagcagcgcccacagccaggccagcctggagaccactggagagctgagcagccccctgcccacccccctgctgtag

SEQ ID NO: 146594 - DNA, 2262 bp, synthetic construct
  misc_feature 1..2262: note = Description of Artificial Sequence: Synthetic coding sequence
  source 1..2262: mol_type = other DNA
atggctgacaagaggaagctgcagggcgagattgaccgctgcctgaagaaggtgtctgaaggagtggagcagtttgaggacatctggcagaagctgcacaatgctgccaatgccaaccagaaggagaagtatgaggccgacctgaagaaggagatcaagaagctgcagaggctgcgggaccagatcaagacctgggtggccagcaatgagatcaaggacaagaggcagctgattgacaacaggaagctgattgagacccagatggagcgcttcaaggtggtggagcgggagaccaagaccaaggcctacagcaaggagggcctgggcctggcccagaaggtggaccctgcccagaaggagaaggaggaggtgggccagtggctgaccaacaccatcgacaccctgaacatgcaggtggaccagtttgagagcgaggtggagagcctgtctgtgcagaccaggaagaagaagggggacaaggacaagcaggaccgcatcgagggcctgaagaggcacatcgagaagcaccgctaccacgtgaggatgctggagaccatcctgaggatgctggacaatgacagcatcctggtggatgccatcaggaagatcaaggatgatgtggagtactacgtggacagcagccaggaccctgactttgaagaaaatgagttcctgtatgatgacctggacctggaggacatcccccaggccctggtggccaccagcccccccagccacagccacatggaggatgagatcttcaaccagagcagcagcacccccaccagcaccaccagcagcagccccatcccccccagccctgccaactgcaccacagagaacagtgaagatgacaagaagaggggccgcagcacagacagcgaggtgtcccagagccctgccaagaatggcagcaagcctgtgcacagcaaccagcacccccagagccctgctgtgccccccacctaccccagcggccccccacctgctgccagcgccctgagcaccaccccaggcaacaatggagtgcctgccccagctgcccctccttctgccctgggccccaaggccagccctgcccccagccacaacagcggcaccccagccccctatgcccaggccgtggcccccccagcccccagcggccccagcaccacccagccccggccccccagcgtgcagcccagcggcggcggcggcggcggcagcggcggcggcggcagcagcagcagcagcaacagcagcgctgggggcggggccggcaagcagaatggagccaccagctacagctctgtggtggccgacagccctgctgaggtggccctgagcagcagcggcggcaacaatgccagcagccaggccctgggccccccatctggcccccacaaccccccacccagcaccagcaaggagcccagcgctgctgcccccaccggggccggcggcgtggcccctggcagcggcaacaacagcggcggccccagcctgctggtgcccctgcctgtgaacccccccagcagccccacccccagcttcagtgatgccaaggccgccggggccctgctgaatggaccaccccagttcagcacagcccctgagatcaaggcccctgagcccctgagcagcctgaagtccatggccgagcgggccgccatcagcagcggcattgaagatcctgtgcccaccctgcacctgacagagcgggacatcatcctgagcagcaccagcgcccccccagccagcgcccagccccccctgcagctgtctgaggtgaacatccccctgagcctgggcgtgtgccccctgggccctgtgcccctgaccaaggagcagctgtaccagcaggccatggaggaggccgcctggcaccacatgccccaccccagcgacagcgagcgcatccggcagtacctgcccaggaacccctgccccaccccaccctaccaccaccagatgcccccaccccacagcgacacagtggagttctaccagaggctgagcacagagaccctcttcttcatcttctactacctggagggcaccaaggcccagtacctggccgccaaggccctgaagaagcagagctggaggttccacaccaagtacatgatgtggttccagagacatgaggagcccaagaccatcacagatgaatttgagcagggcacctacatctactttgattatgagaagtggggccagaggaagaaggagggcttcacctttgagtaccgctacctggaggaccgggacctgcagtag

SEQ ID NO: 146595 - DNA, 867 bp, synthetic construct
  misc_feature 1..867: note = Description of Artificial Sequence: Synthetic coding sequence
  source 1..867: mol_type = other DNA
tgaaaggagcccagcgctgctgcccccaccggggccggcggcgtggcccctggcagcggcaacaacagcggcggccccagcctgctggtgcccctgcctgtgaacccccccagcagccccacccccagcttcagtgatgccaaggccgccggggccctgctgaatggaccaccccagttcagcacagcccctgagatcaaggcccctgagcccctgagcagcctgaagtccatggccgagcgggccgccatcagcagcggcattgaagatcctgtgcccaccctgcacctgacagagcgggacatcatcctgagcagcaccagcgcccccccagccagcgcccagccccccctgcagctgtctgaggtgaacatccccctgagcctgggcgtgtgccccctgggccctgtgcccctgaccaaggagcagctgtaccagcaggccatggaggaggccgcctggcaccacatgccccaccccagcgacagcgagcgcatccggcagtacctgcccaggaacccctgccccaccccaccctaccaccaccagatgcccccaccccacagcgacacagtggagttctaccagaggctgagcacagagaccctcttcttcatcttctactacctggagggcaccaaggcccagtacctggccgccaaggccctgaagaagcagagctggaggttccacaccaagtacatgatgtggttccagagacatgaggagcccaagaccatcacagatgaatttgagcagctggcccagagcctgagcctgaccaagtacagcagcctgtggctgagcgcccagcccggcaccccacccagccacccccccctgggccagctgctgggcctgctgtag

SEQ ID NO: 146596 - DNA, 2304 bp, synthetic construct
  misc_feature 1..2304: note = Description of Artificial Sequence: Synthetic coding sequence
  source 1..2304: mol_type = other DNA
atgagccgcagcccagatgccaaggaggaccctgtggagtgccccctgtgcatggagcccctggagattgatgacatcaacttcttcccctgcacctgtggctaccagatctgccgcttctgctggcaccgcatcagaacagatgaaaatggcctgtgcccagcctgcaggaagccctacccagaggaccctgctgtgtacaagcccctgagccaggaggagctgcagaggatcaagaatgagaagaagcagaagcagaatgaaaggaagcagaagatcagtgaaaataggaagcacctggcctctgtgcgggtggtgcagaagaacctggtgtttgtggtgggcctgagccagaggctggccgaccctgaggtgctgaagaggcctgagtactttgggaagtttgggaagatccacaaggtggtgatcaacaacagcaccagctatgccggcagccagggccccagcgccagcgcctacgtgacctacatccgctcagaagatgccctgcgggccatccagtgtgtgaacaacgtggtggtggatggccgcaccctgaaggccagcctgggcaccaccaagtactgcagctacttcctgaagaacatgcagtgccccaagccagactgcatgtacctgcacgagctgggagatgaggccgccagcttcaccaaggaggagatgcaggccggcaagcaccaggagtatgagcagaagctgctgcaggagctgtacaagctgaaccccaacttcctgcagctgagcacaggctctgtggacaagaacaagaacaaggtgacccccctgcagagatatgacacccccatcgacaagcccagcgacagcctgagcattggaaatggagacaacagccagcagatcagcaacagcgacacccccagccccccacctggcctgagcaagagcaaccctgtgatccccatcagcagcagcaaccacagcgcccggagcccctttgagggcgctgtgacagagagccagagcctcttcagtgacaacttccgccaccccaaccccatccccagcggcctgccccccttccccagcagcccccagaccagcagtgactggcccacagcccctgagccccagagcctcttcaccagcgagaccatccctgtgagcagcagcacagactggcaggccgcctttggatttggcagcagcaagcagccagaagatgacctgggctttgacccctttgatgtgaccaggaaggccctggccgacctgattgagaaggagctgtctgtgcaggaccagcccagcctgagccccaccagcctgcagaacagcagcagccacaccaccacagccaagggccctggcagcggcttcctgcaccctgctgctgccaccaatgccaacagcctgaacagcaccttctctgtgctgccccagcgcttcccccagttccagcagcacagagctgtgtacaacagcttctccttccctggccaggccgcccgctacccctggatggccttccccagaaattccatcatgcacctgaaccacacagccaaccccaccagcaacagcaacttcctggacctgaacctgcccccccagcacaacacaggcctgggcggcatccctgtggccgacaacagcagctctgtggagagcctgaacatgaaggagtggcaggacggcctgcgggccctgctgcccaacatcaacatcaactttggaggcctgcccaacagcagcagccccagcaatgccaaccacagcgcccccaccagcaacacagccaccacagacagcctgtcctgggacagccctggctcctggacagatcctgccatcatcaccggcatcccagccagcagcggcaacagcctggacagcctgcaggatgacaaccccccccactggctgaagagcctgcaggccctgacagagatggatggccccagcgctgcccccagccagacccaccacagcgcccccttcagcacccagatccccctgcaccgggcctcctggaacccctaccccccacccagcaaccccagcagcttccacagccccccacctggcatctactacagagtgcagcactggacagccatccggcagagaggagccaccatcagaaaatgtcgcatctgccccaccctcttcagccccagccagcccaccacccacagcagcctgctgatctcctatgtgctgaagaaccctgtgcctgaccagttcttcttcagcctgaccccagatgccatgaggagccagggccactaccacctgttcatcaactgcaagaacttctgctag

SEQ ID NO: 146597 - DNA, 1728 bp, synthetic construct
  misc_feature 1..1728: note = Description of Artificial Sequence: Synthetic coding sequence
  source 1..1728: mol_type = other DNA
atgagccgcagcccagatgccaaggaggaccctgtggagtgccccctgtgcatggagcccctggagattgatgacatcaacttcttcccctgcacctgtggctaccagatctgccgcttctgctggcaccgcatcagaacagatgaaaatggcctgtgcccagcctgcaggaagccctacccagaggaccctgctgtgtacaagcccctgagccaggaggagctgcagaggatcaagaatgagaagaagcagaagcagaatgaaaggaagcagaagatcagtgaaaataggaagcacctggcctctgtgcgggtggtgcagaagaacctggtgtttgtggtgggcctgagccagaggctggccgaccctgaggtgctgaagaggcctgagtactttgggaagtttgggaagatccacaaggtggtgatcaacaacagcaccagctatgccggcagccagggccccagcgccagcgcctacgtgacctacatccgctcagaagatgccctgcgggccatccagtgtgtgaacaacgtggtggtggatggccgcaccctgaaggccagcctgggcaccaccaagtactgcagctacttcctgaagaacatgcagtgccccaagccagactgcatgtacctgcacgagctgggagatgaggccgccagcttcaccaaggaggagatgcaggccggcaagcaccaggagtatgagcagaagctgctgcaggagctgtacaagctgaaccccaacttcctgcagctgagcacaggctctgtggacaagaacaagaacaaggtgacccccctgcagagatatgacacccccatcgacaagcccagcgacagcctgagcattggaaatggagacaacagccagcagatcagcaacagcgacacccccagccccccacctggcctgagcaagagcaaccctgtgatccccatcagcagcagcaaccacagcgcccggagcccctttgagggcgctgtgacagagagccagagcctcttcagtgacaacttccgccaccccaaccccatccccagcggcctgccccccttccccagcagcccccagaccagcagtgactggcccacagcccctgagccccagagcctcttcaccagcgagaccatccctgtgagcagcagcacagactggcaggccgcctttggatttggcagcagcaagcagccagaagatgacctgggctttgacccctttgatgtgaccaggaaggccctggccgacctgattgagaaggagctgtctgtgcaggaccagcccagcctgagccccaccagcctgcagaacagcagcagccacaccaccacagccaagggccctggcagcggcttcctgcaccctgctgctgccaccaatgccaacagcctgaacagcaccttctctgtgctgccccagcgcttcccccagttccagcagcacagagctgtgtacaacagcttctccttccctggccaggccgcccgctacccctggatggccttccccagaaattccatcatgcacctgaaccacacagccaaccccaccagcaacagcaacttcctggacctgaacctgcccccccagcacaacacaggcctgggcggcatccctgtggccggggaggaggaggtgaaggtgtccaccatgcccctgagcaccagcagccacagcctgcagcagggccagcagcccaccagcctgcacaccaccgtggcctag

SEQ ID NO: 146598 - DNA, 1302 bp, synthetic construct
  misc_feature 1..1302: note = Description of Artificial Sequence: Synthetic coding sequence
  source 1..1302: mol_type = other DNA
atgagccgcagcccagatgccaaggaggaccctgtggagtgccccctgtgcatggagcccctggagattgatgacatcaacttcttcccctgcacctgtggctaccagatctgccgcttctgctggcaccgcatcagaacagatgaaaatggcctgtgcccagcctgcaggaagccctacccagaggaccctgctgtgtacaagcccctgagccaggaggagctgcagaggatcaagaatgagaagaagcagaagcagaatgaaaggaagcagaagatcagtgaaaataggaagcacctggcctctgtgcgggtggtgcagaagaacctggtgtttgtggtgggcctgagccagaggctggccgaccctgaggtgctgaagaggcctgagtactttgggaagtttgggaagatccacaaggtggtgatcaacaacagcaccagctatgccggcagccagggccccagcgccagcgcctacgtgacctacatccgctcagaagatgccctgcgggccatccagtgtgtgaacaacgtggtggtggatggccgcaccctgaaggccagcctgggcaccaccaagtactgcagctacttcctgaagaacatgcagtgccccaagccagactgcatgtacctgcacgagctgggagatgaggccgccagcttcaccaaggaggagatgcaggccggcaagcaccaggagtatgagcagaagctgctgcaggagctgtacaagctgaaccccaacttcctgcagctgagcacaggctctgtggacaagaacaagaacaaggtgacccccctgcagagatatgacacccccatcgacaagcccagcgacagcctgagcattggaaatggagacaacagccagcagatcagcaacagcgacacccccagccccccacctggcctgagcaagagcaaccctgtgatccccatcagcagcagcaaccacagcgcccggagcccctttgagggcgctgtgacagagagccagagcctcttcagtgacaacttccgccaccccaaccccatccccagcggcctgccccccttccccagcagcccccagaccagcagtgactggcccacagcccctgagccccagagcctcttcaccagcgagaccatccctgtgagcagcagcacagactggcaggccgcctttggatttggcagcagcaagcagccagaagatgacctgggctttgacccctttgatgtgaccaggaaggccctggccgacctgacagagcccatcgagaggaagaggctggccgtgctgaagagaagatag

SEQ ID NO: 146599 - DNA, 1920 bp, synthetic construct
  misc_feature 1..1920: note = Description of Artificial Sequence: Synthetic coding sequence
  source 1..1920: mol_type = other DNA
atgagccgcagcccagatgccaaggaggaccctgtggagtgccccctgtgcatggagcccctggagattgatgacatcaacttcttcccctgcacctgtggctaccagatctgccgcttctgctggcaccgcatcagaacagatgaaaatggcctgtgcccagcctgcaggaagccctacccagaggaccctgctgtgtacaagcccctgagccaggaggagctgcagaggatcaagaatgagaagaagcagaagcagaatgaaaggaagcagaagatcagtgaaaataggaagcacctggcctctgtgcgggtggtgcagaagaacctggtgtttgtggtgggcctgagccagaggctggccgaccctgaggtgctgaagaggcctgagtactttgggaagtttgggaagatccacaaggtggtgatcaacaacagcaccagctatgccggcagccagggccccagcgccagcgcctacgtgacctacatccgctcagaagatgccctgcgggccatccagtgtgtgaacaacgtggtggtggatggccgcaccctgaaggccagcctgggcaccaccaagtactgcagctacttcctgaagaacatgcagtgccccaagccagactgcatgtacctgcacgagctgggagatgaggccgccagcttcaccaaggaggagatgcaggccggcaagcaccaggagtatgagcagaagctgctgcaggagctgtacaagctgaaccccaacttcctgcagctgagcacaggctctgtggacaagaacaagaacaaggtgacccccctgcagagccccatcgacaagcccagcgacagcctgagcattggaaatggagacaacagccagcagatcagcaacagcgacacccccagccccccacctggcctgagcaagagcaaccctgtgatccccatcagcagcagcaaccacagcgcccggagcccctttgaaggagctgtgacagagagccagagcctcttcagtgacaacttccgccaccccaaccccatccccagcggcctgccccccttccccagcagcccccagaccagcagtgactggcccacagcccctgagccccagagcctcttcaccagcgagaccatccctgtgagcagcagcacagactggcaggccgccttcggcttcggcagcagcaagcagccagaagatgacctgggctttgacccctttgatgtgaccaggaaggccctggccgacctgattgagaaggagctgtctgtgcaggaccagcccagcctgagccccaccagcctgcagaacagcagcagccacaccaccacagccaagggccctggcagcggcttcctgcaccctgctgctgccaccaatgccaacagcctgaacagcaccttctctgtgctgccccagcgcttcccccagttccagcagcacagagctgtgtacaacagcttctccttccctggccaggccgcccgctacccctggatggccttccccaggaacagcatcatgcacctgaaccacacagccaaccccaccagcaacagcaacttcctggacctgaacctgcccccccagcacaacacaggcctgggcggcatccctgtggccggcatcccagccagcagcggcaacagcctggacagcctgcaggatgacaaccccccccactggctgaagagcctgcaggccctgacagagatggatggccccagcgctgcccccagccagacccaccacagcgcccccttcagcacccagatccccctgcaccgggcctcctggaacccctaccccccacccagcaaccccagcagcttccacagccccccacctggcttccagacagccttccggccccccagcaagacccccacagacctgctgcagagcagcaccctggacagacactag

SEQ ID NO: 146600 - DNA, 1302 bp, synthetic construct; identical to SEQ ID NO: 146598
  misc_feature 1..1302: note = Description of Artificial Sequence: Synthetic coding sequence
  source 1..1302: mol_type = other DNA

SEQ ID NO: 146601 - DNA, 1929 bp, synthetic construct
  misc_feature 1..1929: note = Description of Artificial Sequence: Synthetic coding sequence
  source 1..1929: mol_type = other DNA
atgagccgcagcccagatgccaaggaggaccctgtggagtgccccctgtgcatggagcccctggagattgatgacatcaacttcttcccctgcacctgtggctaccagatctgccgcttctgctggcaccgcatcagaacagatgaaaatggcctgtgcccagcctgcaggaagccctacccagaggaccctgctgtgtacaagcccctgagccaggaggagctgcagaggatcaagaatgagaagaagcagaagcagaatgaaaggaagcagaagatcagtgaaaataggaagcacctggcctctgtgcgggtggtgcagaagaacctggtgtttgtggtgggcctgagccagaggctggccgaccctgaggtgctgaagaggcctgagtactttgggaagtttgggaagatccacaaggtggtgatcaacaacagcaccagctatgccggcagccagggccccagcgccagcgcctacgtgacctacatccgctcagaagatgccctgcgggccatccagtgtgtgaacaacgtggtggtggatggccgcaccctgaaggccagcctgggcaccaccaagtactgcagctacttcctgaagaacatgcagtgccccaagccagactgcatgtacctgcacgagctgggagatgaggccgccagcttcaccaaggaggagatgcaggccggcaagcaccaggagtatgagcagaagctgctgcaggagctgtacaagctgaaccccaacttcctgcagctgagcacaggctctgtggacaagaacaagaacaaggtgacccccctgcagagatatgacacccccatcgacaagcccagcgacagcctgagcattggaaatggagacaacagccagcagatcagcaacagcgacacccccagccccccacctggcctgagcaagagcaaccctgtgatccccatcagcagcagcaaccacagcgcccggagcccctttgagggcgctgtgacagagagccagagcctcttcagtgacaacttccgccaccccaaccccatccccagcggcctgccccccttccccagcagcccccagaccagcagtgactggcccacagcccctgagccccagagcctcttcaccagcgagaccatccctgtgagcagcagcacagactggcaggccgcctttggatttggcagcagcaagcagccagaagatgacctgggctttgacccctttgatgtgaccaggaaggccctggccgacctgattgagaaggagctgtctgtgcaggaccagcccagcctgagccccaccagcctgcagaacagcagcagccacaccaccacagccaagggccctggcagcggcttcctgcaccctgctgctgccaccaatgccaacagcctgaacagcaccttctctgtgctgccccagcgcttcccccagttccagcagcacagagctgtgtacaacagcttctccttccctggccaggccgcccgctacccctggatggccttccccagaaattccatcatgcacctgaaccacacagccaaccccaccagcaacagcaacttcctggacctgaacctgcccccccagcacaacacaggcctgggcggcatccctgtggccggcatcccagccagcagcggcaacagcctggacagcctgcaggatgacaaccccccccactggctgaagagcctgcaggccctgacagagatggatggccccagcgctgcccccagccagacccaccacagcgcccccttcagcacccagatccccctgcaccgggcctcctggaacccctaccccccacccagcaaccccagcagcttccacagccccccacctggcttccagacagccttccggccccccagcaagacccccacagacctgctgcagagcagcaccctggacagacactag

SEQ ID NO: 146602 - DNA, 1719 bp, synthetic construct
  misc_feature 1..1719: note = Description of Artificial Sequence: Synthetic coding sequence
  source 1..1719: mol_type = other DNA
atgagccgcagcccagatgccaaggaggaccctgtggagtgccccctgtgcatggagcccctggagattgatgacatcaacttcttcccctgcacctgtggctaccagatctgccgcttctgctggcaccgcatcagaacagatgaaaatggcctgtgcccagcctgcaggaagccctacccagaggaccctgctgtgtacaagcccctgagccaggaggagctgcagaggatcaagaatgagaagaagcagaagcagaatgaaaggaagcagaagatcagtgaaaataggaagcacctggcctctgtgcgggtggtgcagaagaacctggtgtttgtggtgggcctgagccagaggctggccgaccctgaggtgctgaagaggcctgagtactttgggaagtttgggaagatccacaaggtggtgatcaacaacagcaccagctatgccggcagccagggccccagcgccagcgcctacgtgacctacatccgctcagaagatgccctgcgggccatccagtgtgtgaacaacgtggtggtggatggccgcaccctgaaggccagcctgggcaccaccaagtactgcagctacttcctgaagaacatgcagtgccccaagccagactgcatgtacctgcacgagctgggagatgaggccgccagcttcaccaaggaggagatgcaggccggcaagcaccaggagtatgagcagaagctgctgcaggagctgtacaagctgaaccccaacttcctgcagctgagcacaggctctgtggacaagaacaagaacaaggtgacccccctgcagagccccatcgacaagcccagcgacagcctgagcattggaaatggagacaacagccagcagatcagcaacagcgacacccccagccccccacctggcctgagcaagagcaaccctgtgatccccatcagcagcagcaaccacagcgcccggagcccctttgaaggagctgtgacagagagccagagcctcttcagtgacaacttccgccaccccaaccccatccccagcggcctgccccccttccccagcagcccccagaccagcagtgactggcccacagcccctgagccccagagcctcttcaccagcgagaccatccctgtgagcagcagcacagactggcaggccgccttcggcttcggcagcagcaagcagccagaagatgacctgggctttgacccctttgatgtgaccaggaaggccctggccgacctgattgagaaggagctgtctgtgcaggaccagcccagcctgagccccaccagcctgcagaacagcagcagccacaccaccacagccaagggccctggcagcggcttcctgcaccctgctgctgccaccaatgccaacagcctgaacagcaccttctctgtgctgccccagcgcttcccccagttccagcagcacagagctgtgtacaacagcttctccttccctggccaggccgcccgctacccctggatggccttccccaggaacagcatcatgcacctgaaccacacagccaaccccaccagcaacagcaacttcctggacctgaacctgcccccccagcacaacacaggcctgggcggcatccctgtggccggggaggaggaggtgaaggtgtccaccatgcccctgagcaccagcagccacagcctgcagcagggccagcagcccaccagcctgcacaccaccgtggcctag

SEQ ID NO: 146603 - DNA, 2142 bp, synthetic construct
  misc_feature 1..2142: note = Description of Artificial Sequence: Synthetic coding sequence
  source 1..2142: mol_type = other DNA
atgagccgcagcccagatgccaaggaggaccctgtggagtgccccctgtgcatggagcccctggagattgatgacatcaacttcttcccctgcacctgtggctaccagatctgccgcttctgctggcaccgcatcagaacagatgaaaatggcctgtgcccagcctgcaggaagccctacccagaggaccctgctgtgtacaagcccctgagccaggaggagctgcagaggatcaagaatgagaagaagcagaagcagaatgaaaggaagcagaagatcagtgaaaataggaagcacctggcctctgtgcgggtggtgcagaagaacctggtgtttgtggtgggcctgagccagaggctggccgaccctgaggtgctgaagaggcctgagtactttgggaagtttgggaagatccacaaggtggtgatcaacaacagcaccagctatgccggcagccagggccccagcgccagcgcctacgtgacctacatccgctcagaagatgccctgcgggccatccagtgtgtgaacaacgtggtggtggatggccgcaccctgaaggccagcctgggcaccaccaagtactgcagctacttcctgaagaacatgcagtgccccaagccagactgcatgtacctgcacgagctgggagatgaggccgccagcttcaccaaggaggagatgcaggccggcaagcaccaggagtatgagcagaagctgctgcaggagctgtacaagctgaaccccaacttcctgcagctgagcacaggctctgtggacaagaacaagaacaaggtgacccccctgcagagatatgacacccccatcgacaagcccagcgacagcctgagcattggaaatggagacaacagccagcagatcagcaacagcgacacccccagccccccacctggcctgagcaagagcaaccctgtgatccccatcagcagcagcaaccacagcgcccggagcccctttgagggcgctgtgacagagagccagagcctcttcagtgacaacttccgccaccccaaccccatccccagcggcctgccccccttccccagcagcccccagaccagcagtgactggcccacagcccctgagccccagagcctcttcaccagcgagaccatccctgtgagcagcagcacagactggcaggccgcctttggatttggcagcagcaagcagccagaagatgacctgggctttgacccctttgatgtgaccaggaaggccctggccgacctgattgagaaggagctgtctgtgcaggaccagcccagcctgagccccaccagcctgcagaacagcagcagccacaccaccacagccaagggccctggcagcggcttcctgcaccctgctgctgccaccaatgccaacagcctgaacagcaccttctctgtgctgccccagcgcttcccccagttccagcagcacagagctgtgtacaacagcttctccttccctggccaggccgcccgctacccctggatggccttccccagaaattccatcatgcacctgaaccacacagccaaccccaccagcaacagcaacttcctggacctgaacctgcccccccagcacaacacaggcctgggcggcatccctgtggccgacaacagcagctctgtggagagcctgaacatgaaggagtggcaggacggcctgcgggccctgctgcccaacatcaacatcaactttggaggcctgcccaacagcagcagccccagcaatgccaaccacagcgcccccaccagcaacacagccaccacagacagcctgtcctgggacagccctggctcctggacagatcctgccatcatcaccggcatcccagccagcagcggcaacagcctggacagcctgcaggatgacaaccccccccactggctgaagagcctgcaggccctgacagagatggatggccccagcgctgcccccagccagacccaccacagcgcccccttcagcacccagatccccctgcaccgggcctcctggaacccctaccccccacccagcaaccccagcagcttccacagccccccacctggcttccagacagccttccggccccccagcaagacccccacagacctgctgcagagcagcaccctggacagacactag

SEQ ID NO: 146604 - DNA, 1674 bp, synthetic construct
  misc_feature 1..1674: note = Description of Artificial Sequence: Synthetic coding sequence
  source 1..1674: mol_type = other DNA
atgcccaaggagaagtatgagcccccagaccccaggaggatgtacaccatcatgagcagcgaggaggccgccaacgggaagaagagccactgggccgagctggagatcagcggcaaggtgcgcagcctgagcgccagcctgtggagcctgacccacctgacagccctgcacctgagtgacaacagcctgagccgcatccccagcgacatcgccaagctgcacaacctggtgtacctggacctgagcagcaacaagatccgcagcctgcctgctgagctgggcaacatggtgtccctgcgggagctgcacctgaacaacaacctgctgcgggtgctgccctttgagctgggcaagctgttccagctgcagaccctgggcctgaagggcaaccccctgacccaggacatcctgaacctgtaccaggagccagatggcacccggcggctgctgaactacctgctggacaacctgagcggcacagccaagaggatcaccacagagcagcccccacccaggtcctggatcatgctgcaggagccagacaggacccggcccacagccctcttctctgtgatgtgctacaacgtgctgtgtgacaagtatgccacccggcagctgtatggctactgccccagctgggccctgaactgggactacaggaagaaggccatcatccaggagatcctgagctgcaatgctgacatcgtgtccctgcaggaggtggagacagagcagtactacagcttcttcctggtggagctgaaggagcggggctacaacggcttcttcagccccaagagccgggcccggaccatgtctgagcaggagaggaagcacgtggatggctgtgccatcttcttcaagacagagaagttcaccctggtgcagaagcacacagtggagttcaaccagctggccatggccaacagcgagggcagcgaggccatgctgaacagagtgatgaccaaggacaacatcggcgtggccgtgctgctggagctgaggaaggagagcattgagatgcccagcggcaagccccacctgggcacagagaagcagctgatcctggtggccaatgcccacatgcactgggaccctgagtacagtgatgtgaagctggtgcagaccatgatgttcctgtctgaggtgaagaacatcatcgacaaggccagcaggaacctgaagagctctgtgctgggggagtttggcaccatccccctggtgctgtgtgccgacctgaacagcctgcctgattctggagtggtggagtacctgagcactggaggagtggagaccaaccacaaggacttcaaggagctgcgctacaatgaaagcctgaccaacttcagctgccacggcaagaatggcaccaccaacggccgcatcacccacggcttcaagctgcagagcgcctatgagagcggcctgatgccctacaccaactacacctttgacttcaagggcatcatcgactacatcttctacagcaagccccagctgaacaccctgggcatcctgggccccctggaccaccactggctggtggagaacaacatcagcggctgcccccaccccctcatccccagcgaccacttcagcctgtttgcccagctggagctgctgctgcccttcctgccccaggtgaatggcatccacctgcccggcagaagatag

SEQ ID NO: 146605 - DNA, 1674 bp, synthetic construct; identical to SEQ ID NO: 146604
  misc_feature 1..1674: note = Description of Artificial Sequence: Synthetic coding sequence
  source 1..1674: mol_type = other DNA

SEQ ID NO: 146606 - DNA, 858 bp, synthetic construct
  misc_feature 1..858: note = Description of Artificial Sequence: Synthetic coding sequence
  source 1..858: mol_type = other DNA
atgcctgctgccaccgtggaccacagccagaggatctgtgaggtgtgggcctgcaacctggatgaggagatgaagaagatccggcaggtgatcaggaagtacaactacgtggccatggacacagagttccctggggtggtggcccggcccatcggggagttccgcagcaatgctgactaccagtaccagctgctgcgctgcaatgtggacctgctgaagatcatccagctgggcctgaccttcatgaatgagcagggcgagtacccacctggcaccagcacctggcagttcaacttcaagttcaacctgacagaggacatgtatgcccaggacagcattgagctgctgaccaccagcggcatccagttcaagaagcatgaggaggagggcatcgagacccagtactttgctgagctgctgatgaccagcggcgtggtgctgtgtgagggcgtgaagtggctgtccttccacagcggctatgactttggctacctgatcaagatcctgaccaacagcaacctgcctgaggaggagctggacttctttgagatcctgcggctcttcttccctgtgatctatgatgtgaagtacctgatgaagagctgcaagaacctgaagggcggcctgcaggaggtggccgagcagctggagctggagagaattggcccccagcaccaggccggcagtgacagcctgctgaccggcatggccttcttcaagatgagggagatgttctttgaggaccacattgatgatgccaagtactgcggccacctgtatggcctgggcagcggcagcagctatgtgcagaatggaactggaaatgcctatgaggaggaggccaacaagcagagctag

SEQ ID NO: 146607 - DNA, 126 bp, synthetic construct
  misc_feature 1..126: note = Description of Artificial Sequence: Synthetic coding sequence
  source 1..126: mol_type = other DNA
atgcctgctgccaccgtggaccacagccagaggatctgtgaggtgtgggcctgcaacctggatgaggagatgaagaagatccggcaggtgatcaggaagtacaactacgtggccatggacacctag

SEQ ID NO: 146608 - DNA, 735 bp, synthetic construct
  misc_feature 1..735: note = Description of Artificial Sequence: Synthetic coding sequence
  source 1..735: mol_type = other DNA
atgcctgctgccaccgtggaccacagccagaggatctgtgaggtgtgggcctgcaacctggatgaggagatgaagaagatccggcaggtgatcaggaagtacaactacgtggccatggacacagagttccctggggtggtggcccggcccatcggggagttccgcagcaatgctgactaccagtaccagctgctgcgctgcaatgtggacctgctgaagatcatccagctgggcctgaccttcatgaatgagcagggcgagtacccacctggcaccagcacctggcagttcaacttcaagttcaacctgacagaggacatgtatgcccaggacagcattgagctgctgaccaccagcggcatccagttcaagaagcatgaggaggagggcatcgagacccagtactttgctgagctgctgatgaccagcggcgtggtgctgtgtgagggcgtgaagtggctgtccttccacagcggctatgactttggctacctgatcaagatcctgaccaacagcaacctgcctgaggaggagctggacttctttgagatcctgcggctcttcttccctgtgatctatgatgtgaagtacctgatgaagagctgcaagaacctgaagggcggcctgcaggaggtggccgagcagctggagctggagagaattggcccccagcaccaggccggcagtgacagcctgctgaccggcatggccttcttcaagatgagggaggtgtag

SEQ ID NO: 146609 - DNA, 444 bp, synthetic construct
  misc_feature 1..444: note = Description of Artificial Sequence: Synthetic coding sequence
  source 1..444: mol_type = other DNA
atgcctgctgccaccgtggaccacagccagaggatctgtgaggtgtgggcctgcaacctggatgaggagatgaagaagatccggcaggtgatcaggaagtacaactacgtggccatggacacagagttccctggggtggtggcccggcccatcggggagttccgcagcaatgctgactaccagtaccagctgctgcgctgcaatgtggacctgctgaagatcatccagctgggcctgaccttcatgaatgagcagggcgagtacccacctggcaccagcacctggcagttcaacttcaagttcaacctgacagaggacatgtatgcccaggacagcattgagctgctgaccaccagcggcatccagttcaagaagcatgaggaggagggcatcgagacccagtactttgctgagctgctgatgaccagcggcgtggtgctgtag

SEQ ID NO: 146610 - DNA, 879 bp, synthetic construct
  misc_feature 1..879: note = Description of Artificial Sequence: Synthetic coding sequence
  source 1..879: mol_type = other DNA
atgcctgctgccctggtggagaacagccaggtgatctgtgaggtgtgggccagcaacctggaggaggagatgaggaagatccgggagatcgtgctgagctacagctacatcgccatggacacagagttccctggggtggtggtgcggcccatcggggagttccgcagcagcattgactaccagtaccagctgctgcgctgcaatgtggacctgctgaagatcatccagctgggcctgaccttcaccaatgaaaaaggagagtaccccagcggcatcaacacctggcagttcaacttcaagttcaacctgacagaggacatgtacagccaggacagcattgacctgctggccaacagcggcctgcagttccagaagcatgaggaggagggcatcgacaccctgcactttgctgagctgctgatgaccagcggcgtggtgctgtgtgacaacgtgaagtggctgtccttccacagcggctatgactttggctacatggtgaagctgctgacagacagccggctgcctgaggaggagcacgagttcttccacatcctgaacctcttcttccccagcatctatgatgtgaagtacctgatgaagagctgcaagaacctgaagggcggcctgcaggaggtggccgaccagctggacctgcagagaattggccggcagcaccaggccggcagtgacagcctgctgaccggcatggccttcttcaggatgaaggagctgttctttgaagattccattgatgatgccaagtactgcggccgcctgtatggcctgggcaccggggtggcccagaagcagaatgaagatgtggacagcgcccaggagaagatgagcatcctggccatcatcaacaacatgcagcagtag

SEQ ID NO: 146611 - DNA, 879 bp, synthetic construct; identical to SEQ ID NO: 146610
  misc_feature 1..879: note = Description of Artificial Sequence: Synthetic coding sequence
  source 1..879: mol_type = other DNA

SEQ ID NO: 146612 - DNA, 357 bp, synthetic construct
  misc_feature 1..357: note = Description of Artificial Sequence: Synthetic coding sequence
  source 1..357: mol_type = other DNA
atgcctgctgccctggtggagaacagccaggtgatctgtgaggtgtgggccagcaacctggaggaggagatgaggaagatccgggagatcgtgctgagctacagctacatcgccatggacacagagttccctggggtggtggtgcggcccatcggggagttccgcagcagcattgactaccagtaccagctgctgcgctgcaatgtggacctgctgaagatcatccagctgggcctgaccttcaccaatgaaaaaggagagtaccccagcggcatcaacacctggcagttcaacttcaagttcaacctgacagaggacatgtacagccaggacagcattgacctgctggccaactag

SEQ ID NO: 146613 - DNA, 879 bp, synthetic construct; identical to SEQ ID NO: 146610
  misc_feature 1..879: note = Description of Artificial Sequence: Synthetic coding sequence
  source 1..879: mol_type = other DNA

SEQ ID NO: 146614 - DNA, 168 bp, synthetic construct
  misc_feature 1..168: note = Description of Artificial Sequence: Synthetic coding sequence
  source 1..168: mol_type = other DNA
atgcctgctgccctggtggagaacagccaggtgatctgtgaggtgtgggccagcaacctggaggaggagatgaggaagatccgggagatcgtgctgagctacagctacatcgccatggacacagagttccctggggtggtggtgcggcccatcggggagttcagatag

SEQ ID NO: 146615 - DNA, 678 bp, synthetic construct
  misc_feature 1..678: note = Description of Artificial Sequence: Synthetic coding sequence
  source 1..678: mol_type = other DNA
atgcctgctgccctggtggagaacagccaggtgatctgtgaggtgtgggccagcaacctggaggaggagatgaggaagatccgggagatcgtgctgagctacagctacatcgccatggacacagagttccctggggtggtggtgcggcccatcggggagttccgcagcagcattgactaccagtaccagctgctgcgctgcaatgtggacctgctgaagatcatccagctgggcctgaccttcaccaatgaaaaaggagagtaccccagcggcatcaacacctggcagttcaacttcaagttcaacctgaccggctatgactttggctacatggtgaagctgctgacagacagccggctgcctgaggaggagcacgagttcttccacatcctgaacctcttcttccccagcatctatgatgtgaagtacctgatgaagagctgcaagaacctgaagggcggcctgcaggaggtggccgaccagctggacctgcagagaattggccggcagcaccaggccggcagtgacagcctgctgaccggcatggccttcttcaggatgaaggagctgttctttgaagattccattgatgatgccaagtactgcggccgcctgtatggcctgggcaccggggtggcccagaagcagaatgaagatgtggacagcgcccaggagtag

SEQ ID NO: 146616 - DNA, 360 bp, synthetic construct
  misc_feature 1..360: note = Description of Artificial Sequence: Synthetic coding sequence
  source 1..360: mol_type = other DNA
atgcctgctgccctggtggagaacagccaggtgatctgtgaggtgtgggccagcaacctggaggaggagatgaggaagatccgggagatcgtgctgagctacagctacatcgccatggacacagagttccctggggtggtggtgcggcccatcggggagttccgcagcagcattgactaccagtaccagctgctgcgctgcaatgtggacctgctgaagatcatccagctgggcctgaccttcaccaatgaaaaaggagagtaccccagcggcatcaacacctggcagttcaacttcaagttcaacctgacagaggacatgtacagccaggacagcattgacctgctggccaacagctag

SEQ ID NO: 146617 - DNA, 717 bp, synthetic construct
  misc_feature 1..717: note = Description of Artificial Sequence: Synthetic coding sequence
  source 1..717: mol_type = other DNA
atgcctgctgccctggtggagaacagccaggtgatctgtgaggtgtgggccagcaacctggaggaggagatgaggaagatccgggagatcgtgctgagctacagctacatcgccatggacacagagttccctggggtggtggtgcggcccatcggggagttccgcagcagcattgactaccagtaccagctgctgcgctgcaatgtggacctgctgaagatcatccagctgggcctgaccttcaccaatgaaaaaggagagtaccccagcggcatcaacacctggcagttcaacttcaagttcaacctgaccggctatgactttggctacatggtgaagctgctgacagacagccggctgcctgaggaggagcacgagttcttccacatcctgaacctcttcttccccagcatctatgatgtgaagtacctgatgaagagctgcaagaacctgaagggcggcctgcaggaggtggccgaccagctggacctgcagagaattggccggcagcaccaggccggcagtgacagcctgctgaccggcatggccttcttcaggatgaaggagctgttctttgaagattccattgatgatgccaagtactgcggccgcctgtatggcctgggcaccggggtggcccagaagcagaatgaagatgtggacagcgcccaggagaagatgagcatcctggccatcatcaacaacatgcagcagtag

SEQ ID NO: 146618 - DNA, 168 bp, synthetic construct; identical to SEQ ID NO: 146614
  misc_feature 1..168: note = Description of Artificial Sequence: Synthetic coding sequence
  source 1..168: mol_type = other DNA

SEQ ID NO: 146619 - DNA, 258 bp, synthetic construct
  misc_feature 1..258: note = Description of Artificial Sequence: Synthetic coding sequence
  source 1..258: mol_type = other DNA
atgtacagccaggacagcattgacctgctggccaacagcggcctgcagttccagaagcatgaggaggagggcatcgacaccctgcactttgctgagctgctgatgaccagcggcgtggtgctgtgtgacaacgtgaagtggctgtccttccacagcggctatgactttggctacatggtgaagctgctgacagacagccggctgcctgaggaggagcacgagttcttccacatcctgaacctcttcttccccagctag

SEQ ID NO: 146620 - DNA, 402 bp, synthetic construct
  misc_feature 1..402: note = Description of Artificial Sequence: Synthetic coding sequence
  source 1..402: mol_type = other DNA
atgcctgctgccctggtggagaacagccaggtgatctgtgaggtgtgggccagcaacctggaggaggagatgaggaagatccgggagatcgtgctgagctacagctacatcgccatggacacagagttccctggggtggtggtgcggcccatcggggagttccgcagcagcattgactaccagtaccagctgctgcgctgcaatgtggacctgctgaagatcatccagctgggcctgaccttcaccaatgaaaaaggagagtaccccagcggcatcaacacctggcagttcaacttcaagttcaacctgacagaggacatgtacagccaggacagcattgacctgctggccaacagcggcctgcagttccagaagcatgaggaggagggcatcgacacctag

SEQ ID NO: 146621 - DNA, 561 bp, synthetic construct
  misc_feature 1..561: note = Description of Artificial Sequence: Synthetic coding sequence
  source 1..561: mol_type = other DNA
atgtacagccaggacagcattgacctgctggccaacagcggcctgcagttccagaagcatgaggaggagggcatcgacaccctgcactttgctgagctgctgatgaccagcggcgtggtgctgtgtgacaacgtgaagtggctgtccttccacagcggctatgactttggctacatggtgaagctgctgacagacagccggctgcctgaggaggagcacgagttcttccacatcctgaacctcttcttccccagcatctatgatgtgaagtacctgatgaagagctgcaagaacctgaagggcggcctgcaggaggtggccgaccagctggacctgcagagaattggccggcagcaccaggccggcagtgacagcctgctgaccggcatggccttcttcaggatgaaggagctgttctttgaagattccattgatgatgccaagtactgcggccgcctgtatggcctgggcaccggggtggcccagaagcagaatgaagatgtggacagcgcccaggagaagatgagcatcctggccatcatcaacaacatgcagcagtag

SEQ ID NO: 146622 - DNA, 561 bp, synthetic construct; identical to SEQ ID NO: 146621
  misc_feature 1..561: note = Description of Artificial Sequence: Synthetic coding sequence
  source 1..561: mol_type = other DNA

SEQ ID NO: 146623 - DNA, 561 bp, synthetic construct; identical to SEQ ID NO: 146621
  misc_feature 1..561: note = Description of Artificial Sequence: Synthetic coding sequence
  source 1..561: mol_type = other DNA

SEQ ID NO: 146624 - DNA, 366 bp, synthetic construct
  misc_feature 1..366: note = Description of Artificial Sequence: Synthetic coding sequence
  source 1..366: mol_type = other DNA
atgcctgctgccctggtggagaacagccaggtgatctgtgaggtgtgggccagcaacctggaggaggagatgaggaagatccgggagatcgtgctgagctacagctacatcgccatggacacagagttccctggggtggtggtgcggcccatcggggagttccgcagcagcattgactaccagtaccagctgctgcgctgcaatgtggacctgctgaagatcatccagctgggcctgaccttcaccaatgaaaaaggagagtaccccagcggcatcaacacctggcagttcaacttcaagttcaacctgaccggctatgactttggctacatggtgaagctgctgacagacagccggctgccctag

SEQ ID NO: 146625 - DNA, 561 bp, synthetic construct; identical to SEQ ID NO: 146621
  misc_feature 1..561: note = Description of Artificial Sequence: Synthetic coding sequence
  source 1..561: mol_type = other DNA

SEQ ID NO: 146626 - DNA, 387 bp, synthetic construct
  misc_feature 1..387: note = Description of Artificial Sequence: Synthetic coding sequence
  source 1..387: mol_type = other DNA
atggtgaagctgctgacagacagccggctgcctgaggaggagcacgagttcttccacatcctgaacctcttcttccccagcatctatgatgtgaagtacctgatgaagagctgcaagaacctgaagggcggcctgcaggaggtggccgaccagctggacctgcagagaattggccggcagcaccaggccggcagtgacagcctgctgaccggcatggccttcttcaggatgaaggagctgttctttgaagattccattgatgatgccaagtactgcggccgcctgtatggcctgggcaccggggtggcccagaagcagaatgaagatgtggacagcgcccaggagaagatgagcatcctggccatcatcaacaacatgcagcagtag

SEQ ID NO: 146627 - DNA, 810 bp, synthetic construct
  misc_feature 1..810: note = Description of Artificial Sequence: Synthetic coding sequence
  source 1..810: mol_type = other DNA
atgaggaagatccgggagatcgtgctgagctacagctacatcgccatggacacagagttccctggggtggtggtgcggcccatcggggagttccgcagcagcattgactaccagtaccagctgctgcgctgcaatgtggacctgctgaagatcatccagctgggcctgaccttcaccaatgagaagggggagtaccccagcggcatcaacacctggcagttcaacttcaagttcaacctgacagaggacatgtacagccaggacagcattgacctgctggccaacagcggcctgcagttccagaagcatgaggaggagggcatcgacaccctgcactttgctgagctgctgatgaccagcggcgtggtgctgtgtgacaacgtgaagtggctgtccttccacagcggctatgactttggctacatggtgaagctgctgacagacagccggctgcctgaggaggagcacgagttcttccacatcctgaacctcttcttccccagcatctatgatgtgaagtacctgatgaagagctgcaagaacctgaagggcggcctgcaggaggtggccgaccagctggacctgcagagaattggccggcagcaccaggccggcagtgacagcctgctgaccggcatggccttcttcaggatgaaggagctgttctttgaggacagcattgatgatgccaagtactgcggccgcctgtatggcctgggcactggagtggcccagaagcagaatgaagatgtggacagcgcccaggagaagatgagcatcctggccatcatcaacaacatgcagcagtag

SEQ ID NO: 146628 - DNA, 4338 bp, synthetic construct
  misc_feature 1..4338: note = Description of Artificial Sequence: Synthetic coding sequence
  source 1..4338: mol_type = other DNA
atgcagggcccccccctgctgacagctgcccacctgctgtgtgtgtgcacagctgccctggccgtggcccctggcccccgcttcctggtgacagcccctggcatcatccggcctggaggaaatgtgaccatcggcgtggagctgctggagcactgccccagccaggtgacagtgaaggccgagctgctgaagacagccagcaacctgactgtgtctgtgctggaggccgagggcgtgtttgagaagggcagcttcaagaccctgaccctgcccagcctgcccctgaacagcgcagatgagatctatgagctgcgggtgactggaagaacccaggatgagatcctcttcagcaacagcacccggctgagctttgagaccaagaggatcagcgtcttcatccagacagacaaggccctgtacaagcccaagcaggaggtgaagttccgcatcgtgaccctcttcagtgacttcaagccctacaagaccagcctgaacatcctgatcaaggaccccaagagcaacctgatccagcagtggctgagccagcagagcgacctgggcgtcatcagcaagaccttccagctgagcagccaccccatcctgggggactggagcatccaggtgcaggtgaatgaccagacctactaccagagcttccaggtgtctgaatatgtgctgcccaagtttgaggtgaccctgcagacccccctgtactgcagcatgaacagcaagcacctgaatggcaccatcacagccaagtacacctacggcaagcctgtgaagggagatgtgaccctgaccttcctgcccctgtccttctggggcaagaagaagaacatcaccaagaccttcaagatcaatggaagtgccaacttctccttcaatgatgaggagatgaagaatgtgatggacagcagcaatggcctgtctgagtacctggacctgagcagccctggccctgtggagatcctgaccaccgtgacagagagcgtgacaggcatcagcagaaatgtgtccaccaacgtgttcttcaagcagcacgactacatcatcgagttctttgactacaccaccgtgctgaagcccagcctgaacttcaccgccaccgtgaaggtgaccagggcagatggcaaccagctgaccctggaggagaggaggaacaacgtggtgatcaccgtgacccagaggaactacacagagtactggagcggcagcaacagcggcaaccagaagatggaggccgtgcagaagatcaactacacagtgccccagagcggcaccttcaagattgagttccccatcctggaggacagcagcgagctgcagctgaaggcctacttcctgggcagcaagagctccatggctgtgcacagcctcttcaagagccccagcaagacctacatccagctgaagaccagagatgagaacatcaaggtgggcagcccctttgagctggtggtgtctggcaacaagaggctgaaggagctgagctacatggtggtgtcccggggccagctggtggccgtgggcaagcagaacagcaccatgttcagcctgaccccagagaacagctggacccccaaggcctgcgtcatcgtgtactacattgaagatgatggagagatcatcagtgatgtgctgaagatccctgtgcagctggtgttcaagaacaagatcaagctgtactggagcaaggtgaaggccgagcccagcgagaaggtgtccctgcgcatctctgtgacccagcctgacagcatcgtgggcatcgtggccgtggacaagtctgtgaacctgatgaatgccagcaatgacatcaccatggagaatgtggtgcatgagctggagctgtacaacacaggctactacctgggcatgttcatgaacagctttgctgtgttccaggagtgtggcctgtgggtgctgacagatgccaacctgaccaaggactacattgatggagtgtatgacaatgcagaatatgcagagcgcttcatggaggagaatgaaggccacatcgtggacatccatgacttcagcctgggcagcagcccccacgtgaggaagcacttccctgagacctggatctggctggacaccaacatgggctaccgcatctaccaggagtttgaggtgacagtgcctgacagcatcacctcctgggtggccactggatttgtgatcagcgaggacctgggcctgggcctgaccaccacccctgtggagctgcaggccttccagcccttcttcatcttcctgaacctgccctacagcgtcatccggggggaggagtttgccctggagatcaccatcttcaactacctgaaggatgccacagaggtgaaggtgatcatcgagaagagtgacaagtttgacatcctgatgaccagcaatgagatcaatgccaccggccaccagcagaccctgctggtgcccagtgaagatggagccaccgtgctcttccccatccggcccacccacctgggggagatccccatcaccgtgacagccctgagccccacagccagtgatgctgtgacccagatgatcctggtgaaggccgagggcatcgagaagagctacagccagagcatcctgctggacctgacagacaaccggctgcagagcaccctgaagaccctgtccttctccttcccccccaacacagtgacaggcagcgagcgggtgcagatcacagccatcggagatgtgctgggccccagcatcaatggcctggccagcctcatccgcatgccctacggctgtggggagcagaacatgatcaactttgcccccaacatctacatcctggactacctgaccaagaagaagcagctgacagacaacctgaaggagaaggccctgtccttcatgaggcagggctaccagcgggagctgctgtaccagcgggaggatggcagcttcagcgcctttggaaattatgaccccagcggcagcacctggctgagcgcctttgtgctgcgctgcttcctggaggccgacccctacattgatattgaccagaatgtgctgcacaggacctacacctggctgaagggccaccagaagagcaatggagagttctgggaccccggccgggtcatccacagcgagctgcagggcggcaacaagagccctgtgaccctgacagcctacatcgtgaccagcctgctgggctacaggaagtaccagcccaacattgatgtgcaggagagcatccacttcctggagagcgagttcagccggggcatcagtgacaactacaccctggccctgatcacctacgccctgagctctgtgggcagccccaaggccaaggaggccctgaacatgctgacctggagggctgagcaggagggcggcatgcagttctgggtgtcctctgagagcaagctgagtgacagctggcagcccaggagcctggacatcgaggtggccgcctatgccctgctgagccacttcctgcagttccagaccagcgagggcatccccatcatgcgctggctgagccggcagaggaacagcctgggcggctttgccagcacccaggacaccaccgtggccctgaaggccctgtctgaatttgctgccctgatgaacacagagaggaccaacatccaggtgacagtgacaggccccagcagccccagccctgtgaagttcctgattgacacccacaaccggctgctgctgcagacagctgagctggccgtggtgcagcccacagctgtgaacatcagcgccaacggcttcggctttgccatctgccagctgaatgtggtgtacaacgtgaaggccagcggcagcagcagaagaagaagaagcatccagaaccaggaggcctttgacctggatgtggccgtgaaggagaacaaggatgacctgaaccacgtggacctgaatgtgtgcaccagcttcagcggccctggccgcagcggcatggccctgatggaggtgaacctgctgagcggcttcatggtgcccagcgaggccatcagcctgtctgagaccgtgaagaaggtggagtatgaccacggcaagctgaacctgtacctggacagcgtgaatgagacccagttctgtgtgaacatcccagctgtgaggaacttcaaggtgagcaacacccaggatgcctctgtgtccatcgtggactactatgagccccggcggcaggccgtgcgcagctacaacagcgaggtgaagctgagcagctgtgacctgtgcagtgatgtgcagggctgccggccctgtgaagatggagccagcggcagccaccaccacagcagcgtcatcttcatcttctgcttcaagctgctgtacttcatggagctgtggctgtag

SEQ ID NO: 146629 - DNA, 4107 bp, synthetic construct
  misc_feature 1..4107: note = Description of Artificial Sequence: Synthetic coding sequence
  source 1..4107: mol_type = other DNA
atgcagggcccccccctgctgacagctgcccacctgctgtgtgtgtgcacagctgccctggccgtggcccctggcccccgcttcctggtgacagcccctggcatcatccggcctggaggaaatgtgaccatcggcgtggagctgctggagcactgccccagccaggtgacagtgaaggccgagctgctgaagacagccagcaacctgactgtgtctgtgctggaggccgagggcgtgtttgagaagggcagcttcaagaccctgaccctgcccagcgaccccaagagcaacctgatccagcagtggctgagccagcagagcgacctgggcgtcatcagcaagaccttccagctgagcagccaccccatcctgggggactggagcatccaggtgcaggtgaatgaccagacctactaccagagcttccaggtgtctgaatatgtgctgcccaagtttgaggtgaccctgcagacccccctgtactgcagcatgaacagcaagcacctgaatggcaccatcacagccaagtacacctacggcaagcctgtgaagggagatgtgaccctgaccttcctgcccctgtccttctggggcaagaagaagaacatcaccaagaccttcaagatcaatggcagcgccaacttctccttcaatgatgaggagatgaagaatgtgatggacagcagcaatggcctgtctgagtacctggacctgagcagccctggccctgtggagatcctgaccaccgtgacagaatctgtgacaggcatcagcagaaatgtgtccaccaacgtgttcttcaagcagcacgactacatcatcgagttctttgactacaccaccgtgctgaagcccagcctgaacttcaccgccaccgtgaaggtgaccagggcagatggcaaccagctgaccctggaggagaggagaaataatgtggtgatcaccgtgacccagaggaactacacagagtactggagcggcagcaacagcggcaaccagaagatggaggccgtgcagaagatcaactacacagtgccccagagcggcaccttcaagattgagttccccatcctggaggacagcagcgagctgcagctgaaggcctacttcctgggcagcaagagctccatggctgtgcacagcctcttcaagagccccagcaagacctacatccagctgaagaccagagatgagaacatcaaggtgggcagcccctttgagctggtggtgtctggcaacaagaggctgaaggagctgagctacatggtggtgtcccggggccagctggtggccgtgggcaagcagaacagcaccatgttcagcctgaccccagaaaattcctggacccccaaggcctgtgtgattgtgtactacattgaagatgatggagagatcatcagtgatgtgctgaagatccctgtgcagctggtgttcaagaacaagatcaagctgtactggagcaaggtgaaggccgagcccagcgagaaggtgtccctgcgcatctctgtgacccagcctgacagcatcgtgggcatcgtggccgtggacaagtctgtgaacctgatgaatgccagcaatgacatcaccatggagaatgtggtgcatgagctggagctgtacaacacaggctactacctgggcatgttcatgaacagctttgctgtgttccaggagtgtggcctgtgggtgctgacagatgccaacctgaccaaggactacattgatggagtgtatgacaatgcagaatatgcagagcgcttcatggaggagaatgaaggccacatcgtggacatccatgacttcagcctgggcagcagcccccacgtgaggaagcacttccctgagacctggatctggctggacaccaacatgggctaccgcatctaccaggagtttgaggtgacagtgcctgacagcatcacctcctgggtggccaccggcttcgtcatcagcgaggacctgggcctgggcctgaccaccacccctgtggagctgcaggccttccagcccttcttcatcttcctgaacctgccctacagcgtcatccggggggaggagtttgccctggagatcaccatcttcaactacctgaaggatgccacagaggtgaaggtgatcatcgagaagagtgacaagtttgacatcctgatgaccagcaatgagatcaatgccaccggccaccagcagaccctgctggtgcccagtgaagatggagccaccgtgctcttccccatccggcccacccacctgggggagatccccatcaccgtgacagccctgagccccacagccagtgatgctgtgacccagatgatcctggtgaaggccgagggcatcgagaagagctacagccagagcatcctgctggacctgacagacaaccggctgcagagcaccctgaagaccctgtccttctccttcccccccaacacagtgactggaagtgagcgggtgcagatcacagccatcggagatgtgctgggccccagcatcaatggcctggccagcctcatccgcatgccctacggctgtggggagcagaacatgatcaactttgcccccaacatctacatcctggactacctgaccaagaagaagcagctgacagacaacctgaaggagaaggccctgtccttcatgaggcagggctaccagcgggagctgctgtaccagagagaagatggcagcttcagcgccttcggcaactatgaccccagcggcagcacctggctgagcgcctttgtgctgcgctgcttcctggaggccgacccctacatcgacatcgaccagaatgtgctgcacaggacctacacctggctgaagggccaccagaagagcaatggagagttctgggaccccggccgggtcatccacagcgagctgcagggcggcaacaagagccctgtgaccctgacagcctacatcgtgaccagcctgctgggctacaggaagtaccagcccaacattgatgtgcaggagagcatccacttcctggagagcgagttcagccggggcatcagtgacaactacaccctggccctgatcacctacgccctgagctctgtgggcagccccaaggccaaggaggccctgaacatgctgacctggagggctgagcaggagggcggcatgcagttctgggtgagcagcgagagcaagctgagtgacagctggcagcccaggagcctggacatcgaggtggccgcctatgccctgctgagccacttcctgcagttccagaccagcgagggcatccccatcatgcgctggctgagccggcagaggaacagcctgggcggctttgccagcacccaggacaccaccgtggccctgaaggccctgtctgaatttgctgccctgatgaacacagagaggaccaacatccaggtgacagtgacaggccccagcagccccagccctgtgaagttcctgattgacacccacaaccggctgctgctgcagacagctgagctggccgtggtgcagcccacagctgtgaacatcagcgccaatggatttggatttgccatctgccagctgaatgtggtgtacaacgtgaaggccagcggcagcagcagaagaagaagaagcatccagaaccaggaggcctttgacctggatgtggccgtgaaggagaacaaggatgacctgaaccacgtggacctgaatgtgtgcaccagcttcagcggccctggccgcagcggcatggccctgatggaggtgaacctgctgagcggcttcatggtgcccagcgaggccatcagcctgtctgaaacagtgaagaaggtggagtatgaccacggcaagctgaacctgtacctggacagcgtgaatgagacccagttctgtgtgaacatcccagctgtgaggaacttcaaggtgagcaacacccaggatgcctctgtgtccatcgtggactactatgagccccggcggcaggccgtgcgcagctacaacagcgaggtgaagctgagcagctgtgacctgtgcagtgatgtgcagggctgccggccctgtgaagatggagccagcggcagccaccaccacagcagcgtcatcttcatcttctgcttcaagctgctgtacttcatggagctgtggctgtag

SEQ ID NO: 146630 - DNA, 4287 bp, synthetic construct
  misc_feature 1..4287: note = Description of Artificial Sequence: Synthetic coding sequence
  source 1..4287: mol_type = other DNA
atgcagggcccccccctgctgacagctgcccacctgctgtgtgtgtgcacagctgccctggccgtggcccctggcccccgcttcctggtgacagcccctggcatcatccggcctggaggaaatgtgaccatcggcgtggagctgctggagcactgccccagccaggtgacagtgaaggccgagctgctgaagacagccagcaacctgactgtgtctgtgctggaggccgagggcgtgtttgagaagggcagcttcaagaccctgaccctgcccagcctgcccctgaacagcgcagatgagatctatgagctgcgggtgactggaagaacccaggatgagatcctcttcagcaacagcacccggctgagctttgagaccaagaggatcagcgtcttcatccagacagacaaggccctgtacaagcccaagcaggaggtgaagttccgcatcgtgaccctcttcagtgacttcaagccctacaagaccagcctgaacatcctgatcaaggaccccaagagcaacctgatccagcagtggctgagccagcagagcgacctgggcgtcatcagcaagaccttccagctgagcagccaccccatcctgggggactggagcatccaggtgcaggtgaatgaccagacctactaccagagcttccaggtgtctgaatatgtgctgcccaagtttgaggtgaccctgcagacccccctgtactgcagcatgaacagcaagcacctgaatggcaccatcacagccaagtacacctacggcaagcctgtgaagggagatgtgaccctgaccttcctgcccctgtccttctggggcaagaagaagaacatcaccaagaccttcaagatcaatggaagtgccaacttctccttcaatgatgaggagatgaagaatgtgatggacagcagcaatggcctgtctgagtacctggacctgagcagccctggccctgtggagatcctgaccaccgtgacagagagcgtgacaggcatcagcagaaatgtgtccaccaacgtgttcttcaagcagcacgactacatcatcgagttctttgactacaccaccgtgctgaagcccagcctgaacttcaccgccaccgtgaaggtgaccagggcagatggcaaccagctgaccctggaggagaggaggaacaacgtggtgatcaccgtgacccagaggaactacacagagtactggagcggcagcaacagcggcaaccagaagatggaggccgtgcagaagatcaactacacagtgccccagagcggcaccttcaagattgagttccccatcctggaggacagcagcgagctgcagctgaaggcctacttcctgggcagcaagagctccatggctgtgcacagcctcttcaagagccccagcaagacctacatccagctgaagaccagagatgagaacatcaaggtgggcagcccctttgagctggtggtgtctggcaacaagaggctgaaggagctgagctacatggtggtgtcccggggccagctggtggccgtgggcaagcagaacagcaccatgttcagcctgaccccagagaacagctggacccccaaggcctgcgtcatcgtgtactacattgaagatgatggagagatcatcagtgatgtgctgaagatccctgtgcagctggtgttcaagaacaagatcaagctgtactggagcaaggtgaaggccgagcccagcgagaaggtgtccctgcgcatctctgtgacccagcctgacagcatcgtgggcatcgtggccgtggacaagtctgtgaacctgatgaatgccagcaatgacatcaccatggagaatgtggtgcatgagctggagctgtacaacacaggctactacctgggcatgttcatgaacagctttgctgtgttccaggagtgtggcctgtgggtgctgacagatgccaacctgaccaaggactacattgatggagtgtatgacaatgcagaatatgcagagcgcttcatggaggagaatgaaggccacatcgtggacatccatgacttcagcctgggcagcagcccccacgtgaggaagcacttccctgagacctggatctggctggacaccaacatgggctaccgcatctaccaggagtttgaggtgacagtgcctgacagcatcacctcctgggtggccactggatttgtgatcagcgaggacctgggcctgggcctgaccaccacccctgtggagctgcaggccttccagcccttcttcatcttcctgaacctgccctacagcgtcatccggggggaggagtttgccctggagatcaccatcttcaactacctgaaggatgccacagaggtgaaggtgatcatcgagaagagtgacaagtttgacatcctgatgaccagcaatgagatcaatgccaccggccaccagcagaccctgctggtgcccagtgaagatggagccaccgtgctcttccccatccggcccacccacctgggggagatccccatcaccgtgacagccctgagccccacagccagtgatgctgtgacccagatgatcctggtgaaggccgagggcatcgagaagagctacagccagagcatcctgctggacctgacagacaaccggctgcagagcaccctgaagaccctgtccttctccttcccccccaacacagtgacaggcagcgagcgggtgcagatcacagccatcggagatgtgctgggccccagcatcaatggcctggccagcctcatccgcatgccctacggctgtggggagcagaacatgatcaactttgcccccaacatctacatcctggactacctgaccaagaagaagcagctgacagacaacctgaaggagaaggccctgtccttcatgaggcagggctaccagcgggagctgctgtaccagcgggaggatggcagcttcagcgcctttggaaattatgaccccagcggcagcacctggctgagcgcctttgtgctgcgctgcttcctggaggccgacccctacattgatattgaccagaatgtgctgcacaggacctacacctggctgaagggccaccagaagagcaatggagagttctgggaccccggccgggtcatccacagcgagctgcagggcggcaacaagagccctgtgaccctgacagcctacatcgtgaccagcctgctgggctacaggaagtaccagcccaacattgatgtgcaggagagcatccacttcctggagagcgagttcagccggggcatcagtgacaactacaccctggccctgatcacctacgccctgagctctgtgggcagccccaaggccaaggaggccctgaacatgctgacctggagggctgagcaggagggcggcatgcagttctgggtgtcctctgagagcaagctgagtgacagctggcagcccaggagcctggacatcgaggtggccgcctatgccctgctgagccacttcctgcagttccagaccagcgagggcatccccatcatgcgctggctgagccggcagaggaacagcctgggcggctttgccagcacccaggacaccaccgtggccctgaaggccctgtctgaatttgctgccctgatgaacacagagaggaccaacatccaggtgacagtgacaggccccagcagccccagccccctggccgtggtgcagcccacagctgtgaacatcagcgccaatggatttggatttgccatctgccagctgaatgtggtgtacaacgtgaaggccagcggcagcagcagaagaagaagaagcatccagaaccaggaggcctttgacctggatgtggccgtgaaggagaacaaggatgacctgaaccacgtggacctgaatgtgtgcaccagcttcagcggccctggccgcagcggcatggccctgatggaggtgaacctgctgagcggcttcatggtgcccagcgaggccatcagcctgtctgaaacagtgaagaaggtggagtatgaccacggcaagctgaacctgtacctggacagcgtgaatgagacccagttctgtgtgaacatcccagctgtgaggaacttcaaggtgagcaacacccaggatgcctctgtgtccatcgtggactactatgagccccggcggcaggccgtgcgcagctacaacagcgaggtgaagctgagcagctgtgacctgtgcagtgatgtgcagggctgccggccctgtgaagatggagccagcggcagccaccaccacagcagcgtcatcttcatcttctgcttcaagctgctgtacttcatggagctgtggctgtag

SEQ ID NO: 146631 - DNA, 762 bp, synthetic construct
  misc_feature 1..762: note = Description of Artificial Sequence: Synthetic coding sequence
  source 1..762: mol_type = other DNA
atgggagagttcaatgagaagaagaccacctgtggcaccgtgtgcctgaagtacctgctcttcacctacaactgctgcttctggctggccggcctggccgtgatggctgtgggcatctggaccctggccctgaagagtgactacatcagcctgctggccagcggcacctacctggccacagcctacatcctggtggtggccggcaccgtggtgatggtgactggagtgctgggctgctgtgccaccttcaaggagaggaggaacctgctgcggctgtacttcatcctgctgctgatcatcttcctgctggagatcatcgccggcatcctggcctatgcctactaccagcagctgaacacagagctgaaggagaacctgaaggacaccatgaccaagcgctaccaccagcccggccatgaagctgtgaccagcgctgtggaccagctgcagcaggagttccactgctgcggcagcaacaacagccaggactggagggacagcgagtggatccgcagccaggaggccggcggccgggtggtgcctgacagctgctgcaagacagtggtggccctgtgtggccagagggaccacgccagcaacatctacaaggtggagggcggctgcatcaccaagctggagaccttcatccaggagcacctgcgggtgattggagctgtgggcatcggcatcgcctgtgtgcaggtgtttggcatgatcttcacctgctgcctgtaccgcagcctgaagctggagcactactag

SEQ ID NO: 146632 - DNA, 762 bp, synthetic construct; identical to SEQ ID NO: 146631
  misc_feature 1..762: note = Description of Artificial Sequence: Synthetic coding sequence
  source 1..762: mol_type = other DNA

SEQ ID NO: 146633 - DNA, 762 bp, synthetic construct; identical to SEQ ID NO: 146631
  misc_feature 1..762: note = Description of Artificial Sequence: Synthetic coding sequence
  source 1..762: mol_type = other DNA

SEQ ID NO: 146634 - DNA, 543 bp, synthetic construct
  misc_feature 1..543: note = Description of Artificial Sequence: Synthetic coding sequence
  source 1..543: mol_type = other DNA
atgggagagttcaatgagaagaagaccacctgtggcaccgtgtgcctgaagtacctgctcttcacctacaactgctgcttctggctggccggcctggccgtgatggctgtgggcatctggaccctggccctgaagagtgactacatcagcctgctggccagcggcacctacctggccacagcctacatcctggtggtggccggcaccgtggtgatggtgactggagtgctgggctgctgtgccaccttcaaggagaggaggaacctgctgcggctgtacttcatcctgctgctgatcatcttcctgctggagatcatcgccggcatcctggcctatgcctactaccagcagctgaacacagagctgaaggagaacctgaaggacaccatgaccaagcgctaccaccagcccggccatgaagctgtgaccagcgctgtggaccagctgcagcaggagttccactgctgcggcagcaacaacagccaggactggagggacagcgagtggatccgcagccaggaggccggcggccgggtggtgtag

SEQ ID NO: 146635 - DNA, 240 bp, synthetic construct
  misc_feature 1..240: note = Description of Artificial Sequence: Synthetic coding sequence
  source 1..240: mol_type = other DNA
atgggagagttcaatgagaagaagaccacctgtggcaccgtgtgcctgaagtacctgctcttcacctacaactgctgcttctggctggccggcctggccgtgatggctgtgggcatctggaccctggccctgaagagtgactacatcagcctgctggccagcggcacctacctggccacagcctacatcctggtggtggccggcaccgtggtgatggtgactggagtgctgggctgctag

SEQ ID NO: 146636 - DNA, 279 bp, synthetic construct
  misc_feature 1..279: note = Description of Artificial Sequence: Synthetic coding sequence
  source 1..279: mol_type = other DNA
atgggagagttcaatgagaagaagaccacctgtggcaccgtgtgcctgaagtacctgctcttcacctacaactgctgcttctggctggccggcctggccgtgatggctgtgggcatctggaccctggccctgaagagtgactacatcagcctgctggccagcggcacctacctggccacagcctacatcctggtggtggccggcaccgtggtgatggtgactggagtgctgggctgctgtgccaccttcaaggagaggaggaacctgctgcggctgtag

SEQ ID NO: 146637 - DNA, 198 bp, synthetic construct
  misc_feature 1..198: note = Description of Artificial Sequence: Synthetic coding sequence
  source 1..198: mol_type = other DNA
atgggagagttcaatgagaagaagaccacctgtggcaccgtgtgcctgaagtacctgctcttcacctacaactgctgcttctggctggccggcctggccgtgatggctgtgggcatctggaccctggccctgaagagtgactacatcagcctgctggccagcggcacctacctggccacagcctacatcctggtgtag

SEQ ID NO: 146638 - DNA, 531 bp, synthetic construct
  misc_feature 1..531: note = Description of Artificial Sequence: Synthetic coding sequence
  source 1..531: mol_type = other DNA
atgggagagttcaatgagaagaagaccacctgtggcaccgtgtgcctgaagtacctgctcttcacctacaactgctgcttctggctggccggcctggccgtgatggctgtgggcatctggaccctggccctgaagagtgactacatcagcctgctggccagcggcacctacctggccacagcctacatcctggtggtggccggcaccgtggtgatggtgactggagtgctgggctgctgtgccaccttcaaggagaggaggaacctgctgcggctgtacttcatcctgctgctgatcatcttcctgctggagatcatcgccggcatcctggcctatgcctactaccagcagctgaacacagagctgaaggagaacctgaaggacaccatgaccaagcgctaccaccagcccggccatgaagctgtgaccagcgctgtggaccagctgcagcaggagttccactgctgcggcagcaacaacagccaggactggagggacagcgagtggatccgcagccaggaggccggctag

SEQ ID NO: 146639 - DNA, 543 bp, synthetic construct; identical to SEQ ID NO: 146634
  misc_feature 1..543: note = Description of Artificial Sequence: Synthetic coding sequence
  source 1..543: mol_type = other DNA

SEQ ID NO: 146640 - DNA, 273 bp, synthetic construct
  misc_feature 1..273: note = Description of Artificial Sequence: Synthetic coding sequence
  source 1..273: mol_type = other DNA
atgggagagttcaatgagaagaagaccacctgtggcaccgtgtgcctgaagtacctgctcttcacctacaactgctgcttctggctggccggcctggccgtgatggctgtgggcatctggaccctggccctgaagagtgactacatcagcctgctggccagcggcacctacctggccacagcctacatcctggtggtggccggcaccgtggtgatggtgactggagtgctgggctgctgtgccaccttcaaggagaggaggaacctgctgtag

SEQ ID NO: 146641 - DNA, 513 bp, synthetic construct
  misc_feature 1..513: note = Description of Artificial Sequence: Synthetic coding sequence
  source 1..513: mol_type = other DNA
atgggagagttcaatgagaagaagaccacctgtggcaccgtgtgcctgaagtacctgctcttcacctacaactgctgcttctggctggccggcctggccgtgatggctgtgggcatctggaccctggccctgaagagtgactacatcagcctgctggccagcggcacctacctggccacagcctacatcctggtggtggccggcaccgtggtgatggtgactggagtgctgggctgctgtgccaccttcaaggagaggaggaacctgctgcggctgtacttcatcctgctgctgatcatcttcctgctggagatcatcgccggcatcctggcctatgcctactaccagcagctgaacacagagctgaaggagaacctgaaggacaccatgaccaagcgctaccaccagcccggccatgaagctgtgaccagcgctgtggaccagctgcagcaggagttccactgctgcggcagcaacaacagccaggactggagggacagcgagtggatctag

SEQ ID NO: 146642 - DNA, 762 bp, synthetic construct; identical to SEQ ID NO: 146631
  misc_feature 1..762: note = Description of Artificial Sequence: Synthetic coding sequence
  source 1..762: mol_type = other DNA

SEQ ID NO: 146643 - DNA, 3471 bp, synthetic construct
  misc_feature 1..3471: note = Description of Artificial Sequence: Synthetic coding sequence
  source 1..3471: mol_type = other DNA
atgagcaagctgaggatggtgctgctggaggacagcggcagcgctgacttccgccgccactttgtgaacctgagccccttcaccatcaccgtggtgctgctgctgagcgcctgctttgtgaccagcagcctgggcggcacagacaaggagctgcggctggtggatggagaaaataaatgttctggccgggtggaggtgaaggtgcaggaggagtggggcaccgtgtgcaacaacggctggagcatggaggccgtgtctgtcatctgcaaccagctgggctgccccacagccatcaaggcccctggctgggccaacagcagcgctggcagcggccgcatctggatggaccacgtgtcctgcagaggaaatgaaagtgccctgtgggactgcaagcatgatggctggggcaagcacagcaactgcacccaccagcaggatgctggggtgacctgcagtgatggcagcaacctggagatgaggctgacccggggcggcaacatgtgcagcggccgcatcgagatcaagttccagggccgctggggcaccgtgtgtgatgacaacttcaacatcgaccacgccagcgtcatctgccggcagctggagtgtggcagcgctgtgtccttcagcggcagcagcaactttggagagggcagcggccccatctggtttgatgacctgatctgcaatggaaatgaaagtgccctgtggaactgcaagcaccagggctggggcaagcacaactgtgaccatgctgaagatgctggggtcatctgcagcaaaggagctgacctgagcctgcggctggtggatggagtgacagagtgcagcggccgcctggaggtgcgcttccagggcgagtggggcaccatctgtgatgatggctgggacagctatgatgctgctgtggcctgcaagcagctgggctgccccacagctgtgacagccatcggccgggtgaatgccagcaaaggatttggccacatctggctggacagcgtgtcctgccagggccacgagcccgccatctggcagtgcaagcaccacgagtggggcaagcactactgcaaccacaatgaagatgctggggtgacctgcagtgatggcagtgacctggagctgcggctgcggggcggcggcagccgctgtgccggcaccgtggaggtggagatccagaggctgctgggcaaggtgtgtgaccggggctggggcctgaaggaggctgatgtggtgtgccggcagctgggctgcggcagcgccctgaagaccagctaccaggtgtacagcaagatccaggccaccaacacctggctgttcctgagcagctgcaatggaaatgagaccagcctgtgggactgcaagaactggcagtggggcggcctgacctgtgaccactatgaggaggccaagatcacctgcagcgcccaccgggagccccggctggtgggcggggacatcccctgcagcggccgggtggaggtgaagcatggagacacctggggcagcatctgtgacagcgacttcagcctggaggccgcctctgtgctgtgccgggagctgcagtgtggcaccgtggtgtccatcctgggcggggcccactttggagagggcaatggccagatctgggccgaggagttccagtgtgagggccacgagagccacctgagcctgtgccctgtggcccccaggcctgagggcacctgcagccacagcagagatgtgggcgtggtgtgcagccgctacacagagatccggctggtgaatggcaagaccccctgtgagggccgggtggagctgaagaccctgggcgcctggggcagcctgtgcaacagccactgggacattgaagatgcccacgtgctgtgccagcagctgaagtgtggggtggccctgagcaccccaggaggagccaggtttggaaaaggaaatggccagatctggaggcacatgttccactgcacaggaacagagcagcacatgggagactgccctgtgacagccctgggcgccagcctgtgccccagcgagcaggtggccagcgtcatctgcagcggcaaccagagccagaccctgagcagctgcaacagcagcagcctgggccccacccggcccaccatccctgaggagagcgctgtggcctgcatcgagagcggccagctgcggctggtgaatggaggcggccgctgtgccggccgggtggagatctaccacgagggctcctggggcaccatctgtgatgacagctgggacctgagtgatgcccacgtggtgtgccggcagctgggctgtggggaggccatcaatgccactggaagtgcccactttggagagggcaccggccccatctggctggatgagatgaagtgcaatggcaaggagagccgcatctggcagtgccacagccacggctggggccagcagaactgccgccacaaggaggatgctggggtcatctgcagcgagttcatgagcctgcggctgaccagcgaggccagccgggaggcctgtgccggccgcctggaggtgttctacaacggggcctggggcaccgtgggcaagagctccatgtctgagaccaccgtgggcgtggtgtgccggcagctgggctgtgccgacaagggcaagatcaacccagccagcctggacaaggccatgagcatccccatgtgggtggacaacgtgcagtgccccaagggccctgacaccctgtggcagtgccccagcagcccctgggagaagaggctggccagccccagcgaggagacctggatcacctgtgacaacaagatccggctgcaggagggccccaccagctgcagcggccgggtggagatctggcacggcggctcctggggcaccgtgtgtgatgacagctgggacctggatgatgcccaggtggtgtgccagcagctgggctgcggccctgccctgaaggccttcaaggaggccgagtttggccagggcaccggccccatctggctgaatgaggtgaagtgcaagggaaatgaaagcagcctgtgggactgcccagcccggcgctggggccacagtgaatgtggccacaaggaggatgctgctgtgaactgcacagacatctctgtgcagaagaccccccagaaggccaccaccggccgcagcagccggcagagcagcttcatcgctgtgggcatcctgggcgtggtgctgctggccatctttgtggccctcttcttcctgaccaagaagaggcggcagaggcagaggctggccgtgagcagcagaggagagaacctggtgcaccagatccagtaccgggagatgaacagctgcctgaatgctgatgacctggacctgatgaacagcagcgagaacagccatgagagcgctgacttctctgctgctgagctgatctctgtgtccaagttcctgcccatcagcggcatggagaaggaggccatcctgagccacacagagaaggaaaatggaaacctgtag

SEQ ID NO: 146644 - DNA, 3465 bp, synthetic construct
  misc_feature 1..3465: note = Description of Artificial Sequence: Synthetic coding sequence
  source 1..3465: mol_type = other DNA
atgagcaagctgaggatggtgctgctggaggacagcggcagcgctgacttccgccgccactttgtgaacctgagccccttcaccatcaccgtggtgctgctgctgagcgcctgctttgtgaccagcagcctgggcggcacagacaaggagctgcggctggtggatggagaaaataaatgttctggccgggtggaggtgaaggtgcaggaggagtggggcaccgtgtgcaacaacggctggagcatggaggccgtgtctgtcatctgcaaccagctgggctgccccacagccatcaaggcccctggctgggccaacagcagcgctggcagcggccgcatctggatggaccacgtgtcctgcagaggaaatgaaagtgccctgtgggactgcaagcatgatggctggggcaagcacagcaactgcacccaccagcaggatgctggggtgacctgcagtgatggcagcaacctggagatgaggctgacccggggcggcaacatgtgcagcggccgcatcgagatcaagttccagggccgctggggcaccgtgtgtgatgacaacttcaacatcgaccacgccagcgtcatctgccggcagctggagtgtggcagcgctgtgtccttcagcggcagcagcaactttggagagggcagcggccccatctggtttgatgacctgatctgcaatggaaatgaaagtgccctgtggaactgcaagcaccagggctggggcaagcacaactgtgaccatgctgaagatgctggggtcatctgcagcaaaggagctgacctgagcctgcggctggtggatggagtgacagagtgcagcggccgcctggaggtgcgcttccagggcgagtggggcaccatctgtgatgatggctgggacagctatgatgctgctgtggcctgcaagcagctgggctgccccacagctgtgacagccatcggccgggtgaatgccagcaaaggatttggccacatctggctggacagcgtgtcctgccagggccacgagcccgccatctggcagtgcaagcaccacgagtggggcaagcactactgcaaccacaatgaagatgctggggtgacctgcagtgatggcagtgacctggagctgcggctgcggggcggcggcagccgctgtgccggcaccgtggaggtggagatccagaggctgctgggcaaggtgtgtgaccggggctggggcctgaaggaggctgatgtggtgtgccggcagctgggctgcggcagcgccctgaagaccagctaccaggtgtacagcaagatccaggccaccaacacctggctgttcctgagcagctgcaatggaaatgagaccagcctgtgggactgcaagaactggcagtggggcggcctgacctgtgaccactatgaggaggccaagatcacctgcagcgcccaccgggagccccggctggtgggcggggacatcccctgcagcggccgggtggaggtgaagcatggagacacctggggcagcatctgtgacagcgacttcagcctggaggccgcctctgtgctgtgccgggagctgcagtgtggcaccgtggtgtccatcctgggcggggcccactttggagagggcaatggccagatctgggccgaggagttccagtgtgagggccacgagagccacctgagcctgtgccctgtggcccccaggcctgagggcacctgcagccacagcagagatgtgggcgtggtgtgcagcagcaagacccagaagaccagcctgattggcagccacacagtgaagggcaccggcctgggcagccacagctgcctcttcctgaagccctgcctgctgcccggctacacagagatccggctggtgaatggcaagaccccctgtgagggccgggtggagctgaagaccctgggcgcctggggcagcctgtgcaacagccactgggacattgaagatgcccacgtgctgtgccagcagctgaagtgtggggtggccctgagcacccctgggggcgccaggtttggaaaaggaaatggccagatctggaggcacatgttccactgcaccggcacagagcagcacatgggagactgccctgtgacagccctgggcgccagcctgtgccccagcgagcaggtggccagcgtcatctgcagcggcaaccagagccagaccctgagcagctgcaacagcagcagcctgggccccacccggcccaccatccctgaggagagcgctgtggcctgcattgaaagtggccagctgcggctggtgaatggaggcggccgctgtgccggccgggtggagatctaccacgagggctcctggggcaccatctgtgatgacagctgggacctgagtgatgcccacgtggtgtgccggcagctgggctgtggggaggccatcaatgccaccggcagcgcccactttggagagggcaccggccccatctggctggatgagatgaagtgcaatggcaaggagagccgcatctggcagtgccacagccacggctggggccagcagaactgccgccacaaggaggatgctggggtcatctgcagcgagttcatgagcctgcggctgaccagcgaggccagccgggaggcctgtgccggccgcctggaggtgttctacaatggagcctggggcaccgtgggcaagagctccatgtctgagaccaccgtgggcgtggtgtgccggcagctgggctgtgccgacaagggcaagatcaacccagccagcctggacaaggccatgagcatccccatgtgggtggacaacgtgcagtgccccaagggccctgacaccctgtggcagtgccccagcagcccctgggagaagaggctggccagccccagcgaggagacctggatcacctgtgacaacaagatccggctgcaggagggccccaccagctgcagcggccgggtggagatctggcatggaggctcctggggcaccgtgtgtgatgacagctgggacctggatgatgcccaggtggtgtgccagcagctgggctgcggccctgccctgaaggccttcaaggaggccgagtttggccagggcaccggccccatctggctgaatgaggtgaagtgcaagggaaatgaaagcagcctgtgggactgcccagcccggcgctggggccacagtgaatgtggccacaaggaggatgctgctgtgaactgcacagacatctctgtgcagaagaccccccagaaggccaccaccggccgcagcagccggcagagcagcttcatcgctgtgggcatcctgggcgtggtgctgctggccatctttgtggccctcttcttcctgaccaagaagaggcggcagaggcagaggctggccgtgagcagcagaggagagaacctggtgcaccagatccagtaccgggagatgaacagctgcctgaatgctgatgacctggacctgatgaacagcagcggcggccacagcgagccccactag

SEQ ID NO: 146645 - DNA, 3366 bp, synthetic construct
  misc_feature 1..3366: note = Description of Artificial Sequence: Synthetic coding sequence
  source 1..3366: mol_type = other DNA
atgagcaagctgaggatggtgctgctggaggacagcggcagcgctgacttccgccgccactttgtgaacctgagccccttcaccatcaccgtggtgctgctgctgagcgcctgctttgtgaccagcagcctgggcggcacagacaaggagctgcggctggtggatggagaaaataaatgttctggccgggtggaggtgaaggtgcaggaggagtggggcaccgtgtgcaacaacggctggagcatggaggccgtgtctgtcatctgcaaccagctgggctgccccacagccatcaaggcccctggctgggccaacagcagcgctggcagcggccgcatctggatggaccacgtgtcctgcagaggaaatgaaagtgccctgtgggactgcaagcatgatggctggggcaagcacagcaactgcacccaccagcaggatgctggggtgacctgcagtgatggcagcaacctggagatgaggctgacccggggcggcaacatgtgcagcggccgcatcgagatcaagttccagggccgctggggcaccgtgtgtgatgacaacttcaacatcgaccacgccagcgtcatctgccggcagctggagtgtggcagcgctgtgtccttcagcggcagcagcaactttggagagggcagcggccccatctggtttgatgacctgatctgcaatggaaatgaaagtgccctgtggaactgcaagcaccagggctggggcaagcacaactgtgaccatgctgaagatgctggggtcatctgcagcaaaggagctgacctgagcctgcggctggtggatggagtgacagagtgcagcggccgcctggaggtgcgcttccagggcgagtggggcaccatctgtgatgatggctgggacagctatgatgctgctgtggcctgcaagcagctgggctgccccacagctgtgacagccatcggccgggtgaatgccagcaaaggatttggccacatctggctggacagcgtgtcctgccagggccacgagcccgccatctggcagtgcaagcaccacgagtggggcaagcactactgcaaccacaatgaagatgctggggtgacctgcagtgatggcagtgacctggagctgcggctgcggggcggcggcagccgctgtgccggcaccgtggaggtggagatccagaggctgctgggcaaggtgtgtgaccggggctggggcctgaaggaggctgatgtggtgtgccggcagctgggctgcggcagcgccctgaagaccagctaccaggtgtacagcaagatccaggccaccaacacctggctgttcctgagcagctgcaatggaaatgagaccagcctgtgggactgcaagaactggcagtggggcggcctgacctgtgaccactatgaggaggccaagatcacctgcagcgcccaccgggagccccggctggtgggcggggacatcccctgcagcggccgggtggaggtgaagcatggagacacctggggcagcatctgtgacagcgacttcagcctggaggccgcctctgtgctgtgccgggagctgcagtgtggcaccgtggtgtccatcctgggcggggcccactttggagagggcaatggccagatctgggccgaggagttccagtgtgagggccacgagagccacctgagcctgtgccctgtggcccccaggcctgagggcacctgcagccacagcagagatgtgggcgtggtgtgcagccgctacacagagatccggctggtgaatggcaagaccccctgtgagggccgggtggagctgaagaccctgggcgcctggggcagcctgtgcaacagccactgggacattgaagatgcccacgtgctgtgccagcagctgaagtgtggggtggccctgagcaccccaggaggagccaggtttggaaaaggaaatggccagatctggaggcacatgttccactgcacaggaacagagcagcacatgggagactgccctgtgacagccctgggcgccagcctgtgccccagcgagcaggtggccagcgtcatctgcagcggcaaccagagccagaccctgagcagctgcaacagcagcagcctgggccccacccggcccaccatccctgaggagagcgctgtggcctgcatcgagagcggccagctgcggctggtgaatggaggcggccgctgtgccggccgggtggagatctaccacgagggctcctggggcaccatctgtgatgacagctgggacctgagtgatgcccacgtggtgtgccggcagctgggctgtggggaggccatcaatgccactggaagtgcccactttggagagggcaccggccccatctggctggatgagatgaagtgcaatggcaaggagagccgcatctggcagtgccacagccacggctggggccagcagaactgccgccacaaggaggatgctggggtcatctgcagcgagttcatgagcctgcggctgaccagcgaggccagccgggaggcctgtgccggccgcctggaggtgttctacaacggggcctggggcaccgtgggcaagagctccatgtctgagaccaccgtgggcgtggtgtgccggcagctgggctgtgccgacaagggcaagatcaacccagccagcctggacaaggccatgagcatccccatgtgggtggacaacgtgcagtgccccaagggccctgacaccctgtggcagtgccccagcagcccctgggagaagaggctggccagccccagcgaggagacctggatcacctgtgacaacaagatccggctgcaggagggccccaccagctgcagcggccgggtggagatctggcacggcggctcctggggcaccgtgtgtgatgacagctgggacctggatgatgcccaggtggtgtgccagcagctgggctgcggccctgccctgaaggccttcaaggaggccgagtttggccagggcaccggccccatctggctgaatgaggtgaagtgcaagggaaatgaaagcagcctgtgggactgcccagcccggcgctggggccacagtgaatgtggccacaaggaggatgctgctgtgaactgcacagacatctctgtgcagaagaccccccagaaggccaccaccggccgcagcagccggcagagcagcttcatcgctgtgggcatcctgggcgtggtgctgctggccatctttgtggccctcttcttcctgaccaagaagaggcggcagaggcagaggctggccgtgagcagcagaggagagaacctggtgcaccagatccagtaccgggagatgaacagctgcctgaatgctgatgacctggacctgatgaacagcagcggcggccacagcgagccccactag

SEQ ID NO: 146646 - DNA, 555 bp, synthetic construct
  misc_feature 1..555: note = Description of Artificial Sequence: Synthetic coding sequence
  source 1..555: mol_type = other DNA
atgagccggctgagccgcagcctgctgtgggccgccacctgcctgggcgtgctgtgtgtgctgtctgctgacaagaacaccacccagcaccccaacgtgaccaccctggcccccatcagcaatgtgaccagcgcccctgtgaccagcctgcccctggtgaccaccccagcccctgagacctgtgagggcaggaacagctgtgtgtcctgcttcaacgtgtctgtggtgaacaccacctgcttctggattgagtgcaaggatgagagctactgcagccacaacagcacagtgtctgactgccaggtgggcaacaccacagacttctgcagcgccaagcccaccgtgcagcccagccccagcaccaccagcaagacagtgaccaccagcggcaccaccaacaacacagtgacccccaccagccagcctgtgaggaagagcacctttgatgctgccagcttcatcggcggcatcgtgctggtgctgggcgtgcaggccgtcatcttcttcctgtacaagttctgcaagagcaaggagaggaactaccacaccctgtag

SEQ ID NO: 146647 - DNA, 594 bp, synthetic construct
  misc_feature 1..594: note = Description of Artificial Sequence: Synthetic coding sequence
  source 1..594: mol_type = other DNA
atgagccggctgagccgcagcctgctgtgggccgccacctgcctgggcgtgctgtgtgtgctgtctgctgacaagaacaccacccagcaccccaacgtgaccaccctggcccccatcagcaatgtgaccagcgcccctgtgaccagcctgcccctggtgaccaccccagcccctgagacctgtgagggcaggaacagctgtgtgtcctgcttcaacgtgtctgtggtgaacaccacctgcttctggattgagtgcaaggatgagagctactgcagccacaacagcacagtgtctgactgccaggtgggcaacaccacagacttctgcagcgtgtccacagccacccctgtgcccacagccaacagcacagccaagcccaccgtgcagcccagccccagcaccaccagcaagacagtgaccaccagcggcaccaccaacaacacagtgacccccaccagccagcctgtgaggaagagcacctttgatgctgccagcttcatcggcggcatcgtgctggtgctgggcgtgcaggccgtcatcttcttcctgtacaagttctgcaagagcaaggagaggaactaccacaccctgtag

SEQ ID NO: 146648 - DNA, 537 bp, synthetic construct
  misc_feature 1..537: note = Description of Artificial Sequence: Synthetic coding sequence
  source 1..537: mol_type = other DNA
atgagccggctgagccgcagcctgctgtgggccgccacctgcctgggcgtgctgtgtgtgctgtctgctgacaagaacaccacccagcaccccaacgtgaccaccctggcccccatcagcaatgtgaccagcgcccctgtgaccagcctgcccctggtgaccaccccagcccctgagacctgtgagggcaggaacagctgtgtgtcctgcttcaacgtgtctgtggtgaacaccacctgcttctggattgagtgcaaggatgagagctactgcagccacaacagcacagtgtctgactgccaggtgggcaacaccacagacttctgcagcgtgtccacagccacccctgtgcccacagccaacagcacaggcaccaccaacaacacagtgacccccaccagccagcctgtgaggaagagcacctttgatgctgccagcttcatcggcggcatcgtgctggtgctgggcgtgcaggccgtcatcttcttcctgtacaagttctgcaagagcaaggagaggaactaccacaccctgtag

SEQ ID NO: 146649 - DNA, 498 bp, synthetic construct
  misc_feature 1..498: note = Description of Artificial Sequence: Synthetic coding sequence
  source 1..498: mol_type = other DNA
atgagccggctgagccgcagcctgctgtgggccgccacctgcctgggcgtgctgtgtgtgctgtctgctgacaagaacaccacccagcaccccaacgtgaccaccctggcccccatcagcaatgtgaccagcgcccctgtgaccagcctgcccctggtgaccaccccagcccctgagacctgtgagggcaggaacagctgtgtgtcctgcttcaacgtgtctgtggtgaacaccacctgcttctggattgagtgcaaggatgagagctactgcagccacaacagcacagtgtctgactgccaggtgggcaacaccacagacttctgcagcggcaccaccaacaacacagtgacccccaccagccagcctgtgaggaagagcacctttgatgctgccagcttcatcggcggcatcgtgctggtgctgggcgtgcaggccgtcatcttcttcctgtacaagttctgcaagagcaaggagaggaactaccacaccctgtag

SEQ ID NO: 146650 - DNA, 570 bp, synthetic construct
  misc_feature 1..570: note = Description of Artificial Sequence: Synthetic coding sequence
  source 1..570: mol_type = other DNA
atgagccggctgagccgcagcctgctgtgggccgccacctgcctgggcgtgctgtgtgtgctgtctgctgacaagaacaccacccagcaccccaacgtgaccaccctggcccccatcagcaatgtgaccagcgcccctgtgaccagcctgcccctggtgaccaccccagcccctgagacctgtgagggcaggaacagctgtgtgtcctgcttcaacgtgtctgtggtgaacaccacctgcttctggattgagtgcaaggatgagagctactgcagccacaacagcacagtgtctgactgccaggtgggcaacaccacagacttctgcagcgtgtccacagccacccctgtgcccacagccaacagcacagccaagcccaccgtgcagcccagccccagcaccaccagcaagacagtgaccaccagcggcaccaccaacaacacagtgacccccaccagccagcctgtgaggaagagcacctttgatgctgccagcttcatcggcggcatcgtgctggtgctggagatccgctgccacaccaggaactacatcccagacctgaagaagtag

SEQ ID NO: 146651 - DNA, 474 bp, synthetic construct
  misc_feature 1..474: note = Description of Artificial Sequence: Synthetic coding sequence
  source 1..474: mol_type = other DNA
atgagccggctgagccgcagcctgctgtgggccgccacctgcctgggcgtgctgtgtgtgctgtctgctgacaagaacaccacccagcaccccaacgtgaccaccctggcccccatcagcaatgtgaccagcgcccctgtgaccagcctgcccctggtgaccaccccagcccctgagacctgtgagggcaggaacagctgtgtgtcctgcttcaacgtgtctgtggtgaacaccacctgcttctggattgagtgcaaggatgagagctactgcagccacaacagcacagtgtctgactgccaggtgggcaacaccacagacttctgcagcgtgtccacagccacccctgtgcccacagccaacagcacagccaagcccaccgtgcagcccagccccagcaccaccagcaagacagtgaccaccagcgagatccgctgccacaccaggaactacatcccagacctgaagaagtag

SEQ ID NO: 146652 - DNA, 747 bp, synthetic construct
  misc_feature 1..747: note = Description of Artificial Sequence: Synthetic coding sequence
  source 1..747: mol_type = other DNA
atgtctgctgtgctgctgctggccctgctgggcttcatcctgcccctgcccggggtgcaggccctgctgtgccagtttggcaccgtgcagcacgtgtggaaggtgtctgacctgccccggcagtggacccccaagaacaccagctgtgacagcggcctgggctgccaggacaccctgatgctgattgagagcggcccccaggtgtccctggtgctgagcaagggctgcacagaggccaaggaccaggagccccgggtgacagagcacaggatgggccctggcctgagcctcatctcctacacctttgtgtgccggcaggaggacttctgcaacaacctggtgaacagcctgcccctgtgggccccccagcccccagctgaccccggcagcctgcgctgccctgtgtgcctgtccatggagggctgcctggagggcaccacagaggagatctgccccaagggcaccacccactgctatgatggcctgctgcggctgcggggcggcggcatcttcagcaacctgcgggtgcagggctgcatgccccagcctgtgtgcaacctgctgaatggcacccaggagatcggccctgtgggcatgacagagaactgtgacatgaaggacttcctgcagctgaagcctgtgggcctgctggaggagcacaacgtgggggagaaggagcggggccagggccagcaccagtgtgtgcagctggactggcagaagagagctgccaccggcatcttctag

SEQ ID NO: 146653 - DNA, 438 bp, synthetic construct
  misc_feature 1..438: note = Description of Artificial Sequence: Synthetic coding sequence
  source 1..438: mol_type = other DNA
atgtctgctgtgctgctgctggccctgctgggcttcatcctgcccctgcccggggtgcaggccctgctgtgccagtttggcaccgtgcagcacgtgtggaaggtgtctgacctgccccggcagtggacccccaagaacaccagctgtgacagcggcctgggctgccaggacaccctgatgctgattgagagcggcccccaggtgtccctggtgctgagcaagggctgcacagaggccaaggaccaggagccccgggtgacagagcacaggatgggccctggcctgagcctcatctcctacacctttgtgtgccggcaggaggacttctgcaacaacctggtgaacagcctgcccctgtgggccccccagcccccagctgaccccatgatgggcgctgctgagggcccctttgggaaggccgagcaggtggacagctag

SEQ ID NO: 146654 - DNA, 438 bp, synthetic construct; identical to SEQ ID NO: 146653
  misc_feature 1..438: note = Description of Artificial Sequence: Synthetic coding sequence
  source 1..438: mol_type = other DNA

SEQ ID NO: 146655 - DNA, 1671 bp, synthetic construct
  misc_feature 1..1671: note = Description of Artificial Sequence: Synthetic coding sequence
  source 1..1671: mol_type = other DNA
atgcccccaccccggctgctcttcttcctgctcttcctgacccccatggaggtgcggcctgaggagcccctggtggtgaaggtggaggagggggacaatgctgtgctgcagtgcctgaagggcaccagtgatggccccacccagcagctgacctggagccgggagagccccctgaagcccttcctgaagctgagcctgggcctgcccggcctgggcatccacatgaggcccctggccatctggctgttcatcttcaacgtgtcccagcagatgggcggcttctacctgtgccagcccggccccccatctgagaaggcctggcagcccggctggacagtgaatgtggagggcagcggggagctgttccgctggaatgtgtctgacctgggcggcctgggctgcggcctgaagaacagaagcagcgagggccccagcagccccagcggcaagctgatgagccccaagctgtatgtgtgggccaaggacaggcctgagatctgggagggggagcccccctgcctgcccccccgggacagcctgaaccagagcctgagccaggacctgaccatggcccctggcagcaccctgtggctgagctgtggggtgcccccagacagcgtgtcccggggccccctgtcctggacccacgtgcaccccaagggccccaagagcctgctgagcctggagctgaaggatgacaggcctgcccgggacatgtgggtgatggagaccggcctgctgctgccccgggccacagcccaggatgctgggaagtactactgccaccggggcaacctgaccatgtccttccacctggagatcacagcccggcctgtgctgtggcactggctgctgaggactggaggctggaaggtgtctgctgtgaccctggcctacctgatcttctgcctgtgcagcctggtgggcatcctgcacctgcagagggccctggtgctgcggaggaagaggaagaggatgacagaccccacccggcgcttcttcaaggtgaccccacctcctggcagcggcccccagaaccagtatggaaatgtgctgagcctgcccacccccaccagcggcctgggccgggcccagcgctgggccgccggcctgggcggcacagcccccagctatggcaaccccagcagtgatgtgcaggctgatggagccctgggcagccgcagccccccaggagtgggccctgaggaggaggagggggagggctatgaggagccagacagcgaggaggacagcgagttctatgaaaatgacagcaacctgggccaggaccagctgagccaggacggcagcggctatgagaacccagaagatgagcccctgggcccagaagatgaggacagcttcagcaatgctgagagctatgaaaatgaagatgaggagctgacccagcctgtggcccggaccatggacttcctgagcccccacggcagcgcctgggaccccagccgggaggccaccagcctgggcagccagagctatgaggacatgaggggcatcctgtatgctgccccccagctgcggagcatccggggccagcccggccccaaccacgaggaggatgctgacagctatgagaacatggacaacccagatggccctgaccctgcctggggcggcggcggccgcatgggcacctggagcaccaggtag

SEQ ID NO: 146656 - DNA, 1092 bp, synthetic construct
  misc_feature 1..1092: note = Description of Artificial Sequence: Synthetic coding sequence
  source 1..1092: mol_type = other DNA
atggaggtgcggcctgaggagcccctggtggtgaaggtggaggagggggacaatgctgtgctgcagtgcctgaagggcaccagtgatggccccacccagcagctgacctggagccgggagagccccctgaagcccttcctgaagctgagcctgggcctgcccggcctgggcatccacatgaggcccctgggcaagtactactgccaccggggcaacctgaccatgtccttccacctggagatcacagcccggcctgtgctgtggcactggctgctgaggactggaggctggaaggtgtctgctgtgaccctggcctacctgatcttctgcctgtgcagcctggtgggcatcctgcacctgcagagggccctggtgctgcggaggaagaggaagaggatgacagaccccacccggcgcttcttcaaggtgaccccacctcctggcagcggcccccagaaccagtatggaaatgtgctgagcctgcccacccccaccagcggcctgggccgggcccagcgctgggccgccggcctgggcggcacagcccccagctatggcaaccccagcagtgatgtgcaggctgatggagccctgggcagccgcagccccccaggagtgggccctgaggaggaggagggggagggctatgaggagccagattctgaagaagattctgagttctatgaaaatgacagcaacctgggccaggaccagctgagccaggacggcagcggctatgaaaatccagaagatgagcccctgggcccagaagatgaagattccttcagcaatgctgagagctatgaaaatgaagatgaggagctgacccagcctgtggcccggaccatggacttcctgagcccccacggcagcgcctgggaccccagccgggaggccaccagcctgggcagccagagctatgaggacatgaggggcatcctgtatgctgccccccagctgcggagcatccggggccagcccggccccaaccatgaagaagatgctgacagctatgagaacatggacaacccagatggccctgaccctgcctggggcggcggcggccgcatgggcacctggagcaccaggtag

SEQ ID NO: 146657 - DNA, 1218 bp, synthetic construct
  misc_feature 1..1218: note = Description of Artificial Sequence: Synthetic coding sequence
  source 1..1218: mol_type = other DNA
atgagccccaagctgtatgtgtgggccaaggacaggcctgagatctgggagggggagcccccctgcctgcccccccgggacagcctgaaccagagcctgagccaggacctgaccatggcccctggcagcaccctgtggctgagctgtggggtgcccccagattctgtgtcccggggccccctgtcctggacccacgtgcaccccaagggccccaagagcctgctgagcctggagctgaaggatgacaggcctgcccgggacatgtgggtgatggagaccggcctgctgctgccccgggccacagcccaggatgctgggaagtactactgccaccggggcaacctgaccatgtccttccacctggagatcacagcccggcctgtgctgtggcactggctgctgaggactggaggctggaaggtgtctgctgtgaccctggcctacctgatcttctgcctgtgcagcctggtgggcatcctgcacctgcagagggccctggtgctgcggaggaagaggaagaggatgacagaccccacccggcgcttcttcaaggtgaccccacctcctggcagcggcccccagaaccagtatggaaatgtgctgagcctgcccacccccaccagcggcctgggccgggcccagcgctgggccgccggcctgggcggcacagcccccagctatggcaaccccagcagtgatgtgcaggctgatggagccctgggcagccgcagccccccaggagtgggccctgaggaggaggagggggagggctatgaggagccagattctgaagaagattctgagttctatgaaaatgacagcaacctgggccaggaccagctgagccaggacggcagcggctatgaaaatccagaagatgagcccctgggcccagaagatgaagattccttcagcaatgctgagagctatgaaaatgaagatgaggagctgacccagcctgtggcccggaccatggacttcctgagcccccacggcagcgcctgggaccccagccgggaggccaccagcctgggcagccagagctatgaggacatgaggggcatcctgtatgctgccccccagctgcggagcatccggggccagcccggccccaaccatgaagaagatgctgacagctatgagaacatggacaacccagatggccctgaccctgcctggggcggcggcggccgcatgggcacctggagcaccaggtag

SEQ ID NO: 146658 - DNA, 1674 bp, synthetic construct
  misc_feature 1..1674: note = Description of Artificial Sequence: Synthetic coding sequence
  source 1..1674: mol_type = other DNA
atgcccccaccccggctgctcttcttcctgctcttcctgacccccatggaggtgcggcctgaggagcccctggtggtgaaggtggaggagggggacaatgctgtgctgcagtgcctgaagggcaccagtgatggccccacccagcagctgacctggagccgggagagccccctgaagcccttcctgaagctgagcctgggcctgcccggcctgggcatccacatgaggcccctggccatctggctgttcatcttcaacgtgtcccagcagatgggcggcttctacctgtgccagcccggccccccatctgagaaggcctggcagcccggctggacagtgaatgtggagggcagcggggagctgttccgctggaatgtgtctgacctgggcggcctgggctgcggcctgaagaacagaagcagcgagggccccagcagccccagcggcaagctgatgagccccaagctgtatgtgtgggccaaggacaggcctgagatctgggagggggagcccccctgcctgcccccccgggacagcctgaaccagagcctgagccaggacctgaccatggcccctggcagcaccctgtggctgagctgtggggtgcccccagacagcgtgtcccggggccccctgtcctggacccacgtgcaccccaagggccccaagagcctgctgagcctggagctgaaggatgacaggcctgcccgggacatgtgggtgatggagaccggcctgctgctgccccgggccacagcccaggatgctgggaagtactactgccaccggggcaacctgaccatgtccttccacctggagatcacagcccggcctgtgctgtggcactggctgctgaggactggaggctggaaggtgtctgctgtgaccctggcctacctgatcttctgcctgtgcagcctggtgggcatcctgcacctgcagagggccctggtgctgcggaggaagaggaagaggatgacagaccccacccggcgcttcttcaaggtgaccccacctcctggcagcggcccccagaaccagtatggaaatgtgctgagcctgcccacccccaccagcggcctgggccgggcccagcgctgggccgccggcctgggcggcacagcccccagctatggcaaccccagcagtgatgtgcaggctgatggagccctgggcagccgcagccccccaggagtgggccctgaggaggaggagggggagggctatgaggagccagacagcgaggaggacagcgagttctatgaaaatgacagcaacctgggccaggaccagctgagccaggacggcagcggctatgagaacccagaagatgagcccctgggcccagaagatgaggacagcttcagcaatgctgagagctatgaaaatgaagatgaggagctgacccagcctgtggcccggaccatggacttcctgagcccccacggcagcgcctgggaccccagccgggaggccaccagcctggccggcagccagagctatgaggacatgaggggcatcctgtatgctgccccccagctgcggagcatccggggccagcccggccccaaccatgaagaagatgctgacagctatgagaacatggacaacccagatggccctgaccctgcctggggcggcggcggccgcatgggcacctggagcaccaggtag

SEQ ID NO: 146659 - DNA, 984 bp, synthetic construct
  misc_feature 1..984: note = Description of Artificial Sequence: Synthetic coding sequence
  source 1..984: mol_type = other DNA
atgctgttcctgctgctgcccctgctggccgtgctgcctggagatggaaatgctgatggcctgaaggagcccctgtccttccacgtgacctggatcgccagcttctacaaccacagctggaagcagaacctggtgtctggctggctgagtgacctgcagacccacacctgggacagcaacagcagcaccatcgtgttcctgtgcccctggagccggggcaacttcagcaatgaggagtggaaggagctggagaccctcttccgcatccgcaccatccgcagctttgagggcatcagaagatatgcccacgagctgcagtttgagtacccctttgagatccaggtgactggaggctgtgagctgcacagcggcaaggtgtctggcagcttcctgcagctggcctaccagggcagtgactttgtgtccttccagaacaacagctggctgccctaccctgtggccggcaacatggccaagcacttctgcaaggtgctgaaccagaaccagcatgaaaatgacatcacccacaacctgctgagtgacacctgcccccgcttcatcctgggcctgctggatgctgggaaggcccacctgcagaggcaggtgaagccagaggcctggctgagccacggccccagccctggccctggccacctgcagctggtgtgccacgtgtctggcttctaccccaagcctgtgtgggtgatgtggatgagaggagagcaggagcagcagggcacccagagaggagacatcctgcccagcgcagatggcacctggtacctgcgggccaccctggaggtggccgccggggaggccgctgacctgagctgccgggtgaagcacagcagcctggagggccaggacatcgtgctgtactgggagcaccacagctctgtgggcttcatcatcctggccgtcatcgtgcccctgctgctgctgattggcctggccctgtggttcaggaagcgctgcttctgctag

SEQ ID NO: 146660 - DNA, 1002 bp, synthetic construct
  misc_feature 1..1002: note = Description of Artificial Sequence: Synthetic coding sequence
  source 1..1002: mol_type = other DNA
atgctgctgctgcccttccagctgctggccgtgctcttccctgggggcaacagcgagcacgccttccagggccccaccagcttccacgtgatccagaccagcagcttcaccaacagcacctgggcccagacccagggcagcggctggctggatgacctgcagatccacggctgggacagcgacagcggcacagccatcttcctgaagccctggagcaaaggaaacttcagtgacaaggaggtggccgagctggaggagatcttccgggtgtacatctttggatttgcccgggaggtgcaggactttgctggggacttccagatgaagtacccctttgagatccagggcattgctggctgtgagctgcacagcggcggggccatcgtgtccttcctgcggggggccctgggcggcctggacttcctgtctgtgaagaatgccagctgtgtgcccagccctgagggcggcagccgggcccagaagttctgtgccctgatcatccagtaccagggcatcatggagaccgtgcgcatcctgctgtatgagacctgcccccgctacctgctgggcgtgctgaatgctgggaaggctgacctgcagaggcaggtgaagccagaggcctggctgagcagcggccccagccctggccctggccgcctgcagctggtgtgccacgtgtctggcttctaccccaagcctgtgtgggtgatgtggatgagaggagagcaggagcagcagggcacccagctgggggacatcctgcccaatgccaactggacctggtacctgcgggccaccctggatgtggctgatggagaggccgccggcctgagctgccgggtgaagcacagcagcctggagggccaggacatcatcctgtactggaggaaccccaccagcatcggcagcatcgtgctggccatcatcgtgcccagcctgctgctgctgctgtgcctggccctgtggtacatgagaagaagaagctaccagaacatcccctag

SEQ ID NO: 146661 - DNA, 741 bp, synthetic construct
  misc_feature 1..741: note = Description of Artificial Sequence: Synthetic coding sequence
  source 1..741: mol_type = other DNA
tgaagcagcttcaccaacagcacctgggcccagacccagggcagcggctggctggatgacctgcagatccacggctgggacagcgacagcggcacagccatcttcctgaagccctggagcaaaggaaacttcagtgacaaggaggtggccgagctggaggagatcttccgggtgtacatctttggatttgcccgggaggtgcaggactttgctggggacttccagatgaagtacccctttgagatccagggcattgctggctgtgagctgcacagcggcggggccatcgtgtccttcctgcggggggccctgggcggcctggacttcctgtctgtgaagaatgccagctgtgtgcccagccctgagggcggcagccgggcccagaagttctgtgccctgatcatccagtaccagggcatcatggagaccgtgcgcatcctgctgtatgagacctgcccccgctacctgctgggcgtgctgaatgctgggaaggctgacctgcagaggcaggtgaagccagaggcctggctgagcagcggccccagccctggccctggccgcctgcagctggtgtgccacgtgtctggcttctaccccaagcctgtgtgggtgatgtggatgaggggcaaccccaccagcatcggcagcatcgtgctggccatcatcgtgcccagcctgctgctgctgctgtgcctggccctgtggtacatgagaagaagaagctaccagaacatcccctag

SEQ ID NO: 146662 - DNA, 1041 bp, synthetic construct
  misc_feature 1..1041: note = Description of Artificial Sequence: Synthetic coding sequence
  source 1..1041: mol_type = other DNA
atgctgttcctgcagttcctgctgctggccctgctgctgcccggcggggacaatgctgatgccagccaggagcacgtgtccttccacgtgatccagatcttctcctttgtgaaccagagctgggcccggggccagggcagcggctggctggatgagctgcagacccacggctgggacagcgagagcggcaccatcatcttcctgcacaactggagcaaaggaaacttcagcaatgaggagctgagtgacctggagctgctcttccgcttctacctgtttggcctgacccgggagatccaggaccacgccagccaggactacagcaagtacccctttgaggtgcaggtgaaggccggctgtgagctgcacagcggcaagagccctgagggcttcttccaggtggccttcaacggcctggacctgctgtccttccagaacaccacctgggtgcccagccctggctgcggcagcctggcccagagcgtgtgccacctgctgaaccaccagtatgagggcgtgacagagaccgtgtacaacctgatccgcagcacctgcccccgcttcctgctgggcctgctggatgctgggaagatgtatgtgcaccggcaggtgcggcctgaggcctggctgagcagccggcccagcctgggcagcggccagctgctgctggtgtgccacgccagcggcttctaccccaagcctgtgtgggtgacctggatgagaaatgagcaggagcagctgggcaccaagcatggagacatcctgcccaatgctgatggcacctggtacctgcaggtgatcctggaggtggccagcgaggagcccgccggcctgagctgccgggtgcgccacagcagcctgggcggccaggacatcatcctgtactgggcccacatccgcaccagctgtgagaccctgcccccagacagccccatcgtgctgcggacccagcagcccaggagcctggtgcagtacagtgatgccatccccagcaccctgcacctgaactgcttctccttctgcatcatcaacatctgctag

SEQ ID NO: 146663 - DNA, 1002 bp, synthetic construct
  misc_feature 1..1002: note = Description of Artificial Sequence: Synthetic coding sequence
  source 1..1002: mol_type = other DNA
atgctgttcctgcagttcctgctgctggccctgctgctgcccggcggggacaatgctgatgccagccaggagcacgtgtccttccacgtgatccagatcttctcctttgtgaaccagagctgggcccggggccagggcagcggctggctggatgagctgcagacccacggctgggacagcgagagcggcaccatcatcttcctgcacaactggagcaaaggaaacttcagcaatgaggagctgagtgacctggagctgctcttccgcttctacctgtttggcctgacccgggagatccaggaccacgccagccaggactacagcaagtacccctttgaggtgcaggtgaaggccggctgtgagctgcacagcggcaagagccctgagggcttcttccaggtggccttcaacggcctggacctgctgtccttccagaacaccacctgggtgcccagccctggctgcggcagcctggcccagagcgtgtgccacctgctgaaccaccagtatgagggcgtgacagagaccgtgtacaacctgatccgcagcacctgcccccgcttcctgctgggcctgctggatgctgggaagatgtatgtgcaccggcaggtgcggcctgaggcctggctgagcagccggcccagcctgggcagcggccagctgctgctggtgtgccacgccagcggcttctaccccaagcctgtgtgggtgacctggatgagaaatgagcaggagcagctgggcaccaagcatggagacatcctgcccaatgctgatggcacctggtacctgcaggtgatcctggaggtggccagcgaggagcccgccggcctgagctgccgggtgcgccacagcagcctgggcggccaggacatcatcctgtactggggccaccacttctccatgaactggatcgccctggtggtgattgtgcccctggtgatcctgattgtgctggtgctgtggttcaagaagcactgcagctaccaggacatcctgtag

SEQ ID NO: 146664 - DNA, 846 bp, synthetic construct
  misc_feature 1..846: note = Description of Artificial Sequence: Synthetic coding sequence
  source 1..846: mol_type = other DNA
tgattcctgcacaactggagcaagggcaacttcagcaatgaggagctgagtgacctggagctgctcttccgcttctacctgtttggcctgacccgggagatccaggaccacgccagccaggactacagcaagtacccctttgaggtgcaggtgaaggccggctgtgagctgcacagcggcaagagccctgagggcttcttccaggtggccttcaacggcctggacctgctgtccttccagaacaccacctgggtgcccagccctggctgcggcagcctggcccagagcgtgtgccacctgctgaaccaccagtatgaaggagtgacagaaacagtgtacaacctgatccgcagcacctgcccccgcttcctgctgggcctgctggatgctgggaagatgtatgtgcaccggcaggtgcggcctgaggcctggctgagcagccggcccagcctgggcagcggccagctgctgctggtgtgccacgccagcggcttctaccccaagcctgtgtgggtgacctggatgagaaatgagcaggagcagctgggcaccaagcacggggacatcctgcccaatgctgatggcacctggtacctgcaggtgatcctggaggtggccagcgaggagcctgctggcctgagctgccgggtgcgccacagcagcctgggcggccaggacatcatcctgtactgggcccacatccgcaccagctgtgagaccctgcccccagacagccccatcgtgctgcggacccagcagcccaggagcctggtgcagtacagtgatgccatccccagcaccctgcacctgaactgcttctccttctgcatcatcaacatctgctag

SEQ ID NO: 146665 - DNA, 411 bp, synthetic construct
  misc_feature 1..411: note = Description of Artificial Sequence: Synthetic coding sequence
  source 1..411: mol_type = other DNA
atgtatgtgcaccggcaggtgcggcctgaggcctggctgagcagccggcccagcctgggcagcggccagctgctgctggtgtgccacgccagcggcttctaccccaagcctgtgtgggtgacctggatgagaaatgagcaggagcagctgggcaccaagcacggggacatcctgcccaatgctgatggcacctggtacctgcaggtgatcctggaggtggccagcgaggagcctgctggcctgagctgccgggtgcgccacagcagcctgggcggccaggacatcatcctgtactggggccaccacttctccatgaactggatcgccctggtggtgattgtgcccctggtgatcctgattgtgctggtgctgtggttcaagaagcactgcagctaccaggacatcctgtag

SEQ ID NO: 146666 - DNA, 1008 bp, synthetic construct
  misc_feature 1..1008: note = Description of Artificial Sequence: Synthetic coding sequence
  source 1..1008: mol_type = other DNA
atgggctgcctgctcttcctgctgctgtgggccctgctgcaggcctggggcagcgctgaggtgccccagaggctcttccccctgcgctgcctgcagatcagcagctttgccaacagctcctggaccaggacagatggcctggcctggctgggggagctgcagacccacagctggagcaatgacagcgacacagtgcgcagcctgaagccctggagccagggcaccttcagtgaccagcagtgggagaccctgcagcacatcttccgggtgtaccgcagcagcttcaccagagatgtgaaggagtttgccaagatgctgcggctgagctaccccctggagctgcaggtgtctgctggctgtgaggtgcaccctggaaatgccagcaacaacttcttccacgtggccttccagggcaaggacatcctgtccttccagggcacctcctgggagcccacccaggaggcccccctgtgggtgaacctggccatccaggtgctgaaccaggacaagtggacccgggagaccgtgcagtggctgctgaatggcacctgcccccagtttgtgtctggcctgctggagagcggcaagtctgagctgaagaagcaggtgaagcccaaggcctggctgagccggggccccagccctggccctggccgcctgctgctggtgtgccacgtgtctggcttctaccccaagcctgtgtgggtgaagtggatgagaggagagcaggagcagcagggcacccagcccggggacatcctgcccaatgctgatgagacctggtacctgcgggccaccctggatgtggtggccggggaggccgccggcctgagctgccgggtgaagcacagcagcctggagggccaggacatcgtgctgtactggggcggcagctacacctccatgggcctgattgccctggccgtgctggcctgcctgctcttcctgctgattgtgggcttcaccagccgcttcaagaggcagaccagctaccagggcgtgctgtag

SEQ ID NO: 146667 - DNA, 435 bp, synthetic construct
  misc_feature 1..435: note = Description of Artificial Sequence: Synthetic coding sequence
  source 1..435: mol_type = other DNA
atgctgctgctcttcctgctgtttgagggcctgtgctgccctggagagaacacagctgtgaagccagaggcctggctgagctgtggccccagccctggccctggccgcctgcagctggtgtgccacgtgtctggcttctaccccaagcctgtgtgggtgatgtggatgaggggcggctacagcatcttcctgatcctgatctgcctgaccgtcatcgtgaccctggtgatcctggtggtggtggacagccggctgaagaagcagagcagcaacaagaacatcctgagcccccacacccccagccctgtgttcctgatgggcgccaacacccaggacaccaagaacagccgccaccagttctgcctggcccaggtgtcctggatcaagaacagagtgctgaagaagtggaagacccggctgaaccagctgtggtag

SEQ ID NO: 146668 - DNA, 696 bp, synthetic construct
  misc_feature 1..696: note = Description of Artificial Sequence: Synthetic coding sequence
  source 1..696: mol_type = other DNA
atgctgctgctcttcctgctgtttgagggcctgtgctgccctggagagaacacagctgccccccaggccctgcagagctaccacctggccgctgaggagcagctgtccttcaggatgctgcagaccagcagctttgccaaccacagctgggcccacagcgagggcagcggctggctgggggacctgcagacccacggctgggacacagtgctgggcaccatccgcttcctgaagccctggagccacggcaacttcagcaagcaggagctgaagaacctgcagagcctcttccagctgtacttccacagcttcatccagatcgtgcaggccagcgctggccagttccagctggagctgaagccagaggcctggctgagctgtggccccagccctggccctggccgcctgcagctggtgtgccacgtgtctggcttctaccccaagcctgtgtgggtgatgtggatgagaggaggctacagcatcttcctgatcctgatctgcctgactgtgattgtgaccctggtgatcctggtggtggtggacagccggctgaagaagcagagccctgtgttcctgatgggcgccaacacccaggacaccaagaacagccgccaccagttctgcctggcccaggtgtcctggatcaagaacagagtgctgaagaagtggaagacccggctgaaccagctgtggtag

SEQ ID NO: 146669 - DNA, 861 bp, synthetic construct
  misc_feature 1..861: note = Description of Artificial Sequence: Synthetic coding sequence
  source 1..861: mol_type = other DNA
atgctgctgctcttcctgctgtttgagggcctgtgctgccctggagagaacacagctgccccccaggccctgcagagctaccacctggccgctgaggagcagctgtccttcaggatgctgcagaccagcagctttgccaaccacagctgggcccacagcgagggcagcggctggctgggggacctgcagacccacggctgggacacagtgctgggcaccatccgcttcctgaagccctggagccacggcaacttcagcaagcaggagctgaagaacctgcagagcctcttccagctgtacttccacagcttcatccagatcgtgcaggccagcgctggccagttccagctggagctgaagccagaggcctggctgagctgtggccccagccctggccctggccgcctgcagctggtgtgccacgtgtctggcttctaccccaagcctgtgtgggtgatgtggatgagaggagagcaggagcagaggggcacccagagaggagatgtgctgcccaatgctgatgagacctggtacctgcgggccaccctggatgtggccgccggggaggccgccggcctgagctgccgggtgaagcacagcagcctgggcggccatgacctgatcatccactggggcggctacagcatcttcctgatcctgatctgcctgaccgtcatcgtgaccctggtgatcctggtggtggtggacagccggctgaagaagcagagccctgtgttcctgatgggcgccaacacccaggacaccaagaacagccgccaccagttctgcctggcccaggtgtcctggatcaagaacagagtgctgaagaagtggaagacccggctgaaccagctgtggtag

SEQ ID NO: 146670 - DNA, 399 bp, synthetic construct
  misc_feature 1..399: note = Description of Artificial Sequence: Synthetic coding sequence
  source 1..399: mol_type = other DNA
atgctgctgctcttcctgctgtttgagggcctgtgctgccctggagagaacacagctgtgaagccagaggcctggctgagctgtggccccagccctggccctggccgcctgcagctggtgtgccacgtgtctggcttctaccccaagcctgtgtgggtgatgtggatgaggggcggctacagcatcttcctgatcctgatctgcctgaccgtcatcgtgaccctggtgatcctggtggtggtggacagccggctgaagaagcagagccctgtgttcctgatgggcgccaacacccaggacaccaagaacagccgccaccagttctgcctggcccaggtgtcctggatcaagaacagagtgctgaagaagtggaagacccggctgaaccagctgtggtag

SEQ ID NO: 146671 - DNA, 1131 bp, synthetic construct
  misc_feature 1..1131: note = Description of Artificial Sequence: Synthetic coding sequence
  source 1..1131: mol_type = other DNA
atgctgctgctcttcctgctgtttgagggcctgtgctgccctggagagaacacagctgccccccaggccctgcagagctaccacctggccgctgaggagcagctgtccttcaggatgctgcagaccagcagctttgccaaccacagctgggcccacagcgagggcagcggctggctgggggacctgcagacccacggctgggacacagtgctgggcaccatccgcttcctgaagccctggagccacggcaacttcagcaagcaggagctgaagaacctgcagagcctcttccagctgtacttccacagcttcatccagatcgtgcaggccagcgctggccagttccagctggagtacccctttgagatccagatcctggccggctgcaggatgaatgccccccagatcttcctgaacatggcctaccagggcagtgacttcctgtccttccagggcatctcctgggagcccagccctggagctggcatccgggcccagaacatctgcaaggtgctgaaccgctacctggacatcaaggagatcctgcagagcctgctgggccacacctgcccccgcttcctggccggcctgatggaggccggggagagcgagctgaagaggaaggtgaagccagaggcctggctgagctgtggccccagccctggccctggccgcctgcagctggtgtgccacgtgtctggcttctaccccaagcctgtgtgggtgatgtggatgagaggagagcaggagcagaggggcacccagagaggagatgtgctgcccaatgctgatgagacctggtacctgcgggccaccctggatgtggccgccggggaggccgccggcctgagctgccgggtgaagcacagcagcctgggcggccatgacctgatcatccactggggcggctacagcatcttcctgatcctgatctgcctgaccgtcatcgtgaccctggtgatcctggtggtggtggacagccggctgaagaagcagagccctgtgttcctgatgggcgccaacacccaggacaccaagaacagccgccaccagttctgcctggcccaggtgtcctggatcaagaacagagtgctgaagaagtggaagacccggctgaaccagctgtggtag

SEQ ID NO: 146672 - DNA, 873 bp, synthetic construct
  misc_feature 1..873: note = Description of Artificial Sequence: Synthetic coding sequence
  source 1..873: mol_type = other DNA
atgctgctgctcttcctgctgtttgagggcctgtgctgccctggagagaacacagctgccccccaggccctgcagagctaccacctggccgctgaggagcagctgtccttcaggatgctgcagaccagcagctttgccaaccacagctgggcccacagcgagggcagcggctggctgggggacctgcagacccacggctgggacacagtgctgggcaccatccgcttcctgaagccctggagccacggcaacttcagcaagcaggagctgaagaacctgcagagcctcttccagctgtacttccacagcttcatccagatcgtgcaggccagcgctggccagttccagctggagtacccctttgagatccagatcctggccggctgcaggatgaatgccccccagatcttcctgaacatggcctaccagggcagtgacttcctgtccttccagggcatctcctgggagcccagccctggagctggcatccgggcccagaacatctgcaaggtgctgaaccgctacctggacatcaaggagatcctgcagagcctgctgggccacacctgcccccgcttcctggccggcctgatggaggccggggagagcgagctgaagaggaaggtgaagccagaggcctggctgagctgtggccccagccctggccctggccgcctgcagctggtgtgccacgtgtctggcttctaccccaagcctgtgtgggtgatgtggatgagaggagagcaggagcagaggggcacccagagaggagatgtgctgcccaatgctgatgagacctggtggatcttccacctgagccacccagacctgtttgactgtgacagctacccaggccacatcggctgcagctag

SEQ ID NO: 146673 - DNA, 183 bp, synthetic construct
  misc_feature 1..183: note = Description of Artificial Sequence: Synthetic coding sequence
  source 1..183: mol_type = other DNA
tgagtgtctggcttctaccccaagcctgtgtgggtgatgtggatgagaggagagcaggagcagaggggcacccagagaggagatgtgctgcccaatgctgatgagacctggtggatcttccacctgagccacccagacctgtttgactgtgacagctacccaggccacatcggctgcagctag

SEQ ID NO: 146674 - DNA, 966 bp, synthetic construct
  misc_feature 1..966: note = Description of Artificial Sequence: Synthetic coding sequence
  source 1..966: mol_type = other DNA
atgctgctgctcttcctgctgtttgagggcctgtgctgccctggagagaacacagctgccccccaggccctgcagagctaccacctggccgctgaggagcagctgtccttcaggatgctgcagaccagcagctttgccaaccacagctgggcccacagcgagggcagcggctggctgggggacctgcagacccacggctgggacacagtgctgggcaccatccgcttcctgaagccctggagccacggcaacttcagcaagcaggagctgaagaacctgcagagcctcttccagctgtacttccacagcttcatccagatcgtgcaggccagcgctggccagttccagctggagtacccctttgagatccagatcctggccggctgcaggatgaatgccccccagatcttcctgaacatggcctaccagggcagtgacttcctgtccttccagggcatctcctgggagcccagccctggagctggcatccgggcccagaacatctgcaaggtgctgaaccgctacctggacatcaaggagatcctgcagagcctgctgggccacacctgcccccgcttcctggccggcctgatggaggccggggagagcgagctgaagaggaaggtgaagccagaggcctggctgagctgtggccccagccctggccctggccgcctgcagctggtgtgccacgtgtctggcttctaccccaagcctgtgtgggtgatgtggatgagaggaggctacagcatcttcctgatcctgatctgcctgactgtgattgtgaccctggtgatcctggtggtggtggacagccggctgaagaagcagagccctgtgttcctgatgggcgccaacacccaggacaccaagaacagccgccaccagttctgcctggcccaggtgtcctggatcaagaacagagtgctgaagaagtggaagacccggctgaaccagctgtggtag

SEQ ID NO: 146675 - DNA, 306 bp, synthetic construct
  misc_feature 1..306: note = Description of Artificial Sequence: Synthetic coding sequence
  source 1..306: mol_type = other DNA
atgctgctgctcttcctgctgtttgagggcctgtgctgccctggagagaacacagctgtgaagccagaggcctggctgagctgtggccccagccctggccctggccgcctgcagctggtgtgccacgtgtctggcttctaccccaagcctgtgtgggtgatgtggatgagaggagagcaggagcagaggggcacccagagaggagatgtgctgcccaatgctgatgagacctggtggatcttccacctgagccacccagacctgtttgactgtgacagctacccaggccacatcggctgcagctag

SEQ ID NO: 146676 - DNA, 897 bp, synthetic construct
  misc_feature 1..897: note = Description of Artificial Sequence: Synthetic coding sequence
  source 1..897: mol_type = other DNA
atgctgctgctcttcctgctgtttgagggcctgtgctgccctggagagaacacagctgccccccaggccctgcagagctaccacctggccgctgaggagcagctgtccttcaggatgctgcagaccagcagctttgccaaccacagctgggcccacagcgagggcagcggctggctgggggacctgcagacccacggctgggacacagtgctgggcaccatccgcttcctgaagccctggagccacggcaacttcagcaagcaggagctgaagaacctgcagagcctcttccagctgtacttccacagcttcatccagatcgtgcaggccagcgctggccagttccagctggagctgaagccagaggcctggctgagctgtggccccagccctggccctggccgcctgcagctggtgtgccacgtgtctggcttctaccccaagcctgtgtgggtgatgtggatgagaggagagcaggagcagaggggcacccagagaggagatgtgctgcccaatgctgatgagacctggtacctgcgggccaccctggatgtggccgccggggaggccgccggcctgagctgccgggtgaagcacagcagcctgggcggccatgacctgatcatccactggggcggctacagcatcttcctgatcctgatctgcctgaccgtcatcgtgaccctggtgatcctggtggtggtggacagccggctgaagaagcagagcagcaacaagaacatcctgagcccccacacccccagccctgtgttcctgatgggcgccaacacccaggacaccaagaacagccgccaccagttctgcctggcccaggtgtcctggatcaagaacagagtgctgaagaagtggaagacccggctgaaccagctgtggtag

SEQ ID NO: 146677 - DNA, 564 bp, synthetic construct
  misc_feature 1..564: note = Description of Artificial Sequence: Synthetic coding sequence
  source 1..564: mol_type = other DNA
atgctgctgctcttcctgctgtttgagggcctgtgctgccctggagagaacacagctgtgaagccagaggcctggctgagctgtggccccagccctggccctggccgcctgcagctggtgtgccacgtgtctggcttctaccccaagcctgtgtgggtgatgtggatgagaggagagcaggagcagaggggcacccagagaggagatgtgctgcccaatgctgatgagacctggtacctgcgggccaccctggatgtggccgccggggaggccgccggcctgagctgccgggtgaagcacagcagcctgggcggccatgacctgatcatccactggggcggctacagcatcttcctgatcctgatctgcctgactgtgattgtgaccctggtgatcctggtggtggtggacagccggctgaagaagcagagccctgtgttcctgatgggcgccaacacccaggacaccaagaacagccgccaccagttctgcctggcccaggtgtcctggatcaagaacagagtgctgaagaagtggaagacccggctgaaccagctgtggtag

SEQ ID NO: 146678 - DNA, 1167 bp, synthetic construct
  misc_feature 1..1167: note = Description of Artificial Sequence: Synthetic coding sequence
  source 1..1167: mol_type = other DNA
atgctgctgctcttcctgctgtttgagggcctgtgctgccctggagagaacacagctgccccccaggccctgcagagctaccacctggccgctgaggagcagctgtccttcaggatgctgcagaccagcagctttgccaaccacagctgggcccacagcgagggcagcggctggctgggggacctgcagacccacggctgggacacagtgctgggcaccatccgcttcctgaagccctggagccacggcaacttcagcaagcaggagctgaagaacctgcagagcctcttccagctgtacttccacagcttcatccagatcgtgcaggccagcgctggccagttccagctggagtacccctttgagatccagatcctggccggctgcaggatgaatgccccccagatcttcctgaacatggcctaccagggcagtgacttcctgtccttccagggcatctcctgggagcccagccctggagctggcatccgggcccagaacatctgcaaggtgctgaaccgctacctggacatcaaggagatcctgcagagcctgctgggccacacctgcccccgcttcctggccggcctgatggaggccggggagagcgagctgaagaggaaggtgaagccagaggcctggctgagctgtggccccagccctggccctggccgcctgcagctggtgtgccacgtgtctggcttctaccccaagcctgtgtgggtgatgtggatgagaggagagcaggagcagaggggcacccagagaggagatgtgctgcccaatgctgatgagacctggtacctgcgggccaccctggatgtggccgccggggaggccgccggcctgagctgccgggtgaagcacagcagcctgggcggccatgacctgatcatccactggggcggctacagcatcttcctgatcctgatctgcctgaccgtcatcgtgaccctggtgatcctggtggtggtggacagccggctgaagaagcagagcagcaacaagaacatcctgagcccccacacccccagccctgtgttcctgatgggcgccaacacccaggacaccaagaacagccgccaccagttctgcctggcccaggtgtcctggatcaagaacagagtgctgaagaagtggaagacccggctgaaccagctgtggtag

SEQ ID NO: 146679 - DNA, 1023 bp, synthetic construct
  misc_feature 1..1023: note = Description of Artificial Sequence: Synthetic coding sequence
  source 1..1023: mol_type = other DNA
atgatcaagagccgggtgaagcgctacagaagaagaagaggcagccagagggccccccaggccctgcagagctaccacctggccgctgaggagcagctgtccttcaggatgctgcagaccagcagctttgccaaccacagctgggcccacagcgagggcagcggctggctgggggacctgcagacccacggctgggacacagtgctgggcaccatccgcttcctgaagccctggagccacggcaacttcagcaagcaggagctgaagaacctgcagagcctcttccagctgtacttccacagcttcatccagatcgtgcaggccagcgctggccagttccagctggagtacccctttgagatccagatcctggccggctgcaggatgaatgccccccagatcttcctgaacatggcctaccagggcagtgacttcctgtccttccagggcatctcctgggagcccagccctggagctggcatccgggcccagaacatctgcaaggtgctgaaccgctacctggacatcaaggagatcctgcagagcctgctgggccacacctgcccccgcttcctggccggcctgatggaggccggggagagcgagctgaagaggaaggtgaagccagaggcctggctgagctgtggccccagccctggccctggccgcctgcagctggtgtgccacgtgtctggcttctaccccaagcctgtgtgggtgatgtggatgagaggagagcaggagcagaggggcacccagagaggagatgtgctgcccaatgctgatgagacctggtacctgcgggccaccctggatgtggccgccggggaggccgccggcctgagctgccgggtgaagcacagcagcctgggcggccatgacctgatcatccactggggcgagaagcagctgcggctgtgctgggagatcatgaagatcgccctgggcctgctgtctgtgggcctgaggaagtgggtgggcatgctgggcacccggcgggtgaagctgggccagagcaagtag

SEQ ID NO: 146680 - DNA, 870 bp, synthetic construct
  misc_feature 1..870: note = Description of Artificial Sequence: Synthetic coding sequence
  source 1..870: mol_type = other DNA
atgctgctgctcttcctgctgtttgagggcctgtgctgccctggagagaacacagctgacccctttgagatccagatcctggccggctgcaggatgaatgccccccagatcttcctgaacatggcctaccagggcagtgacttcctgtccttccagggcatctcctgggagcccagccctggggccggcatccgggcccagaacatctgcaaggtgctgaaccgctacctggacatcaaggagatcctgcagagcctgctgggccacacctgcccccgcttcctggccggcctgatggaggccggggagagcgagctgaagaggaaggtgaagccagaggcctggctgagctgtggccccagccctggccctggccgcctgcagctggtgtgccacgtgtctggcttctaccccaagcctgtgtgggtgatgtggatgagaggagagcaggagcagaggggcacccagagaggagatgtgctgcccaatgctgatgagacctggtacctgcgggccaccctggatgtggccgccggggaggccgccggcctgagctgccgggtgaagcacagcagcctgggcggccatgacctgatcatccactggggcggctacagcatcttcctgatcctgatctgcctgactgtgattgtgaccctggtgatcctggtggtggtggacagccggctgaagaagcagagcagcaacaagaacatcctgagcccccacacccccagccctgtgttcctgatgggcgccaacacccaggacaccaagaacagccgccaccagttctgcctggcccaggtgtcctggatcaagaacagagtgctgaagaagtggaagacccggctgaaccagctgtggtag

SEQ ID NO: 146681 - DNA, 600 bp, synthetic construct
  misc_feature 1..600: note = Description of Artificial Sequence: Synthetic coding sequence
  source 1..600: mol_type = other DNA
atgctgctgctcttcctgctgtttgagggcctgtgctgccctggagagaacacagctgtgaagccagaggcctggctgagctgtggccccagccctggccctggccgcctgcagctggtgtgccacgtgtctggcttctaccccaagcctgtgtgggtgatgtggatgagaggagagcaggagcagaggggcacccagagaggagatgtgctgcccaatgctgatgagacctggtacctgcgggccaccctggatgtggccgccggggaggccgccggcctgagctgccgggtgaagcacagcagcctgggcggccatgacctgatcatccactggggcggctacagcatcttcctgatcctgatctgcctgactgtgattgtgaccctggtgatcctggtggtggtggacagccggctgaagaagcagagcagcaacaagaacatcctgagcccccacacccccagccctgtgttcctgatgggcgccaacacccaggacaccaagaacagccgccaccagttctgcctggcccaggtgtcctggatcaagaacagagtgctgaagaagtggaagacccggctgaaccagctgtggtag

SEQ ID NO: 146682 - DNA, 1047 bp, synthetic construct
  misc_feature 1..1047: note = Description of Artificial Sequence: Synthetic coding sequence
  source 1..1047: mol_type = other DNA
atgctgtgcccctggaggacagccaacctgggcctgctgctgatcctgaccatcttcctggtggccgaggccgagggcgccgcccagcccaacaacagcctgatgctgcagaccagcaaagaaaatcatgccctggccagcagcagcctgtgcatggatgagaagcagatcacccagaactacagcaaggtgctggccgaggtgaacacctcctggcctgtgaagatggccaccaatgctgtgctgtgctgcccccccatcgccctgaggaacctgatcatcatcacctgggagatcatcctgcggggccagcccagctgcaccaaggcctacaagaaggagaccaatgagaccaaggagaccaactgcacagatgagcgcatcacctgggtgtccaggccagaccagaacagcgacctgcagatcagaacagtggccatcacccatgatggctactaccgctgcatcatggtgaccccagatggcaacttccaccggggctaccacctgcaggtgctggtgaccccagaggtgaccctcttccagaacagaaacagaacagctgtgtgcaaggctgtggccggcaagccagctgcccacatctcctggatccctgagggggactgtgccaccaagcaggagtactggagcaatggcaccgtgacagtgaagagcacctgccactgggaggtgcacaacgtgtccacagtgacctgccacgtgagccacctgactggaaacaagagcctgtacatcgagctgctgcctgtgcctggggccaagaagagcgccaagctgtacatcccctacatcatcctgaccatcatcatcctgaccatcgtgggcttcatctggctgctgaaggtgaatggctgcaggaagtacaagctgaacaagacagagagcacccctgtggtggaggaggatgagatgcagccctatgccagctacacagagaagaacaaccccctgtatgacaccaccaacaaggtgaaggccagcgaggccctgcagagcgaggtggacacagacctgcacaccctgtag

SEQ ID NO: 146683 - DNA, 567 bp, synthetic construct
  misc_feature 1..567: note = Description of Artificial Sequence: Synthetic coding sequence
  source 1..567: mol_type = other DNA
atgctgtgcccctggaggacagccaacctgggcctgctgctgatcctgaccatcttcctggtggccgaggccgagggcgccgcccagcccaacaacagcctgatgctgcagaccagcaaagaaaatcatgccctggccagcagcagcctgtgcatggatgagaagcagatcacccagaactacagcaaggtgctggccgaggtgaacacctcctggcctgtgaagatggccaccaatgctgtgctgtgctgcccccccatcgccctgaggaacctgatcatcatcacctgggagatcatcctgcggggccagcccagctgcaccaaggcctacaagaaggagaccaatgagaccaaggagaccaactgcacagatgagcgcatcacctgggtgtccaggccagaccagaacagcgacctgcagatcagaacagtggccatcacccatgatggctactaccgctgcatcatggtgaccccagatggcaacttccaccggggctaccacctgcaggtgctgggcaaggagcaccacatcctgcgctacttcaccagcccagacctgtag

SEQ ID NO: 146684 - DNA, 978 bp, synthetic construct
  misc_feature 1..978: note = Description of Artificial Sequence: Synthetic coding sequence
  source 1..978: mol_type = other DNA
atgctgtgcccctggaggacagccaacctgggcctgctgctgatcctgaccatcttcctggtggccgccagcagcagcctgtgcatggatgagaagcagatcacccagaactacagcaaggtgctggccgaggtgaacacctcctggcctgtgaagatggccaccaatgctgtgctgtgctgcccccccatcgccctgaggaacctgatcatcatcacctgggagatcatcctgcggggccagcccagctgcaccaaggcctacaagaaggagaccaatgagaccaaggagaccaactgcacagatgagcgcatcacctgggtgtccaggccagaccagaacagcgacctgcagatcagaacagtggccatcacccatgatggctactaccgctgcatcatggtgaccccagatggcaacttccaccggggctaccacctgcaggtgctggtgaccccagaggtgaccctcttccagaacagaaacagaacagctgtgtgcaaggctgtggccggcaagccagctgcccacatctcctggatccctgagggggactgtgccaccaagcaggagtactggagcaatggaacagtgacagtgaagagcacctgccactgggaggtgcacaacgtgtccacagtgacctgccacgtgagccacctgaccggcaacaagagcctgtacatcgagctgctgcctgtgcctggggccaagaagagcgccaagctgtacatcccctacatcatcctgaccatcatcatcctgaccatcgtgggcttcatctggctgctgaaggtgaatggctgcaggaagtacaagctgaacaagacagagagcacccctgtggtggaggaggatgagatgcagccctatgccagctacacagagaagaacaaccccctgtatgacaccaccaacaaggtgaaggccagcgaggccctgcagagcgaggtggacacagacctgcacaccctgtag

SEQ ID NO: 146685 - DNA, 498 bp, synthetic construct
  misc_feature 1..498: note = Description of Artificial Sequence: Synthetic coding sequence
  source 1..498: mol_type = other DNA
atgctgtgcccctggaggacagccaacctgggcctgctgctgatcctgaccatcttcctggtggccgccagcagcagcctgtgcatggatgagaagcagatcacccagaactacagcaaggtgctggccgaggtgaacacctcctggcctgtgaagatggccaccaatgctgtgctgtgctgcccccccatcgccctgaggaacctgatcatcatcacctgggagatcatcctgcggggccagcccagctgcaccaaggcctacaagaaggagaccaatgagaccaaggagaccaactgcacagatgagcgcatcacctgggtgtccaggccagaccagaacagcgacctgcagatcagaacagtggccatcacccatgatggctactaccgctgcatcatggtgaccccagatggcaacttccaccggggctaccacctgcaggtgctgggcaaggagcaccacatcctgcgctacttcaccagcccagacctgtag

SEQ ID NO: 146686 - DNA, 987 bp, synthetic construct
  misc_feature 1..987: note = Description of Artificial Sequence: Synthetic coding sequence
  source 1..987: mol_type = other DNA
atgacagtggagaaggaggccccagatgcccacttcaccgtggacaagcagaacatcagcctgtggccccgggagcccccacccaagagcggccccagcctggtgcctgggaagacccccaccgtgcgggccgccctgatctgcctgaccctggtgctggtggcctctgtgctgctgcaggccgtgctgtacccccgcttcatgggcaccatcagtgatgtgaagaccaacgtgcagctgctgaagggccgggtggacaacatcagcaccctggacagcgagatcaagaagaacagtgatggcatggaggccgccggcgtgcagatccagatggtgaatgaaagcctgggctacgtgcgcagccagttcctgaagctgaagacctctgtggagaaggccaatgcccagatccagatcctgaccaggtcctgggaggaggtgtccaccctgaatgcccagatccctgagctgaagagtgacctggagaaggccagcgccctgaacaccaagatccgggccctgcagggcagcctggagaacatgagcaagctgctgaagaggcagaatgacatcctgcaggtggtgtcccagggctggaagtacttcaagggcaacttctactacttcagcctcatccccaagacctggtacagcgctgagcagttctgtgtgtccaggaacagccacctgacctctgtgaccagcgagagcgagcaggagttcctgtacaagacagctgggggcctcatctactggattggcctgaccaaggccggcatggagggggactggagctgggtggatgacacccccttcaacaaggtgcagagcgtgcgcttctggatccctggagagcccaacaatgccggcaacaatgagcactgcggcaacatcaaggcccccagcctgcaggcctggaatgatgccccctgtgacaagaccttcctgttcatctgcaagaggccctacgtgcccagcgagccctag

SEQ ID NO: 146687 - DNA, 4497 bp, synthetic construct
  misc_feature 1..4497: note = Description of Artificial Sequence: Synthetic coding sequence
  source 1..4497: mol_type = other DNA
atggatggagccagcgctgagcaggacggcctgcaggaggacaggagccacagcggccccagcagcctgcctgaggcccccctgaagcccccaggccccctggtgcccccagaccagcaggacaaggtgcagtgtgccgaggtgaacagagccagcacagaaggagagagcccagatggccctggccagggcggcctgtgccagaatggccccaccccacccttcccagacccccccagcagcctggaccccaccaccagccctgtgggcccagatgccagccctggggtggccggcttccatgacaacctgaggaagagccagggcaccagcgctgagggctctgtgaggaaggaggccctgcagagcctgcggctgagcctgcccatgcaggagacccagctgtgcagcacagacagccccctgcccctggagaaggaggagcaggtgcggctgcaggccaggaagtggctggaggagcagctgaagcagtacagagtgaagaggcagcaggagaggagcagccagcctgccaccaagaccaggctcttcagcaccctggaccctgagctgatgctgaaccctgagaacctgccccgggccagcaccctggccatgaccaaggagtacagcttcctgcggacctctgtgccccggggccccaaggtgggcagcctgggcctgcctgcccacccccgggagaagaagaccagcaagagcagcaagatccgcagcctggccgactacagaacagaggacagcaatgccggcaacagcggcggcaatgtgcctgccccagacagcaccaagggcagcctgaagcagaacagaagcagcgctgcctctgtggtgtctgagatcagcctgagcccagacacagatgaccggctggagaacaccagcctggccggggacagcgtgtctgaggtggatggaaatgacagcgacagcagcagctacagcagcgccagcacccggggcacctacggcatcctgagcaagacagtgggcacccaggacaccccctacatggtgaatggccaggagatcccagctgacaccctgggccagttccccagcatcaaggatgtgctgcaggccgctgctgctgagcaccaggaccagggccaggaggtgaatggagaggtgcgcagccggcgggacagcatctgcagctctgtgtccctggagagcagcgctgctgagacccaggaggagatgctgcaggtgctgaaggagaagatgaggctggagggccagctggaggccctgagcctggaggccagccaggccctgaaggagaaggccgagctgcaggcccagctggccgccctgagcaccaagctgcaggcccaggtggagtgcagccacagcagccagcagaggcaggacagcctgagcagcgaggtggacaccctgaagcagagctgctgggacctggagcgggccatgacagacctgcagaacatgctggaggccaagaatgccagcctggccagcagcaacaatgacctgcaggtggccgaggagcagtaccagaggctgatggccaaggtggaggacatgcagaggtccatgctgagcaaggacaacacagtgcatgacctgcggcagcagatgacagccctgcagagccagctgcagcaggtgcagctggagaggaccaccctgaccagcaagctgaaggccagccaggccgagatcagcagcctgcagagcgtgcggcagtggtaccagcagcagctggccctggcccaggaggcccgggtgcggctgcagggcgagatggcccacatccaggtgggccagatgacccaggccggcctgctggagcacctgaagctggagaatgtgtccctgagccagcagctgacagagacccagcaccgctccatgaaggagaagggcagaattgctgcccagctgcagggcattgaagctgacatgctggaccaggaggccgccttcatgcagatccaggaggccaagaccatggtggaggaggacctgcagaggcggctggaggagtttgaaggagagcgggagcggctgcagaggatggctgacagcgctgccagcctggagcagcagctggagcaggtgaagctgaccctgctgcagagggaccagcagctggaggccctgcagcaggagcacctggacctgatgaagcagctgaccctgacccaggaggccctgcagagccgggagcagagcctggatgccctgcagacccactatgatgagctgcaggcccggctgggggagctgcagggcgaggccgccagccgggaggacaccatctgcctgctgcagaatgagaagatcatcctggaggccgccctgcaggccgccaagagcggcaaggaggagctggacagaggagcccggcggctggaggagggcacagaggagaccagcgagaccctggagaagctgcgggaggagctggccatcaagagcggccaggtggagcacctgcagcaggagacagctgccctgaagaagcagatgcagaagatcaaggagcagttcctgcagcagaaggtgatggtggaggcctacagaagagatgccaccagcaaggaccagctgatcagcgagctgaaggccaccaggaagaggctggacagcgagctgaaggagctgcggcaggagctgatgcaggtgcatggagagaagaggacagctgaggccgagctgagccggctgcaccgggaggtggcccaggtgcggcagcacatggctgacctggagggccacctgcagagcgcccagaaggagagagatgagatggagacccacctgcagagcctgcagtttgacaaggagcagatggtggccgtgacagaggccaatgaggccctgaagaagcagatcgaggagctgcagcaggaggccaggaaggccatcacagagcagaagcagaagatgaggcggctgggcagtgacctgaccagcgcccagaaggagatgaagaccaagcacaaggcctatgaaaatgctgtgggcatcctgagccggcggctgcaggaggccctggccgccaaggaggccgcagatgctgagctgggccagctgcgggcccagggcggcagcagtgacagcagcctggccctgcacgagcgcatccaggccctggaggccgagctgcaggccgtgagccacagcaagaccctgctggagaaggagctgcaggaggtgattgccctgaccagccaggagctggaggagagccgggagaaggtgctggagctggaggatgagctgcaggagagccggggcttcaggaagaagatcaagaggctggaggagagcaacaagaagctggccctggagctggagcacgagaagggcaagctgaccggcctgggccagagcaatgctgccctgcgggagcacaacagcatcctggagacagccctggccaagcgggaggccgacctggtgcagctgaacctgcaggtgcaggccgtgctgcagaggaaggaggaggaggaccggcagatgaagcacctggtgcaggccctgcaggccagcctggagaaggagaaggagaaggtgaacagcctgaaggagcaggtggccgccgccaaggtggaggccggccacaacagaagacacttcaaggccgccagcctggagctgtctgaggtgaagaaggagctgcaggccaaggagcacctggtgcagaagctgcaggccgaggctgatgacctgcagatccgggagggcaagcacagccaggagatcgcccagttccaggccgagctggccgaggcccgggcccagctgcagctgctgcagaagcagctggatgagcagctgagcaagcagcctgtgggcaaccaggagatggagaacctgaagtgggaggtggaccagaaggagcgggagatccagagcctgaagcagcagctggacctgacagagcagcagggcaggaaggagctggagggcctgcagcagctgctgcagaatgtgaagtctgagctggagatggcccaggaggacctgtccatgacccagaaggacaagttcatgctgcaggccaaggtgtctgagctgaagaacaacatgaagaccctgctgcagcagaaccagcagctgaagctggacctgcggcggggggccgccaagaccaggaaggagcccaagggggaggccagcagcagcaacccagccacccccatcaagatcccagactgccctgtgcctgccagcctgctggaggagctgctgcggcccccacctgctgtgtccaaggagcccctgaagaacctgaacagctgcctgcagcagctgaagcaggagatggacagcctgcagaggcagatggaggagcacgccctgactgtgcatgagagcctgagctcctggacccccctggagcccgccacagccagccctgtgcccccaggcggccatgctggccccaggggggacccccagaggcacagccagagccgggccagcaaggagggccctggagagtag

SEQ ID NO: 146688 - DNA, 807 bp, synthetic construct
  misc_feature 1..807: note = Description of Artificial Sequence: Synthetic coding sequence
  source 1..807: mol_type = other DNA
atgtctgacagcaaggagccccggctgcagcagctgggcctgctggtgtccaaggtgcccagcagcatcagccaggagcagagccggcaggatgccatctaccagaacctgacccagctgaaggctgctgtgggggagctgtctgagaagagcaagctgcaggagatctaccaggagctgacccagctgaaggctgctgtgggggagctgcctgagaagagcaagctgcaggagatctaccaggagctgacccggctgaaggctgctgtgggggagctgcctgagaagagcaagcagcaggagatctaccaggagctgacccagctgaaggctgctgtggagcggctgtgccacccctgcccctgggagtggaccttcttccagggcaactgctacttcatgagcaacagccagaggaactggcatgacagcatcacagcctgcaaggaggtgggcgcccagctggtggtgatcaagtctgctgaggagcagaacttcctgcagctgcagagcagccgcagcaaccgcttcacctggatgggcctgagtgacctgaaccaggagggcacctggcagtgggtggatggcagccccctgctgcccagcttcaagcagtactggaacagaggagagcccaacaacgtgggggaggaggactgtgccgagttctctggaaatggctggaatgatgacaagtgcaacctggccaagttctggatctgcaagaagtctgctgccagctgcagcagagatgaggagcagttcctgagccctgccccagccacccccaaccccccaccagcctag

SEQ ID NO: 146689 - DNA, 1143 bp, synthetic construct
  misc_feature 1..1143: note = Description of Artificial Sequence: Synthetic coding sequence
  source 1..1143: mol_type = other DNA
atgtctgacagcaaggagccccggctgcagcagctgggcctgctggaggaggagcagctgcggggcctgggcttccggcagacccggggctacaagagcctggccgtgtccaaggtgcccagcagcatcagccaggagcagagccggcaggatgccatctaccagaacctgacccagctgaaggctgctgtgggggagctgtctgagaagagcaagctgcaggagatctaccaggagctgacccagctgaaggctgctgtgggggagctgcctgagaagagcaagctgcaggagatctaccaggagctgacccggctgaaggctgctgtgggggagctgcctgagaagagcaagctgcaggagatctaccaggagctgacctggctgaaggctgctgtgggggagctgcctgagaagagcaagatgcaggagatctaccaggagctgacccggctgaaggctgctgtgggggagctgcctgagaagagcaagcagcaggagatctaccaggagctgacccggctgaaggctgctgtgggggagctgcctgagaagagcaagcagcaggagatctaccaggagctgacccggctgaaggctgctgtgggggagctgcctgagaagagcaagcagcaggagatctaccaggagctgacccagctgaaggctgctgtggagcggctgtgccacccctgcccctgggagtggaccttcttccagggcaactgctacttcatgagcaacagccagaggaactggcatgacagcatcacagcctgcaaggaggtgggcgcccagctggtggtgatcaagtctgctgaggagcagaacttcctgcagctgcagagcagccgcagcaaccgcttcacctggatgggcctgagtgacctgaaccaggagggcacctggcagtgggtggatggcagccccctgctgcccagcttcaagcagtactggaacagaggagagcccaacaacgtgggggaggaggactgtgccgagttctctggaaatggctggaatgatgacaagtgcaacctggccaagttctggatctgcaagaagtctgctgccagctgcagcagagatgaggagcagttcctgagccctgccccagccacccccaaccccccaccagcctag

SEQ ID NO: 146690 - DNA, 1215 bp, synthetic construct
  misc_feature 1..1215: note = Description of Artificial Sequence: Synthetic coding sequence
  source 1..1215: mol_type = other DNA
atgtctgacagcaaggagccccggctgcagcagctgggcctgctggaggaggagcagctgcggggcctgggcttccggcagacccggggctacaagagcctggccggctgcctgggccacggccccctggtgctgcagctgctgtccttcaccctgctggccggcctgctggtgcaggtgtccaaggtgcccagcagcatcagccaggagcagagccggcaggatgccatctaccagaacctgacccagctgaaggctgctgtgggggagctgtctgagaagagcaagctgcaggagatctaccaggagctgacccagctgaaggctgctgtgggggagctgcctgagaagagcaagctgcaggagatctaccaggagctgacccggctgaaggctgctgtgggggagctgcctgagaagagcaagctgcaggagatctaccaggagctgacctggctgaaggctgctgtgggggagctgcctgagaagagcaagatgcaggagatctaccaggagctgacccggctgaaggctgctgtgggggagctgcctgagaagagcaagcagcaggagatctaccaggagctgacccggctgaaggctgctgtgggggagctgcctgagaagagcaagcagcaggagatctaccaggagctgacccggctgaaggctgctgtgggggagctgcctgagaagagcaagcagcaggagatctaccaggagctgacccagctgaaggctgctgtggagcggctgtgccacccctgcccctgggagtggaccttcttccagggcaactgctacttcatgagcaacagccagaggaactggcatgacagcatcacagcctgcaaggaggtgggcgcccagctggtggtgatcaagtctgctgaggagcagaacttcctgcagctgcagagcagccgcagcaaccgcttcacctggatgggcctgagtgacctgaaccaggagggcacctggcagtgggtggatggcagccccctgctgcccagcttcaagcagtactggaacagaggagagcccaacaacgtgggggaggaggactgtgccgagttctctggaaatggctggaatgatgacaagtgcaacctggccaagttctggatctgcaagaagtctgctgccagctgcagcagagatgaggagcagttcctgagccctgccccagccacccccaaccccccaccagcctag

SEQ ID NO: 146691 - DNA, 1197 bp, synthetic construct
  misc_feature 1..1197: note = Description of Artificial Sequence: Synthetic coding sequence
  source 1..1197: mol_type = other DNA
atgtctgacagcaaggagccccggctgcagcagctgggcctgctggaggaggagcagctgcggggcctgggcttccggcagacccggggctacaagagcctggccggctgcctgggccacggccccctggtgctgcagctgctgtccttcaccctgctggccggcctgctggtgcaggtgtccaaggtgcccagcagcatcagccaggagcagagccggcaggatgccatctaccagaacctgacccagctgaaggctgctgtgggggagctgtctgagaagagcaagctgcaggagatctaccaggagctgacccagctgaaggctgctgtgggggagctgcctgagaagagcaagctgcaggagatctaccaggagctgacccggctgaaggctgctgtgggggagctgcctgagaagagcaagctgcaggagatctaccaggagctgacctggctgaaggctgctgtgggggagctgcctgagaagagcaagatgcaggagatctaccaggagctgacccggctgaaggctgctgtgggggagctgcctgagaagagcaagcagcaggagatctaccaggagctgacccggctgaaggctgctgtgggggagctgcctgagaagagcaagcagcaggagatctaccaggagctgacccggctgaaggctgctgtgggggagctgcctgagaagagcaagcagcaggagatctaccaggagctgacccagctgaaggctgctgtggagcggctgtgccacccctgcccctgggagtggaccttcttccagggcaactgctacttcatgagcaacagccagaggaactggcatgacagcatcacagcctgcaaggaggtgggcgcccagctggtggtgatcaagtctgctgaggagcagagcagccgcagcaaccgcttcacctggatgggcctgagtgacctgaaccaggagggcacctggcagtgggtggatggcagccccctgctgcccagcttcaagcagtactggaacagaggagagcccaacaacgtgggggaggaggactgtgccgagttctctggaaatggctggaatgatgacaagtgcaacctggccaagttctggatctgcaagaagtctgctgccagctgcagcagagatgaggagcagttcctgagccctgccccagccacccccaaccccccaccagcctag

SEQ ID NO: 146692 - DNA, 507 bp, synthetic construct
  misc_feature 1..507: note = Description of Artificial Sequence: Synthetic coding sequence
  source 1..507: mol_type = other DNA
atgtctgacagcaaggagccccggctgcagcagctgggcctgctggaggaggagcagctgcggggcctgggcttccggcagacccggggctacaagagcctggccggctgcctgggccacggccccctggtgctgcagctgctgtccttcaccctgctggccggcctgctggtgcaggtgtccaaggtgcccagcagcatcagccaggagcagagccgcagcaaccgcttcacctggatgggcctgagtgacctgaaccaggagggcacctggcagtgggtggatggcagccccctgctgcccagcttcaagcagtactggaacagaggagagcccaacaacgtgggggaggaggactgtgccgagttctctggaaatggctggaatgatgacaagtgcaacctggccaagttctggatctgcaagaagtctgctgccagctgcagcagagatgaggagcagttcctgagccctgccccagccacccccaaccccccaccagcctag

SEQ ID NO: 146693 - DNA, 939 bp, synthetic construct
  misc_feature 1..939: note = Description of Artificial Sequence: Synthetic coding sequence
  source 1..939: mol_type = other DNA
atgtctgacagcaaggagccccggctgcagcagctgggcctgctggaggaggagcagctgcggggcctgggcttccggcagacccggggctacaagagcctggccggctgcctgggccacggccccctggtgctgcagctgctgtccttcaccctgctggccggcctgctggtgcaggtgtccaaggtgcccagcagcatcagccaggagcagagccggcaggatgccatctaccagaacctgacccagctgaaggctgctgtgggggagctgtctgagaagagcaagctgcaggagatctaccaggagctgacccagctgaaggctgctgtgggggagctgcctgagaagagcaagctgcaggagatctaccaggagctgacccggctgaaggctgctgtgggggagctgcctgagaagagcaagctgcaggagatctaccaggagctgacctggctgaaggctgctgtggagcggctgtgccacccctgcccctgggagtggaccttcttccagggcaactgctacttcatgagcaacagccagaggaactggcatgacagcatcacagcctgcaaggaggtgggcgcccagctggtggtgatcaagtctgctgaggagcagaacttcctgcagctgcagagcagccgcagcaaccgcttcacctggatgggcctgagtgacctgaaccaggagggcacctggcagtgggtggatggcagccccctgctgcccagcttcaagcagtactggaacagaggagagcccaacaacgtgggggaggaggactgtgccgagttctctggaaatggctggaatgatgacaagtgcaacctggccaagttctggatctgcaagaagtctgctgccagctgcagcagagatgaggagcagttcctgagccctgccccagccacccccaaccccccaccagcctag

SEQ ID NO: 146694 - DNA, 105 bp, synthetic construct
  misc_feature 1..105: note = Description of Artificial Sequence: Synthetic coding sequence
  source 1..105: mol_type = other DNA
atgtctgacagcaaggagccccggctgcagcagctgggcctgctggaggaggagcagctgcggggcctgggcttccggcagaccaggaggaaccagaagtgctag

SEQ ID NO: 146695 - DNA, 855 bp, synthetic construct
  misc_feature 1..855: note = Description of Artificial Sequence: Synthetic coding sequence
  source 1..855: mol_type = other DNA
atgtctgacagcaaggagccccggctgcagcagctgggcctgctgggctgcctgggccacggccccctggtgctgcagctgctgtccttcaccctgctggccggcctgctggtgcaggtgctgggccctgtgtccaaggtgcccagcagcatcagccaggagcagagccggcaggatgccatctaccagaacctgacccagctgaaggctgctgtgggggagctgtctgagaagagcaagctgcaggagatctaccaggagctgacccagctgaaggctgctgtgggggagctgcctgagaagagcaagctgcaggagatctaccaggagctgacccggctgaaggctgctgtgggggagctgcctgagaagagcaagctgcaggagatctaccaggagctgacctggctgaaggctgctgtgggggagctgcctgagaagagcaagatgcaggagatctaccaggagctgacccggctgaaggctgctgtgggggagctgcctgagaagagcaagcagcaggagatctaccaggagctgacccggctgaaggctgctgtgggggagctgcctgagaagagcaagcagcaggagatctaccaggagctgacccggctgaaggctgctgtgggggagctgcctgagaagagcaagcagcaggagatctaccaggagctgacccagctgaaggctgctgtggagcggctgtgccacccctgcccctgggagtggaccttcttccagggcaactgctacttcatgagcaacagccagaggaactggcatgacagcatcacagcctgcaaggaggtgggcgcccagctggtggtgatcaagtctgctgaggagcagtag

SEQ ID NO: 146696 - DNA, 939 bp, synthetic construct; identical to SEQ ID NO: 146693
  misc_feature 1..939: note = Description of Artificial Sequence: Synthetic coding sequence
  source 1..939: mol_type = other DNA

SEQ ID NO: 146697 - DNA, 1011 bp, synthetic construct
  misc_feature 1..1011: note = Description of Artificial Sequence: Synthetic coding sequence
  source 1..1011: mol_type = other DNA
atggactaccccaccctgctgctggccctgctgcacgtgtaccgggccctgtgtgaggaggtgctgtggcacacctctgtgccctttgctgagaacatgagcctggagtgtgtgtaccccagcatgggcatcctgacccaggtggagtggttcaagattggcacccagcaggacagcatcgccatcttcagccccacccacggcatggtgatcaggaagccctatgcagagcgggtgtacttcctgaacagcaccatggccagcaacaacatgaccctcttcttcagaaatgcctctgaagatgatgtgggctactacagctgcagcctgtacacctacccccagggcacctggcagaaggtgatccaggtggtgcagagcgacagctttgaggccgctgtgcccagcaacagccacatcgtgtctgagcccgggaagaatgtgaccctgacctgccagccccagatgacctggcctgtgcaggccgtgcgctgggagaagatccagccccggcagattgacctgctgacctactgcaacctggtgcatggaagaaacttcaccagcaagttcccccggcagatcgtgagcaactgcagccacggccgctggagcgtgattgtcatcccagatgtgacagtgtctgattctggcctgtaccgctgctacctgcaggccagcgctggggagaatgagacctttgtgatgaggctgactgtggccgagggcaagacagacaaccagtacaccctgtttgtggccggcggcaccgtgctgctgctgctgtttgtgatcagcatcaccaccatcatcgtcatcttcctgaacagaagaagaagaagagaaagaagagacctcttcacagagagctgggacacccagaaggcccccaacaactaccgcagccccatcagcaccagccagcccaccaaccagagcatggatgacacccgggaggacatctacgtgaactaccccaccttcagccggcggcccaagaccagggtgtag

SEQ ID NO: 146698 - DNA, 822 bp, synthetic construct
  misc_feature 1..822: note = Description of Artificial Sequence: Synthetic coding sequence
  source 1..822: mol_type = other DNA
atgctgggccaggtggtgaccctcatcctgctgctgctgctgaaggtgtaccagggcaagggctgccagggcagcgctgaccacgtggtgtccatctctggagtgcccctgcagctgcagcccaacagcatccagaccaaggtggacagcatcgcctggaagaagctgctgcccagccagaatggcttccaccacatcctgaagtgggagaatggcagcctgcccagcaacaccagcaatgaccgcttctccttcatcgtgaagaacctgagcctgctgatcaaggccgcccagcagcaggacagcggcctgtactgcctggaggtgaccagcatcagcggcaaggtgcagacagccaccttccaggtgtttgtgtttgagttccgcttctggcccttcctggtgatcatcgtcatcctgagcgccctcttcctgggcaccctggcctgcttctgtgtgtggaggaggaagaggaaggagaagcagagcgagaccagccccaaggagttcctgaccatctatgaagatgtgaaggacctgaagaccaggaggaaccacgagcaggagcagaccttccctgggggcggcagcaccatctacagcatgatccagagccagagcagcgcccccaccagccaggagcccgcctacaccctgtacagcctcatccagcccagcaggaagagcggcagcaggaagaggaaccacagccccagcttcaacagcaccatctatgaagtcatcggcaagagccagcccaaggcccagaacccagcccggctgagcaggaaggagctggagaactttgatgtgtacagctag

SEQ ID NO: 146699 - DNA, 990 bp, synthetic construct
  misc_feature 1..990: note = Description of Artificial Sequence: Synthetic coding sequence
  source 1..990: mol_type = other DNA
atgctgggccaggtggtgaccctcatcctgctgctgctgctgaaggtgtaccagggcaagggctgccagggcagcgctgaccacgtggtgtccatctctggagtgcccctgcagctgcagcccaacagcatccagaccaaggtggacagcatcgcctggaagaagctgctgcccagccagaatggcttccaccacatcctgaagtgggagaatggcagcctgcccagcaacaccagcaatgaccgcttctccttcatcgtgaagaacctgagcctgctgatcaaggccgcccagcagcaggacagcggcctgtactgcctggaggtgaccagcatcagcggcaaggtgcagacagccaccttccaggtgtttgtgtttgacaaggtggagaagccccggctgcagggccagggcaagatcctggaccggggccgctgccaggtggccctgagctgcctggtgtccagagatggaaatgtgtcctatgcctggtaccggggcagcaagctgatccagacagctggcaacctgacctacctggatgaggaggtggacatcaatggcacccacacctacacctgcaatgtgagcaaccctgtgtcctgggagagccacaccctgaacctgacccaggactgccagaatgcccaccaggagttccgcttctggcccttcctggtgatcatcgtcatcctgagcgccctcttcctgggcaccctggcctgcttctgtgtgtggaggaggaagaggaaggagaagcagagcgagaccagccccaaggagttcctgaccatctatgaagatgtgaaggacctgaagaccaggaggaaccacgagcaggagcagaccttccctgggggcggcagcaccatctacagcatgatccagagccagagcagcgcccccaccagccaggagcccgcctacaccctgtacagcctcatccagcccagcaggaagggggaccgcttctacagcttcagcggctag

SEQ ID NO: 146700 - DNA, 1113 bp, synthetic construct
  misc_feature 1..1113: note = Description of Artificial Sequence: Synthetic coding sequence
  source 1..1113: mol_type = other DNA
atgctgggccaggtggtgaccctcatcctgctgctgctgctgaaggtgtaccagggcaagggctgccagggcagcgctgaccacgtggtgtccatctctggagtgcccctgcagctgcagcccaacagcatccagaccaaggtggacagcatcgcctggaagaagctgctgcccagccagaatggcttccaccacatcctgaagtgggagaatggcagcctgcccagcaacaccagcaatgaccgcttctccttcatcgtgaagaacctgagcctgctgatcaaggccgcccagcagcaggacagcggcctgtactgcctggaggtgaccagcatcagcggcaaggtgcagacagccaccttccaggtgtttgtgtttgagagcctgctgcctgacaaggtggagaagccccggctgcagggccagggcaagatcctggaccggggccgctgccaggtggccctgagctgcctggtgtccagagatggaaatgtgtcctatgcctggtaccggggcagcaagctgatccagacagctggcaacctgacctacctggatgaggaggtggacatcaatggcacccacacctacacctgcaatgtgagcaaccctgtgtcctgggagagccacaccctgaacctgacccaggactgccagaatgcccaccaggagttccgcttctggcccttcctggtgatcatcgtcatcctgagcgccctcttcctgggcaccctggcctgcttctgtgtgtggaggaggaagaggaaggagaagcagagcgagaccagccccaaggagttcctgaccatctatgaagatgtgaaggacctgaagaccaggagaaatcatgagcaggagcagaccttccctgggggcggcagcaccatctacagcatgatccagagccagagcagcgcccccaccagccaggagcccgcctacaccctgtacagcctcatccagcccagcaggaagagcggcagcaggaagaggaaccacagccccagcttcaacagcaccatctatgaggtgattggcaagagccagcccaaggcccagaacccagcccggctgagcaggaaggagctggagaactttgatgtgtacagctag

SEQ ID NO: 146701 - DNA, 1098 bp, synthetic construct
  misc_feature 1..1098: note = Description of Artificial Sequence: Synthetic coding sequence
  source 1..1098: mol_type = other DNA
atgctgggccaggtggtgaccctcatcctgctgctgctgctgaaggtgtaccagggcaagggctgccagggcagcgctgaccacgtggtgtccatctctggagtgcccctgcagctgcagcccaacagcatccagaccaaggtggacagcatcgcctggaagaagctgctgcccagccagaatggcttccaccacatcctgaagtgggagaatggcagcctgcccagcaacaccagcaatgaccgcttctccttcatcgtgaagaacctgagcctgctgatcaaggccgcccagcagcaggacagcggcctgtactgcctggaggtgaccagcatcagcggcaaggtgcagacagccaccttccaggtgtttgtgtttgacaaggtggagaagccccggctgcagggccagggcaagatcctggaccggggccgctgccaggtggccctgagctgcctggtgtccagagatggaaatgtgtcctatgcctggtaccggggcagcaagctgatccagacagctggcaacctgacctacctggatgaggaggtggacatcaatggcacccacacctacacctgcaatgtgagcaaccctgtgtcctgggagagccacaccctgaacctgacccaggactgccagaatgcccaccaggagttccgcttctggcccttcctggtgatcatcgtcatcctgagcgccctcttcctgggcaccctggcctgcttctgtgtgtggaggaggaagaggaaggagaagcagagcgagaccagccccaaggagttcctgaccatctatgaagatgtgaaggacctgaagaccaggaggaaccacgagcaggagcagaccttccctgggggcggcagcaccatctacagcatgatccagagccagagcagcgcccccaccagccaggagcccgcctacaccctgtacagcctcatccagcccagcaggaagagcggcagcaggaagaggaaccacagccccagcttcaacagcaccatctatgaagtcatcggcaagagccagcccaaggcccagaacccagcccggctgagcaggaaggagctggagaactttgatgtgtacagctag

SEQ ID NO: 146702 - DNA, 495 bp, synthetic construct
  misc_feature 1..495: note = Description of Artificial Sequence: Synthetic coding sequence
  source 1..495: mol_type = other DNA
atgaagtggaaggccctcttcaccgctgccatcctgcaggcccagctgcccatcacagaggcccagagctttggcctgctggaccccaagctgtgctacctgctggatggcatcctcttcatctacggcgtcatcctgacagccctcttcctgcgggtgaagttcagccgctctgcagatgccccagcctaccagcagggccagaaccagctgtacaatgagctgaacctgggcagaagagaggagtatgatgtgctggacaagagaagaggccgggaccctgagatgggcggcaagccccagaggaggaagaacccccaggagggcctgtacaatgagctgcagaaggacaagatggccgaggcctacagcgagatcggcatgaagggggagaggagaagaggcaagggccatgatggcctgtaccagggcctgagcacagccaccaaggacacctatgatgccctgcacatgcaggccctgccccccaggtag

SEQ ID NO: 146703 - DNA, 492 bp, synthetic construct
  misc_feature 1..492: note = Description of Artificial Sequence: Synthetic coding sequence
  source 1..492: mol_type = other DNA
atgaagtggaaggccctcttcaccgctgccatcctgcaggcccagctgcccatcacagaggcccagagctttggcctgctggaccccaagctgtgctacctgctggatggcatcctcttcatctacggcgtcatcctgacagccctcttcctgcgggtgaagttcagccgctctgcagatgccccagcctaccagcagggccagaaccagctgtacaatgagctgaacctgggcagaagagaggagtatgatgtgctggacaagagaagaggccgggaccctgagatgggcggcaagcccaggaggaagaacccccaggagggcctgtacaatgagctgcagaaggacaagatggccgaggcctacagcgagatcggcatgaagggggagcggcggcggggcaaaggacatgatggcctgtaccagggcctgagcacagccaccaaggacacctatgatgccctgcacatgcaggccctgcccccaagatag

SEQ ID NO: 146704 - DNA, 2274 bp, synthetic construct
  misc_feature 1..2274: note = Description of Artificial Sequence: Synthetic coding sequence
  source 1..2274: mol_type = other DNA
atgctgctgcggctgctgctggcctgggccgccgccggccccaccctgggccaggacccctgggccgctgagcccagggctgcctgtggccccagcagctgctacgccctcttccccaggaggaggaccttcctggaggcctggagggcctgccgggagctgggcggggacctggccacccccaggaccccagaggaggcccagagggtggacagcctggtgggcgccggccctgccagccggctgctgtggattggcctgcagaggcaggcccggcagtgccagctgcagaggcccctgcggggcttcacctggaccactggagaccaggacacagccttcaccaactgggcccagcctgccagcggcggcccctgcccagcccagagatgtgtggccctggaggccagcggggagcaccgctggctggagggcagctgcaccctggccgtggatggctacctgtgccagtttggatttgagggcgcctgcccagccctgcaggatgaagctggccaggccggccctgctgtgtacaccacccccttccacctggtgtccacagaatttgagtggctgccctttggatctgtggccgctgtgcagtgccaggccggccgcggggccagcctgctgtgtgtgaagcagcctgagggcggcgtgggctggagccgggccggccccctgtgcctgggcaccggctgcagcccagacaatggaggctgtgaacatgaatgtgtggaggaggtggatggccacgtgtcctgccgctgcacagagggcttccggctggccgcagatggccgcagctgtgaggacccctgtgcccaggccccctgtgagcagcagtgtgagcccggcggcccccagggctacagctgccactgccgcctgggcttccggccagcagaagatgacccccaccgctgtgtggacacagatgagtgccagattgctggggtgtgccagcagatgtgtgtgaactacgtgggcggctttgagtgctactgcagcgagggccacgagctggaggctgatggcatcagctgcagccctgctggggccatgggcgcccaggccagccaggacctgggagatgagctgctggatgatggagaagatgaggaggatgaagatgaggcctggaaggccttcaacggcggctggacagagatgcctggcatcctgtggatggagcccacccagcccccagactttgccctggcctaccggcccagcttccctgaggaccgggagccccagatcccctacccagagcccacctggcccccacccctgagcgccccccgggtgccctaccacagctctgtgctgtctgtgaccaggcctgtggtggtgtctgccacccaccccaccctgcccagcgcccaccagccccctgtgatcccagccacccacccagccctgagccgggaccaccagatccctgtgattgctgccaactacccagacctgcccagcgcctaccagcccggcatcctgtctgtgagccacagcgcccagcccccagcccaccagccccccatgatcagcaccaagtacccagagctgtttcctgcccaccagagccccatgtttcctgacaccagggtggccggcacccagaccaccacccacctgcccggcatcccccccaaccacgcccccctggtgaccaccctgggcgcccagctgcccccccaggccccagatgccctggtgctgcggacccaggccacccagctgcccatcatccccacagcccagcccagcctgaccaccaccagccgcagccctgtgtccccagcccaccagatctctgtgcctgctgccacccagcctgctgccctgcccaccctgctgcccagccagagccccaccaaccagaccagccccatcagccccacccacccccacagcaaggccccccagatcccccgggaggatggccccagccccaagctggccctgtggctgcccagccctgcccccacagctgcccccacagccctgggggaggccggcctggccgagcacagccagagagatgaccgctggctgctggtggccctgctggtgcccacctgtgtgttcctggtggtgctgctggccctgggcatcgtgtactgcacccgctgtggcccccacgcccccaacaagaggatcacagactgctaccgctgggtgattcatgctggcagcaagagccccacagagcccatgccaccccggggcagcctgactggagtgcagacctgcaggacctctgtgtag

SEQ ID NO: 146705 - DNA, 951 bp, synthetic construct
  misc_feature 1..951: note = Description of Artificial Sequence: Synthetic coding sequence
  source 1..951: mol_type = other DNA
atgctgcggcggcggggcagccctggcatgggcgtgcacgtgggcgccgccctgggcgccctgtggttctgcctgaccggggccctggaggtgcaggtgcctgaagatcctgtggtggccctggtgggcacagatgccaccctgtgctgcagcttcagccctgagcccggcttcagcctggcccagctgaacctgatctggcagctgacagacaccaagcagctggtgcacagctttgctgagggccaggaccagggcagcgcctatgccaacagaacagccctcttcccagacctgctggcccagggcaatgccagcctgcggctgcagagggtgcgggtggctgatgagggcagcttcacctgctttgtgtccatccgggactttggatctgctgctgtgtccctgcaggtggccgccccctacagcaagcccagcatgaccctggagcccaacaaggacctgcggcctggggacacagtgaccatcacctgcagcagctaccggggctacccagaggccgaggtgttctggcaggacggccagggcgtgcccctgactggaaatgtgaccaccagccagatggccaatgagcagggcctgtttgatgtgcacagcgtgctgcgggtggtgctgggcgccaacggcacctacagctgcctggtgagaaatcctgtgctgcagcaggatgcccacggctctgtgaccatcaccggccagcccatgaccttccccccagaggccctgtgggtgacagtgggcctgtctgtgtgcctgattgccctgctggtggccctggcctttgtgtgctggaggaagatcaagcagagctgtgaggaggagaatgctggagctgaggaccaggatggagagggggagggcagcaagacagccctgcagcccctgaagcacagcgacagcaaagaagatgatggccaggagatcgcctag

SEQ ID NO: 146706 - DNA, 1605 bp, synthetic construct
  misc_feature 1..1605: note = Description of Artificial Sequence: Synthetic coding sequence
  source 1..1605: mol_type = other DNA
atgctgcggcggcggggcagccctggcatgggcgtgcacgtgggcgccgccctgggcgccctgtggttctgcctgaccggggccctggaggtgcaggtgcctgaagatcctgtggtggccctggtgggcacagatgccaccctgtgctgcagcttcagccctgagcccggcttcagcctggcccagctgaacctgatctggcagctgacagacaccaagcagctggtgcacagctttgctgagggccaggaccagggcagcgcctatgccaacagaacagccctcttcccagacctgctggcccagggcaatgccagcctgcggctgcagagggtgcgggtggctgatgagggcagcttcacctgctttgtgtccatccgggactttggatctgctgctgtgtccctgcaggtggccgccccctacagcaagcccagcatgaccctggagcccaacaaggacctgcggcctggggacacagtgaccatcacctgcagcagctaccagggctacccagaggccgaggtgttctggcaggacggccagggcgtgcccctgactggaaatgtgaccaccagccagatggccaatgagcagggcctgtttgatgtgcacagcatcctgcgggtggtgctgggcgccaacggcacctacagctgcctggtgagaaatcctgtgctgcagcaggatgcccacagctctgtgaccatcaccccccagaggagccccaccggggctgtggaggtgcaggtgcctgaagatcctgtggtggccctggtgggcacagatgccaccctgcgctgcagcttcagccctgagcccggcttcagcctggcccagctgaacctgatctggcagctgacagacaccaagcagctggtgcacagcttcacagagggccgggaccagggcagcgcctatgccaacagaacagccctcttcccagacctgctggcccagggcaatgccagcctgcggctgcagagggtgcgggtggctgatgagggcagcttcacctgctttgtgtccatccgggactttggatctgctgctgtgtccctgcaggtggccgccccctacagcaagcccagcatgaccctggagcccaacaaggacctgcggcctggggacacagtgaccatcacctgcagcagctaccggggctacccagaggccgaggtgttctggcaggacggccagggcgtgcccctgactggaaatgtgaccaccagccagatggccaatgagcagggcctgtttgatgtgcacagcgtgctgcgggtggtgctgggcgccaacggcacctacagctgcctggtgagaaatcctgtgctgcagcaggatgcccacggctctgtgaccatcaccggccagcccatgaccttccccccagaggccctgtgggtgacagtgggcctgtctgtgtgcctgattgccctgctggtggccctggcctttgtgtgctggaggaagatcaagcagagctgtgaggaggagaatgctggagctgaggaccaggatggagagggggagggcagcaagacagccctgcagcccctgaagcacagcgacagcaaagaagatgatggccaggagatcgcctag

SEQ ID NO: 146707 - DNA, 1482 bp, synthetic construct
  misc_feature 1..1482: note = Description of Artificial Sequence: Synthetic coding sequence
  source 1..1482: mol_type = other DNA
atgctgcggcggcggggcagccctggcatgggcgtgcacgtgggcgccgccctgggcgccctgtggttctgcctgaccggggccctggaggtgcaggtgcctgaagatcctgtggtggccctggtgggcacagatgccaccctgtgctgcagcttcagccctgagcccggcttcagcctggcccagctgaacctgatctggcagctgacagacaccaagcagctggtgcacagctttgctgagggccaggaccagggcagcgcctatgccaacagaacagccctcttcccagacctgctggcccagggcaatgccagcctgcggctgcagagggtgcgggtggctgatgagggcagcttcacctgctttgtgtccatccgggactttggatctgctgctgtgtccctgcaggtggccgccccctacagcaagcccagcatgaccctggagcccaacaaggacctgcggcctggggacacagtgaccatcacctgcagcagctaccagggctacccagaggccgaggtgttctggcaggacggccagggcgtgcccctgactggaaatgtgaccaccagccagatggccaatgagcagggcctgtttgatgtgcacagcatcctgcgggtggtgctgggcgccaacggcacctacagctgcctggtgagaaatcctgtgctgcagcaggatgcccacagctctgtgaccatcaccccccagaggagccccaccggggctgtggaggtgcaggtgcctgaagatcctgtggtggccctggtgggcacagatgccaccctgcgctgcagcttcagccctgagcccggcttcagcctggcccagctgaacctgatctggcagctgacagacaccaagcagctggtgcacagcttcacagagggccgggaccagggcagcgcctatgccaacagaacagccctcttcccagacctgctggcccagggcaatgccagcctgcggctgcagagggtgcgggtggctgatgagggcagcttcacctgctttgtgtccatccgggactttggatctgctgctgtgtccctgcaggtggccgccccctacagcaagcccagcatgaccctggagcccaacaaggacctgcggcctggggacacagtgaccatcacctgcagcagctaccggggctacccagaggccgaggtgttctggcaggacggccagggcgtgcccctgactggaaatgtgaccaccagccagatggccaatgagcagggcctgtttgatgtgcacagcgtgctgcgggtggtgctgggcgccaacggcacctacagctgcctggtgagaaatcctgtgctgcagcaggatgcccacggctctgtgaccatcaccggccagcccatgaccttccccccaggccctgccagcagcgctgtgcccctgagccctgcccaccccccccacggctccatgtgctggagccactggttcagccggggcctgtag

SEQ ID NO: 146708 - DNA, 423 bp, synthetic construct
  misc_feature 1..423: note = Description of Artificial Sequence: Synthetic coding sequence
  source 1..423: mol_type = other DNA
atgctgcggcggcggggcagccctggcatgggcgtgcacgtgggcgccgccctgggcgccctgtggttctgcctgaccggggccctggaggtgcaggtgcctgaagatcctgtggtggccctggtgggcacagatgccaccctgtgctgcagcttcagccctgagcccggcttcagcctggcccagctgaacctgatctggcagctgacagacaccaagcagctggtgcacagctttgctgagggccaggaccagggcagcgcctatgccaacagaacagccctcttcccagacctgcaccgggccgcctatgacatccccccccggggccctgtgggggacagaggagctgtgtgcctgagccactgcacagctgggggccctggcttccgggtgctggagaaggaccagacagagctgtag

SEQ ID NO: 146709 - DNA, 411 bp, synthetic construct
  misc_feature 1..411: note = Description of Artificial Sequence: Synthetic coding sequence
  source 1..411: mol_type = other DNA
atgctgcggcggcggggcagccctggcatgggcgtgcacgtgggcgccgccctgggcgccctgtggttctgcctgaccggggccctggaggtgcaggtgcctgaagatcctgtggtggccctggtgggcacagatgccaccctgtgctgcagcttcagccctgagcccggcttcagcctggcccagctgaacctgatctggcagctgacagacaccaagcagctggtgcacagctttgctgagggccaggaccagggcagcgcctatgccaacagaacagccctcttcccagacctgctggcccagggcaatgccagcctgcggctgcagagggtgcgggtggctgatgagggcagcttcacctgctttgtgtccatccgggactttggatctgctgctgtgtccctgtag

SEQ ID NO: 146710 - DNA, 402 bp, synthetic construct
  misc_feature 1..402: note = Description of Artificial Sequence: Synthetic coding sequence
  source 1..402: mol_type = other DNA
atgctgcggcggcggggcagccctggcatgggcgtgcacgtgggcgccgccctgggcgccctgtggttctgcctgaccggggccctggaggtgcaggtgcctgaagatcctgtggtggccctggtgggcacagatgccaccctgtgctgcagcttcagccctgagcccggcttcagcctggcccagctgaacctgatctggcagctgacagacaccaagcagctggtgcacagctttgctgagggccaggaccagggcagcgcctatgccaacagaacagccctcttcccagacctgctggcccagggcaatgccagcctgcggctgcagagggtgcgggtggctgatgagggcagcttcacctgctttgtgtccatccgggactttggatctgctgcctag

SEQ ID NO: 146711 - DNA, 1602 bp, synthetic construct
  misc_feature 1..1602: note = Description of Artificial Sequence: Synthetic coding sequence
  source 1..1602: mol_type = other DNA
atgctgcggcggcggggcagccctggcatgggcgtgcacgtgggcgccgccctgggcgccctgtggttctgcctgaccggggccctggaggtgcaggtgcctgaagatcctgtggtggccctggtgggcacagatgccaccctgtgctgcagcttcagccctgagcccggcttcagcctggcccagctgaacctgatctggcagctgacagacaccaagcagctggtgcacagctttgctgagggccaggaccagggcagcgcctatgccaacagaacagccctcttcccagacctgctggcccagggcaatgccagcctgcggctgcagagggtgcgggtggctgatgagggcagcttcacctgctttgtgtccatccgggactttggatctgctgctgtgtccctgcaggtggccgccccctacagcaagcccagcatgaccctggagcccaacaaggacctgcggcctggggacacagtgaccatcacctgcagcagctaccagggctacccagaggccgaggtgttctggcaggacggccagggcgtgcccctgactggaaatgtgaccaccagccagatggccaatgagcagggcctgtttgatgtgcacagcatcctgcgggtggtgctgggcgccaacggcacctacagctgcctggtgagaaatcctgtgctgcagcaggatgcccacagctctgtgaccatcaccccccagaggagccccaccggggctgtggaggtgcaggtgcctgaagatcctgtggtggccctggtgggcacagatgccaccctgcgctgcagcttcagccctgagcccggcttcagcctggcccagctgaacctgatctggcagctgacagacaccaagcagctggtgcacagcttcacagagggccgggaccagggcagcgcctatgccaacagaacagccctcttcccagacctgctggcccagggcaatgccagcctgcggctgcagagggtgcgggtggctgatgagggcagcttcacctgctttgtgtccatccgggactttggatctgctgctgtgtccctgcaggtggccgccccctacagcaagcccagcatgaccctggagcccaacaaggacctgcggcctggggacacagtgaccatcacctgcagcagctaccggggctacccagaggccgaggtgttctggcaggacggccagggcgtgcccctgactggaaatgtgaccaccagccagatggccaatgagcagggcctgtttgatgtgcacagcgtgctgcgggtggtgctgggcgccaacggcacctacagctgcctggtgagaaatcctgtgctgcagcaggatgcccacggctctgtgaccatcaccggccagcccatgaccttccccccagaggccctgtgggtgacagtgggcctgtctgtgtgcctgattgccctgctggtggccctggcctttgtgtgctggaggaagatcaagcagagctgtgaggaggagaatgctggagctgaggaccaggatggagagggggagggcagcaagacagccctgcagcccctgaagcacagcgacagcaaggagggcaaggacacctgggcctag

SEQ ID NO: 146712 - DNA, 498 bp, synthetic construct
  misc_feature 1..498: note = Description of Artificial Sequence: Synthetic coding sequence
  source 1..498: mol_type = other DNA
atgctgcggcggcggggcagccctggcatgggcgtgcacgtgggcgccgccctgggcgccctgtggttctgcctgaccggggccctggaggtgcaggtgcctgaagatcctgtggtggccctggtgggcacagatgccaccctgtgctgcagcttcagccctgagcccggcttcagcctggcccagctgaacctgatctggcagctgacagacaccaagcagctggtgcacagctttgctgagggccaggaccagggcagcgcctatgccaacagaacagccctcttcccagacctgctggcccagggcaatgccagcctgcggctgcagagggtgcgggtggctgatgagggcagcttcacctgctttgtgtccatccgggactttggatctgctgctgtgtccctgcaggtggccgccccctacagcaagcccagcatgaccctggagcccaacaaggacctgcggcctggggacacagtgaccatcacctgctag

SEQ ID NO: 146713 - DNA, 156 bp, synthetic construct
  misc_feature 1..156: note = Description of Artificial Sequence: Synthetic coding sequence
  source 1..156: mol_type = other DNA
atgctgcggcggcggggcagccctggcatgggcgtgcacgtgggcgccgccctgggcgccctgtggttctgcctgaccggggccctggaggtgcaggtgcctgaagatcctgtggtggccctggtgggcacagatgccaccctgtgctgcagctag

SEQ ID NO: 146714 - DNA, 663 bp, synthetic construct
  misc_feature 1..663: note = Description of Artificial Sequence: Synthetic coding sequence
  source 1..663: mol_type = other DNA
atgctgcggctgctgctggccctgaacctcttccccagcatccaggtgactggaaacaagatcctggtgaagcagagccccatgctggtggcctatgacaatgctgtgaacctgagctgcaagtacagctacaacctcttcagccgggagttccgggccagcctgcacaagggcctggacagcgctgtggaggtgtgtgtggtgtatggcaactacagccagcagctgcaggtgtacagcaagacaggcttcaactgtgatggcaagctgggcaatgaatctgtgaccttctacctgcagaacctgtatgtgaaccagacagacatctacttctgcaagattgaggtgatgtaccccccaccctacctggacaatgagaagagcaatggcaccatcatccacgtgaagggcaagcacctgtgccccagccccctcttccctggccccagcaagcccttctgggtgctggtggtggtgggcggcgtgctggcctgctacagcctgctggtgacagtggccttcatcatcttctgggtgcgcagcaagaggagccggctgctgcacagcgactacatgaacatgaccccaagaagacctggccccaccaggaagcactaccagccctatgccccaccccgggactttgctgcctaccgctcctag

SEQ ID NO: 146715 - DNA, 306 bp, synthetic construct
  misc_feature 1..306: note = Description of Artificial Sequence: Synthetic coding sequence
  source 1..306: mol_type = other DNA
atgctgcggctgctgctggccctgaacctcttccccagcatccaggtgacaggcaagcacctgtgccccagccccctcttccctggccccagcaagcccttctgggtgctggtggtggtgggcggcgtgctggcctgctacagcctgctggtgacagtggccttcatcatcttctgggtgcgcagcaagaggagccggctgctgcacagcgactacatgaacatgaccccccggcggcccggccccaccaggaagcactaccagccctatgccccaccccgggactttgctgcctaccgctcctag

SEQ ID NO: 146716 - DNA, 411 bp, synthetic construct
  misc_feature 1..411: note = Description of Artificial Sequence: Synthetic coding sequence
  source 1..411: mol_type = other DNA
atgctgcggctgctgctggccctgaacctcttccccagcatccaggtgactggaaacaagatcctggtgaagcagagccccatgctggtggcctatgacaatgctgtgaacctgagctacaatgagaagagcaatggcaccatcatccacgtgaagggcaagcacctgtgccccagccccctcttccctggccccagcaagcccttctgggtgctggtggtggtgggcggcgtgctggcctgctacagcctgctggtgacagtggccttcatcatcttctgggtgcgcagcaagaggagccggctgctgcacagcgactacatgaacatgaccccaagaagacctggccccaccaggaagcactaccagccctatgccccaccccgggactttgctgcctaccgctcctag

SEQ ID NO: 146717 - DNA, 705 bp, synthetic construct
  misc_feature 1..705: note = Description of Artificial Sequence: Synthetic coding sequence
  source 1..705: mol_type = other DNA
atgccctgtggcctgagcgccctgatcatgtgccccaagggcatggtggccgtggtggtggccgtggatgatggagacagccaggccctggccggcaacaagatcctggtgaagcagagccccatgctggtggcctatgacaatgctgtgaacctgagctgcaagtacagctacaacctcttcagccgggagttccgggccagcctgcacaagggcctggacagcgctgtggaggtgtgtgtggtgtatggcaactacagccagcagctgcaggtgtacagcaagacaggcttcaactgtgatggcaagctgggcaatgaatctgtgaccttctacctgcagaacctgtatgtgaaccagacagacatctacttctgcaagattgaggtgatgtaccccccaccctacctggacaatgagaagagcaatggcaccatcatccacgtgaagggcaagcacctgtgccccagccccctcttccctggccccagcaagcccttctgggtgctggtggtggtgggcggcgtgctggcctgctacagcctgctggtgacagtggccttcatcatcttctgggtgcgcagcaagaggagccggctgctgcacagcgactacatgaacatgaccccaagaagacctggccccaccaggaagcactaccagccctatgccccaccccgggactttgctgcctaccgctcctag

SEQ ID NO: 146718 - DNA, 1920 bp, synthetic construct
  misc_feature 1..1920: note = Description of Artificial Sequence: Synthetic coding sequence
  source 1..1920: mol_type = other DNA
atggtggactacatcgtggagtatgactatgatgctgtgcatgatgatgagctgaccatccgggtgggggagatcatcagaaatgtgaagaagctgcaggaggagggctggctggagggggagctgaatggaagaagaggcatgtttcctgacaactttgtgaaggagatcaagcgggagacagagttcaaggatgacagcctgcccatcaagcgggagagacatggaaatgtggccagcctggtgcagaggatcagcacctacggcctgcctgctgggggcatccagccccacccccagaccaagaacatcaagaagaagaccaagaagaggcagtgcaaggtgctgtttgagtacatcccccagaatgaagatgagctggagctgaaggtgggggacatcatcgacatcaatgaggaggtggaggagggctggtggagcggcaccctgaacaacaagctgggcctcttccccagcaactttgtgaaggagctggaggtgacagatgatggagagacccatgaggcccaggatgacagcgagaccgtgctggccggccccaccagccccatccccagcctgggcaatgtgtctgaaacagccagcggctctgtgacccagcccaagaagatccggggcatcggctttggagacatcttcaaggagggctctgtgaagctgcggaccaggaccagcagcagcgagacagaggagaagaagccagagaagcccctcatcctgcagagcctgggccccaagacccagagcgtggagatcaccaagacagacacagagggcaagatcaaggccaaggagtactgcaggaccctgtttgcctatgagggcaccaatgaagatgagctgaccttcaaggagggggagatcatccacctgatcagcaaggagactggagaggccggctggtggagaggagagctgaatggcaaggagggcgtcttcccagacaactttgctgtgcagatcaatgagctggacaaggacttccccaagcccaagaagcccccacctccagccaaggccccagcccccaagccagagctgattgctgctgagaagaagtacttcagcctgaagccagaggagaaggatgagaagagcaccctggagcagaagcccagcaagccagctgccccccaggtgccccccaagaagcccaccccacccaccaaggccagcaacctgctgcggagcagcggcaccgtgtaccccaagaggcctgagaagcctgtgcccccacctccacccatcgccaagatcaatggagaggtgagcagcatcagcagcaagtttgaaacagagcctgtgtccaagctgaagctggacagcgagcagctgcccctgcggcccaagtctgtggactttgacagcctgactgtgaggaccagcaaggagacagatgtggtgaactttgatgacatcgccagcagcgagaacctgctgcacctgacagccaaccggcccaagatgcctggaagaaggctgcccggccgcttcaacggcggccacagccccacccacagccctgagaagatcctgaagctgcccaaggaggaggacagcgccaacctgaagcccagcgagctgaagaaggacacctgctacagccccaagcccagcgtgtacctgagcacccccagcagcgccagcaaggccaacaccacagccttcctgacccccctggagatcaaggccaaggtggagacagatgatgtgaagaagaacagcctggatgagctgcgggcccagatcatcgagctgctgtgcatcgtggaggccctgaagaaggaccacggcaaggagctggagaagctgaggaaggacctggaggaggagaagaccatgaggagcaacctggagatggagattgagaagctgaagaaggctgtgctgagcagctag

SEQ ID NO: 146719 - DNA, 717 bp, synthetic construct
  misc_feature 1..717: note = Description of Artificial Sequence: Synthetic coding sequence
  source 1..717: mol_type = other DNA
atgtgccgccgctgcaagccagagctgcggcagaacttccagagcgccagcggcatctgcatctgccactggctgcagatccggaggaccaggagccgggagggccgggccatgtggctgcccccagccctgctgctgctgagcctgagcggctgcttcagcatccagggccctgagagcgtgcgggcccctgagcagggcagcctgactgtgcagtgccactacaagcagggctgggagacctacatcaagtggtggtgccggggcgtgcgctgggacacctgcaagatcctgattgagacccggggcagcgagcagggcgagaagagtgacagagtgtccatcaaggacaaccagaaggacaggaccttcaccgtgaccatggagggcctgcggagagatgatgctgatgtgtactggtgtggcattgaaagaagaggccctgacctgggcacccaggtgaaggtgattgtggaccctgagggcgccgccagcaccacagccagcagccccaccaacagcaacatggctgtgttcatcggcagccacaagaggaaccactacatgctgctggtgtttgtgaaggtgcccatcctgctgatcctggtgacagccatcctgtggctgaagggcagccagagggtgcctgaggagcctggagagcagcccatctacatgaacttcagcgagcccctgaccaaggacatggccacctag

SEQ ID NO: 146720 - DNA, 606 bp, synthetic construct
  misc_feature 1..606: note = Description of Artificial Sequence: Synthetic coding sequence
  source 1..606: mol_type = other DNA
atgtggctgcccccagccctgctgctgctgagcctgagcggctgcttcagcatccagggccctgagagcgtgcgggcccctgagcagggcagcctgactgtgcagtgccactacaagcagggctgggagacctacatcaagtggtggtgccggggcgtgcgctgggacacctgcaagatcctgattgagacccggggcagcgagcagggcgagaagagtgacagagtgtccatcaaggacaaccagaaggacaggaccttcaccgtgaccatggagggcctgcggagagatgatgctgatgtgtactggtgtggcatcgagcggcggggccctgacctgggcacccaggtgaaggtgattgtggaccctgagggcgccgccagcaccacagccagcagccccaccaacagcaacatggctgtgttcatcggcagccacaagaggaaccactacatgctgctggtgtttgtgaaggtgcccatcctgctgatcctggtgacagccatcctgtggctgaagggcagccagagggtgcctgaggagcccggggagcagcccatctacatgaacttcagcgagcccctgaccaaggacatggccacctag

SEQ ID NO: 146721 - DNA, 735 bp, synthetic construct
  misc_feature 1..735: note = Description of Artificial Sequence: Synthetic coding sequence
  source 1..735: mol_type = other DNA
atgcccctgctgaccctgtacctgctgctcttctggctgagcggctacagcatcgtgacccagatcaccggccccaccaccgtgaatggcctggagcggggcagcctgactgtgcagtgtgtgtaccgcagcggctgggagacctacctgaagtggtggtgccgcggggccatctggagggactgcaagatcctggtgaagaccagcggcagcgagcaggaggtgaagagggacagagtgtccatcaaggacaaccagaagaacagaaccttcaccgtgaccatggaggacctgatgaagacagatgctgacacctactggtgtggcatcgagaagacaggaaatgacctgggcgtgacagtgcaggtgaccattgatcctgcccctgtgacccaggaggagaccagcagcagccccaccctgaccggccaccacctggacaacagaagtgagggcagccaggccgccaactacagacctgctgcccaccaggcccaggcccctgaggcccagtgccccccagccccccacctgcaccacatcgctgctgcctttggaggccgcctgaccctgggcctggaggatgatgaggtgcctgctgagagcagcagagatgtgcccagggctggaacagctgcccctgggggccggcccctgctgtgcaggccagaccctgctgctggaagaaacctgcctgccaagggctaccacgaggccttcctgtgccctggatag

SEQ ID NO: 146722 - DNA, 873 bp, synthetic construct
  misc_feature 1..873: note = Description of Artificial Sequence: Synthetic coding sequence
  source 1..873: mol_type = other DNA
atgcccctgctgaccctgtacctgctgctcttctggctgagcggctacagcatcgtgacccagatcaccggccccaccaccgtgaatggcctggagcggggcagcctgactgtgcagtgtgtgtaccgcagcggctgggagacctacctgaagtggtggtgccgcggggccatctggagggactgcaagatcctggtgaagaccagcggcagcgagcaggaggtgaagagggacagagtgtccatcaaggacaaccagaagaacagaaccttcaccgtgaccatggaggacctgatgaagacagatgctgacacctactggtgtggcatcgagaagacaggaaatgacctgggcgtgacagtgcaggtgaccattgatcctgcccctgtgacccaggaggagaccagcagcagccccaccctgaccggccaccacctggacaacagacacaagctgctgaagctgtctgtgctgctgcccctcatcttcaccatcctgctgctgctgctggtggccgccagcctgctggcctggaggatgatgaagtaccagcagaaggccgccggcatgagccctgagcaggtgctgcagcccctggagggggacctgtgctacgccgacctgaccctgcagctggccggcaccagcccccagaaggccaccaccaagctgagcagcgcccaggtggaccaggtggaggtggagtatgtgaccatggccagcctgcccaaggaggacatctcctatgccagcctgaccctgggcgctgaggaccaggagcccacctactgcaacatgggccacctgagcagccacctgcccggccggggccctgaggagcccacagagtacagcaccatcagccggccctag

SEQ ID NO: 146723 - DNA, 585 bp, synthetic construct
  misc_feature 1..585: note = Description of Artificial Sequence: Synthetic coding sequence
  source 1..585: mol_type = other DNA
atgtggctgccccagctggacctgatgagggtcatcagcgccaagagccagggctacagcatcgtgacccagatcaccggccccaccaccgtgaatggcctggagcggggcagcctgactgtgcagtgtgtgtacagaagtggctgggagacctacctgaagtggtggtgccgcggggccatctggagggactgcaagatcctggtgaagaccagcggcagcgagcaggaggtgaagagggacagagtgtccatcaaggacaaccagaagaacagaaccttcaccgtgaccatggaggacctgatgaagacagatgctgacacctactggtgtggcatcgagaagacaggaaatgacctgggcgtgacagtgcaggtgaccatcgaccctgcccctgtgacccaggaggagaccagcagcagccccaccctgaccggccaccacctggacaacagcagcagagatgtgcccagggctggaacagctgcccctgggggccggcccctgctgtgcaggccagaccctgctgctggaagaaacctgcctgccaagggctaccacgaggccttcctgtgccctggatag

SEQ ID NO: 146724 - DNA, 720 bp, synthetic construct
  misc_feature 1..720: note = Description of Artificial Sequence: Synthetic coding sequence
  source 1..720: mol_type = other DNA
atgtggctgccccagctggacctgatgagggtcatcagcgccaagagccagggctacagcatcgtgacccagatcaccggccccaccaccgtgaatggcctggagcggggcagcctgactgtgcagtgtgtgtacagaagtggctgggagacctacctgaagtggtggtgccgcggggccatctggagggactgcaagatcctggtgaagaccagcggcagcgagcaggaggtgaagagggacagagtgtccatcaaggacaaccagaagaacagaaccttcaccgtgaccatggaggacctgatgaagacagatgctgacacctactggtgtggcatcgagaagacaggaaatgacctgggcgtgacagtgcaggtgaccatcgaccctgccagcaccccagcccccaccacccccaccagcaccaccttcaccgcccctgtgacccaggaggagaccagcagcagccccaccctgaccggccaccacctggacaacagacacaagctgctgaagctgtctgtgctgctgcccctcatcttcaccatcctgctgctgctgctggtggccgccagcctgctggcctggaggatgatgaagtaccagcagaagggcacagctgcccctgggggccggcccctgctgtgcaggccagaccctgctgctggcaggaacctgcctgccaagggctaccacgaggccttcctgtgccccggctag

SEQ ID NO: 146725 - DNA, 699 bp, synthetic construct
  misc_feature 1..699: note = Description of Artificial Sequence: Synthetic coding sequence
  source 1..699: mol_type = other DNA
atgctgcgggccgccctgcctgccctgctgctgcccctgctgggcctggccgctgctgctgtggccgactgccccagcagcacctggatccagttccaggacagctgctacatcttcctgcaggaggccatcaaggtggagagcattgaagatgtgaggaaccagtgcacagaccatggagctgacatgatcagcatccacaatgaggaggagaatgccttcatcctggacaccctgaagaagcagtggaagggcccagatgacatcctgctgggcatgttttatgacacagatgatgccagcttcaagtggtttgacaacagcaacatgacctttgacaagtggacagaccaggatgatgatgaggacctggtggacacctgtgccttcctgcacatcaagacaggagagtggaagaagggcaactgtgaggtgtcctctgtggagggcaccctgtgcaagacagccatcccctacaagaggaagtacctgagtgacaaccacatcctgatcagcgccctggtgattgccagcaccgtcatcctgactgtgctgggcgccatcatctggttcctgtacaagaagcacagcgacagccgcttcaccaccgtcttcagcacagccccccagagcccctacaatgaagactgtgtgctggtggtgggggaggagaatgagtaccctgtgcagtttgattag

SEQ ID NO: 146726 - DNA, 525 bp, synthetic construct
  misc_feature 1..525: note = Description of Artificial Sequence: Synthetic coding sequence
  source 1..525: mol_type = other DNA
atgctgcgggccgccctgcctgccctgctgctgcccctgctgggcctggccgctgctgctgtggccgactgccccagcagcacctggatccagttccaggacagctgctacatcttcctgcaggaggccatcaaggtggagagcattgaagatgtgaggaaccagtgcacagaccatggagctgacatgatcagcatccacaatgaggaggagaatgccttcatcctggacaccctgaagaagcagtggaagggcccagatgacatcctgctgggcatgttttatgacacagatgtgccctacaagaggaagtacctgagtgacaaccacatcctgatcagcgccctggtgattgccagcaccgtcatcctgactgtgctgggcgccatcatctggttcctgtacaagaagcacagcgacagccgcttcaccaccgtcttcagcacagccccccagagcccctacaatgaagactgtgtgctggtggtgggggaggagaatgagtaccctgtgcagtttgattag

SEQ ID NO: 146727 - DNA, 849 bp, synthetic construct
  misc_feature 1..849: note = Description of Artificial Sequence: Synthetic coding sequence
  source 1..849: mol_type = other DNA
atgtctgggggctggatggcccaggtgggcgcctggaggactggagccctgggcctggccctgctgctgctgctgggcctgggcctgggcctggaggccgccgccagccccctgagcacccccaccagcgcccaggccgccggccccagcagcggcagctgcccccccaccaagttccagtgcaggaccagcggcctgtgtgtgcccctgacctggaggtgtgaccgggacctggactgcagtgatggcagtgatgaggaggagtgcagaattgagccctgcacccagaagggccagtgccccccacctcctggcctgccctgcccctgcacaggagtgtctgactgcagcggcggcacagacaagaagctgaggaactgcagccggctggcctgcctggccggggagctgcgctgcaccctgagtgatgactgcatccccctgacctggaggtgtgatggccacccagactgcccagacagcagtgatgagctgggctgcggcaccaatgagatcctgcctgaaggagatgccaccaccatgggcccccctgtgaccctggagagcgtgaccagcctgagaaatgccaccaccatgggcccccctgtgaccctggagagcgtgcccagcgtgggcaatgccaccagcagcagcgctggggaccagagcggcagccccacagcctatggagtgattgctgctgctgctgtgctgagcgccagcctggtgacagccaccctgctgctgctgtcctggctgcgggcccaggagcggctgcggcccctgggcctgctggtggccatgaaggagagcctgctgctgtctgagcagaagaccagcctgccctag

SEQ ID NO: 146728 - DNA, 606 bp, synthetic construct
  misc_feature 1..606: note = Description of Artificial Sequence: Synthetic coding sequence
  source 1..606: mol_type = other DNA
aatgagatcctgcctgaaggagatgccaccaccatgggcccccctgtgaccctggagagcgtgaccagcctgagaaatgccaccaccatgggcccccctgtgaccctggagagcgtgcccagcgtgggcaatgccatcctgctgtgccggcggcctgtgtggaagcccaactgcctgtggggctactgcagctgctgcggggcccagtgcaagccaggccaccgccaccccccaccatttgtgctggcccccagccctggggcccccccacccaccggggtgactggaggccacgagggcgtgcctgctgctgtgaggacagaggacctggccgccctgcggaccagcacctgccaccaccgccacagcgccctgggcgtggccggccaggaggagagcagtgatgctgatggctacccaggcaccccagccctgcgggacctgagcagcagcggccacgtggagcccaggacccgggccccagctgaggtggccctggagattgagggcccctggaccctgcccatggagatccggggggccaggatgggcaacctgccccagcctgagctgcggggctggccccaggccgccccccggggctag

SEQ ID NO: 146729 - DNA, 723 bp, synthetic construct
  misc_feature 1..723: note = Description of Artificial Sequence: Synthetic coding sequence
  source 1..723: mol_type = other DNA
atgtctgggggctggatggcccaggtgggcgcctggaggactggagccctgggcctggccctgctgctgctgctgggcctgggcctgggcctggaggccgccgccagccccctgagcacccccaccagcgcccaggccgccggcatcgagccctgcacccagaagggccagtgccccccacctcctggcctgccctgcccctgcacaggagtgtctgactgcagcggcggcacagacaagaagctgaggaactgcagccggctggcctgcctggccggggagctgcgctgcaccctgagtgatgactgcatccccctgacctggaggtgtgatggccacccagactgcccagacagcagtgatgagctgggctgcggcaccaatgagatcctgcctgaaggagatgccaccaccatgggcccccctgtgaccctggagagcgtgaccagcctgagaaatgccaccaccatgggcccccctgtgaccctggagagcgtgcccagcgtgggcaatgccaccagcagcagcgctggggaccagagcggcagccccacagcctatggagtgattgctgctgctgctgtgctgagcgccagcctggtgacagccaccctgctgctgctgtcctggctgcgggcccaggagcggctgcggcccctgggcctgctggtggccatgaaggagagcctgctgctgtctgagcagaagaccagcctgccctag

SEQ ID NO: 146730 - DNA, 1095 bp, synthetic construct
  misc_feature 1..1095: note = Description of Artificial Sequence: Synthetic coding sequence
  source 1..1095: mol_type = other DNA
atgcccctgctgctgctgctgcccctgctgtgggccggggccctggccatggaccccaacttctggctgcaggtgcaggagagcgtgacagtgcaggagggcctgtgtgtgctggtgccctgcaccttcttccaccccatcccctactatgacaagaacagccctgtgcacggctactggttccgggagggcgccatcatcagccgggacagccctgtggccaccaacaagctggaccaggaggtgcaggaggagacccagggccgcttccggctgctgggggaccccagcaggaacaactgcagcctgagcatcgtggatgcccggcggcgggacaatggcagctacttcttcaggatggagcggggcagcaccaagtacagctacaagagcccccagctgtctgtgcacgtgacagacctgacccaccggcccaagatcctgatccctggcaccctggagcccggccacagcaagaacctgacctgcagcgtgtcctgggcctgtgagcagggcaccccacccatcttctcctggctgtctgctgcccccaccagcctgggccccaggaccacccacagctctgtgctgatcatcaccccccggccccaggaccacggcaccaacctgacctgccaggtgaagtttgctggagctggggtgaccacagagaggaccatccagctgaatgtgacctacgtgccccagaaccccaccaccggcatcttccctggagatggcagcggcaagcaggagaccagggctggggtggtgcatggagccatcggcggggccggcgtgacagccctgctggccctgtgcctgtgcctgatcttcttcatcgtgaagacccacaggaggaaggccgccaggacagctgtgggcagaaatgacacccaccccaccactggaagtgccagccccaagcaccagaagaagagcaagctgcacggccccacagagaccagcagctgcagcggggccgcccccaccgtggagatggatgaggagctgcactacgccagcctgaacttccacggcatgaaccccagcaaggacaccagcacagagtacagcgaggtgaggacccagtag

SEQ ID NO: 146731 - DNA, 933 bp, synthetic construct
  misc_feature 1..933: note = Description of Artificial Sequence: Synthetic coding sequence
  source 1..933: mol_type = other DNA
atgcccctgctgctgctgctgcccctgctgtgggccggggccctggccatggaccccaacttctggctgcaggtgcaggagagcgtgacagtgcaggagggcctgtgtgtgctggtgccctgcaccttcttccaccccatcccctactatgacaagaacagccctgtgcacggctactggttccgggagggcgccatcatcagccgggacagccctgtggccaccaacaagctggaccaggaggtgcaggaggagacccagggccgcttccggctgctgggggaccccagcaggaacaactgcagcctgagcatcgtggatgcccggcggcgggacaatggcagctacttcttcaggatggagcggggcagcaccaagtacagctacaagagcccccagctgtctgtgcacgtgacagacctgacccaccggcccaagatcctgatccctggcaccctggagcccggccacagcaagaacctgacctgcagcgtgtcctgggcctgtgagcagggcaccccacccatcttctcctggctgtctgctgcccccaccagcctgggccccaggaccacccacagctctgtgctgatcatcaccccccggccccaggaccacggcaccaacctgacctgccaggtgaagtttgctggagctggggtgaccacagagaggaccatccagctgaatgtgacctacgtgccccagaaccccaccaccggcatcttccctggagatggcagcggcaagcaggagaccagggctggggtggtgcatggagccatcggcggggccggcgtgacagccctgctggccctgtgcctgtgcctgatcttcttcatcgtgaagacccacaggaggaaggccgccaggacagctgtgggcagaaatgacacccaccccaccactggaagtgccagccctgtgaggtag

SEQ ID NO: 146732 - DNA, 714 bp, synthetic construct
  misc_feature 1..714: note = Description of Artificial Sequence: Synthetic coding sequence
  source 1..714: mol_type = other DNA
atgcccctgctgctgctgctgcccctgctgtgggccgacctgacccaccggcccaagatcctgatccctggcaccctggagcccggccacagcaagaacctgacctgcagcgtgtcctgggcctgtgagcagggcaccccacccatcttctcctggctgtctgctgcccccaccagcctgggccccaggaccacccacagctctgtgctgatcatcaccccccggccccaggaccacggcaccaacctgacctgccaggtgaagtttgctggggccggcgtgaccacagagaggaccatccagctgaatgtgacctacgtgccccagaaccccaccaccggcatcttccctggagatggcagcggcaagcaggagacccgggccggcgtggtgcacggggccatcggcggggccggcgtgacagccctgctggccctgtgcctgtgcctgatcttcttcatcgtgaagacccacaggaggaaggccgccaggacagctgtgggcagaaatgacacccaccccaccaccggcagcgccagccccaagcaccagaagaagagcaagctgcacggccccacagagaccagcagctgcagcggggccgcccccaccgtggagatggatgaggagctgcactacgccagcctgaacttccacggcatgaaccccagcaaggacaccagcacagagtacagcgaggtgaggacccagtag

SEQ ID NO: 146733 - DNA, 639 bp, synthetic construct
  misc_feature 1..639: note = Description of Artificial Sequence: Synthetic coding sequence
  source 1..639: mol_type = other DNA
atgcccctgctgctgctgctgcccctgctgtgggccgacctgacccaccggcccaagatcctgatccctggcaccctggagcccggccacagcaagaacctgacctgcagcgtgtcctgggcctgtgagcagggcaccccacccatcttctcctggctgtctgctgcccccaccagcctgggccccaggaccacccacagctctgtgctgatcatcaccccccggccccaggaccacggcaccaacctgacctgccaggtgaagtttgctggggccggcgtgaccacagagaggaccatccagctgaatgtgacctacgtgccccagaaccccaccaccggcatcttccctggagatggcagcggcaagcaggagacccgggccggcgtggtgcacggggccatcggcggggccggcgtgacagccctgctggccctgtgcctgtgcctgatcttcttcatcgtgaagacccacaggaggaaggccgccaggacagctgtgggcagaaatgacacccaccccaccaccggcagcgccagccctgtgtctgatggagcctcctggcaccctgtgtgcccagctgacaccagcagccagtgtggcccccccagctgccccatccagcacttccagaactag

SEQ ID NO: 146734 - DNA, 1419 bp, synthetic construct
  misc_feature 1..1419: note = Description of Artificial Sequence: Synthetic coding sequence
  source 1..1419: mol_type = other DNA
atgggctgtgacaggaactgtggcctgattgctggagctgtgattggagctgtgctggccgtgtttggaggcatcctgatgcctgtgggggacctgctgatccagaagaccatcaagaagcaggtggtgctggaggagggcaccatcgccttcaagaactgggtgaagacaggaacagaggtgtaccggcagttctggatctttgatgtgcagaacccccaggaggtgatgatgaacagcagcaacatccaggtgaagcagaggggcccctacacctacagagtgcgcttcctggccaaggaaaatgtgacccaggatgctgaggacaacacagtgtccttcctgcagcccaacggggccatctttgagcccagcctgtctgtgggcacagaggccgacaacttcaccgtgctgaacctggccgtggccgccgccagccacatctaccagaaccagtttgtgcagatgatcctgaacagcctcatcaacaagagcaagagctccatgttccaggtgaggaccctgcgggagctgctgtggggctacagagaccccttcctgagcctggtgccctaccctgtgaccaccaccgtgggcctcttctacccctacaacaacacagcagatggagtgtacaaggtgttcaacgggaaggacaacatcagcaaggtggccatcatcgacacctacaagggcaagaggaacctgagctactgggagagccactgtgacatgatcaatggaacagatgctgccagcttccccccatttgtggagaagagccaggtgctgcagttcttcagcagtgacatctgccgcagcatctatgctgtgtttgaaagtgatgtgaacctgaagggcatccctgtgtacagatttgtgctgcccagcaaggcctttgccagccctgtggagaacccagacaactactgcttctgcacagagaagatcatcagcaagaactgcaccagctatggagtgctggacatcagcaagtgcaaggagggccggcctgtgtacatcagcctgccccacttcctgtatgccagcccagatgtgtctgagcccattgatggcctgaaccccaatgaggaggagcacaggacctacctggacatcgagcccatcaccggcttcaccctgcagtttgccaagaggctgcaggtgaacctgctggtgaagcccagcgagaagatccaggtgctgaagaacctgaagaggaactacatcgtgcccatcctgtggctgaatgaaacaggcaccatcggagatgagaaggccaacatgttccgcagccaggtgacaggcaagatcaacctgctgggcctcatcgagatgatcctgctgtctgtgggcgtggtgatgtttgtggccttcatgatctcctactgtgcctgccgcagcaagaccatcaagtag

SEQ ID NO: 146735 - DNA, 1419 bp, synthetic construct; identical to SEQ ID NO: 146734
  misc_feature 1..1419: note = Description of Artificial Sequence: Synthetic coding sequence
  source 1..1419: mol_type = other DNA

SEQ ID NO: 146736 - DNA, 612 bp, synthetic construct
  misc_feature 1..612: note = Description of Artificial Sequence: Synthetic coding sequence
  source 1..612: mol_type = other DNA
atgggctgtgacaggaactgtggcctgattgctggagctgtgattggagctgtgctggccgtgtttggaggcatcctgatgcctgtgggggacctgctgatccagaagaccatcaagaagcaggtggtgctggaggagggcaccatcgccttcaagaactgggtgaagacaggaacagaggtgtaccggcagttctggatctttgatgtgcagaacccccaggaggtgatgatgaacagcagcaacatccaggtgaagcagaggggcccctacacctacagagtgcgcttcctggccaaggaaaatgtgacccaggatgctgaggacaacacagtgtccttcctgcagcccaacggggccatctttgagcccagcctgtctgtgggcacagaggccgacaacttcaccgtgctgaacctggccgtggccgccgccagccacatctaccagaaccagtttgtgcagatgatcctgaacagcctcatcaacaagagcaagagctccatgttccaggtgaggaccctgcgggagctgctgtggggctacagagaccccttcctgagcctggtgccctaccctgtgaccaccaccgtgggcctcttctacccctag

SEQ ID NO: 146737 - DNA, 1392 bp, synthetic construct
  misc_feature 1..1392: note = Description of Artificial Sequence: Synthetic coding sequence
  source 1..1392: mol_type = other DNA
atgggctgtgacaggaactgtggcctgattgctggagctgtgattggagctgtgctggccgtgtttggaggcatcctgatgcctgtgggggacctgctgatccagaagaccatcaagaagcaggtggtgctggaggagggcaccatcgccttcaagaactgggtgaagacaggaacagaggtgtaccggcagttctggatctttgatgtgcagaacccccaggaggtgatgatgaacagcagcaacatccaggtgaagcagaggggcccctacacctacagagtgcgcttcctggccaaggaaaatgtgacccaggatgctgaggacaacacagtgtccttcctgcagcccaacggggccatctttgagcccagcctgtctgtgggcacagaggccgacaacttcaccgtgctgaacctggccgtggccgccgccagccacatctaccagaaccagtttgtgcagatgatcctgaacagcctcatcaacaagagcaagagctccatgttccaggtgaggaccctgcgggagctgctgtggggctacagagaccccttcctgagcctggtgccctaccctgtgaccaccaccgtgggcctcttctacccctacaacaacacagcagatggagtgtacaaggtgttcaacgggaaggacaacatcagcaaggtggccatcatcgacacctacaagggcaagaggaacctgagctactgggagagccactgtgacatgatcaatggaacagatgctgccagcttccccccatttgtggagaagagccaggtgctgcagttcttcagcagtgacatctgccgcagcatctatgctgtgtttgaaagtgatgtgaacctgaagggcatccctgtgtacagatttgtgctgcccagcaaggcctttgccagccctgtggagaacccagacaactactgcttctgcacagagaagatcatcagcaagaactgcaccagctatggagtgctggacatcagcaagtgcaaggagggccggcctgtgtacatcagcctgccccacttcctgtatgccagcccagatgtgtctgagcccattgatggcctgaaccccaatgaggaggagcacaggacctacctggacatcgagcccatcaccggcttcaccctgcagtttgccaagaggctgcaggtgaacctgctggtgaagcccagcgagaagatccaggtgctgaagaacctgaagaggaactacatcgtgcccatcctgtggctgaatgaaacaggcaccatcggagatgagaaggccaacatgttccgcagccaggtgacaggcaagatcaacctgctgggcctcatcgagatgatcctgctgtctgtgggcgtggtgatgtttgtggccttcatgatctcctactag

SEQ ID NO: 146738 - DNA, 447 bp, synthetic construct
  misc_feature 1..447: note = Description of Artificial Sequence: Synthetic coding sequence
  source 1..447: mol_type = other DNA
atgggctgtgacaggaactgtggcctgattgctggagctgtgattggagctgtgctggccgtgtttggaggcatcctgatgcctgtgggggacctgctgatccagaagaccatcaagaagcaggtggtgctggaggagggcaccatcgccttcaagaactgggtgaagacaggaacagaggtgtaccggcagttctggatctttgatgtgcagaacccccaggaggtgatgatgaacagcagcaacatccaggtgaagcagaggggcccctacacctacagagtgcgcttcctggccaaggaaaatgtgacccaggatgctgaggacaacacagtgtccttcctgcagcccaacggggccatctttgagcccagcctgtctgtgggcacagaggccgacaacttcaccgtgctgaacctggccgtggccgccgccagccacatctag

SEQ ID NO: 146739 - DNA, 282 bp, synthetic construct
  misc_feature 1..282: note = Description of Artificial Sequence: Synthetic coding sequence
  source 1..282: mol_type = other DNA
atgggctgtgacaggaactgtggcctgattgctggagctgtgattggagctgtgctggccgtgtttggaggcatcctgatgcctgtgggggacctgctgatccagaagaccatcaagaagcaggtggtgctggaggagggcaccatcgccttcaagaactgggtgaagacaggaacagaggtgtaccggcagttctggatctttgatgtgcagaacccccaggaggtgatgatgaacagcagcaacatccaggtgaagcagaggggcccctacacctactag

SEQ ID NO: 146740 - DNA, 1419 bp, synthetic construct; identical to SEQ ID NO: 146734
  misc_feature 1..1419: note = Description of Artificial Sequence: Synthetic coding sequence
  source 1..1419: mol_type = other DNA

SEQ ID NO: 146741 - DNA, 1302 bp, synthetic construct
  misc_feature 1..1302: note = Description of Artificial Sequence: Synthetic coding sequence
  source 1..1302: mol_type = other DNA
atgggctgtgacaggaactgtggcctgattgctggagctgtgattggagctgtgctggccgtgtttggaggcatcctgatgcctgtgggggacctgctgatccagaagaccatcaagaagcaggtggtgctggaggagggcaccatcgccttcaagaactgggtgaagacaggaacagaggtgtaccggcagttctggatctttgatgtgcagaacccccaggaggtgatgatgaacagcagcaacatccaggtgaagcagaggggcccctacacctacagagtgcgcttcctggccaaggaaaatgtgacccaggatgctgaggacaacacagtgtccttcctgcagcccaacggggccatctttgagcccagcctgtctgtgggcacagaggccgacaacttcaccgtgctgaacctggccgtggccgccgccagccacatctaccagaaccagtttgtgcagatgatcctgaacagcctcatcaacaagagcaagagctccatgttccaggtgaggaccctgcgggagctgctgtggggctacagagaccccttcctgagcctggtgccctaccctgtgaccaccaccgtgggcctcttctacccctacaacaacacagcagatggagtgtacaaggtgttcaacgggaaggacaacatcagcaaggtggccatcatcgacacctacaagggcaagaggagcatctatgctgtgtttgaaagtgatgtgaacctgaagggcatccctgtgtacagatttgtgctgcccagcaaggcctttgccagccctgtggagaacccagacaactactgcttctgcacagagaagatcatcagcaagaactgcaccagctatggagtgctggacatcagcaagtgcaaggagggccggcctgtgtacatcagcctgccccacttcctgtatgccagcccagatgtgtctgagcccattgatggcctgaaccccaatgaggaggagcacaggacctacctggacatcgagcccatcaccggcttcaccctgcagtttgccaagaggctgcaggtgaacctgctggtgaagcccagcgagaagatccaggtgctgaagaacctgaagaggaactacatcgtgcccatcctgtggctgaatgagaccggcaccatcggagatgagaaggccaacatgttccgcagccaggtgacaggcaagatcaacctgctgggcctgattgagatgatcctgctgtctgtgggcgtggtgatgtttgtggccttcatgatctcctactgtgcctgccgcagcaagaccatcaagtag

SEQ ID NO: 146742 - DNA, 1419 bp, synthetic construct; identical to SEQ ID NO: 146734
  misc_feature 1..1419: note = Description of Artificial Sequence: Synthetic coding sequence
  source 1..1419: mol_type = other DNA

SEQ ID NO: 146743 - DNA, 282 bp, synthetic construct; identical to SEQ ID NO: 146739
  misc_feature 1..282: note = Description of Artificial Sequence: Synthetic coding sequence
  source 1..282: mol_type = other DNA

SEQ ID NO: 146744 - DNA, 432 bp, synthetic construct
  misc_feature 1..432: note = Description of Artificial Sequence: Synthetic coding sequence
  source 1..432: mol_type = other DNA
atgggctgtgacaggaactgtggcctgattgctggagctgtgattggagctgtgctggccgtgtttggaggcatcctgatgcctgtgggggacctgctgatccagaagaccatcaagaagcaggtggtgctggaggagggcaccatcgccttcaagaactgggtgaagacaggaacagaggtgtaccggcagttctggatctttgatgtgcagaacccccaggaggtgatgatgaacagcagcaacatccaggtgaagcagaggggcccctacacctacagagtgcgcttcctggccaaggaaaatgtgacccaggatgctgaggacaacacagtgtccttcctgcagcccaacggggccatctttgagcccagcctgtctgtgggcacagaggccgacaacttcaccgtgctgaacctggccgtggcctag

SEQ ID NO: 146745 - DNA, 1419 bp, synthetic construct; identical to SEQ ID NO: 146734
  misc_feature 1..1419: note = Description of Artificial Sequence: Synthetic coding sequence
  source 1..1419: mol_type = other DNA

SEQ ID NO: 146746 - DNA, 198 bp, synthetic construct
  misc_feature 1..198: note = Description of Artificial Sequence: Synthetic coding sequence
  source 1..198: mol_type = other DNA
atgggctgtgacaggaactgtggcctgattgctggagctgtgattggagctgtgctggccgtgtttggaggcatcctgatgcctgtgggggacctgctgatccagaagaccatcaagaagcaggtggtgctggaggagggcaccatcgccttcaagaactgggtgaagacaggaacagaggtgtaccggcagttctag

SEQ ID NO: 146747 - DNA, 1191 bp, synthetic construct
  misc_feature 1..1191: note = Description of Artificial Sequence: Synthetic coding sequence
  source 1..1191: mol_type = other DNA
atgatgaacagcagcaacatccaggtgaagcagaggggcccctacacctacagagtgcgcttcctggccaaggaaaatgtgacccaggatgctgaggacaacacagtgtccttcctgcagcccaacggggccatctttgagcccagcctgtctgtgggcacagaggccgacaacttcaccgtgctgaacctggccgtggccgccgccagccacatctaccagaaccagtttgtgcagatgatcctgaacagcctcatcaacaagagcaagagctccatgttccaggtgaggaccctgcgggagctgctgtggggctacagagaccccttcctgagcctggtgccctaccctgtgaccaccaccgtgggcctcttctacccctacaacaacacagcagatggagtgtacaaggtgttcaacgggaaggacaacatcagcaaggtggccatcatcgacacctacaagggcaagaggaacctgagctactgggagagccactgtgacatgatcaatggaacagatgctgccagcttccccccatttgtggagaagagccaggtgctgcagttcttcagcagtgacatctgccgcagcatctatgctgtgtttgaaagtgatgtgaacctgaagggcatccctgtgtacagatttgtgctgcccagcaaggcctttgccagccctgtggagaacccagacaactactgcttctgcacagagaagatcatcagcaagaactgcaccagctatggagtgctggacatcagcaagtgcaaggagggccggcctgtgtacatcagcctgccccacttcctgtatgccagcccagatgtgtctgagcccattgatggcctgaaccccaatgaggaggagcacaggacctacctggacatcgagcccatcaccggcttcaccctgcagtttgccaagaggctgcaggtgaacctgctggtgaagcccagcgagaagatccaggtgctgaagaacctgaagaggaactacatcgtgcccatcctgtggctgaatgaaacaggcaccatcggagatgagaaggccaacatgttccgcagccaggtgacaggcaagatcaacctgctgggcctcatcgagatgatcctgctgtctgtgggcgtggtgatgtttgtggccttcatgatctcctactgtgcctgccgcagcaagaccatcaagtag

SEQ ID NO: 146748 - DNA, 1239 bp, synthetic construct
  misc_feature 1..1239: note = Description of Artificial Sequence: Synthetic coding sequence
  source 1..1239: mol_type = other DNA
atgggctgtgacaggaactgtggcctgattgctggagctgtgattggagctgtgctggccgtgtttggaggcatcctgatgcctgtgggggacctgctgatccagaagaccatcaagaagcaggtggtgctggaggagggcaccatcgccttcaagaactgggtgaagacaggaacagaggtgtaccggcagttctggatctttgatgtgcagaacccccaggaggtgatgatgaacagcagcaacatccaggtgaagcagaggggcccctacacctacagagtgcgcttcctggccaaggaaaatgtgacccaggatgctgaggacaacacagtgtccttcctgcagcccaacggggccatctttgagcccagcctgtctgtgggcacagaggccgacaacttcaccgtgctgaacctggccgtggcctacaacaacacagcagatggagtgtacaaggtgttcaacgggaaggacaacatcagcaaggtggccatcatcgacacctacaagggcaagaggaacctgagctactgggagagccactgtgacatgatcaatggaacagatgctgccagcttccccccatttgtggagaagagccaggtgctgcagttcttcagcagtgacatctgccgcagcatctatgctgtgtttgaaagtgatgtgaacctgaagggcatccctgtgtacagatttgtgctgcccagcaaggcctttgccagccctgtggagaacccagacaactactgcttctgcacagagaagatcatcagcaagaactgcaccagctatggagtgctggacatcagcaagtgcaaggagggccggcctgtgtacatcagcctgccccacttcctgtatgccagcccagatgtgtctgagcccattgatggcctgaaccccaatgaggaggagcacaggacctacctggacatcgagcccatcaccggcttcaccctgcagtttgccaagaggctgcaggtgaacctgctggtgaagcccagcgagaagatccaggtgctgaagaacctgaagaggaactacatcgtgcccatcctgtggctgaatgaaacaggcaccatcggagatgagaaggccaacatgttccgcagccaggtgacaggcaagatcaacctgctgggcctcatcgagatgatcctgctgtctgtgggcgtggtgatgtttgtggccttcatgatctcctactgtgcctgccgcagcaagaccatcaagtag

SEQ ID NO: 146749 - DNA, 867 bp, synthetic construct
  misc_feature 1..867: note = Description of Artificial Sequence: Synthetic coding sequence
  source 1..867: mol_type = other DNA
atgggctgtgacaggaactgtggcctgattgctggagctgtgattggagctgtgctggccgtgtttggaggcatcctgatgcctgtgggggacctgctgatccagaagaccatcaagaagcaggtggtgctggaggagggcaccatcgccttcaagaactgggtgaagacaggaacagaggtgtaccggcagttctggatctttgatgtgcagaacccccaggaggtgatgatgaacagcagcaacatccaggtgaagcagaggggcccctacacctacagagtgcgcttcctggccaaggaaaatgtgacccaggatgctgaggacaacacagtgtccttcctgcagcccaacggggccatctttgagcccagcctgtctgtgggcacagaggccgacaacttcaccgtgctgaacctggccgtggccgccgccagccacatctaccagaaccagtttgtgcagatgatcctgaacagcctcatcaacaagagcaagagctccatgttccaggtgaggaccctgcgggagctgctgtggggctacagagaccccttcctgagcctggtgccctaccctgtgaccaccaccgtgggcctcttctacccctacaacaacacagcagatggagtgtacaaggtgttcaacgggaaggacaacatcagcaaggtggccatcatcgacacctacaagggcaagaggaacctgagctactgggagagccactgtgacatgatcaatggaacagatgctgccagcttccccccatttgtggagaagagccaggtgctgcagttcttcagcagtgacatctgccgggagacctgtgtgcacttcaccagcagcttctctgtgtgcaagagctag

SEQ ID NO: 146750 - DNA, 846 bp, synthetic construct
  misc_feature 1..846: note = Description of Artificial Sequence: Synthetic coding sequence
  source 1..846: mol_type = other DNA
atgtctgcccaggagagctgcctgagcctcatcaagtacttcctgtttgtgttcaacctcttcttctttgtgctgggcagcctcatcttctgcttcggcatctggatcctgattgacaagaccagctttgtgtcctttgtgggcctggcctttgtgcccctgcagatctggagcaaggtgctggccatcagcggcatcttcaccatgggcatcgccctgctgggctgtgtgggcgccctgaaggagctgcgctgcctgctgggcctgtacttcggcatgctgctgctgctgtttgccacccagatcaccctgggcatcctgatcagcacccagagggcccagctggagaggagcctgagagatgtggtggagaagaccatccagaagtatggcaccaaccctgaggagacagctgctgaggagagctgggactatgtgcagttccagctgcgctgctgcggctggcactacccccaggactggttccaggtgctgatcctgcggggaaatggcagcgaggcccaccgggtgccctgcagctgctacaacctgagcgccaccaatgacagcaccatcctggacaaggtgatcctgccccagctgagccggctgggccacctggcccggagccgccacagcgctgacatctgtgctgtgcctgctgagagccacatctaccgggagggctgtgcccagggcctgcagaagtggctgcacaacaacctgatcagcatcgtgggcatctgcctgggcgtgggcctgctggagctgggcttcatgaccctgagcatcttcctgtgcaggaacctggaccacgtgtacaaccggctggcccgctacagatag

SEQ ID NO: 146751 - DNA, 471 bp, synthetic construct
  misc_feature 1..471: note = Description of Artificial Sequence: Synthetic coding sequence
  source 1..471: mol_type = other DNA
atgtctgcccaggagagctgcctgagcctcatcaagtacttcctgtttgtgttcaacctcttcttctttgtgctgggcagcctcatcttctgcttcggcatctggatcctgattgacaagaccagctttgtgtcctttgtgggcctggcctttgtgcccctgcagatctggagcaaggtgctggccatcagcggcatcttcaccatgggcatcgccctgctgggctgtgtgggcgccctgaaggagctgcgctgcctgctgggcctgtacttcggcatgctgctgctgctgtttgccacccagatcaccctgggcatcctgatcagcacccagagggcccagaaggacacccccacctggaccaagggggacagacacaagcagctgcagcgggagacccacggcaagaagcgggagcaggagaaggagattgatgccctgaaggaggagacagagacctatgagccctag

SEQ ID NO: 146752 - DNA, 642 bp, synthetic construct
  misc_feature 1..642: note = Description of Artificial Sequence: Synthetic coding sequence
  source 1..642: mol_type = other DNA
atgggcatcgccctgctgggctgtgtgggcgccctgaaggagctgcgctgcctgctgggcctgtacttcggcatgctgctgctgctgtttgccacccagatcaccctgggcatcctgatcagcacccagagggcccagctggagaggagcctgagagatgtggtggagaagaccatccagaagtatggcaccaaccctgaggagacagctgctgaggagagctgggactatgtgcagttccagctgcgctgctgcggctggcactacccccaggactggttccaggtgctgatcctgcggggaaatggcagcgaggcccaccgggtgccctgcagctgctacaacctgagcgccaccaatgacagcaccatcctggacaaggtgatcctgccccagctgagccggctgggccacctggcccggagccgccacagcgctgacatctgtgctgtgcctgctgagagccacatctaccgggagggctgtgcccagggcctgcagaagtggctgcacaacaacctgatcagcatcgtgggcatctgcctgggcgtgggcctgctggagctgggcttcatgaccctgagcatcttcctgtgcaggaacctggaccacgtgtacaaccggctggcccgctacagatag

SEQ ID NO: 146753 - DNA, 813 bp, synthetic construct
  misc_feature 1..813: note = Description of Artificial Sequence: Synthetic coding sequence
  source 1..813: mol_type = other DNA
atgtctgcccaggagagctgcctgagcctcatcaagtacttcctgtttgtgttcaacctcttcttctttgtgctgggcagcctcatcttctgcttcggcatctggatcctgattgacaagaccagctttgtgtcctttgtgggcctggcctttgtgcccctgcagatctggagcaaggtgctggccatcagcggcatcttcaccatgggcatcgccctgctgggctgtgtgggcgccctgaaggagctgcgctgcctgctgggcctgtacttcggcatgctgctgctgctgtttgccacccagatcaccctgggcatcctgatcagcacccagagggcccagctggagaggagcctgagagatgtggtggagaagaccatccagaagtatggcaccaaccctgaggagacagctgctgaggagagctgggactatgtgcagttccagctgcgctgctgcggctggcactacccccaggactggttccaggtgctgatcctgcggggaaatggcagcgaggcccaccgggtgccctgcagctgctacaacctgagcgccaccaatgacagcaccatcctggacaaggtgatcctgccccagctgagccggctgggccacctggcccggagccgccacagcgctgacatctgtgctgtgcctgctgagagccacatctaccgggagggctgtgcccagggcctgcagaagtggctgcacaacaacctgatcagcatcgtgggcatctgcctgggcgtgggcctgctggaggtgatctggccccggccccaccccaggtctgccctgaacccctag

SEQ ID NO: 146754 - DNA, 1095 bp, synthetic construct; identical to SEQ ID NO: 143274
  misc_feature 1..1095: note = Description of Artificial Sequence: Synthetic coding sequence
  source 1..1095: mol_type = other DNA

SEQ ID NO: 146755 - DNA, 483 bp, synthetic construct
  misc_feature 1..483: note = Description of Artificial Sequence: Synthetic coding sequence
  source 1..483: mol_type = other DNA
atggccaactgtgagttcagccctgtgtctggggacaagccctgctgccgcctgagccggcgggcccagctgtgcctgggcgtgtccatcctggtgctgatcctggtggtggtgctggccgtggtggtgccccgctggaggcagcagtggagcggccctggcaccaccaagcgcttccctgagaccgtgctggcccgctgtgtgaagtacacagagatccaccctgagatgagacatgtggactgccagagcgtgtgggatgccttcaagggggccttcatcagcaagcacccctgcaacatcacagaggaggactaccagcccctgatgaagctgggcacccagacagtgccctgcaacaagaatgagaccatcaacctggcccagacaggagagaggacagctgccaccaccctcttccagtacagcggcaagcgcttccctgctggcctgcagaagctgcctgtgatgtggagcatgtag

SEQ ID NO: 146756 - DNA, 624 bp, synthetic construct
  misc_feature 1..624: note = Description of Artificial Sequence: Synthetic coding sequence
  source 1..624: mol_type = other DNA
atgcagagcggcacccactggagggtgctgggcctgtgcctgctgtctgtgggcgtgtggggccaggatggaaatgaggagatgggcggcatcacccagaccccctacaaggtgtccatcagcggcaccaccgtcatcctgacctgcccccagtacccaggcagcgagatcctgtggcagcacaatgacaagaacattggaggagatgaagatgacaagaacattggaagtgatgaggaccacctgagcctgaaggagttcagcgagctggagcagagcggctactacgtgtgctacccccggggcagcaagccagaagatgccaacttctacctgtacctgcgggcccgggtgtgtgagaactgcatggagatggatgtgatgtctgtggccaccatcgtgattgtggacatctgcatcactggaggcctgctgctgctggtgtactactggagcaagaacaggaaggccaaggccaagcctgtgaccaggggggccggggccggcggccggcagaggggccagaacaaggagcggcccccacctgtgcccaacccagactatgagcccatcaggaagggccagagggacctgtacagcggcctgaaccagaggcgcatctag

SEQ ID NO: 146757 - DNA, 606 bp, synthetic construct
  misc_feature 1..606: note = Description of Artificial Sequence: Synthetic coding sequence
  source 1..606: mol_type = other DNA
atgcagagcggcacccactggagggtgctgggcctgtgcctgctgtctgtgggcgtgtggggccaggatggaaatgaggagatggcctacaaggtgtccatcagcggcaccaccgtcatcctgacctgcccccagtacccaggcagcgagatcctgtggcagcacaatgacaagaacattggaggagatgaagatgacaagaacattggaagtgatgaggaccacctgagcctgaaggagttcagcgagctggagcagagcggctactacgtgtgctacccccggggcagcaagccagaagatgccaacttctacctgtacctgcgggcccgggtgtgtgagaactgcatggagatggatgtgatgtctgtggccaccatcgtgattgtggacatctgcatcactggaggcctgctgctgctggtgtactactggagcaagaacaggaaggccaaggccaagcctgtgaccaggggggccggggccggcggccggcagaggggccagaacaaggagcggcccccacctgtgcccaacccagactatgagcccatcaggaagggccagagggacctgtacagcggcctgaaccagaggcgcatctag

SEQ ID NO: 146758 - DNA, 237 bp, synthetic construct
  misc_feature 1..237: note = Description of Artificial Sequence: Synthetic coding sequence
  source 1..237: mol_type = other DNA
atgattggcttcctgacagaggacaagaagaagtggaacctgggcagcaatgccaaggacccccggggcatgtaccagtgcaagggcagccagaacaagagcaagcccctgcaggtgtactaccgcaccagtgacaagcagaccctgctgcccaatgaccagctgtaccagcccctgaaggacagagaagatgaccagtacagccacctgcagggcaaccagctgcggagaaattag

SEQ ID NO: 146759 - DNA, 549 bp, synthetic construct
  misc_feature 1..549: note = Description of Artificial Sequence: Synthetic coding sequence
  source 1..549: mol_type = other DNA
atggagcagggcaagggcctggccgtgctgatcctggccatcatcctgctgcagggcaccctggcccagagcatcaagggcaaccacctggtgaaggtgtatgactaccaggaggatggctctgtgctgctgacctgtgatgctgaggccaagaacatcacctggttcaaggatggcaagatgattggcttcctgacagaggacaagaagaagtggaacctgggcagcaatgccaaggacccccggggcatgtaccagtgcaagggcagccagaacaagagcaagcccctgcaggtgtactacaggatgtgccagaactgcatcgagctgaatgctgccaccatcagcggcttcctgtttgctgagatcgtgtccatctttgtgctggccgtgggcgtgtacttcatcgccggccaggatggagtgcggcagagccgggccagtgacaagcagaccctgctgcccaatgaccagctgtaccagcccctgaaggacagagaagatgaccagtacagccacctgcagggcaaccagctgcggagaaattag

SEQ ID NO: 146760 - DNA, 1200 bp, synthetic construct
  misc_feature 1..1200: note = Description of Artificial Sequence: Synthetic coding sequence
  source 1..1200: mol_type = other DNA
atggagcccccaggccggcgggagtgccccttccccagctggaggtttcctggcctgctgctggccgccatggtgctgctgctgtacagcttcagtgatgcctgtgaggagccccccacctttgaggccatggagctgattggcaagcccaagccctactatgagatcggggagcgggtggactacaagtgcaagaagggctacttctacatcccccccctggccacccacaccatctgtgacaggaaccacacctggctgcctgtgtctgatgatgcctgctaccgggagacctgcccctacatccgggaccccctgaatggccaggccgtgcctgccaacggcacctatgaatttggctaccagatgcacttcatctgcaatgaaggctactacctgattggagaggagatcctgtactgtgagctgaagggctctgtggccatctggagcggcaagccacccatctgtgagaaggtgctgtgcaccccaccacccaagatcaagaatggcaagcacaccttcagcgaggtggaggtgtttgagtacctggatgctgtgacctacagctgtgaccctgcccctggccctgaccccttcagcctgattggagagagcaccatctactgtggggacaacagcgtgtggagcagagctgcccctgagtgcaaggtggtgaagtgccgcttccctgtggtggagaatggcaagcagatcagcggctttgggaagaagttctactacaaggccaccgtgatgtttgaatgtgacaagggcttctacctggatggcagtgacaccatcgtgtgtgacagcaacagcacctgggacccccctgtgcccaagtgcctgaaggtgctgccccccagcagcaccaagcccccagccctgagccacagcgtgtccaccagcagcaccaccaagagccctgccagcagcgccagcggcccccggcccacctacaagccccctgtgagcaactacccaggctaccccaagccagaggagggcatcctggacagcctggatgtgtgggtgattgctgtgattgtcatcgccatcgtggtgggcgtggccgtcatctgtgtggtgccctaccgctacctgcagaggaggaagaagaagggcaaggcagatggaggagcagaatatgccacctaccagaccaagagcaccaccccagctgagcagaggggctag

SEQ ID NO: 146761 - DNA, 1050 bp, synthetic construct
  misc_feature 1..1050: note = Description of Artificial Sequence: Synthetic coding sequence
  source 1..1050: mol_type = other DNA
atggagcccccaggccggcgggagtgccccttccccagctggaggtttcctggcctgctgctggccgccatggtgctgctgctgtacagcttcagtgatgcctgtgaggagccccccacctttgaggccatggagctgattggcaagcccaagccctactatgagatcggggagcgggtggactacaagtgcaagaagggctacttctacatcccccccctggccacccacaccatctgtgacaggaaccacacctggctgcctgtgtctgatgatgcctgctaccgggagacctgcccctacatccgggaccccctgaatggccaggccgtgcctgccaacggcacctatgaatttggctaccagatgcacttcatctgcaatgaaggctactacctgattggagaggagatcctgtactgtgagctgaagggctctgtggccatctggagcggcaagccacccatctgtgagaaggtgctgtgcaccccaccacccaagatcaagaatggcaagcacaccttcagcgaggtggaggtgtttgagtacctggatgctgtgacctacagctgtgaccctgcccctggccctgaccccttcagcctgattggagagagcaccatctactgtggggacaacagcgtgtggagcagagctgcccctgagtgcaaggtggtgaagtgccgcttccctgtggtggagaatggcaagcagatcagcggctttgggaagaagttctactacaaggccaccgtgatgtttgaatgtgacaagggcttctacctggatggcagtgacaccatcgtgtgtgacagcaacagcacctgggacccccctgtgcccaagtgcctgaagggcccccggcccacctacaagccccctgtgagcaactacccaggctaccccaagccagaggagggcatcctggacagcctggatgtgtgggtgattgctgtgattgtcatcgccatcggcaagcagatggtggagctgaacatgcccctgacccggctgaaccagcccctgcagcagagccgggaggccgagtag

SEQ ID NO: 146762 - DNA, 1155 bp, synthetic construct
  misc_feature 1..1155: note = Description of Artificial Sequence: Synthetic coding sequence
  source 1..1155: mol_type = other DNA
atggagcccccaggccggcgggagtgccccttccccagctggaggtttcctggcctgctgctggccgccatggtgctgctgctgtacagcttcagtgatgcctgtgaggagccccccacctttgaggccatggagctgattggcaagcccaagccctactatgagatcggggagcgggtggactacaagtgcaagaagggctacttctacatcccccccctggccacccacaccatctgtgacaggaaccacacctggctgcctgtgtctgatgatgcctgctaccgggagacctgcccctacatccgggaccccctgaatggccaggccgtgcctgccaacggcacctatgaatttggctaccagatgcacttcatctgcaatgaaggctactacctgattggagaggagatcctgtactgtgagctgaagggctctgtggccatctggagcggcaagccacccatctgtgagaaggtgctgtgcaccccaccacccaagatcaagaatggcaagcacaccttcagcgaggtggaggtgtttgagtacctggatgctgtgacctacagctgtgaccctgcccctggccctgaccccttcagcctgattggagagagcaccatctactgtggggacaacagcgtgtggagcagagctgcccctgagtgcaaggtggtgaagtgccgcttccctgtggtggagaatggcaagcagatcagcggctttgggaagaagttctactacaaggccaccgtgatgtttgaatgtgacaagggcttctacctggatggcagtgacaccatcgtgtgtgacagcaacagcacctgggacccccctgtgcccaagtgcctgaaggtgtccaccagcagcaccaccaagagccctgccagcagcgccagcggcccccggcccacctacaagccccctgtgagcaactacccaggctaccccaagccagaggagggcatcctggacagcctggatgtgtgggtgattgctgtgattgtgattgccatcgtggtgggcgtggccgtcatctgtgtggtgccctaccgctacctgcagaggaggaagaagaagggcaaggcagatggcggcgcagaatatgccacctaccagaccaagagcaccaccccagctgagcagaggggctag

SEQ ID NO: 146763 - DNA, 1110 bp, synthetic construct
  misc_feature 1..1110: note = Description of Artificial Sequence: Synthetic coding sequence
  source 1..1110: mol_type = other DNA
atggagcccccaggccggcgggagtgccccttccccagctggaggtttcctggcctgctgctggccgccatggtgctgctgctgtacagcttcagtgatgcctgtgaggagccccccacctttgaggccatggagctgattggcaagcccaagccctactatgagatcggggagcgggtggactacaagtgcaagaagggctacttctacatcccccccctggccacccacaccatctgtgacaggaaccacacctggctgcctgtgtctgatgatgcctgctaccgggagacctgcccctacatccgggaccccctgaatggccaggccgtgcctgccaacggcacctatgaatttggctaccagatgcacttcatctgcaatgaaggctactacctgattggagaggagatcctgtactgtgagctgaagggctctgtggccatctggagcggcaagccacccatctgtgagaaggtgctgtgcaccccaccacccaagatcaagaatggcaagcacaccttcagcgaggtggaggtgtttgagtacctggatgctgtgacctacagctgtgaccctgcccctggccctgaccccttcagcctgattggagagagcaccatctactgtggggacaacagcgtgtggagcagagctgcccctgagtgcaaggtggtgaagtgccgcttccctgtggtggagaatggcaagcagatcagcggctttgggaagaagttctactacaaggccaccgtgatgtttgaatgtgacaagggcttctacctggatggcagtgacaccatcgtgtgtgacagcaacagcacctgggacccccctgtgcccaagtgcctgaagggcccccggcccacctacaagccccctgtgagcaactacccaggctaccccaagccagaggagggcatcctggacagcctggatgtgtgggtgattgctgtgattgtcatcgccatcgtggtgggcgtggccgtcatctgtgtggtgccctaccgctacctgcagaggaggaagaagaagggcaaggcagatggaggagcagaatatgccacctaccagaccaagagcaccaccccagctgagcagaggggctag

SEQ ID NO: 146764 - DNA, 1179 bp, synthetic construct
  misc_feature 1..1179: note = Description of Artificial Sequence: Synthetic coding sequence
  source 1..1179: mol_type = other DNA
atggagcccccaggccggcgggagtgccccttccccagctggaggtttcctggcctgctgctggccgccatggtgctgctgctgtacagcttcagtgatgcctgtgaggagccccccacctttgaggccatggagctgattggcaagcccaagccctactatgagatcggggagcgggtggactacaagtgcaagaagggctacttctacatcccccccctggccacccacaccatctgtgacaggaaccacacctggctgcctgtgtctgatgatgcctgctaccgggagacctgcccctacatccgggaccccctgaatggccaggccgtgcctgccaacggcacctatgaatttggctaccagatgcacttcatctgcaatgaaggctactacctgattggagaggagatcctgtactgtgagctgaagggctctgtggccatctggagcggcaagccacccatctgtgagaaggtgctgtgcaccccaccacccaagatcaagaatggcaagcacaccttcagcgaggtggaggtgtttgagtacctggatgctgtgacctacagctgtgaccctgcccctggccctgaccccttcagcctgattggagagagcaccatctactgtggggacaacagcgtgtggagcagagctgcccctgagtgcaaggtggtgaagtgccgcttccctgtggtggagaatggcaagcagatcagcggctttgggaagaagttctactacaaggccaccgtgatgtttgaatgtgacaagggcttctacctggatggcagtgacaccatcgtgtgtgacagcaacagcacctgggacccccctgtgcccaagtgcctgaaggtgctgccccccagcagcaccaagcccccagccctgagccacagcgtgtccaccagcagcaccaccaagagccctgccagcagcgccagcggcccccggcccacctacaagccccctgtgagcaactacccaggctaccccaagccagaggagggcatcctggacagcctggatgtgtgggtgattgctgtgattgtcatcgccatcgtggtgggcgtggccgtcatctgtgtggtgccctaccgctacctgcagaggaggaagaagaagggcacctacctgacagatgagacccaccgggaggtgaagttcaccagcctgtag

SEQ ID NO: 146765 - DNA, 1068 bp, synthetic construct
  misc_feature 1..1068: note = Description of Artificial Sequence: Synthetic coding sequence
  source 1..1068: mol_type = other DNA
atggagcccccaggccggcgggagtgccccttccccagctggaggtttcctggcctgctgctggccgccatggtgctgctgctgtacagcttcagtgatgcctgtgaggagccccccacctttgaggccatggagctgattggcaagcccaagccctactatgagatcggggagcgggtggactacaagtgcaagaagggctacttctacatcccccccctggccacccacaccatctgtgacaggaaccacacctggctgcctgtgtctgatgatgcctgctaccgggagacctgcccctacatccgggaccccctgaatggccaggccgtgcctgccaacggcacctatgaatttggctaccagatgcacttcatctgcaatgaaggctactacctgattggagaggagatcctgtactgtgagctgaagggctctgtggccatctggagcggcaagccacccatctgtgagaaggtgctgtgcaccccaccacccaagatcaagaatggcaagcacaccttcagcgaggtggaggtgtttgagtacctggatgctgtgacctacagctgtgaccctgcccctggccctgaccccttcagcctgattggagagagcaccatctactgtggggacaacagcgtgtggagcagagctgcccctgagtgcaaggtggtgaagtgccgcttccctgtggtggagaatggcaagcagatcagcggctttgggaagaagttctactacaaggccaccgtgatgtttgaatgtgacaagggcttctacctggatggcagtgacaccatcgtgtgtgacagcaacagcacctgggacccccctgtgcccaagtgcctgaagggctaccccaagccagaggagggcatcctggacagcctggatgtgtgggtgattgctgtgattgtcatcgccatcgtggtgggcgtggccgtcatctgtgtggtgccctaccgctacctgcagaggaggaagaagaagggcaaggcagatggaggagcagaatatgccacctaccagaccaagagcaccaccccagctgagcagaggggctag

SEQ ID NO: 146766 - DNA, 1158 bp, synthetic construct
  misc_feature 1..1158: note = Description of Artificial Sequence: Synthetic coding sequence
  source 1..1158: mol_type = other DNA
atggagcccccaggccggcgggagtgccccttccccagctggaggtttcctggcctgctgctggccgccatggtgctgctgctgtacagcttcagtgatgcctgtgaggagccccccacctttgaggccatggagctgattggcaagcccaagccctactatgagatcggggagcgggtggactacaagtgcaagaagggctacttctacatcccccccctggccacccacaccatctgtgacaggaaccacacctggctgcctgtgtctgatgatgcctgctaccgggagacctgcccctacatccgggaccccctgaatggccaggccgtgcctgccaacggcacctatgaatttggctaccagatgcacttcatctgcaatgaaggctactacctgattggagaggagatcctgtactgtgagctgaagggctctgtggccatctggagcggcaagccacccatctgtgagaaggtgctgtgcaccccaccacccaagatcaagaatggcaagcacaccttcagcgaggtggaggtgtttgagtacctggatgctgtgacctacagctgtgaccctgcccctggccctgaccccttcagcctgattggagagagcaccatctactgtggggacaacagcgtgtggagcagagctgcccctgagtgcaaggtggtgaagtgccgcttccctgtggtggagaatggcaagcagatcagcggctttgggaagaagttctactacaaggccaccgtgatgtttgaatgtgacaagggcttctacctggatggcagtgacaccatcgtgtgtgacagcaacagcacctgggacccccctgtgcccaagtgcctgaaggtgctgccccccagcagcaccaagcccccagccctgagccacagcgtgtccaccagcagcaccaccaagagccctgccagcagcgccagcggctaccccaagccagaggagggcatcctggacagcctggatgtgtgggtgattgctgtgattgtcatcgccatcgtggtgggcgtggccgtcatctgtgtggtgccctaccgctacctgcagaggaggaagaagaagggcaaggcagatggaggagcagaatatgccacctaccagaccaagagcaccaccccagctgagcagaggggctag

SEQ ID NO: 146767 - DNA, 1089 bp, synthetic construct
  misc_feature 1..1089: note = Description of Artificial Sequence: Synthetic coding sequence
  source 1..1089: mol_type = other DNA
atggagcccccaggccggcgggagtgccccttccccagctggaggtttcctggcctgctgctggccgccatggtgctgctgctgtacagcttcagtgatgcctgtgaggagccccccacctttgaggccatggagctgattggcaagcccaagccctactatgagatcggggagcgggtggactacaagtgcaagaagggctacttctacatcccccccctggccacccacaccatctgtgacaggaaccacacctggctgcctgtgtctgatgatgcctgctaccgggagacctgcccctacatccgggaccccctgaatggccaggccgtgcctgccaacggcacctatgaatttggctaccagatgcacttcatctgcaatgaaggctactacctgattggagaggagatcctgtactgtgagctgaagggctctgtggccatctggagcggcaagccacccatctgtgagaaggtgctgtgcaccccaccacccaagatcaagaatggcaagcacaccttcagcgaggtggaggtgtttgagtacctggatgctgtgacctacagctgtgaccctgcccctggccctgaccccttcagcctgattggagagagcaccatctactgtggggacaacagcgtgtggagcagagctgcccctgagtgcaaggtggtgaagtgccgcttccctgtggtggagaatggcaagcagatcagcggctttgggaagaagttctactacaaggccaccgtgatgtttgaatgtgacaagggcttctacctggatggcagtgacaccatcgtgtgtgacagcaacagcacctgggacccccctgtgcccaagtgcctgaagggcccccggcccacctacaagccccctgtgagcaactacccaggctaccccaagccagaggagggcatcctggacagcctggatgtgtgggtgattgctgtgattgtcatcgccatcgtggtgggcgtggccgtcatctgtgtggtgccctaccgctacctgcagaggaggaagaagaagggcacctacctgacagatgagacccaccgggaggtgaagttcaccagcctgtag

SEQ ID NO: 146768 - DNA, 1134 bp, synthetic construct
  misc_feature 1..1134: note = Description of Artificial Sequence: Synthetic coding sequence
  source 1..1134: mol_type = other DNA
atggagcccccaggccggcgggagtgccccttccccagctggaggtttcctggcctgctgctggccgccatggtgctgctgctgtacagcttcagtgatgcctgtgaggagccccccacctttgaggccatggagctgattggcaagcccaagccctactatgagatcggggagcgggtggactacaagtgcaagaagggctacttctacatcccccccctggccacccacaccatctgtgacaggaaccacacctggctgcctgtgtctgatgatgcctgctaccgggagacctgcccctacatccgggaccccctgaatggccaggccgtgcctgccaacggcacctatgaatttggctaccagatgcacttcatctgcaatgaaggctactacctgattggagaggagatcctgtactgtgagctgaagggctctgtggccatctggagcggcaagccacccatctgtgagaaggtgctgtgcaccccaccacccaagatcaagaatggcaagcacaccttcagcgaggtggaggtgtttgagtacctggatgctgtgacctacagctgtgaccctgcccctggccctgaccccttcagcctgattggagagagcaccatctactgtggggacaacagcgtgtggagcagagctgcccctgagtgcaaggtggtgaagtgccgcttccctgtggtggagaatggcaagcagatcagcggctttgggaagaagttctactacaaggccaccgtgatgtttgaatgtgacaagggcttctacctggatggcagtgacaccatcgtgtgtgacagcaacagcacctgggacccccctgtgcccaagtgcctgaaggtgtccaccagcagcaccaccaagagccctgccagcagcgccagcggcccccggcccacctacaagccccctgtgagcaactacccaggctaccccaagccagaggagggcatcctggacagcctggatgtgtgggtgattgctgtgattgtgattgccatcgtggtgggcgtggccgtcatctgtgtggtgccctaccgctacctgcagaggaggaagaagaagggcacctacctgacagatgagacccaccgggaggtgaagttcaccagcctgtag

SEQ ID NO: 146769 - DNA, 1011 bp, synthetic construct
  misc_feature 1..1011: note = Description of Artificial Sequence: Synthetic coding sequence
  source 1..1011: mol_type = other DNA
atggagcccccaggccggcgggagtgccccttccccagctggaggtttcctggcctgctgctggccgccatggtgctgctgctgtacagcttcagcggggagacctgcccctacatccgggaccccctgaatggccaggccgtgcctgccaacggcacctatgaatttggctaccagatgcacttcatctgcaatgaaggctactacctgattggagaggagatcctgtactgtgagctgaagggctctgtggccatctggagcggcaagccacccatctgtgagaaggtgctgtgcaccccaccacccaagatcaagaatggcaagcacaccttcagcgaggtggaggtgtttgagtacctggatgctgtgacctacagctgtgaccctgcccctggccctgaccccttcagcctcatcggggagagcaccatctactgtggggacaacagcgtgtggagccgggccgcccctgagtgcaaggtggtgaagtgccgcttccctgtggtggagaatggcaagcagatcagcggctttgggaagaagttctactacaaggccaccgtgatgtttgaatgtgacaagggcttctacctggatggcagtgacaccatcgtgtgtgacagcaacagcacctgggacccccctgtgcccaagtgcctgaaggtgctgccccccagcagcaccaagcccccagccctgagccacagcgtgtccaccagcagcaccaccaagagccctgccagcagcgccagcggcccccggcccacctacaagccccctgtgagcaactacccaggctaccccaagccagaggagggcatcctggacagcctggatgtgtgggtgattgctgtgattgtgattgccatcgtggtgggcgtggccgtcatctgtgtggtgccctaccgctacctgcagaggaggaagaagaagggcaaggcagatggcggcgcagaatatgccacctaccagaccaagagcaccaccccagctgagcagaggggctag

SEQ ID NO: 146770 - DNA, 1095 bp, synthetic construct
  misc_feature 1..1095: note = Description of Artificial Sequence: Synthetic coding sequence
  source 1..1095: mol_type = other DNA
atggagcccccaggccggcgggagtgccccttccccagctggaggtttcctggcctgctgctggccgccatggtgctgctgctgtacagcttcagtgatgcctgtgaggagccccccacctttgaggccatggagctgattggcaagcccaagccctactatgagatcggggagcgggtggactacaagtgcaagaagggctacttctacatcccccccctggccacccacaccatctgtgacaggaaccacacctggctgcctgtgtctgatgatgcctgctaccgggagacctgcccctacatccgggaccccctgaatggccaggccgtgcctgccaacggcacctatgaatttggctaccagatgcacttcatctgcaatgaaggctactacctgattggagaggagatcctgtactgtgagctgaagggctctgtggccatctggagcggcaagccacccatctgtgagaaggtgctgtgcaccccaccacccaagatcaagaatggcaagcacaccttcagcgaggtggaggtgtttgagtacctggatgctgtgacctacagctgtgaccctgcccctggccctgaccccttcagcctgattggagagagcaccatctactgtggggacaacagcgtgtggagcagagctgcccctgagtgcaaggtggtgaagtgccgcttccctgtggtggagaatggcaagcagatcagcggctttgggaagaagttctactacaaggccaccgtgatgtttgaatgtgacaagggcttctacctggatggcagtgacaccatcgtgtgtgacagcaacagcacctgggacccccctgtgcccaagtgcctgaaggtgtccaccagcagcaccaccaagagccctgccagcagcgccagcggcccccggcccacctacaagccccctgtgagcaactacccaggctaccccaagccagaggagggcatcctggacagcctggatgtgtgggtgattgctgtgattgtgattgccatcggcaagcagatggtggagctgaacatgcccctgacccggctgaaccagcccctgcagcagagccgggaggccgagtag

SEQ ID NO: 146771 - DNA, 1113 bp, synthetic construct
  misc_feature 1..1113: note = Description of Artificial Sequence: Synthetic coding sequence
  source 1..1113: mol_type = other DNA
atggagcccccaggccggcgggagtgccccttccccagctggaggtttcctggcctgctgctggccgccatggtgctgctgctgtacagcttcagtgatgcctgtgaggagccccccacctttgaggccatggagctgattggcaagcccaagccctactatgagatcggggagcgggtggactacaagtgcaagaagggctacttctacatcccccccctggccacccacaccatctgtgacaggaaccacacctggctgcctgtgtctgatgatgcctgctaccgggagacctgcccctacatccgggaccccctgaatggccaggccgtgcctgccaacggcacctatgaatttggctaccagatgcacttcatctgcaatgaaggctactacctgattggagaggagatcctgtactgtgagctgaagggctctgtggccatctggagcggcaagccacccatctgtgagaaggtgctgtgcaccccaccacccaagatcaagaatggcaagcacaccttcagcgaggtggaggtgtttgagtacctggatgctgtgacctacagctgtgaccctgcccctggccctgaccccttcagcctgattggagagagcaccatctactgtggggacaacagcgtgtggagcagagctgcccctgagtgcaaggtggtgaagtgccgcttccctgtggtggagaatggcaagcagatcagcggctttgggaagaagttctactacaaggccaccgtgatgtttgaatgtgacaagggcttctacctggatggcagtgacaccatcgtgtgtgacagcaacagcacctgggacccccctgtgcccaagtgcctgaaggtgtccaccagcagcaccaccaagagccctgccagcagcgccagcggctaccccaagccagaggagggcatcctggacagcctggatgtgtgggtgattgctgtgattgtgattgccatcgtggtgggcgtggccgtcatctgtgtggtgccctaccgctacctgcagaggaggaagaagaagggcaaggcagatggcggcgcagaatatgccacctaccagaccaagagcaccaccccagctgagcagaggggctag

SEQ ID NO: 146772 - DNA, 510 bp, synthetic construct
  misc_feature 1..510: note = Description of Artificial Sequence: Synthetic coding sequence
  source 1..510: mol_type = other DNA
atgtgcagccggggctgggacagctgcctggccctggagctgctgctgctgcccctgagcctgctggtgaccagcatccagggccacctggtgcacatgacagtggtgtctggcagcaatgtgaccctgaacatcagcgagagcctgcctgagaactacaagcagctgacctggttctacacctttgaccagaagatcgtggagtgggacagcaggaagagcaagtactttgagagcaagttcaagggccgggtgcggctggacccccagagcggggccctgtacatcagcaaggtgcagaaggaggacaacagcacctacatcatgagggtgctgaagaagacaggaaatgagcaggagtggaagatcaagctgcaggtgctgggggagagcggggagcccaagagcaagagccccctgcagtggccccagatggaccactgccgggcctcctgggaggcctggggcaccctgggggaggaggagaggaagaccagcggccaggtgtag

SEQ ID NO: 146773 - DNA, 732 bp, synthetic construct
  misc_feature 1..732: note = Description of Artificial Sequence: Synthetic coding sequence
  source 1..732: mol_type = other DNA
atgtgcagccggggctgggacagctgcctggccctggagctgctgctgctgcccctgagcctgctggtgaccagcatccagggccacctggtgcacatgacagtggtgtctggcagcaatgtgaccctgaacatcagcgagagcctgcctgagaactacaagcagctgacctggttctacacctttgaccagaagatcgtggagtgggacagcaggaagagcaagtactttgagagcaagttcaagggccgggtgcggctggacccccagagcggggccctgtacatcagcaaggtgcagaaggaggacaacagcacctacatcatgagggtgctgaagaagacaggaaatgagcaggagtggaagatcaagctgcaggtgctggaccctgtgcccaagcctgtgatcaagattgagaagattgaggacatggatgacaactgctacctgaagctgagctgtgtgattcctggagagagcgtgaactacacctggtacggggacaagaggcccttccccaaggagctgcagaacagcgtgctggagaccaccctgatgccccacaactacagccgctgctacacctgccaggtgagcaacagcgtgagcagcaagaatggcaccgtgtgcctgagccccccctgcaccctggcccggagctttggagtggagtggatcgcctcctggctggtggtgacagtgcccaccatcctgggcctgctgctgacctag

SEQ ID NO: 146774 - DNA, 1044 bp, synthetic construct
  misc_feature 1..1044: note = Description of Artificial Sequence: Synthetic coding sequence
  source 1..1044: mol_type = other DNA
atggccctgctcttcagcctcatcctggccatctgcaccaggcctggcttcctggccagccccagcggcgtgcggctggtgggcggcctgcaccgctgtgagggccgggtggaggtggagcagaagggccagtggggcaccgtgtgtgatgatggctgggacatcaaggatgtggccgtgctgtgccgggagctgggctgtggggccgccagcggcaccccatctggcatcctgtatgagcccccagctgagaaggagcagaaggtgctgatccagagcgtgtcctgcacaggaacagaggacaccctggcccagtgtgagcaggaggaggtgtatgactgcagccatgatgaagatgctggggccagctgtgaaaatcctgagagcagcttcagccctgtgcctgagggcgtgcggctggctgatggccctggccactgcaagggccgggtggaggtgaagcaccagaaccagtggtacacagtgtgccagacaggctggagcctgcgggccgccaaggtggtgtgccggcagctgggctgcggccgggctgtgctgacccagaagcgctgcaacaagcacgcctacggcaggaagcccatctggctgagccagatgagctgcagcggccgggaggccaccctgcaggactgccccagcggcccctggggcaagaacacctgcaaccatgatgaggacacctgggtggagtgtgaggacccctttgacctgcggctggtgggcggggacaacctgtgcagcggccgcctggaggtgctgcacaagggcgtgtggggctctgtgtgtgatgacaactggggcgagaaggaggaccaggtggtgtgcaagcagctgggctgcggcaagagcctgagccccagcttccgggacagaaaatgttatggccctggggtgggccgcatctggctggacaacgtgcgctgcagcggggaggagcagagcctggagcagtgccagcaccgcttctggggcttccatgactgcacccaccaggaggatgtggccgtcatctgcagcggctag

SEQ ID NO: 146775 - DNA, 660 bp, synthetic construct
  misc_feature 1..660: note = Description of Artificial Sequence: Synthetic coding sequence
  source 1..660: mol_type = other DNA
atgggcatgagcagcctgaagctgctgaagtatgtgctcttcttcttcaacctgctcttctggatctgtggctgctgcatcctgggcttcggcatctacctgctgatccacaacaactttggagtgctcttccacaacctgcccagcctgaccctgggcaatgtgtttgtgattgtgggcagcatcatcatggtggtggccttcctgggctgcatgggcagcatcaaggagaacaagtgcctgctgatgtccttcttcatcctgctgctgatcatcctgctggccgaggtgaccctggccatcctgctgtttgtgtatgagcagaagctgaatgaatatgtggccaagggcctgacagacagcatccaccgctaccacagcgacaacagcaccaaggccgcctgggacagcatccagagcttcctgcagtgctgcggcatcaatggcaccagtgactggaccagcggccccccagccagctgccccagcgacaggaaggtggagggctgctacgccaaggcccggctgtggttccacagcaacttcctgtacatcggcatcatcaccatctgtgtgtgtgtgattgaggtgctgggcatgagctttgccctgaccctgaactgccagattgacaagaccagccagaccatcggcctgtag

SEQ ID NO: 146776 - DNA, 483 bp, synthetic construct
  misc_feature 1..483: note = Description of Artificial Sequence: Synthetic coding sequence
  source 1..483: mol_type = other DNA
atgggcatgagcagcctgaagctgctgaagtatgtgctcttcttcttcaacctgctcttctggatctgtggctgctgcatcctgggcttcggcatctacctgctgatccacaacaactttggagtgctcttccacaacctgcccagcctgaccctgggcaatgtgtttgtgattgtgggcagcatcatcatggtggtggccttcctgggctgcatgggcagcatcaaggagaacaagtgcctgctgatgtccttcttcatcctgctgctgatcatcctgctggccgaggtgaccctggccatcctgctgtttgtgtatgagcagaagggctgctacgccaaggcccggctgtggttccacagcaacttcctgtacatcggcatcatcaccatctgtgtgtgtgtgattgaggtgctgggcatgagctttgccctgaccctgaactgccagattgacaagaccagccagaccatcggcctgtag

SEQ ID NO: 146777 - DNA, 1323 bp, synthetic construct
  misc_feature 1..1323: note = Description of Artificial Sequence: Synthetic coding sequence
  source 1..1323: mol_type = other DNA
atgacagtggcccggcccagcgtgcctgctgccctgcccctgctgggggagctgccccggctgctgctgctggtgctgctgtgcctgcctgctgtgtggggagactgtggcctgcccccagatgtgcccaatgcccagcctgccctggagggccgcaccagcttcccagaagatactgtcatcacctacaagtgtgaggagagctttgtgaagatccctggagagaaggacagcgtcatctgcctgaagggcagccagtggagcgacatcgaggagttctgcaacagaagctgtgaggtgcccacccggctgaacagcgccagcctgaagcagccctacatcacccagaactacttccctgtgggcaccgtggtggagtatgagtgcaggcctggctaccgccgggagcccagcctgagccccaagctgacctgcctgcagaacctgaagtggagcacagctgtggagttctgcaagaagaagagctgccccaaccctggagagatcagaaatggccagattgatgtgcctgggggcatcctgtttggagccaccatctccttcagctgcaacacaggctacaagctgtttggcagcaccagcagcttctgcctgatcagcggcagctctgtgcagtggagcgaccccctgcctgaatgtcgggagatctactgcccagccccaccccagattgacaatggcatcatccagggcgagcgggaccactacggctaccggcagagcgtgacctacgcctgcaacaagggcttcaccatgattggagagcacagcatctactgcaccgtgaacaatgatgaaggagagtggagcggccccccacctgagtgccggggcaagagcctgaccagcaaggtgcccccaacagtgcagaagcccaccaccgtgaatgtgcccaccacagaggtgagccccaccagccagaagaccaccaccaagaccaccaccccaaatgcccaggccaccaggagcacccctgtgtccaggaccaccaagcacttccacgagaccacccccaacaagggcagcggcaccaccagcggcaccacccggctgctgagcggcagcaggcctgtgacccaggccggcatgcgctggtgtgacaggagcagcctgcagagcaggaccccaggcttcaagaggagcttccacttcagcctgcccagctcctggtactaccgggcccacgtgttccacgtggacagatttgcctgggatgccagcaaccacggcctggccgacctggccaaggaggagctgcggaggaagtacacccaggtgtaccgcctcttcctggtgtcctag

SEQ ID NO: 146778 - DNA, 1095 bp, synthetic construct
  misc_feature 1..1095: note = Description of Artificial Sequence: Synthetic coding sequence
  source 1..1095: mol_type = other DNA
atgacagtggcccggcccagcgtgcctgctgccctgcccctgctgggggagctgccccggctgctgctgctggtgctgctgtgcctgcctgctgtgtggggagactgtggcctgcccccagatgtgcccaatgcccagcctgccctggagggccgcaccagcttcccagaagatactgtcatcacctacaagtgtgaggagagctttgtgaagatccctggagagaaggacagcgtcatctgcctgaagggcagccagtggagcgacatcgaggagttctgcaacagaagctgtgaggtgcccacccggctgaacagcgccagcctgaagcagccctacatcacccagaactacttccctgtgggcaccgtggtggagtatgagtgcaggcctggctaccgccgggagcccagcctgagccccaagctgacctgcctgcagaacctgaagtggagcacagctgtggagttctgcaagaagaagagctgccccaaccctggagagatcagaaatggccagattgatgtgcctgggggcatcctgtttggagccaccatctccttcagctgcaacacaggctacaagctgtttggcagcaccagcagcttctgcctgatcagcggcagctctgtgcagtggagcgaccccctgcctgaatgtcgggagatctactgcccagccccaccccagattgacaatggcatcatccagggcgagcgggaccactacggctaccggcagagcgtgacctacgcctgcaacaagggcttcaccatgattggagagcacagcatctactgcaccgtgaacaatgatgaaggagagtggagcggccccccacctgagtgccggggcaagagcctgaccagcaaggtgcccccaacagtgcagaagcccaccaccgtgaatgtgcccaccacagaggtgagccccaccagccagaagaccaccaccaagaccaccaccccaaatgcccaggccaccaggagcacccctgtgtccaggaccaccaagcacttccacgagaccacccccaacaagggcagcggcaccaccagcggcaccacccggctgctgtctgtgctcttcatgtag

SEQ ID NO: 146779 - DNA, 1146 bp, synthetic construct
  misc_feature 1..1146: note = Description of Artificial Sequence: Synthetic coding sequence
  source 1..1146: mol_type = other DNA
atgacagtggcccggcccagcgtgcctgctgccctgcccctgctgggggagctgccccggctgctgctgctggtgctgctgtgcctgcctgctgtgtggggagactgtggcctgcccccagatgtgcccaatgcccagcctgccctggagggccgcaccagcttcccagaagatactgtcatcacctacaagtgtgaggagagctttgtgaagatccctggagagaaggacagcgtcatctgcctgaagggcagccagtggagcgacatcgaggagttctgcaacagaagctgtgaggtgcccacccggctgaacagcgccagcctgaagcagccctacatcacccagaactacttccctgtgggcaccgtggtggagtatgagtgcaggcctggctaccgccgggagcccagcctgagccccaagctgacctgcctgcagaacctgaagtggagcacagctgtggagttctgcaagaagaagagctgccccaaccctggagagatcagaaatggccagattgatgtgcctgggggcatcctgtttggagccaccatctccttcagctgcaacacaggctacaagctgtttggcagcaccagcagcttctgcctgatcagcggcagctctgtgcagtggagcgaccccctgcctgaatgtcgggagatctactgcccagccccaccccagattgacaatggcatcatccagggcgagcgggaccactacggctaccggcagagcgtgacctacgcctgcaacaagggcttcaccatgattggagagcacagcatctactgcaccgtgaacaatgatgaaggagagtggagcggccccccacctgagtgccggggcaagagcctgaccagcaaggtgcccccaacagtgcagaagcccaccaccgtgaatgtgcccaccacagaggtgagccccaccagccagaagaccaccaccaagaccaccaccccaaatgcccaggccaccaggagcacccctgtgtccaggaccaccaagcacttccacgagaccacccccaacaagggcagcggcaccaccagcggcaccacccggctgctgagcggccacacctgcttcaccctgaccggcctgctgggcaccctggtgaccatgggcctgctgacctag

SEQ ID NO: 146780 - DNA, 1320 bp, synthetic construct
  misc_feature 1..1320: note = Description of Artificial Sequence: Synthetic coding sequence
  source 1..1320: mol_type = other DNA
atgacagtggcccggcccagcgtgcctgctgccctgcccctgctgggggagctgccccggctgctgctgctggtgctgctgtgcctgcctgctgtgtggggagactgtggcctgcccccagatgtgcccaatgcccagcctgccctggagggccgcaccagcttcccagaagatactgtcatcacctacaagtgtgaggagagctttgtgaagatccctggagagaaggacagcgtcatctgcctgaagggcagccagtggagcgacatcgaggagttctgcaacagaagctgtgaggtgcccacccggctgaacagcgccagcctgaagcagccctacatcacccagaactacttccctgtgggcaccgtggtggagtatgagtgcaggcctggctaccgccgggagcccagcctgagccccaagctgacctgcctgcagaacctgaagtggagcacagctgtggagttctgcaagaagaagagctgccccaaccctggagagatcagaaatggccagattgatgtgcctgggggcatcctgtttggagccaccatctccttcagctgcaacacaggctacaagctgtttggcagcaccagcagcttctgcctgatcagcggcagctctgtgcagtggagcgaccccctgcctgaatgtcgggagatctactgcccagccccaccccagattgacaatggcatcatccagggcgagcgggaccactacggctaccggcagagcgtgacctacgcctgcaacaagggcttcaccatgattggagagcacagcatctactgcaccgtgaacaatgatgaaggagagtggagcggccccccacctgagtgccggggcaagagcctgaccagcaaggtgcccccaacagtgcagaagcccaccaccgtgaatgtgcccaccacagaggtgagccccaccagccagaagaccaccaccaagaccaccaccccaaatgcccaggccaccaggagcacccctgtgtccaggaccaccaagcacttccacgagaccacccccaacaagggcagcggcaccaccagcggcaccacccggctgctgtctgagaccgtcttccacagggtcatccaggacggcctggacctgctggccagccgcagcgcctgcctgggcctgcccaagtgctgggactacagaagagagcccccccacctggcccgggcccacgtgttccacgtggacagatttgcctgggatgccagcaaccacggcctggccgacctggccaaggaggagctgcggaggaagtacacccaggtgtaccgcctcttcctggtgtcctag

SEQ ID NO: 146781 - DNA, 390 bp, synthetic construct
  misc_feature 1..390: note = Description of Artificial Sequence: Synthetic coding sequence
  source 1..390: mol_type = other DNA
atgacagtggcccggcccagcgtgcctgctgccctgcccctgctgggggagctgccccggctgctgctgctggtgctgctgtgcctgcctgctgtgtggggagactgtggcctgcccccagatgtgcccaatgcccagcctgccctggagggccgcaccagcttcccagaagatactgtcatcacctacaagtgtgaggagagctttgtgaagatccctggagagaaggacagcgtcatctgcctgaagggcagccagtggagcgacatcgaggagttctgcaacagaagctgtgaggtgcccacccggctgcagaagaggaccttcagcatcaccaagaccaacctgcccagcgagttcaagatggtgcacagcagccgcatcctgtag

SEQ ID NO: 146782 - DNA, 1155 bp, synthetic construct
  misc_feature 1..1155: note = Description of Artificial Sequence: Synthetic coding sequence
  source 1..1155: mol_type = other DNA
atgacagtggcccggcccagcgtgcctgctgccctgcccctgctgggggagctgccccggctgctgctgctggtgctgctgtgcctgcctgctgtgtggggagactgtggcctgcccccagatgtgcccaatgcccagcctgccctggagggccgcaccagcttcccagaagatactgtcatcacctacaagtgtgaggagagctttgtgaagatccctggagagaaggacagcgtcatctgcctgaagggcagccagtggagcgacatcgaggagttctgcaacagaagctgtgaggtgcccacccggctgaacagcgccagcctgaagcagccctacatcacccagaactacttccctgtgggcaccgtggtggagtatgagtgcaggcctggctaccgccgggagcccagcctgagccccaagctgacctgcctgcagaacctgaagtggagcacagctgtggagttctgcaagaagaagagctgccccaaccctggagagatcagaaatggccagattgatgtgcctgggggcatcctgtttggagccaccatctccttcagctgcaacacaggctacaagctgtttggcagcaccagcagcttctgcctgatcagcggcagctctgtgcagtggagcgaccccctgcctgaatgtcgggagatctactgcccagccccaccccagattgacaatggcatcatccagggcgagcgggaccactacggctaccggcagagcgtgacctacgcctgcaacaagggcttcaccatgattggagagcacagcatctactgcaccgtgaacaatgatgaaggagagtggagcggccccccacctgagtgccggggcaagagcctgaccagcaaggtgcccccaacagtgcagaagcccaccaccgtgaatgtgcccaccacagaggtgagccccaccagccagaagaccaccaccaagaccaccaccccaaatgcccaggccaccaggagcacccctgtgtccaggaccaccaagcacttccacgagaccacccccaacaagggcagcggcaccaccagcggcaccacccggctgctgagcgccctgcaggtgcggccctttgaggtgtctggcagcagccacatcagcagcaagaagatgatgtgcatcctgtag

SEQ ID NO: 146783 - DNA, 954 bp, synthetic construct
  misc_feature 1..954: note = Description of Artificial Sequence: Synthetic coding sequence
  source 1..954: mol_type = other DNA
atgacagtggcccggcccagcgtgcctgctgccctgcccctgctgggggagctgccccggctgctgctgctggtgctgctgtgcctgcctgctgtgtggggagactgtggcctgcccccagatgtgcccaatgcccagcctgccctggagggccgcaccagcttcccagaagatactgtcatcacctacaagtgtgaggagagctttgtgaagatccctggagagaaggacagcgtcatctgcctgaagggcagccagtggagcgacatcgaggagttctgcaaccagaagagctgccccaaccctggagagatcagaaatggccagattgatgtgcctgggggcatcctgtttggagccaccatctccttcagctgcaacacaggctacaagctgtttggcagcaccagcagcttctgcctgatcagcggcagctctgtgcagtggagcgaccccctgcctgaatgtcgggagatctactgcccagccccaccccagattgacaatggcatcatccagggcgagcgggaccactacggctaccggcagagcgtgacctacgcctgcaacaagggcttcaccatgattggagagcacagcatctactgcaccgtgaacaatgatgaaggagagtggagcggccccccacctgagtgccggggcaagagcctgaccagcaaggtgcccccaacagtgcagaagcccaccaccgtgaatgtgcccaccacagaggtgagccccaccagccagaagaccaccaccaagaccaccaccccaaatgcccaggccaccaggagcacccctgtgtccaggaccaccaagcacttccacgagaccacccccaacaagggcagcggcaccaccagcggccagctgaccctcttcagcggccacacctgcttcaccctgaccggcctgctgggcaccctggtgaccatgggcctgctgacctag

SEQ ID NO: 146784 - DNA, 753 bp, synthetic construct
  misc_feature 1..753: note = Description of Artificial Sequence: Synthetic coding sequence
  source 1..753: mol_type = other DNA
atggtggccggcagtgatgctggccgggccctgggcgtgctgtctgtggtgtgcctgctgcactgcttcggcttcatcagctgcttcagccagcagatctacggcgtggtgtatggaaatgtgaccttccacgtgcccagcaatgtgcccctgaaggaggtgctgtggaagaagcagaaggacaaggtggccgagctggagaacagcgagttccgggccttcagcagcttcaagaacagagtgtacctggacacagtgtctggcagcctgaccatctacaacctgaccagcagtgatgaagatgaatatgagatggagagccccaacatcacagacaccatgaagttcttcctgtatgtgctggagagcctgcccagccccaccctgacctgtgccctgaccaacggcagcattgaggtgcagtgcatgatccctgagcactacaacagccaccggggcctcatcatgtacagctgggactgccccatggagcagtgcaagaggaacagcaccagcatctacttcaagatggagaatgacctgccccagaagatccagtgcaccctgagcaaccccctcttcaacaccaccagcagcatcatcctgaccacctgcatccccagcagcggccacagccgccacagatatgccctgatccccatccccctggccgtcatcaccacctgcatcgtgctgtacatgaatggcatcctgaagtgtgacaggaagccagacaggaccaacagcaactag

SEQ ID NO: 146785 - DNA, 747 bp, synthetic construct
  misc_feature 1..747: note = Description of Artificial Sequence: Synthetic coding sequence
  source 1..747: mol_type = other DNA
atggtggccggcagtgatgctggccgggccctgggcgtgctgtctgtggtgtgcctgctgcactgcttcggcttcatcagctgcttcagccagcagatctacggcgtggtgtatggaaatgtgaccttccacgtgcccagcaatgtgcccctgaaggaggtgctgtggaagaagcagaaggacaaggtggccgagctggagaacagcgagttccgggccttcagcagcttcaagaacagagtgtacctggacacagtgtctggcagcctgaccatctacaacctgaccagcagtgatgaagatgaatatgagatggagagccccaacatcacagacaccatgaagttcttcctgtatgtgctggagagcctgcccagccccaccctgacctgtgccctgaccaacggcagcattgaggtgcagtgcatgatccctgagcactacaacagccaccggggcctcatcatgtacagctgggactgccccatggagcagtgcaagaggaacagcaccagcatctacttcaagatggagaatgacctgccccagaagatccagtgcaccctgagcaaccccctcttcaacaccaccagcagcatcatcctgaccacctgcatccccagcagcggccacagccgccacagatatgccctgatccccatccccctggccgtcatcaccacctgcatcgtgctgtacatgaatggcatcctgaagtgtgacaggaagccagacaggaccaagtag

SEQ ID NO: 146786 - DNA, 387 bp, synthetic construct
  misc_feature 1..387: note = Description of Artificial Sequence: Synthetic coding sequence
  source 1..387: mol_type = other DNA
atgggcatccagggcggctctgtgctgtttggcctgctgctggtgctggccgtgttctgccacagcggccacagcctgcagtgctacaactgccccaaccccacagctgactgcaagacagctgtgaactgcagcagtgactttgatgcctgcctgatcaccaaggccggcctgcaggtgtacaacaagtgctggaagtttgagcactgcaacttcaatgatgtgaccacccggctgagagaaaatgagctgacctactactgctgcaagaaggacctgtgcaacttcaatgagcagctggagaatggaggcaccagcctgtctgagaagacagtgctgctgctggtgacccccttcctggccgccgcctggagcctgcacccctag

SEQ ID NO: 146787 - DNA, 387 bp, synthetic construct; identical to SEQ ID NO: 146786
  misc_feature 1..387: note = Description of Artificial Sequence: Synthetic coding sequence
  source 1..387: mol_type = other DNA

SEQ ID NO: 146788 - DNA, 387 bp, synthetic construct; identical to SEQ ID NO: 146786
  misc_feature 1..387: note = Description of Artificial Sequence: Synthetic coding sequence
  source 1..387: mol_type = other DNA

SEQ ID NO: 146789 - DNA, 387 bp, synthetic construct; identical to SEQ ID NO: 146786
  misc_feature 1..387: note = Description of Artificial Sequence: Synthetic coding sequence
  source 1..387: mol_type = other DNA

SEQ ID NO: 146790 - DNA, 387 bp, synthetic construct; identical to SEQ ID NO: 146786
  misc_feature 1..387: note = Description of Artificial Sequence: Synthetic coding sequence
  source 1..387: mol_type = other DNA

SEQ ID NO: 146791 - DNA, 387 bp, synthetic construct; identical to SEQ ID NO: 146786
  misc_feature 1..387: note = Description of Artificial Sequence: Synthetic coding sequence
  source 1..387: mol_type = other DNA

SEQ ID NO: 146792 - DNA, 387 bp, synthetic construct; identical to SEQ ID NO: 146786
  misc_feature 1..387: note = Description of Artificial Sequence: Synthetic coding sequence
  source 1..387: mol_type = other DNA

SEQ ID NO: 146793 - DNA, 387 bp, synthetic construct; identical to SEQ ID NO: 146786
  misc_feature 1..387: note = Description of Artificial Sequence: Synthetic coding sequence
  source 1..387: mol_type = other DNA

SEQ ID NO: 146794 - DNA, 387 bp, synthetic construct; identical to SEQ ID NO: 146786
  misc_feature 1..387: note = Description of Artificial Sequence: Synthetic coding sequence
  source 1..387: mol_type = other DNA

SEQ ID NO: 146795 - DNA, 2007 bp, synthetic construct
  misc_feature 1..2007: note = Description of Artificial Sequence: Synthetic coding sequence
  source 1..2007: mol_type = other DNA
atgtggctgttcttcggcatcaccggcctgctgacagctgccctgagcggccaccccagccctgcccccccagaccagctgaacaccagcagcgctgagagcgagctgtgggagcctggagagcggctgcctgtgcggctgaccaacggcagcagcagctgcagcggcaccgtggaggtgcggctggaggcctcctgggagcccgcctgtggggccctgtgggacagcagagctgctgaggccgtgtgccgggccctgggctgcggcggcgctgaggccgccagccagctggccccacccaccccagagctgcccccacctcctgctgctggcaacacctctgtggccgccaatgccaccctggccggggccccagccctgctgtgcagcggggctgagtggaggctgtgtgaggtggtggagcacgcctgccgcagtgatggaagaagagcccgggtgacctgtgctgaaaatagagccctgcggctggtggatggcggcggggcctgtgccggccgggtggagatgctggagcacggggagtggggctctgtgtgtgatgacacctgggacctggaggatgcccacgtggtgtgccggcagctgggctgcggctgggccgtgcaggccctgcccggcctgcacttcaccccaggccggggccccatccaccgggaccaggtgaactgcagcggggctgaggcctacctgtgggactgccccggcctgcccggccagcactactgcggccacaaggaggatgctggagctgtgtgcagcgagcaccagagctggaggctgaccggcggcgctgacagatgtgagggccaggtggaggtgcacttccggggcgtgtggaacacagtgtgtgacagcgagtggtaccccagcgaggccaaggtgctgtgccagagcctgggctgcggcacagctgtggagcggcccaagggcctgccccacagcctgagcggccgcatgtactacagctgcaatggagaggagctgaccctgagcaactgctcctggaggttcaacaacagcaacctgtgcagccagagcctggccgcccgggtgctgtgcagcgccagccgcagcctgcacaacctgagcaccccagaggtgcctgcctctgtgcagacagtgaccatcgagagctctgtgacagtgaagattgagaacaaggagagccgggagctgatgctgctgatccccagcatcgtgctgggcatcctgctgctgggcagcctcatcttcatcgccttcatcctgctgcgcatcaagggcaagtatgccctgcctgtgatggtgaaccaccagcacctgcccaccaccatcccagctggcagcaacagctaccagcctgtgcccatcaccatccccaaggaggtgttcatgctgcccatccaggtgcaggcccctcctcctgaggacagcgacagcggcagtgacagcgactatgagcactatgacttcagcgcccagccccctgtggccctgaccaccttctacaacagccagaggcaccgggtgacagatgaggaggtgcagcagagccgcttccagatgccacccctggaggagggcctggaggagctgcacgccagccacatccccacagccaaccctggccactgcatcacagatcctcccagcctgggcccccagtaccaccccaggagcaacagcgagagcagcaccagcagcggggaggactactgcaacagccccaagagcaagctgcccccctggaacccccaggtgttcagcagcgagaggagcagcttcctggagcagccccccaacctggagctggccggcacccagcctgccttctctgctggccccccagcagatgacagcagcagcaccagcagtggagagtggtaccagaacttccagcccccaccccagccccccagcgaggagcagtttggctgccccggcagccccagcccccagcctgacagcacagacaatgatgattatgatgacatctctgctgcctag

SEQ ID NO: 146796 - DNA, 1911 bp, synthetic construct
  misc_feature 1..1911: note = Description of Artificial Sequence: Synthetic coding sequence
  source 1..1911: mol_type = other DNA
atgtggctgttcttcggcatcaccggcctgctgacagctgccctgagcggccaccccagccctgcccccccagaccagctgaacaccagcagcgctgagagcgagctgtgggagcctggagagcggctgcctgtgcggctgaccaacggcagcagcagctgcagcggcaccgtggaggtgcggctggaggcctcctgggagcccgcctgtggggccctgtgggacagcagagctgctgaggccgtgtgccgggccctgggctgcggcggcgctgaggccgccagccagctggccccacccaccccagagctgcccccacctcctgctgctggcaacacctctgtggccgccaatgccaccctggccggggccccagccctgctgtgcagcggggctgagtggaggctgtgtgaggtggtggagcacgcctgccgcagtgatggaagaagagcccgggtgacctgtgctgaaaatagagccctgcggctggtggatggcggcggggcctgtgccggccgggtggagatgctggagcacggggagtggggctctgtgtgtgatgacacctgggacctggaggatgcccacgtggtgtgccggcagctgggctgcggctgggccgtgcaggccctgcccggcctgcacttcaccccaggccggggccccatccaccgggaccaggtgaactgcagcggggctgaggcctacctgtgggactgccccggcctgcccggccagcactactgcggccacaaggaggatgctggagctgtgtgcagcgagcaccagagctggaggctgaccggcggcgctgacagatgtgagggccaggtggaggtgcacttccggggcgtgtggaacacagtgtgtgacagcgagtggtaccccagcgaggccaaggtgctgtgccagagcctgggctgcggcacagctgtggagcggcccaagggcctgccccacagcctgagcggccgcatgtactacagctgcaatggagaggagctgaccctgagcaactgctcctggaggttcaacaacagcaacctgtgcagccagagcctggccgcccgggtgctgtgcagcgccagccgcagcctgcacaacctgagcaccccagaggtgcctgcctctgtgcagacagtgaccatcgagagctctgtgacagtgaagattgagaacaaggagagccgggagctgatgctgctgatccccagcatcgtgctgggcatcctgctgctgggcagcctcatcttcatcgccttcatcctgctgcgcatcaagggcaagtatgtgttcatgctgcccatccaggtgcaggcccctcctcctgaggacagcgacagcggcagtgacagcgactatgagcactatgacttcagcgcccagccccctgtggccctgaccaccttctacaacagccagaggcaccgggtgacagatgaggaggtgcagcagagccgcttccagatgccacccctggaggagggcctggaggagctgcacgccagccacatccccacagccaaccctggccactgcatcacagatcctcccagcctgggcccccagtaccaccccaggagcaacagcgagagcagcaccagcagcggggaggactactgcaacagccccaagagcaagctgcccccctggaacccccaggtgttcagcagcgagaggagcagcttcctggagcagccccccaacctggagctggccggcacccagcctgccttctctgctggccccccagcagatgacagcagcagcaccagcagtggagagtggtaccagaacttccagcccccaccccagccccccagcgaggagcagtttggctgccccggcagccccagcccccagcctgacagcacagacaatgatgattatgatgacatctctgctgcctag

SEQ ID NO: 146797 - DNA, 1788 bp, synthetic construct
  misc_feature 1..1788: note = Description of Artificial Sequence: Synthetic coding sequence
  source 1..1788: mol_type = other DNA
atgtggctgttcttcggcatcaccggcctgctgacagctgccctgagcggccaccccagccctgcccccccagaccagctgaacaccagcagcgctgagagcgagctgtgggagcctggagagcggctgcctgtgcggctgaccaacggcagcagcagctgcagcggcaccgtggaggtgcggctggaggcctcctgggagcccgcctgtggggccctgtgggacagcagagctgctgaggccgtgtgccgggccctgggctgcggcggcgctgaggccgccagccagctggccccacccaccccagagctgcccccacctcctgctgctggcaacacctctgtggccgccaatgccaccctggccggggccccagccctgctgtgcagcggggctgagtggaggctgtgtgaggtggtggagcacgcctgccgcagtgatggaagaagagcccgggtgacctgtgctgaaaatagagccctgcggctggtggatggcggcggggcctgtgccggccgggtggagatgctggagcacggggagtggggctctgtgtgtgatgacacctgggacctggaggatgcccacgtggtgtgccggcagctgggctgcggctgggccgtgcaggccctgcccggcctgcacttcaccccaggccggggccccatccaccgggaccaggtgaactgcagcggggctgaggcctacctgtgggactgccccggcctgcccggccagcactactgcggccacaaggaggatgctggagctgtgtgcagcgagcaccagagctggaggctgaccggcggcgctgacagatgtgagggccaggtggaggtgcacttccggggcgtgtggaacacagtgtgtgacagcgagtggtaccccagcgaggccaaggtgctgtgccagagcctgggctgcggcacagctgtggagcggcccaagggcctgccccacagcctgagcggccgcatgtactacagctgcaatggagaggagctgaccctgagcaactgctcctggaggttcaacaacagcaacctgtgcagccagagcctggccgcccgggtgctgtgcagcgccagccgcagcctgcacaacctgagcaccccagaggtgcctgcctctgtgcagacagtgaccatcgagagctctgtgacagtgaagattgagaacaaggagagccgggagctgatgctgctgatccccagcatcgtgctgggcatcctgctgctgggcagcctcatcttcatcgccttcatcctgctgcgcatcaagggcaagtatgacagccagaggcaccgggtgacagatgaggaggtgcagcagagccgcttccagatgccacccctggaggagggcctggaggagctgcacgccagccacatccccacagccaaccctggccactgcatcacagacccccccagcctgggcccccagtaccaccccaggagcaacagcgagagcagcaccagcagtggagaggactactgcaacagccccaagagcaagctgcccccctggaacccccaggtgttcagcagcgagaggagcagcttcctggagcagccccccaacctggagctggccggcacccagcctgccttctctgctggccccccagcagatgacagcagcagcaccagcagcggggagtggtaccagaacttccagcccccaccccagcccccatctgaggagcagtttggctgccccggcagccccagcccccagcctgacagcacagacaatgatgattatgatgacatctctgctgcctag

SEQ ID NO: 146798 - DNA, 1806 bp, synthetic construct
  misc_feature 1..1806: note = Description of Artificial Sequence: Synthetic coding sequence
  source 1..1806: mol_type = other DNA
atgtggctgttcttcggcatcaccggcctgctgacagctgccctgagcggccaccccagccctgcccccccagaccagctgaacaccagcagcgctgagagcgagctgtgggagcctggagagcggctgcctgtgcggctgaccaacggcagcagcagctgcagcggcaccgtggaggtgcggctggaggcctcctgggagcccgcctgtggggccctgtgggacagcagagctgctgaggccgtgtgccgggccctgggctgcggcggcgctgaggccgccagccagctggccccacccaccccagagctgcccccacctcctgctgctggcaacacctctgtggccgccaatgccaccctggccggggccccagccctgctgtgcagcggggctgagtggaggctgtgtgaggtggtggagcacgcctgccgcagtgatggaagaagagcccgggtgacctgtgctgaaaatagagccctgcggctggtggatggcggcggggcctgtgccggccgggtggagatgctggagcacggggagtggggctctgtgtgtgatgacacctgggacctggaggatgcccacgtggtgtgccggcagctgggctgcggctgggccgtgcaggccctgcccggcctgcacttcaccccaggccggggccccatccaccgggaccaggtgaactgcagcggggctgaggcctacctgtgggactgccccggcctgcccggccagcactactgcggccacaaggaggatgctggagctgtgtgcagcgagcaccagagctggaggctgaccggcggcgctgacagatgtgagggccaggtggaggtgcacttccggggcgtgtggaacacagtgtgtgacagcgagtggtaccccagcgaggccaaggtgctgtgccagagcctgggctgcggcacagctgtggagcggcccaagggcctgccccacagcctgagcggccgcatgtactacagctgcaatggagaggagctgaccctgagcaactgctcctggaggttcaacaacagcaacctgtgcagccagagcctggccgcccgggtgctgtgcagcgccagccgcagcctgcacaacctgagcaccccagaggtgcctgcctctgtgcagacagtgaccatcgagagctctgtgacagtgaagattgagaacaaggagagccgggagctgatgctgctgatccccagcatcgtgctgggcatcctgctgctgggcagcctcatcttcatcgccttcatcctgctgcgcatcaagggcaagtatgtgttcatgctgcccatccaggtgcaggcccctcctcctgaggacagcgacagcggcagtgacagcgactatgagcactatgacttcagcgcccagccccctgtggccctgaccaccttctacaacagccagaggcaccgggtgacagatgaggaggtgcagcagagccgcttccagatgccacccctggaggagggcctggaggagctgcacgccagccacatccccacagccaaccctggccactgcatcacagatcctcccagcctgggcccccagtaccaccccaggagcaacagcgagagcagcaccagcagcggggaggactactgcaacagccccaagagcaagctgcccccctggaacccccaggtgttcagcagcgagaggagcagcttcctggagcagccccccaacctggagctggccggcacccagcctgccttcagcggcagccccagcccccagcctgacagcacagacaatgatgattatgatgacatctctgctgcctag

SEQ ID NO: 146799 - DNA, 1779 bp, synthetic construct
  misc_feature 1..1779: note = Description of Artificial Sequence: Synthetic coding sequence
  source 1..1779: mol_type = other DNA
atgtggctgttcttcggcatcaccggcctgctgacagctgccctgagcggccaccccagccctgcccccccagaccagctgaacaccagcagcgctgagagcgagctgtgggagcctggagagcggctgcctgtgcggctgaccaacggcagcagcagctgcagcggcaccgtggaggtgcggctggaggcctcctgggagcccgcctgtggggccctgtgggacagcagagctgctgaggccgtgtgccgggccctgggctgcggcggcgctgaggccgccagccagctggccccacccaccccagagctgcccccacctcctgctgctggcaacacctctgtggccgccaatgccaccctggccggggccccagccctgctgtgcagcggggctgagtggaggctgtgtgaggtggtggagcacgcctgccgcagtgatggaagaagagcccgggtgacctgtgctgaaaatagagccctgcggctggtggatggcggcggggcctgtgccggccgggtggagatgctggagcacggggagtggggctctgtgtgtgatgacacctgggacctggaggatgcccacgtggtgtgccggcagctgggctgcggctgggccgtgcaggccctgcccggcctgcacttcaccccaggccggggccccatccaccgggaccaggtgaactgcagcggggctgaggcctacctgtgggactgccccggcctgcccggccagcactactgcggccacaaggaggatgctggagctgtgtgcagcgagcaccagagctggaggctgaccggcggcgctgacagatgtgagggccaggtggaggtgcacttccggggcgtgtggaacacagtgtgtgacagcgagtggtaccccagcgaggccaaggtgctgtgccagagcctgggctgcggcacagctgtggagcggcccaagggcctgccccacagcctgagcggccgcatgtactacagctgcaatggagaggagctgaccctgagcaactgctcctggaggttcaacaacagcaacctgtgcagccagagcctggccgcccgggtgctgtgcagcgccagccgcagcctgcacaacctgagcaccccagaggtgcctgcctctgtgcagacagtgaccatcgagagctctgtgacagtgaagattgagaacaaggagagccgggagctgatgctgctgatccccagcatcgtgctgggcatcctgctgctgggcagcctcatcttcatcgccttcatcctgctgcgcatcaagggcaagtatgccctgcctgtgatggtgaaccaccagcacctgcccaccaccatcccagctggcagcaacagctaccagcctgtgcccatcaccatccccaaggaggacagccagaggcaccgggtgacagatgaggaggtgcagcagagccgcttccagatgccacccctggaggagggcctggaggagctgcacgccagccacatccccacagccaaccctggccactgcatcacagacccccccagcctgggcccccagtaccaccccaggagcaacagcgagagcagcaccagcagtggagaggactactgcaacagccccaagagcaagctgcccccctggaacccccaggtgttcagcagcgagaggagcagcttcctggagcagccccccaacctggagctggccggcacccagcctgccttcagcggcagccccagcccccagcctgacagcacagacaatgatgattatgatgacatctctgctgcctag

SEQ ID NO: 146800 - DNA, 717 bp, synthetic construct
  misc_feature 1..717: note = Description of Artificial Sequence: Synthetic coding sequence
  source 1..717: mol_type = other DNA
atggctgtggagggcggcatgaagtgtgtgaagttcctgctgtatgtgctgctgctggccttctgtgcctgtgctgtgggcctgattgctgtgggcgtgggcgcccagctggtgctgagccagaccatcatccagggcgccaccccaggcagcctgctgcctgtggtgatcatcgctgtgggcgtcttcctgttcctggtggcctttgtgggctgctgcggggcctgcaaggagaactactgcctgatgatcacctttgccatcttcctgagcctcatcatgctggtggaggtggccgccgccatcgccggctacgtgttccgggacaaggtgatgtctgagttcaacaacaacttccggcagcagatggagaactaccccaagaacaaccacacagccagcatcctggacaggatgcaggccgacttcaagtgctgcggggccgccaactacacagactgggagaagatccccagcatgagcaagaacagagtgcctgacagctgctgcatcaacgtgacagtgggctgcggcatcaacttcaatgagaaggccatccacaaggagggctgtgtggagaagattggaggctggctgaggaagaatgtgctggtggtggccgctgctgccctgggcatcgcctttgtggaggtgctgggcatcgtgtttgcctgctgcctggtgaagagcatccgcagcggctatgaggtgatgtag

SEQ ID NO: 146801 - DNA, 711 bp, synthetic construct
  misc_feature 1..711: note = Description of Artificial Sequence: Synthetic coding sequence
  source 1..711: mol_type = other DNA
atggctgtggagggcggcatgaagtgtgtgaagttcctgctgtatgtgctgctgctggccttctgtgcctgtgctgtgggcctgattgctgtgggcgtgggcgcccagctggtgctgagccagaccatcatccagggcgccaccccaggcagcctgctgcctgtggtgatcatcgctgtgggcgtcttcctgttcctggtggcctttgtgggctgctgcggggcctgcaaggagaactactgcctgatgatcacctttgccatcttcctgagcctcatcatgctggtggaggtggccgccgccatcgccggctacgtgttccgggacaaggtgatgtctgagttcaacaacaacttccggcagcagatggagaactaccccaagaacaaccacacagccagcatcctggacaggatgcaggccgacttcaagtgctgcggggccgccaactacacagactgggagaagatccccagcatgagcaagaacagagtgcctgacagctgctgcatcaacgtgacagtgggctgcggcatcaacttcaatgagaaggccatccacaaggagggctgtgtggagaagattggaggctggctgaggaagaatgtgctggtggtggccgctgctgccctgggcatcgcctttgtgctgggcatcgtgtttgcctgctgcctggtgaagagcatccgcagcggctatgaggtgatgtag

SEQ ID NO: 146802 - DNA, 402 bp, synthetic construct
  misc_feature 1..402: note = Description of Artificial Sequence: Synthetic coding sequence
  source 1..402: mol_type = other DNA
atggctgtggagggcggcatgaagtgtgtgaagttcctgctgtatgtgctgctgctggccttctgtgcctgtgctgtgggcctgattgctgtgggcgtgggcgcccagctggtgctgagccagaccatcatccagggcgccaccccaggcagcctgctgcctgtggtgatcatcgctgtgggcgtcttcctgttcctggtggcctttgtgggctgctgcggggcctgcaaggagaactactgcctgatgatcacctttgccatcttcctgagcctcatcatgctggtggaggtggccgccgccatcgccggctacgtgttccgggacaaggtgatgtctgagttcaacaacaacttccggcagcagatggagaactaccccaagaacaaccacacagcctag

SEQ ID NO: 146803 - DNA, 717 bp, synthetic construct; identical to SEQ ID NO: 146800
  misc_feature 1..717: note = Description of Artificial Sequence: Synthetic coding sequence
  source 1..717: mol_type = other DNA

SEQ ID NO: 146804 - DNA, 648 bp, synthetic construct
  misc_feature 1..648: note = Description of Artificial Sequence: Synthetic coding sequence
  source 1..648: mol_type = other DNA
atggctgtggagggcggcatgaagtgtgtgaagttcctgctgtatgtgctgctgctggccttctgtgcctgtgctgtgggcctgattgctgtgggcgtgggcgcccagctggtgctgagccagaccatcatccagggcgccaccccaggcagcctgctgcctgtggtgatcatcgctgtgggcgtcttcctgttcctggtggcctttgtgggctgctgcggggcctgcaaggagaactactgcctgatgatcacctttgccatcttcctgagcctcatcatgctggtggaggtggccgccgccatcgccggctacgtgttccgggacaaggtgatgtctgagttcaacaacaacttccggcagcagatggagaactaccccaagaacaaccacacagccagcatcctggacaggatgcaggccgacttcaagtgctgcggggccgccaactacacagactgggagaagatccccagcatgagcaagaacagagtgcctgacagctgctgcatcaacgtgacagtgggctgcggcatcaacttcaatgagaaggccatccacaaggagggctgtgtggagaagattggaggctggctgaggaagaatgtgctggtggtggccgctgctgccctgggcatcgccttctag

SEQ ID NO: 146805 - DNA, 654 bp, synthetic construct
  misc_feature 1..654: note = Description of Artificial Sequence: Synthetic coding sequence
  source 1..654: mol_type = other DNA
atggctgtggagggcggcatgaagtgtgtgaagttcctgctgtatgtgctgctgctggccttctgtgcctgtgctgtgggcctgattgctgtgggcgtgggcgcccagctggtgctgagccagaccatcatccagggcgccaccccaggcagcctgctgcctgtggtgatcatcgctgtgggcgtcttcctgttcctggtggcctttgtgggctgctgcggggcctgcaaggagaactactgcctgatgatcacctttgccatcttcctgagcctcatcatgctggtggaggtggccgccgccatcgccggctacgtgttccgggacaaggtgatgtctgagttcaacaacaacttccggcagcagatggagaactaccccaagaacaaccacacagccagcatcctggacaggatgcaggccgacttcaagtgctgcggggccgccaactacacagactgggagaagatccccagcatgagcaagaacagagtgcctgacagctgctgcatcaacgtgacagtgggctgcggcatcaacttcaatgagaaggccatccacaaggagggctgtgtggagaagattggaggctggctgaggaagaatgtgctggtggtggccgctgctgccctgggcatcgcctttgtggagtag

SEQ ID NO: 146806 - DNA, 717 bp, synthetic construct; identical to SEQ ID NO: 146800
  misc_feature 1..717: note = Description of Artificial Sequence: Synthetic coding sequence
  source 1..717: mol_type = other DNA

SEQ ID NO: 146807 - DNA, 648 bp, synthetic construct
  misc_feature 1..648: note = Description of Artificial Sequence: Synthetic coding sequence
  source 1..648: mol_type = other DNA
atggctgtggagggcggcatgaagtgtgtgaagttcctgctgtatgtgctgctgctggccttctgtggggccaccccaggcagcctgctgcctgtggtgatcatcgctgtgggcgtcttcctgttcctggtggcctttgtgggctgctgcggggcctgcaaggagaactactgcctgatgatcacctttgccatcttcctgagcctcatcatgctggtggaggtggccgccgccatcgccggctacgtgttccgggacaaggtgatgtctgagttcaacaacaacttccggcagcagatggagaactaccccaagaacaaccacacagccagcatcctggacaggatgcaggccgacttcaagtgctgcggggccgccaactacacagactgggagaagatccccagcatgagcaagaacagagtgcctgacagctgctgcatcaacgtgacagtgggctgcggcatcaacttcaatgagaaggccatccacaaggagggctgtgtggagaagattggaggctggctgaggaagaatgtgctggtggtggccgccgccgccctgggcatcgcctttgtggaggtgctgggcatcgtgtttgcctgctgcctggtgaagagcatccgcagcggctatgaggtgatgtag

SEQ ID NO: 146808 - DNA, 471 bp, synthetic construct
  misc_feature 1..471: note = Description of Artificial Sequence: Synthetic coding sequence
  source 1..471: mol_type = other DNA
atgatcacctttgccatcttcctgagcctcatcatgctggtggaggtggccgccgccatcgccggctacgtgttccgggacaaggtgatgtctgagttcaacaacaacttccggcagcagatggagaactaccccaagaacaaccacacagccagcatcctggacaggatgcaggccgacttcaagtgctgcggggccgccaactacacagactgggagaagatccccagcatgagcaagaacagagtgcctgacagctgctgcatcaacgtgacagtgggctgcggcatcaacttcaatgagaaggccatccacaaggagggctgtgtggagaagattggaggctggctgaggaagaatgtgctggtggtggccgctgctgccctgggcatcgcctttgtggaggtgctgggcatcgtgtttgcctgctgcctggtgaagagcatccgcagcggctatgaggtgatgtag

SEQ ID NO: 146809 - DNA, 471 bp, synthetic construct; identical to SEQ ID NO: 146808
  misc_feature 1..471: note = Description of Artificial Sequence: Synthetic coding sequence
  source 1..471: mol_type = other DNA

SEQ ID NO: 146810 - DNA, 1065 bp, synthetic construct
  misc_feature 1..1065: note = Description of Artificial Sequence: Synthetic coding sequence
  source 1..1065: mol_type = other DNA
atgaggctggccgtgctcttcagcggggccctgctgggcctgctggccgcccagggcactggaaatgactgcccccacaagaagagcgccaccctgctgcccagcttcaccgtgacccccaccgtgacagagagcacaggcaccaccagccacaggaccaccaagagccacaagaccaccacccacaggaccaccaccaccggcaccaccagccacggccccaccacagccacccacaaccccaccaccaccagccacggcaatgtgacagtgcaccccaccagcaacagcacagccaccagccagggccccagcacagccacccacagccctgccaccaccagccacggcaatgccaccgtgcaccccaccagcaacagcacagccaccagccctggcttcaccagcagcgcccaccctgagcccccaccacccagccccagccccagccccaccagcaaggagaccatcggggactacacctggaccaacggcagccagccctgtgtgcacctgcaggcccagatccagatccgggtgatgtacaccacccagggcggcggggaggcctggggcatctctgtgctgaaccccaacaagaccaaggtgcagggcagctgtgagggcgcccacccccacctgctgctgtccttcccctacggccacctgagctttggcttcatgcaggacctgcagcagaaggtggtgtacctgagctacatggctgtggagtacaacgtgtccttcccccacgccgcccagtggaccttcagcgcccagaatgccagcctgcgggacctgcaggcccccctgggccagagcttcagctgcagcaacagcagcatcatcctgagccctgctgtgcacctggacctgctgagcctgcggctgcaggccgcccagctgccccacactggagtgtttggccagagcttcagctgccccagcgacaggagcatcctgctgcccctcatcatcggcctcatcctgctgggcctgctggccctggtgctgattgccttctgcatcatcagaagaagaccttctgcctaccaggccctgtag

SEQ ID NO: 146811 - DNA, 894 bp, synthetic construct
  misc_feature 1..894: note = Description of Artificial Sequence: Synthetic coding sequence
  source 1..894: mol_type = other DNA
atgaggctggccgtgctcttcagcggggccctgctgggcctgctggccgagagcacaggcaccaccagccacaggaccaccaagagccacaagaccaccacccacaggaccaccaccaccggcaccaccagccacggccccaccacagccacccacaaccccaccaccaccagccatggaaatgccaccgtgcaccccaccagcaacagcacagccaccagccctggcttcaccagcagcgcccaccctgagcccccaccacccagccccagccccagccccaccagcaaggagaccatcggggactacacctggaccaacggcagccagccctgtgtgcacctgcaggcccagatccagatccgggtgatgtacaccacccagggcggcggggaggcctggggcatctctgtgctgaaccccaacaagaccaaggtgcagggcagctgtgagggcgcccacccccacctgctgctgtccttcccctacggccacctgagctttggcttcatgcaggacctgcagcagaaggtggtgtacctgagctacatggctgtggagtacaacgtgtccttcccccatgctgcccagtggaccttcagcgcccagaatgccagcctgcgggacctgcaggcccccctgggccagagcttcagctgcagcaacagcagcatcatcctgagccctgctgtgcacctggacctgctgagcctgcggctgcaggccgcccagctgccccacactggagtgtttggccagagcttcagctgccccagcgacaggagcatcctgctgcccctcatcatcggcctcatcctgctgggcctgctggccctggtgctgattgccttctgcatcatcagaagaagacccagcgcctaccaggccctgtag

SEQ ID NO: 146812 - DNA, 3018 bp, synthetic construct
  misc_feature 1..3018: note = Description of Artificial Sequence: Synthetic coding sequence
  source 1..3018: mol_type = other DNA
atgatgtctgatgccagtgacatgctggccgccgccctggagcagatggatggcatcatcgccggcagcaaggccctggagtacagcaatggcatctttgactgccagagccccaccagccccttcatgggcagcctgcgggccctgcacctggtggaggacctgcggggcctgctggagatgatggagacagatgagaaggagggcctgcgctgccagatcccagacagcacagctgagaccctggtggagtggctgcagagccagatgaccaacggccacctgcctggaaatggagatgtgtaccaggagcggctggcccggctggagaatgacaaggagagcctggtgctgcaggtgtctgtgctgacagaccaggtggaggcccagggcgagaagatccgggacctggagttctgcctggaggagcaccgggagaaggtgaatgccacagaggagatgctgcagcaggagctgctgagcaggaccagcctggagacccagaagctggacctgatggccgagatcagcaacctgaagctgaagctgacagctgtggagaaggaccggctggactatgaggacaagttccgggacacagagggcctcatccaggagatcaatgacctgcggctgaaggtgtctgagatggattctgagcggctgcagtatgagaagaagctgaagagcaccaaggatgagctggccagcctgaaggagcagctggaggagaaggagagcgaggtgaagaggctgcaggagaagctggtgtgcaagatgaagggggagggcgtggagatcgtggacagagatgagaacttcaagaagaagctgaaggagaagaacatcgaggtgcagaagatgaagaaggctgtggagagcctgatggccgccaatgaggagaaggacaggaagattgaggacctgcggcagtgcctgaaccgctacaagaagatgcaggacacagtggtgctggcccagggcaagaagggcaaggatggagaatatgaggagctgctgaacagcagcagcatcagcagcctgctggatgcccagggcttcagtgacctggagaagagccccagccccacccctgtgatgggcagccccagctgtgaccccttcaacacctctgtgcctgaggagttccacaccaccatcctgcaggtgtccatccccagcctgctgcctgccaccgtgtccatggagaccagcgagaagagcaagctgacccccaagccagagaccagctttgaggagaatgatggcaacatcatcctgggcgccaccgtggacacccagctgtgtgacaagctgctgaccagcagcctgcagaagagcagcagcctgggcaacctgaagaaggagaccagtgatggagagaaggagaccatccagaagaccagcgaggaccgggccccagctgagagccggcccttcggcaccctgccccccaggcctcctggccaggacacctccatggatgacaaccccttcggcaccaggaaggtgcgcagcagctttggccggggcttcttcaagatcaagagcaacaagaggacagccagcgcccccaacctggacaggaagaggtctgccagcgcccccaccctggccgagacagagaaggagacagctgagcacctggacctggccggggccagcagccggcccaaggacagccagaggaacagccccttccagatccccccacccagcccagacagcaagaagaagagccggggcatcatgaagctgtttgggaagctgcggcgcagccagagcaccaccttcaacccagatgacatgtctgagcctgagttcaagagaggaggcacccgggccacagctggcccccggctgggctggagccgggacctgggccagagcaacagcgacctggacatgccctttgccaagtggaccaaggagcaggtgtgcaactggctgatggagcagggcctgggcagctacctgaacagcggcaagcactggatcgccagcggccagaccctgctgcaggccagccagcaggacctggagaaggagctgggcatcaagcacagcctgcacaggaagaagctgcagctggccctgcaggccctgggcagcgaggaggagaccaaccacggcaagctggacttcaactgggtgacccgctggctggatgacatcggcctgccccagtacaagacccagtttgatgagggccgggtggatggccgcatgctgcactacatgacagtggatgacctgctgagcctgaaggtggtgtctgtgctgcaccacctgagcatcaagagggccatccaggtgctgcgcatcaacaactttgagcccaactgcctgcggcggcggcccagtgatgagaacaccatcgcccccagcgaggtgcagaagtggaccaaccaccgggtgatggagtggctgcggtctgtggacctggccgagtatgcccccaacctgcggggcagcggcgtgcacggcggcctgatggtgctggagccccgcttcaacgtggagaccatggcccagctgctgaacatcccccccaacaagaccctgctgcggcggcacctggccacccacttcaacctgctgattggagctgaggcccagcaccagaagagagatgccatggagctgcctgactatgtgctgctgacagccacagccaaggtgaagcccaagaagctggccttcagcaactttggaaacctgaggaagaagaagcaggaggatggagaggagtatgtgtgccccatggagctgggccaggccagcggcagcgccagcaagaagggcttcaagccaggcctggacatgaggctgtatgaagaagatgacctggaccggctggagcagatggaggacagcgagggcaccgtgcggcagatcggggccttcagcgagggcatcaacaacctgacccacatgctgaaggaggatgacatgttcaaggactttgctgcccggagccccagcgccagcatcacagatgaggacagcaatgtgtag

SEQ ID NO: 146813 - DNA, 495 bp, synthetic construct
  misc_feature 1..495: note = Description of Artificial Sequence: Synthetic coding sequence
  source 1..495: mol_type = other DNA
atgagcagcgagaactgctttgtggccgagaacagcagcctgcaccctgagagcggccaggagaatgatgccaccagcccccacttcagcaccaggcatgagggcagcttccaggtgcctgtgctgtgtgctgtgatgaatgtggtgttcatcaccatcctgatcatcgccctgattgccctgtctgtgggccagtacaactgccccggccagtacaccttctccatgcccagcgacagccacgtgagcagctgcagcgaggactgggtgggctaccagaggaagtgctacttcatcagcacagtgaagaggtcctggaccagcgcccagaatgcctgcagcgagcacggggccaccctggccgtgattgattctgagaaggacatgaacttcctgaagagatatgccggccgggaggagcactgggtgggcctgaagaaggagcccggccacccctggaagtggagcaatggcaaggagttcaacaactggtag

SEQ ID NO: 146814 - DNA, 723 bp, synthetic construct
  misc_feature 1..723: note = Description of Artificial Sequence: Synthetic coding sequence
  source 1..723: mol_type = other DNA
atggccggccccccccggctgctgctgctgcccctgctgctggccctggcccggggcctgcccggggccctggccgcccaggaggtgcagcagagcccccactgcaccaccgtgcctgtgggcgcctctgtgaacatcacctgcagcaccagcggcggcctgcggggcatctacctgcggcagctgggcccccagccccaggacatcatctactatgaagatggagtggtgcccaccacagaccggcgcttccggggcagaattgacttcagcggcagccaggacaacctgaccatcaccatgcaccggctgcagctgagtgacaccggcacctacacctgccaggccatcacagaggtgaatgtgtatggcagcggcaccctggtgctggtgacagaggagcagagccagggctggcaccgctgcagtgatgccccaccccgggccagcgccctgcctgcccccccaactggaagtgccctgcctgacccccagacagccagcgccctgcctgaccccccagctgccagcgccctgcctgctgccctggccgtcatctccttcctgctgggcctgggcctgggcgtggcctgtgtgctggcccggacccagatcaagaagctgtgctcctggagggacaagaacagcgctgcctgtgtggtgtatgaggacatgagccacagccgctgcaacaccctgagcagccccaaccagtaccagtag

SEQ ID NO: 146815 - DNA, 1080 bp, synthetic construct
  misc_feature 1..1080: note = Description of Artificial Sequence: Synthetic coding sequence
  source 1..1080: mol_type = other DNA
atggccgaggccatcacctacgccgacctgcgctttgtgaaggcccccctgaagaagagcatcagcagccggctgggccaggaccctggagcagatgatgatggagagatcacctatgaaaatgtgcaggtgcctgctgtgctgggcgtgcccagcagcctggccagctctgtgctgggggacaaggctgctgtgaagtctgagcagcccacagcctcctggagggctgtgaccagccctgctgtgggccgcatcctgccctgcaggaccacctgcctgcgctacctgctgctgggcctgctgctgacctgcctgctgctgggcgtgacagccatctgcctgggcgtgcgctacctgcaggtgtcccagcagctgcagcagaccaacagagtgctggaggtgaccaacagcagcctgcggcagcagctgcggctgaagatcacccagctgggccagagcgctgaggacctgcagggcagcagaagagagctggcccagagccaggaggccctgcaggtggagcagagggcccaccaggccgctgagggccagctgcaggcctgccaggccgaccggcagaagaccaaggagaccctgcagagcgaggagcagcagaggcgggccctggagcagaagctgagcaacatggagaaccggctgaagcccttcttcacctgtggcagcgctgacacctgctgccccagcggctggatcatgcaccagaagagctgcttctacatcagcctgaccagcaagaactggcaggagagccagaagcagtgtgagaccctgagcagcaagctggccaccttcagcgagatctacccccagagccacagctactacttcctgaacagcctgctgcccaacggcggcagcggcaacagctactggacaggcctgagcagcaacaaggactggaagctgacagatgacacccagaggaccaggacctacgcccagagcagcaagtgcaacaaggtgcacaagacctggagctggtggaccctggagagcgagagctgccgcagcagcctgccctacatctgtgagatgacagccttccgcttcccagactag

SEQ ID NO: 146816 - DNA, 363 bp, synthetic construct
  misc_feature 1..363: note = Description of Artificial Sequence: Synthetic coding sequence
  source 1..363: mol_type = other DNA
atggccgaggccatcacctacgccgacctgcgctttgtgaaggcccccctgaagaagagcatcagcagccggctgggccaggaccctggagcagatgatgatggagagatcacctatgaaaatgtgcaggtgcctgctgtgctgggcgtgcccagcagcctggccagctctgtgctgggggacaaggctgctgtgaagtctgagcagcccacagcctcctggagggctgtgaccagccctgctgtgggccgcatcctgccctgtgaatgtgcctgtgccggccagccccggggccaggtgctggcccctgtgcctgctgctgatggagctggcccccggggcgtgcagctgctgcctggatag

SEQ ID NO: 146817 - DNA, 360 bp, synthetic construct
  misc_feature 1..360: note = Description of Artificial Sequence: Synthetic coding sequence
  source 1..360: mol_type = other DNA
atggccgaggccatcacctacgccgacctgcgctttgtgaaggcccccctgaagaagagcatcagcagccggctgggccaggaccctggagcagatgatgatggagagatcacctatgaaaatgtgcaggtgcctgctgtgctgggcgtgcccagcagcctggccagctctgtgctgggggacaaggctgctgtgaagtctgagcagcccacagcctcctggagggctgtgaccagccctgctgtgggccgcatcctgccctgcaggaccacctgcctgcgctacctgctgctgggcctgctgctgacctgcctgctgctgggcgtgacagccatctgcctgggcgtgcgctgtgagtag

SEQ ID NO: 146818 - DNA, 1080 bp, synthetic construct; identical to SEQ ID NO: 146815
  misc_feature 1..1080: note = Description of Artificial Sequence: Synthetic coding sequence
  source 1..1080: mol_type = other DNA

SEQ ID NO: 146819 - DNA, 1080 bp, synthetic construct
  misc_feature 1..1080: note = Description of Artificial Sequence: Synthetic coding sequence
  source 1..1080: mol_type = other DNA
atgcagaccaggaacccccagagccatggagaaaatggagccagcccctggagctggggagaccggctgggccctggccctgaccctggagcagatgatgatggagagatcacctatgaaaatgtgcaggtgcctgctgtgctgggcgtgcccagcagcctggccagctctgtgctgggggacaaggctgctgtgaagtctgagcagcccacagcctcctggagggctgtgaccagccctgctgtgggccgcatcctgccctgcaggaccacctgcctgcgctacctgctgctgggcctgctgctgacctgcctgctgctgggcgtgacagccatctgcctgggcgtgcgctacctgcaggtgtcccagcagctgcagcagaccaacagagtgctggaggtgaccaacagcagcctgcggcagcagctgcggctgaagatcacccagctgggccagagcgctgaggacctgcagggcagcagaagagagctggcccagagccaggaggccctgcaggtggagcagagggcccaccaggccgctgagggccagctgcaggcctgccaggccgaccggcagaagaccaaggagaccctgcagagcgaggagcagcagaggcgggccctggagcagaagctgagcaacatggagaaccggctgaagcccttcttcacctgtggcagcgctgacacctgctgccccagcggctggatcatgcaccagaagagctgcttctacatcagcctgaccagcaagaactggcaggagagccagaagcagtgtgagaccctgagcagcaagctggccaccttcagcgagatctacccccagagccacagctactacttcctgaacagcctgctgcccaacggcggcagcggcaacagctactggacaggcctgagcagcaacaaggactggaagctgacagatgacacccagaggaccaggacctacgcccagagcagcaagtgcaacaaggtgcacaagacctggagctggtggaccctggagagcgagagctgccgcagcagcctgccctacatctgtgagatgacagccttccgcttcccagactag

SEQ ID NO: 146820 - DNA, 891 bp, synthetic construct
  misc_feature 1..891: note = Description of Artificial Sequence: Synthetic coding sequence
  source 1..891: mol_type = other DNA
atgcacagaagaagaagccgcagctgccgggaggaccagaagcctgtgatggatgaccagagggacctgatcagcaacaatgagcagctgcccatgctgggcagaagacctggggcccctgagagcaagtgcagcagaggagccctgtacacaggcttcagcatcctggtgaccctgctgctggccggccaggccaccacagcctacttcctgtaccagcagcagggccgcctggacaagctgactgtgaccagccagaacctgcagctggagaacctgaggatgaagctgcccaagccacccaagcctgtgtccaagatgaggatggccacccccctgctgatgcaggccctgcccatgggcgccctgccccagggccccatgcagaatgccaccaagtatggcaacatgacagaagatcatgtgatgcacctgctgcagaatgctgaccccctgaaggtgtacccacccctgaagggcagcttccctgagaacctgcggcacctgaagaacaccatggagaccatcgactggaaggtgtttgagagctggatgcaccactggctgctgtttgagatgagccgccacagcctggagcagaagcccacagatgccccacccaaggtgctgaccaagtgccaggaggaggtgagccacatcccagctgtgcaccctggcagcttccggcccaagtgtgatgaaaatggaaactacctgcccctgcagtgctacggcagcatcggctactgctggtgtgtgttccccaacggcacagaggtgcccaacaccaggagccggggccaccacaactgcagcgagagcctggagctggaggaccccagcagcggcctgggcgtgaccaagcaggacctgggccctgtgcccatgtag

SEQ ID NO: 146821 - DNA, 699 bp, synthetic construct
  misc_feature 1..699: note = Description of Artificial Sequence: Synthetic coding sequence
  source 1..699: mol_type = other DNA
atgcacagaagaagaagccgcagctgccgggaggaccagaagcctgtgatggatgaccagagggacctgatcagcaacaatgagcagctgcccatgctgggcagaagacctggggcccctgagagcaagtgcagcagaggagccctgtacacaggcttcagcatcctggtgaccctgctgctggccggccaggccaccacagcctacttcctgtaccagcagcagggccgcctggacaagctgactgtgaccagccagaacctgcagctggagaacctgaggatgaagctgcccaagccacccaagcctgtgtccaagatgaggatggccacccccctgctgatgcaggccctgcccatgggcgccctgccccagggccccatgcagaatgccaccaagtatggcaacatgacagaagatcatgtgatgcacctgctgcagaatgctgaccccctgaaggtgtacccacccctgaagggcagcttccctgagaacctgcggcacctgaagaacaccatggagaccatcgactggaaggtgtttgagagctggatgcaccactggctgctgtttgagatgagccgccacagcctggagcagaagcccacagatgccccacccaaggagagcctggagctggaggaccccagcagcggcctgggcgtgaccaagcaggacctgggccctgtgcccatgtag

SEQ ID NO: 146822 - DNA, 483 bp, synthetic construct
  misc_feature 1..483: note = Description of Artificial Sequence: Synthetic coding sequence
  source 1..483: mol_type = other DNA
atgcacagaagaagaagccgcagctgccgggaggaccagaagcctgtgatggatgaccagagggacctgatcagcaacaatgagcagctgcccatgctgggcagaagacctggggcccctgagagcaagtgcagcagaggagccctgtacacaggcttcagcatcctggtgaccctgctgctggccggccaggccaccacagcctacttcctgtaccagcagcagggccgcctggacaagctgactgtgaccagccagaacctgcagctggagaacctgaggatgaagctgcccaagccacccaagcctgtgtccaagatgaggatggccacccccctgctgatgcaggccctgcccatgggcgccctgccccagggccccatgcagaatgccaccaagtatggcaacatgacagaagatcatgtgatgcacctgctgcagagccactggaactggaggacccggctgctgggctgggtgtag

SEQ ID NO: 146823 - DNA, 951 bp, synthetic construct
  misc_feature 1..951: note = Description of Artificial Sequence: Synthetic coding sequence
  source 1..951: mol_type = other DNA
tgaagaagctgccgggaggaccagaagcctgtgatggatgaccagagggacctgatcagcaacaatgagcagctgcccatgctgggccggcggcctggggcccctgagagcaagtgcagcagaggagccctgtacacaggcttcagcatcctggtgaccctgctgctggccggccaggccaccacagcctacttcctgtaccagcagcagggccgcctggacaagctgactgtgaccagccagaacctgcagctggagaacctgaggatgaagctgcccaagccacccaagcctgtgtccaagatgaggatggccacccccctgctgatgcaggccctgcccatgggcgccctgccccagggccccatgcagaatgccaccaagtatggcaacatgacagaggaccacgtgatgcacctgctgcagaatgctgaccccctgaaggtgtacccacccctgaagggcagcttccctgagaacctgcggcacctgaagaacaccatggagaccatcgactggaaggtgtttgagagctggatgcaccactggctgctgtttgagatgagccgccacagcctggagcagaagcccacagatgccccacccaaggtgctgaccaagtgccaggaggaggtgagccacatcccagctgtgcaccctggcagcttccggcccaagtgtgatgaaaatggaaactacctgcccctgcagtgctacggcagcatcggctactgctggtgtgtgttccccaatggaacagaggtgcccaacaccaggagccggggccaccacaactgcagcgagagcctggagctggaggaccccagcagcggcctgggcgtgaccaagcaggacctgggccctgggaagggcctggccgagggccacctggtgaccagcagcagcagccctgctggccctgcccccctgtgggccggggagggcgtgtag

SEQ ID NO: 146824 - DNA, 369 bp, synthetic construct
  misc_feature 1..369: note = Description of Artificial Sequence: Synthetic coding sequence
  source 1..369: mol_type = other DNA
atgcacagaagaagaagccgcagctgccgggaggaccagaagcctgtgatggatgaccagagggacctgatcagcaacaatgagcagctgcccatgctgggcagaagacctggggcccctgagagcaagtgcagcagaggagccctgtacacaggcttcagcatcctggtgaccctgctgctggccggccaggccaccacagcctacttcctgtaccagcagcagggccgcctggacaagctgactgtgaccagccagaacctgcagctggagaacctgaggatgaagctgcccaagccccatgctgagtgccaccaggtgtggcagcacgaccggggcccctgtgatgccccagccccagaatgttag

SEQ ID NO: 146825 - DNA, 459 bp, synthetic construct
  misc_feature 1..459: note = Description of Artificial Sequence: Synthetic coding sequence
  source 1..459: mol_type = other DNA
atgcacagaagaagaagccgcagctgccgggaggaccagaagcctgtgatggatgaccagagggacctgatcagcaacaatgagcagctgcccatgctgggcagaagacctggggcccctgagagcaagtgcagcagaggagccctgtacacaggcttcagcatcctggtgaccctgctgctggccggccaggccaccacagcctacttcctgtaccagcagcagggccgcctggacaagctgactgtgaccagccagaacctgcagctggagaacctgaggatgaagctgcccaagccacccaagcctgtgtccaagatgaggatggccacccccctgctgatgcaggccctgcccatgggcgccctgccccagggccccatgcagaatgccaccaagtatggcaacatgacagaagatcatgtgatgcacctgctgcaggaggtggccaagagctag

SEQ ID NO: 146826 - DNA, 690 bp, synthetic construct
  misc_feature 1..690: note = Description of Artificial Sequence: Synthetic coding sequence
  source 1..690: mol_type = other DNA
atggcccggctggccctgagccctgtgcccagccactggatggtggccctgctgctgctgctgtctgctgagcctgtgcctgctgcccggtctgaggaccgctacagaaaccccaagggcagcgcctgcagccgcatctggcagagcccccgcttcatcgccaggaagaggggcttcaccgtgaagatgcactgctacatgaacagcgccagcggaaatgtgtcctggctgtggaagcaggagatggatgagaacccccagcagctgaagctggagaagggccgcatggaggagagccagaatgaaagcctggccaccctgaccatccagggcatccgctttgaagataatggcatctacttctgccagcagaagtgcaacaacaccagcgaggtgtaccagggctgcggcacagagctgcgggtgatgggcttcagcaccctggcccagctgaagcagaggaacaccctgaaggatggcatcatcatgatccagaccctgctgatcatcctcttcatcatcgtgcccatcttcctgctgctggacaaggatgacagcaaggccggcatggaggaggaccacacctatgagggcctggacatcgaccagacagccacctatgaggacatcgtgaccctgaggactggagaggtgaagtggagcgtgggggagcaccctggccaggagtag

SEQ ID NO: 146827 - DNA, 378 bp, synthetic construct
  misc_feature 1..378: note = Description of Artificial Sequence: Synthetic coding sequence
  source 1..378: mol_type = other DNA
atggcccggctggccctgagccctgtgcccagccactggatggtggccctgctgctgctgctgtctgctgagcctgtgcctgctgcccggtctgaggaccgctacagaaaccccaagggcttcagcaccctggcccagctgaagcagaggaacaccctgaaggatggcatcatcatgatccagaccctgctgatcatcctcttcatcatcgtgcccatcttcctgctgctggacaaggatgacagcaaggccggcatggaggaggaccacacctatgagggcctggacatcgaccagacagccacctatgaggacatcgtgaccctgaggactggagaggtgaagtggagcgtgggggagcaccctggccaggagtag

SEQ ID NO: 146828 - DNA, 693 bp, synthetic construct
  misc_feature 1..693: note = Description of Artificial Sequence: Synthetic coding sequence
  source 1..693: mol_type = other DNA
atggcccggctggccctgagccctgtgcccagccactggatggtggccctgctgctgctgctgtctgctgctgagcctgtgcctgctgcccggagtgaagatcgctacagaaaccccaagggcagcgcctgcagccgcatctggcagagcccccgcttcatcgccaggaagaggggcttcaccgtgaagatgcactgctacatgaacagcgccagcggaaatgtgtcctggctgtggaagcaggagatggatgagaacccccagcagctgaagctggagaagggccgcatggaggagagccagaatgaaagcctggccaccctgaccatccagggcatccgctttgaggacaatggcatctacttctgccagcagaagtgcaacaacaccagcgaggtgtaccagggctgcggcacagagctgcgggtgatgggcttcagcaccctggcccagctgaagcagaggaacaccctgaaggatggcatcatcatgatccagaccctgctgatcatcctcttcatcatcgtgcccatcttcctgctgctggacaaggatgacagcaaggccggcatggaggaggaccacacctatgagggcctggacatcgaccagacagccacctatgaagatattgtgaccctgaggactggagaggtgaagtggagcgtgggggagcaccctggccaggagtag

SEQ ID NO: 146829 - DNA, 711 bp, synthetic construct
  misc_feature 1..711: note = Description of Artificial Sequence: Synthetic coding sequence
  source 1..711: mol_type = other DNA
atgggcgtggagggctgcaccaagtgcatcaagtacctgctgtttgtgttcaactttgtgttctggctggccggcggcgtcatcctgggcgtggccctgtggctgcggcatgacccccagaccaccaacctgctgtacctggagctgggggacaagccagcccccaacaccttctacgtgggcatctacatcctgattgctgtgggcgctgtgatgatgtttgtgggcttcctgggctgctatggagccatccaggagagccagtgcctgctgggcaccttcttcacctgcctggtgatcctgtttgcctgtgaggtggccgccggcatctggggctttgtgaacaaggaccagatcgccaaggatgtgaagcagttctatgaccaggccctgcagcaggccgtggtggatgatgatgccaacaatgccaaggctgtggtgaagaccttccacgagaccctggactgctgcggcagcagcaccctgacagccctgaccacctctgtgctgaagaacaacctgtgccccagcggcagcaacatcatcagcaacctcttcaaggaggactgccaccagaagattgatgacctcttcagcggcaagctgtacctgattggaattgctgccatcgtggtggccgtcatcatgatctttgagatgatcctgtccatggtgctgtgctgcggcatccggaacagctctgtgtactag

SEQ ID NO: 146830 - DNA, 618 bp, synthetic construct
  misc_feature 1..618: note = Description of Artificial Sequence: Synthetic coding sequence
  source 1..618: mol_type = other DNA
atgagccggggcctgcagctgctgctgctgagctgtgcctacagcctggccccagccaccccagaggtgaaggtggcctgcagtgaagatgtggacctgccctgcacagccccctgggacccccaggtgccctacacagtgtcctgggtgaagctgctggagggcggggaggagaggatggagaccccccaggaggaccacctgcggggccagcactaccaccagaagggccagaatggcagctttgatgccccaaatgaaagaccctacagcctgaagatccggaacaccaccagctgcaacagcggcacctaccgctgcaccctgcaggaccctgatggccagaggaacctgagcggcaaggtgatcctgcgggtgacaggctgcccagcccagaggaaggaggagaccttcaagaagtacagagctgagatcgtgctgctgctggccctggtgatcttctacctgaccctcatcatcttcacctgcaagtttgcccggctgcagagcatcttcccagacttcagcaaggccggcatggagcgggccttcctgcctgtgaccagccccaacaagcacctgggcctggtgaccccccacaagacagagctggtgtag

SEQ ID NO: 146831 - DNA, 351 bp, synthetic construct
  misc_feature 1..351: note = Description of Artificial Sequence: Synthetic coding sequence
  source 1..351: mol_type = other DNA
atggacccccagtgcaccatgggcctgagcaacatcctgtttgtgatggccttcctgctgtctgagctggaggacccccagcccccaccagaccacatcccctggatcacagctgtgctgcccaccgtcatcatctgtgtgatggtgttctgcctgatcctgtggaagtggaagaagaagaagaggcccaggaacagctacaagtgtggcaccaacaccatggagcgggaggagagcgagcagaccaagaagcgggagaagatccacatccctgagaggagtgatgaggcccagagggtcttcaagagcagcaagaccagcagctgtgacaagagtgacacctgcttctag

SEQ ID NO: 146832 - DNA, 990 bp, synthetic construct
  misc_feature 1..990: note = Description of Artificial Sequence: Synthetic coding sequence
  source 1..990: mol_type = other DNA
atggacccccagtgcaccatgggcctgagcaacatcctgtttgtgatggccttcctgctgtctggagctgcccccctgaagatccaggcctacttcaatgaaacagctgacctgccctgccagtttgccaacagccagaaccagagcctgtctgagctggtggtgttctggcaggaccaggagaacctggtgctgaatgaggtgtacctgggcaaggagaagtttgattctgtgcacagcaagtacatgggccgcaccagctttgacagcgacagctggaccctgcggctgcacaacctgcagatcaaggacaagggcctgtaccagtgcatcatccaccacaagaagcccaccggcatgatccgcatccaccagatgaacagcgagctgtctgtgctggccaacttcagccagcctgagatcgtgcccatcagcaacatcacagaaaatgtgtacatcaacctgacctgcagcagcatccacggctacccagagcccaagaagatgtctgtgctgctgcggaccaagaacagcaccatcgagtatgatggagtgatgcagaagagccaggacaacgtgacagagctgtatgatgtgtccatcagcctgtctgtgtccttcccagatgtgaccagcaacatgaccatcttctgcatcctggagacagacaagacccggctgctgagcagccccttcagcattgagctggaggacccccagcccccaccagaccacatcccctggatcacagctgtgctgcccaccgtcatcatctgtgtgatggtgttctgcctgatcctgtggaagtggaagaagaagaagaggcccagaaattcctacaagtgtggcaccaacaccatggagcgggaggagagcgagcagaccaagaagcgggagaagatccacatccctgagaggagtgatgaggcccagagggtcttcaagagcagcaagaccagcagctgtgacaagagtgacacctgcttctag

SEQ ID NO: 146833 - DNA, 972 bp, synthetic construct
  misc_feature 1..972: note = Description of Artificial Sequence: Synthetic coding sequence
  source 1..972: mol_type = other DNA
atgggcctgagcaacatcctgtttgtgatggccttcctgctgtctggagctgcccccctgaagatccaggcctacttcaatgaaacagctgacctgccctgccagtttgccaacagccagaaccagagcctgtctgagctggtggtgttctggcaggaccaggagaacctggtgctgaatgaggtgtacctgggcaaggagaagtttgattctgtgcacagcaagtacatgggccgcaccagctttgacagcgacagctggaccctgcggctgcacaacctgcagatcaaggacaagggcctgtaccagtgcatcatccaccacaagaagcccaccggcatgatccgcatccaccagatgaacagcgagctgtctgtgctggccaacttcagccagcctgagatcgtgcccatcagcaacatcacagaaaatgtgtacatcaacctgacctgcagcagcatccacggctacccagagcccaagaagatgtctgtgctgctgcggaccaagaacagcaccatcgagtatgatggagtgatgcagaagagccaggacaacgtgacagagctgtatgatgtgtccatcagcctgtctgtgtccttcccagatgtgaccagcaacatgaccatcttctgcatcctggagacagacaagacccggctgctgagcagccccttcagcattgagctggaggacccccagcccccaccagaccacatcccctggatcacagctgtgctgcccaccgtcatcatctgtgtgatggtgttctgcctgatcctgtggaagtggaagaagaagaagaggcccagaaattcctacaagtgtggcaccaacaccatggagcgggaggagagcgagcagaccaagaagcgggagaagatccacatccctgagaggagtgatgaggcccagagggtcttcaagagcagcaagaccagcagctgtgacaagagtgacacctgcttctag

SEQ ID NO: 146834 - DNA, 504 bp, synthetic construct
  misc_feature 1..504: note = Description of Artificial Sequence: Synthetic coding sequence
  source 1..504: mol_type = other DNA
atgggcctgagcaacatcctgtttgtgatggccttcctgctgtctggagctgcccccctgaagatccaggcctacttcaatgaaacagctgacctgccctgccagtttgccaacagccagaaccagagcctgtctgagctggtggtgttctggcaggaccaggagaacctggtgctgaatgaggtgtacctgggcaaggagaagtttgattctgtgcacagcaagtacatgggccgcaccagctttgacagcgacagctggaccctgcggctgcacaacctgcagatcaaggacaagggcctgtaccagtgcatcatccaccacaagaagcccaccggcatgatccgcatccaccagatgaacagcgagctgtctgtgctggccaacttcagccagcctgagatcgtgcccatcagcaacatcacagaaaatgtgtacatcaacctgacctgcagcagcatccacggctacccagagcccaagaagatgtctgtgctgctgtag

SEQ ID NO: 146835 - DNA, 744 bp, synthetic construct
  misc_feature 1..744: note = Description of Artificial Sequence: Synthetic coding sequence
  source 1..744: mol_type = other DNA
atgggccgcaccagctttgacagcgacagctggaccctgcggctgcacaacctgcagatcaaggacaagggcctgtaccagtgcatcatccaccacaagaagcccaccggcatgatccgcatccaccagatgaacagcgagctgtctgtgctggccaacttcagccagcctgagatcgtgcccatcagcaacatcacagaaaatgtgtacatcaacctgacctgcagcagcatccacggctacccagagcccaagaagatgtctgtgctgctgcggaccaagaacagcaccatcgagtatgatggagtgatgcagaagagccaggacaacgtgacagagctgtatgatgtgtccatcagcctgtctgtgtccttcccagatgtgaccagcaacatgaccatcttctgcatcctggagacagacaagacccggctgctgagcagccccttcagcattgagctggaggacccccagcccccaccagaccacatcccctggatcacagctgtgctgcccaccgtcatcatctgtgtgatggtgttctgcctgatcctgtggaagtggaagaagaagaagaggcccagaaattcctacaagtgtggcaccaacaccatggagcgggaggagagcgagcagaccaagaagcgggagaagatccacatccctgagaggagtgatgaggcccagagggtcttcaagagcagcaagaccagcagctgtgacaagagtgacacctgcttctag

SEQ ID NO: 146836 - DNA, 654 bp, synthetic construct
  misc_feature 1..654: note = Description of Artificial Sequence: Synthetic coding sequence
  source 1..654: mol_type = other DNA
atggacccccagtgcaccatgggcctgagcaacatcctgtttgtgatggccttcctgctgagcgccaacttcagccagcctgagatcgtgcccatcagcaacatcacagaaaatgtgtacatcaacctgacctgcagcagcatccacggctacccagagcccaagaagatgtctgtgctgctgcggaccaagaacagcaccatcgagtatgatggagtgatgcagaagagccaggacaacgtgacagagctgtatgatgtgtccatcagcctgtctgtgtccttcccagatgtgaccagcaacatgaccatcttctgcatcctggagacagacaagacccggctgctgagcagccccttcagcattgagctggaggacccccagcccccaccagaccacatcccctggatcacagctgtgctgcccaccgtcatcatctgtgtgatggtgttctgcctgatcctgtggaagtggaagaagaagaagaggcccagaaattcctacaagtgtggcaccaacaccatggagcgggaggagagcgagcagaccaagaagcgggagaagatccacatccctgagaggagtgatgaggcccagagggtcttcaagagcagcaagaccagcagctgtgacaagagtgacacctgcttctag

SEQ ID NO: 146837 - DNA, 732 bp, synthetic construct
  misc_feature 1..732: note = Description of Artificial Sequence: Synthetic coding sequence
  source 1..732: mol_type = other DNA
atgaggccccggctgtggctgctgctggccgcccagctgactgtgctgcacggcaacagcgtgctgcagcagaccccagcctacatcaaggtgcagaccaacaagatggtgatgctgagctgtgaggccaagatcagcctgagcaacatgaggatctactggctgcggcagaggcaggcccccagcagtgacagccaccacgagttcctggccctgtgggacagcgccaagggcaccatccatggagaggaggtggagcaggagaagattgctgtgttcagagatgccagccgcttcatcctgaacctgacctctgtgaagccagaagattctggcatctacttctgcatgattgtgggcagccctgagctgaccttcggcaagggcacccagctgtctgtggtggacttcctgcccaccacagcccagcccaccaagaagagcaccctgaagaagagggtgtgccgcctgcccaggcctgagacccagaagggccccctgtgcagccccatcaccctgggcctgctggtggccggcgtgctggtgctgctggtgtccctgggcgtggccatccacctgtgctgcagaagaagaagagcccggctgcgcttcatgaagcagccccagggcgagggcatcagcggcacctttgtgccccagtgcctgcacggctactacagcaacaccaccaccagccagaagctgctgaacccctggatcctgaagacctag

SEQ ID NO: 146838 - DNA, 642 bp, synthetic construct
  misc_feature 1..642: note = Description of Artificial Sequence: Synthetic coding sequence
  source 1..642: mol_type = other DNA
atgaggccccggctgtggctgctgctggccgcccagctgactgtgctgcacggcaacagcgtgctgcagcagaccccagcctacatcaaggtgcagaccaacaagatggtgatgctgagctgtgaggccaagatcagcctgagcaacatgaggatctactggctgcggcagaggcaggcccccagcagtgacagccaccacgagttcctggccctgtgggacagcgccaagggcaccatccatggagaggaggtggagcaggagaagattgctgtgttcagagatgccagccgcttcatcctgaacctgacctctgtgaagccagaagattctggcatctacttctgcatgattgtgggcagccctgagctgaccttcggcaagggcacccagctgtctgtggtggacttcctgcccaccacagcccagcccaccaagaagagcaccctgaagaagagggtgtgccgcctgcccaggcctgagacccagaagggcagaagaagaagagcccggctgcgcttcatgaagcagccccagggcgagggcatcagcggcacctttgtgccccagtgcctgcacggctactacagcaacaccaccaccagccagaagctgctgaacccctggatcctgaagacctag

SEQ ID NO: 146839 - DNA, 633 bp, synthetic construct
  misc_feature 1..633: note = Description of Artificial Sequence: Synthetic coding sequence
  source 1..633: mol_type = other DNA
atgaggccccggctgtggctgctgctggccgcccagctgactgtgctgcacggcaacagcgtgctgcagcagaccccagcctacatcaaggtgcagaccaacaagatggtgatgctgagctgtgaggccaagatcagcctgagcaacatgaggatctactggctgcggcagaggcaggcccccagcagtgacagccaccacgagttcctggccctgtgggacagcgccaagggcaccatccatggagaggaggtggagcaggagaagattgctgtgttcagagatgccagccgcttcatcctgaacctgacctctgtgaagccagaagattctggcatctacttctgcatgattgtgggcagccctgagctgaccttcggcaagggcacccagctgtctgtggtggacttcctgcccaccacagcccagcccaccaagaagagcaccctgaagaagagggtgtgccgcctgcccaggcctgagacccagaagggccccctgtgcagccccatcaccctgggcctgctggtggccggcgtgctggtgctgctggtgtccctgggcgtggccatccacctgtgctgcagaagaagaagagcccggctgcgcttcatgaagcagttctacaagtag

SEQ ID NO: 146840 - DNA, 666 bp, synthetic construct
  misc_feature 1..666: note = Description of Artificial Sequence: Synthetic coding sequence
  source 1..666: mol_type = other DNA
atgaggccccggctgtggctgctgctggccgcccagctgactgtgctgcacggcaacagcgtgctgcagcagaccccagcctacatcaaggtgcagaccaacaagatggtgatgctgagctgtgaggccaagatcagcctgagcaacatgaggatctactggctgcggcagaggcaggcccccagcagtgacagccaccacgagttcctggccctgtgggacagcgccaagggcaccatccatggagaggaggtggagcaggagaagattgctgtgttcagagatgccagccgcttcatcctgaacctgacctctgtgaagccagaagattctggcatctacttctgcatgattgtgggcagccctgagctgaccttcggcaagggcacccagctgtctgtggtggacttcctgcccaccacagcccagcccaccaagaagagcaccctgaagaagagggtgtgccgcctgcccaggcctgagacccagaagggccccctgtgcagccccatcaccctgggcctgctggtggccggcgtgctggtgctgctggtgtccctgggcgtggccatccacctgtgctgcagaagaagaagagcccggctgcgcttcatgaagcagctgcggctgcaccccctggagaagtgcagcaggatggactactag

SEQ ID NO: 146841 - DNA, 597 bp, synthetic construct
  misc_feature 1..597: note = Description of Artificial Sequence: Synthetic coding sequence
  source 1..597: mol_type = other DNA
atgaggccccggctgtggctgctgctggccgcccagctgactgtgctgcacggcaacagcgtgctgcagcagaccccagcctacatcaaggtgcagaccaacaagatggtgatgctgagctgtgaggccaagatcagcctgagcaacatgaggatctactggctgcggcagaggcaggcccccagcagtgacagccaccacgagttcctggccctgtgggacagcgccaagggcaccatccatggagaggaggtggagcaggagaagattgctgtgttcagagatgccagccgcttcatcctgaacctgacctctgtgaagccagaagattctggcatctacttctgcatgattgtgggcagccctgagctgaccttcggcaagggcacccagctgtctgtggtggacttcctgcccaccacagcccagcccaccaagaagagcaccctgaagaagagggtgtgccgcctgcccaggcctgagacccagaagggcctgaagggcaaggtgtaccaggagcccctgagccccaatgcctgcatggacaccacagccatcctgcagccccacaggagctgcctgacccacggcagctag

SEQ ID NO: 146842 - DNA, 93 bp, synthetic construct
  misc_feature 1..93: note = Description of Artificial Sequence: Synthetic coding sequence
  source 1..93: mol_type = other DNA
atgaggccccggctgtggctgctgctggccgcccagctgaccggcagaagaagaagagcccggctgcgcttcatgaagcagctgtacaagtag

SEQ ID NO: 146843 - DNA, 624 bp, synthetic construct
  misc_feature 1..624: note = Description of Artificial Sequence: Synthetic coding sequence
  source 1..624: mol_type = other DNA
atgaggccccggctgtggctgctgctggccgcccagctgactgtgctgcacggcaacagcgtgctgcagcagaccccagcctacatcaaggtgcagaccaacaagatggtgatgctgagctgtgaggccaagatcagcctgagcaacatgaggatctactggctgcggcagaggcaggcccccagcagtgacagccaccacgagttcctggccctgtgggacagcgccaagggcaccatccatggagaggaggtggagcaggagaagattgctgtgttcagagatgccagccgcttcatcctgaacctgacctctgtgaagccagaagattctggcatctacttctgcatgattgtgggcagccctgagctgaccttcggcaagggcacccagctgtctgtggtggacttcctgcccaccacagcccagcccaccaagaagagcaccctgaagaagagggtgtgccgcctgcccaggcctgagacccagaagggccccctgtgcagccccatcaccctgggcctgctggtggccggcgtgctggtgctgctggtgtccctgggcgtggccatccacctgtgctgcagaagaagaagagcccggctgcgcttcatgaagcagtag

SEQ ID NO: 146844 - DNA, 153 bp, synthetic construct
  misc_feature 1..153: note = Description of Artificial Sequence: Synthetic coding sequence
  source 1..153: mol_type = other DNA
gagcggggccgggagcggcgggtgaagctgcgcttcagcgcccggccccagggcgagggcatcagcggcacctttgtgccccagtgcctgcacggctactacagcaacaccaccaccagccagaagctgctgaacccctggatcctgaagtag

SEQ ID NO: 146845 - DNA, 687 bp, synthetic construct
  misc_feature 1..687: note = Description of Artificial Sequence: Synthetic coding sequence
  source 1..687: mol_type = other DNA
atgcctgtgaagggcggcaccaagtgcatcaagtacctgctgtttggcttcaacttcatcttctggctggccggcattgctgtgctggccatcggcctgtggctgcgctttgacagccagaccaagagcatctttgagcaggagaccaacaacaacaacagcagcttctacacaggagtgtacatcctgattggagctggggccctgatgatgctggtgggcttcctgggctgctgcggggctgtgcaggagagccagtgcatgctgggcctcttcttcggcttcctgctggtgatctttgccatcgagattgctgctgccatctggggctacagccacaaggatgaagtcatcaaggaggtgcaggagttctacaaggacacctacaacaagctgaagaccaaggatgagccccagcgggagaccctgaaggccatccactacgccctgaactgctgcggcctggccggcggcgtggagcagttcatcagtgacatctgccccaagaaggatgtgctggagaccttcaccgtgaagagctgcccagatgccatcaaggaggtgtttgacaacaagttccacatcatcggggctgtgggcattggaattgctgtggtgatgatcttcggcatgatcttctccatgatcctgtgctgtgccatcagaagaaaccgggagatggtgtag

SEQ ID NO: 146846 - DNA, 480 bp, synthetic construct
  misc_feature 1..480: note = Description of Artificial Sequence: Synthetic coding sequence
  source 1..480: mol_type = other DNA
atgatgctggtgggcttcctgggctgctgcggggctgtgcaggagagccagtgcatgctgggcctcttcttcggcttcctgctggtgatctttgccattgaaattgctgctgccatctggggctacagccacaaggatgaggtgatcaaggaggtgcaggagttctacaaggacacctacaacaagctgaagaccaaggatgagccccagcgggagaccctgaaggccatccactacgccctgaactgctgcggcctggccggcggcgtggagcagttcatcagtgacatctgccccaagaaggatgtgctggagaccttcaccgtgaagagctgcccagatgccatcaaggaggtgtttgacaacaagttccacatcattggagctgtgggcatcggcattgctgtggtgatgatcttcggcatgatcttctccatgatcctgtgctgtgccatcagaagaaaccgggagatggtgtag

SEQ ID NO: 146847 - DNA, 687 bp, synthetic construct; identical to SEQ ID NO: 146845
  misc_feature 1..687: note = Description of Artificial Sequence: Synthetic coding sequence
  source 1..687: mol_type = other DNA

SEQ ID NO: 146848 - DNA, 687 bp, synthetic construct
  misc_feature 1..687: note = Description of Artificial Sequence: Synthetic coding sequence
  source 1..687: mol_type = other DNA
atgcctgtgaagggcggcaccaagtgcatcaagtacctgctgtttggcttcaacttcatcttctggctggccggcattgctgtgctggccatcggcctgtggctgcgctttgacagccagaccaagagcatctttgagcaggagaccaacaacaacaacagcagcttctacacaggagtgtacatcctgattggagctggggccctgatgatgctggtgggcttcctgggctgctgcggggctgtgcaggagagccagtgcatgctgggcctggccaccaagaggaccatgtttcctcccttcctggaggaccacgtgtgcttcttcagcctgaacccccagttcttcggcttcctgctggtgatctttgccattgaaattgctgctgccatctggggctacagccacaaggatgaggtgatcaaggaggtgcaggagttctacaaggacacctacaacaagctgaagaccaaggatgagccccagcgggagaccctgaaggccatccactacgccctgaactgctgcggcctggccggcggcgtggagcagttcatcagtgacatctgccccaagaaggatgtgctggagaccttcaccgtgaagagctgcccagatgccatcaaggaggtgtttgacaacaagttccacatcattggagctgtgggcatcggcattgctgtgtag

SEQ ID NO: 146849 - DNA, 546 bp, synthetic construct
  misc_feature 1..546: note = Description of Artificial Sequence: Synthetic coding sequence
  source 1..546: mol_type = other DNA
atgcctgtgaagggcggcaccaagtgcatcaagtacctgctgtttggcttcaacttcatcttctggctggccggcattgctgtgctggccatcggcctgtggctgcgctttgacagccagaccaagagcatctttgagcaggagaccaacaacaacaacagcagcttctacacaggagtgtacatcctgattggagctggggccctgatgatgctggtgggcttcctgggctgctgcggggctgtgcaggagagccagtgcatgctgggcctcttcttcggcttcctgctggtgatctttgccatcgagattgctgctgccatctggggctacagccacaaggatgaagtcatcaaggaggtgcaggagttctacaaggacacctacaacaagctgaagaccaaggatgagccccagcgggagaccctgaaggccatccactacgccctgaacctgtggtttggctggggccggggcaccgtgtacctgcggcacctgccccaggagggccgcaccaggaacctgcaccgggaggtgctgtcctag

SEQ ID NO: 146850 - DNA, 426 bp, synthetic construct
  misc_feature 1..426: note = Description of Artificial Sequence: Synthetic coding sequence
  source 1..426: mol_type = other DNA
atgctgggcctcttcttcggcttcctgctggtgatctttgccattgaaattgctgctgccatctggggctacagccacaaggatgaggtgatcaaggaggtgcaggagttctacaaggacacctacaacaagctgaagaccaaggatgagccccagcgggagaccctgaaggccatccactacgccctgaactgctgcggcctggccggcggcgtggagcagttcatcagtgacatctgccccaagaaggatgtgctggagaccttcaccgtgaagagctgcccagatgccatcaaggaggtgtttgacaacaagttccacatcattggagctgtgggcatcggcattgctgtggtgatgatcttcggcatgatcttctccatgatcctgtgctgtgccatcagaagaaaccgggagatggtgtag

SEQ ID NO: 146851 - DNA, 1758 bp, synthetic construct
  misc_feature 1..1758: note = Description of Artificial Sequence: Synthetic coding sequence
  source 1..1758: mol_type = other DNA
atggagaagaagtggaagtactgtgctgtgtactacatcatccagatccactttgtgaagggcgtgtgggagaagacagtgaacacagaagaaaatgtgtatgccaccctgggcagtgatgtgaacctgacctgccagacccagacagtgggcttctttgtgcagatgcagtggagcaaggtgaccaacaagattgacctgattgctgtgtaccacccccagtatggcttctactgtgcctacggccggccctgtgagagcctggtgaccttcacagagaccccagaaaatggcagcaagtggaccctgcacctgaggaacatgagctgcagcgtgtctggccgctatgagtgcatgctggtgctgtacccagagggcatccagaccaagatctacaacctgctgatccagacccacgtgacagcagatgagtggaacagcaaccacaccattgaaattgagatcaaccagaccctggagatcccctgcttccagaacagcagcagcaagatcagcagcgagttcacctacgcctggagcgtggagaacagcagcacagacagctgggtgctgctgagcaagggcatcaaggaggacaatggcacccaggagaccctcatcagccagaaccacctgatcagcaacagcaccctgctgaaggacagagtgaagctgggcacagactaccgcctgcacctgagccctgtgcagatctttgatgatggcaggaagttcagctgccacatccgggtgggccccaacaagatcctgcggagcagcaccaccgtgaaggtgtttgccaagccagagatccctgtgattgtggagaacaacagcacagatgtgctggtggagcggcgcttcacctgcctgctgaagaatgtgttccccaaggccaacatcacctggttcattgatggcagcttcctgcatgatgagaaggagggcatctacatcaccaatgaggagaggaagggcaaggatggcttcctggagctgaagtctgtgctgaccagggtgcacagcaacaagccagcccagagcgacaacctgaccatctggtgcatggccctgagccctgtgcccggcaacaaggtgtggaacatcagcagcgagaagatcaccttcctgctgggcagcgagatcagcagcacagatcctcccctgtctgtgacagagagcaccctggacacccagcccagccctgccagctctgtgtccccagcccgctacccagccaccagctctgtgaccctggtggatgtgtctgccctgcggcccaacaccaccccccagcccagcaacagctccatgaccacccggggcttcaactacccctggaccagcagcggcacagacaccaagaagtctgtgagccgcatccccagcgagacctacagcagcagccccagcggggccggcagcaccctgcatgacaacgtgttcaccagcacagcccgggccttcagcgaggtgcccaccacagccaacggcagcaccaagaccaaccacgtgcacatcaccggcatcgtggtgaacaagcccaaggatggcatgtcctggcctgtgattgtggccgccctgctcttctgctgcatgatcctgtttggcctgggcgtgaggaagtggtgccagtaccagaaggagatcatggagcggcccccacccttcaagcccccacctccacccatcaagtacacctgcatccaggagcccaatgaaagtgacctgccctaccacgagatggagaccctgtag

SEQ ID NO: 146852 - DNA, 1710 bp, synthetic construct
  misc_feature 1..1710: note = Description of Artificial Sequence: Synthetic coding sequence
  source 1..1710: mol_type = other DNA
atggagaagaagtggaagtactgtgctgtgtactacatcatccagatccactttgtgaagggcgtgtgggagaagacagtgaacacagaagaaaatgtgtatgccaccctgggcagtgatgtgaacctgacctgccagacccagacagtgggcttctttgtgcagatgcagtggagcaaggtgaccaacaagattgacctgattgctgtgtaccacccccagtatggcttctactgtgcctacggccggccctgtgagagcctggtgaccttcacagagaccccagaaaatggcagcaagtggaccctgcacctgaggaacatgagctgcagcgtgtctggccgctatgagtgcatgctggtgctgtacccagagggcatccagaccaagatctacaacctgctgatccagacccacgtgacagcagatgagtggaacagcaaccacaccattgaaattgagatcaaccagaccctggagatcccctgcttccagaacagcagcagcaagatcagcagcgagttcacctacgcctggagcgtggaggacaatggcacccaggagaccctcatcagccagaaccacctgatcagcaacagcaccctgctgaaggacagagtgaagctgggcacagactaccgcctgcacctgagccctgtgcagatctttgatgatggcaggaagttcagctgccacatccgggtgggccccaacaagatcctgcggagcagcaccaccgtgaaggtgtttgccaagccagagatccctgtgattgtggagaacaacagcacagatgtgctggtggagcggcgcttcacctgcctgctgaagaatgtgttccccaaggccaacatcacctggttcattgatggcagcttcctgcatgatgagaaggagggcatctacatcaccaatgaggagaggaagggcaaggatggcttcctggagctgaagtctgtgctgaccagggtgcacagcaacaagccagcccagagcgacaacctgaccatctggtgcatggccctgagccctgtgcccggcaacaaggtgtggaacatcagcagcgagaagatcaccttcctgctgggcagcgagatcagcagcacagatcctcccctgtctgtgacagagagcaccctggacacccagcccagccctgccagctctgtgtccccagcccgctacccagccaccagctctgtgaccctggtggatgtgtctgccctgcggcccaacaccaccccccagcccagcaacagctccatgaccacccggggcttcaactacccctggaccagcagcggcacagacaccaagaagtctgtgagccgcatccccagcgagacctacagcagcagccccagcggggccggcagcaccctgcatgacaacgtgttcaccagcacagcccgggccttcagcgaggtgcccaccacagccaacggcagcaccaagaccaaccacgtgcacatcaccggcatcgtggtgaacaagcccaaggatggcatgtcctggcctgtgattgtggccgccctgctcttctgctgcatgatcctgtttggcctgggcgtgaggaagtggtgccagtaccagaaggagatcatggagcggcccccacccttcaagcccccacctccacccatcaagtacacctgcatccaggagcccaatgaaagtgacctgccctaccacgagatggagaccctgtag

SEQ ID NO: 146853 - DNA, 2508 bp, synthetic construct
  misc_feature 1..2508: note = Description of Artificial Sequence: Synthetic coding sequence
  source 1..2508: mol_type = other DNA
atgggcggccgggtcttcctggccttctgtgtgtggctgaccctgcccggggctgagacccaggacagccggggctgtgcccgctggtgcccccagaacagcagctgtgtgaatgccacagcctgccgctgcaaccctggcttcagcagcttcagcgagatcatcaccacccccacagagacctgtgatgacatcaatgaatgtgccacccccagcaaggtgtcctgtgggaagttcagtgactgctggaacacagagggcagctatgactgtgtgtgcagccctggctatgagcctgtgtctggggccaagaccttcaagaatgaaagtgagaacacctgccaggatgtggatgagtgccagcagaacccccggctgtgcaagagctatggcacctgtgtgaacaccctgggcagctacacctgccagtgcctgcccggcttcaagttcatccctgaggaccccaaggtgtgcacagatgtgaatgaatgtaccagcggccagaacccctgccacagcagcacccactgcctgaacaacgtgggcagctaccagtgccgctgccggcccggctggcagcccatccctggcagccccaacggccccaacaacacagtgtgtgaagatgtggatgagtgcagcagcggccagcaccagtgtgacagcagcacagtgtgcttcaacacagtgggcagctacagctgccgctgcaggcctggctggaagcccaggcatggcatccccaacaaccagaaggacacagtgtgtgaggacatgaccttcagcacctggaccccacctcctggggtgcacagccagaccctgagccgcttctttgacaaggtgcaggacctgggccgggacagcaagaccagcagcgctgaggtgaccatccagaatgtcatcaagctggtggatgagctgatggaggcccctggagatgtggaggccctggcccctcctgtgcgccacctgattgccacccagctgctgagcaacctggaggacatcatgaggatcctggccaagagcctgcccaagggccccttcacctacatcagccccagcaacacagagctgaccctgatgatccaggagcggggggacaagaatgtgaccatgggccagagcagcgccaggatgaagctgaactgggccgtggccgccggggctgaggaccccggccctgctgtggccggcatcctgagcatccagaacatgaccaccctgctggccaatgccagcctgaacctgcacagcaagaagcaggccgagctggaggagatctatgagagcagcatccggggcgtgcagctgcggcggctgtctgctgtgaacagcatcttcctgagccacaacaacaccaaggagctgaacagccccatcctgtttgccttcagccacctggagagcagtgatggagaggccggccgggaccccccagccaaggatgtgatgcctggcccccggcaggagctgctgtgtgccttctggaagagtgacagcgacagaggaggccactgggccacagagggctgccaggtgctgggcagcaagaatggcagcaccacctgccagtgcagccacctgagcagctttgccatcctgatggcccactatgatgtggaggactggaagctgaccctcatcaccagggtgggcctggccctgagcctcttctgcctgctgctgtgcatcctgaccttcctgctggtgcggcccatccagggcagcaggaccaccatccacctgcacctgtgcatctgcctgtttgtgggcagcaccatcttcctggccggcattgaaaatgaaggaggccaggtgggcctgcgctgccgcctggtggccggcctgctgcactactgcttcctggccgccttctgctggatgagcctggagggcctggagctgtacttcctggtggtgcgggtcttccagggccagggcctgagcacccgctggctgtgcctgattggctacggcgtgcccctgctgattgtgggcgtgtctgctgccatctacagcaagggctacggccggccccgctactgctggctggactttgagcagggcttcctgtggagcttcctgggccctgtgaccttcatcatcctgtgcaatgctgtgatctttgtgaccaccgtgtggaagctgacccagaagttcagcgagatcaacccagacatgaagaagctgaagaaggcccgggccctgaccatcacagccatcgcccagctgttcctgctgggctgcacctgggtgtttggcctcttcatctttgatgacaggagcctggtgctgacctacgtgttcaccatcctgaactgcctgcagggcgccttcctgtacctgctgcactgcctgctgaacaagaaggtgcgggaggagtacaggaagtgggcctgcctggtggccggcggcagcaagtacagcgagttcaccagcaccaccagcggcaccggccacaaccagacccgggccctgcgggccagcgagagcggcatctag

SEQ ID NO: 146854 - DNA, 2361 bp, synthetic construct
  misc_feature 1..2361: note = Description of Artificial Sequence: Synthetic coding sequence
  source 1..2361: mol_type = other DNA
atgggcggccgggtcttcctggccttctgtgtgtggctgaccctgcccggggctgagacccaggacagccggggctgtgcccgctggtgcccccagaacagcagctgtgtgaatgccacagcctgccgctgcaaccctggcttcagcagcttcagcgagatcatcaccacccccacagagacctgtgatgacatcaatgaatgtgccacccccagcaaggtgtcctgtgggaagttcagtgactgctggaacacagagggcagctatgactgtgtgtgcagccctggctatgagcctgtgtctggggccaagaccttcaagaatgaaagtgagaacacctgccaggatgtggatgagtgccagcagaacccccggctgtgcaagagctatggcacctgtgtgaacaccctgggcagctacacctgccagtgcctgcccggcttcaagttcatccctgaggaccccaaggtgtgcacagatgtggatgaatgtagcagcggccagcaccagtgtgacagcagcacagtgtgcttcaacacagtgggcagctacagctgccgctgccggcccggctggaagcccaggcatggcatccccaacaaccagaaggacacagtgtgtgaggacatgaccttcagcacctggaccccacctcctggggtgcacagccagaccctgagccgcttctttgacaaggtgcaggacctgggccgggacagcaagaccagcagcgctgaggtgaccatccagaatgtcatcaagctggtggatgagctgatggaggcccctggagatgtggaggccctggcccctcctgtgcgccacctgattgccacccagctgctgagcaacctggaggacatcatgaggatcctggccaagagcctgcccaagggccccttcacctacatcagccccagcaacacagagctgaccctgatgatccaggagcggggggacaagaatgtgaccatgggccagagcagcgccaggatgaagctgaactgggccgtggccgccggggctgaagatcctggccctgctgtggccggcatcctgagcatccagaacatgaccaccctgctggccaatgccagcctgaacctgcacagcaagaagcaggccgagctggaggagatctatgagagcagcatccggggcgtgcagctgcggcggctgtctgctgtgaacagcatcttcctgagccacaacaacaccaaggagctgaacagccccatcctgtttgccttcagccacctggagagcagtgatggagaggccggccgggaccccccagccaaggatgtgatgcctggcccccggcaggagctgctgtgtgccttctggaagagtgacagcgaccggggcggccactgggccacagagggctgccaggtgctgggcagcaagaatggcagcaccacctgccagtgcagccacctgagcagctttgccatcctgatggcccactatgatgtggaggactggaagctgaccctcatcaccagggtgggcctggccctgagcctcttctgcctgctgctgtgcatcctgaccttcctgctggtgcggcccatccagggcagcaggaccaccatccacctgcacctgtgcatctgcctgtttgtgggcagcaccatcttcctggccggcattgaaaatgaaggaggccaggtgggcctgcgctgccgcctggtggccggcctgctgcactactgcttcctggccgccttctgctggatgagcctggagggcctggagctgtacttcctggtggtgcgggtcttccagggccagggcctgagcacccgctggctgtgcctgattggctatggagtgcccctgctgattgtgggcgtgtctgctgccatctacagcaagggctacggccggccccgctactgctggctggactttgagcagggcttcctgtggagcttcctgggccctgtgaccttcatcatcctgtgcaatgctgtgatctttgtgaccaccgtgtggaagctgacccagaagttcagcgagatcaacccagacatgaagaagctgaagaaggcccgggccctgaccatcacagccatcgcccagctgttcctgctgggctgcacctgggtgtttggcctcttcatctttgatgacaggagcctggtgctgacctacgtgttcaccatcctgaactgcctgcagggcgccttcctgtacctgctgcactgcctgctgaacaagaaggtgcgggaggagtacaggaagtgggcctgcctggtggccggcggcagcaagtacagcgagttcaccagcaccaccagcggcaccggccacaaccagacccgggccctgcgggccagcgagagcggcatctag

SEQ ID NO: 146855 - DNA, 2229 bp, synthetic construct
  misc_feature 1..2229: note = Description of Artificial Sequence: Synthetic coding sequence
  source 1..2229: mol_type = other DNA
atgggcggccgggtcttcctggccttctgtgtgtggctgaccctgcccggggctgagacccaggacagccggggctgtgcccgctggtgcccccagaacagcagctgtgtgaatgccacagcctgccgctgcaaccctggcttcagcagcttcagcgagatcatcaccacccccacagagacctgtgatgacatcaatgaatgtgccacccccagcaaggtgtcctgtgggaagttcagtgactgctggaacacagagggcagctatgactgtgtgtgcagccctggctatgagcctgtgtctggggccaagaccttcaagaatgaaagtgagaacacctgccaggatgtggatgaatgtagcagcggccagcaccagtgtgacagcagcacagtgtgcttcaacacagtgggcagctacagctgccgctgccggcccggctggaagcccaggcatggcatccccaacaaccagaaggacacagtgtgtgaggacatgaccttcagcacctggaccccacctcctggggtgcacagccagaccctgagccgcttctttgacaaggtgcaggacctgggccgggacagcaagaccagcagcgctgaggtgaccatccagaatgtcatcaagctggtggatgagctgatggaggcccctggagatgtggaggccctggcccctcctgtgcgccacctgattgccacccagctgctgagcaacctggaggacatcatgaggatcctggccaagagcctgcccaagggccccttcacctacatcagccccagcaacacagagctgaccctgatgatccaggagcggggggacaagaatgtgaccatgggccagagcagcgccaggatgaagctgaactgggccgtggccgccggggctgaagatcctggccctgctgtggccggcatcctgagcatccagaacatgaccaccctgctggccaatgccagcctgaacctgcacagcaagaagcaggccgagctggaggagatctatgagagcagcatccggggcgtgcagctgcggcggctgtctgctgtgaacagcatcttcctgagccacaacaacaccaaggagctgaacagccccatcctgtttgccttcagccacctggagagcagtgatggagaggccggccgggaccccccagccaaggatgtgatgcctggcccccggcaggagctgctgtgtgccttctggaagagtgacagcgaccggggcggccactgggccacagagggctgccaggtgctgggcagcaagaatggcagcaccacctgccagtgcagccacctgagcagctttgccatcctgatggcccactatgatgtggaggactggaagctgaccctcatcaccagggtgggcctggccctgagcctcttctgcctgctgctgtgcatcctgaccttcctgctggtgcggcccatccagggcagcaggaccaccatccacctgcacctgtgcatctgcctgtttgtgggcagcaccatcttcctggccggcattgaaaatgaaggaggccaggtgggcctgcgctgccgcctggtggccggcctgctgcactactgcttcctggccgccttctgctggatgagcctggagggcctggagctgtacttcctggtggtgcgggtcttccagggccagggcctgagcacccgctggctgtgcctgattggctatggagtgcccctgctgattgtgggcgtgtctgctgccatctacagcaagggctacggccggccccgctactgctggctggactttgagcagggcttcctgtggagcttcctgggccctgtgaccttcatcatcctgtgcaatgctgtgatctttgtgaccaccgtgtggaagctgacccagaagttcagcgagatcaacccagacatgaagaagctgaagaaggcccgggccctgaccatcacagccatcgcccagctgttcctgctgggctgcacctgggtgtttggcctcttcatctttgatgacaggagcctggtgctgacctacgtgttcaccatcctgaactgcctgcagggcgccttcctgtacctgctgcactgcctgctgaacaagaaggtgcgggaggagtacaggaagtgggcctgcctggtggccggcggcagcaagtacagcgagttcaccagcaccaccagcggcaccggccacaaccagacccgggccctgcgggccagcgagagcggcatctag

SEQ ID NO: 146856 - DNA, 2358 bp, synthetic construct
  misc_feature 1..2358: note = Description of Artificial Sequence: Synthetic coding sequence
  source 1..2358: mol_type = other DNA
gggggccgcatcatgagggccttctgtgtgtggctgaccctgcctggagctgagacccaggacagccggggctgtgcccgctggtgcccccagaacagcagctgtgtgaatgccacagcctgccgctgcaaccctggcttcagcagcttcagcgagatcatcaccacccccacagagacctgtgatgacatcaatgaatgtgccacccccagcaaggtgtcctgtgggaagttcagtgactgctggaacacagagggcagctatgactgtgtgtgcagccctggctatgagcctgtgtctggggccaagaccttcaagaatgaaagtgagaacacctgccaggatgtggatgagtgccagcagaacccccggctgtgcaagagctatggcacctgtgtgaacaccctgggcagctacacctgccagtgcctgcccggcttcaagttcatccctgaggaccccaaggtgtgcacagatgtggatgagtgcagcagcggccagcaccagtgtgacagcagcacagtgtgcttcaacacagtgggcagctacagctgccgctgcaggcctggctggaagcccaggcatggcatccccaacaaccagaaggacacagtgtgtgaggacatgaccttcagcacctggaccccacctcctggggtgcacagccagaccctgagccgcttctttgacaaggtgcaggacctgggccgggacagcaagaccagcagcgctgaggtgaccatccagaatgtcatcaagctggtggatgagctgatggaggcccctggagatgtggaggccctggcccctcctgtgcgccacctgattgccacccagctgctgagcaacctggaggacatcatgaggatcctggccaagagcctgcccaagggccccttcacctacatcagccccagcaacacagagctgaccctgatgatccaggagcggggggacaagaatgtgaccatgggccagagcagcgccaggatgaagctgaactgggccgtggccgccggggctgaggaccccggccctgctgtggccggcatcctgagcatccagaacatgaccaccctgctggccaatgccagcctgaacctgcacagcaagaagcaggccgagctggaggagatctatgagagcagcatccggggcgtgcagctgcggcggctgtctgctgtgaacagcatcttcctgagccacaacaacaccaaggagctgaacagccccatcctgtttgccttcagccacctggagagcagtgatggagaggccggccgggaccccccagccaaggatgtgatgcctggcccccggcaggagctgctgtgtgccttctggaagagtgacagcgacagaggaggccactgggccacagagggctgccaggtgctgggcagcaagaatggcagcaccacctgccagtgcagccacctgagcagctttgccatcctgatggcccactatgatgtggaggactggaagctgaccctcatcaccagggtgggcctggccctgagcctcttctgcctgctgctgtgcatcctgaccttcctgctggtgcggcccatccagggcagcaggaccaccatccacctgcacctgtgcatctgcctgtttgtgggcagcaccatcttcctggccggcattgaaaatgaaggaggccaggtgggcctgcgctgccgcctggtggccggcctgctgcactactgcttcctggccgccttctgctggatgagcctggagggcctggagctgtacttcctggtggtgcgggtcttccagggccagggcctgagcacccgctggctgtgcctgattggctacggcgtgcccctgctgattgtgggcgtgtctgctgccatctacagcaagggctacggccggccccgctactgctggctggactttgagcagggcttcctgtggagcttcctgggccctgtgaccttcatcatcctgtgcaatgctgtgatctttgtgaccaccgtgtggaagctgacccagaagttcagcgagatcaacccagacatgaagaagctgaagaaggcccgggccctgaccatcacagccatcgcccagctgttcctgctgggctgcacctgggtgtttggcctcttcatctttgatgacaggagcctggtgctgacctacgtgttcaccatcctgaactgcctgcagggcgccttcctgtacctgctgcactgcctgctgaacaagaaggtgcgggaggagtacaggaagtgggcctgcctggtggccggcggcagcaagtacagcgagttcaccagcaccaccagcggcaccggccacaaccagacccgggccctgcgggccagcgagagcggcatctag

SEQ ID NO: 146857 - DNA, 297 bp, synthetic construct
  misc_feature 1..297: note = Description of Artificial Sequence: Synthetic coding sequence
  source 1..297: mol_type = other DNA
atgtctgtgcggctgcacgtgcccagcggcagccggggcagcgagctgagcgccctgatccaggccatcggggccagcaccagcggcaagcccaagtgctttgtgtgcatcctgcggagcggcctgtctgtggccctgagcctgtctgtgtacttcctgctgctcttcagcaggacccggggcggcggccacggggagcccccagagtgccagaggcgggccagctgcagcgcctacagcttccgggagattgaggactgccggcagaagcagccccggcgctggcagcagggctag

SEQ ID NO: 146858 - DNA, 231 bp, synthetic construct
  misc_feature 1..231: note = Description of Artificial Sequence: Synthetic coding sequence
  source 1..231: mol_type = other DNA
atggcccggggagctgccctggccctgctgctgtttggcctgctgggcgtgctggtggccgcccctggctttggagacctgcggctgcaggccgcccggggcggccggcctggggtggcctgccacagccacgccctgcggcccggccccaagtttggcatcgcccggagcctgcggcccggctggtggggcgagggcaaggagaagctggagaagaactttgagccctag

SEQ ID NO: 146859 - DNA, 534 bp, synthetic construct
  misc_feature 1..534: note = Description of Artificial Sequence: Synthetic coding sequence
  source 1..534: mol_type = other DNA
atggcccggggagctgccctggccctgctgctgtttggcctgctgggcgtgctggtggccgccccagatggcggctttgacctgagtgatgccctgcctgacaatgaaaacaagaagcccacagccatccccaagaagcccagcgctggagatgactttgacctgggagatgctgtggtggatggagaaaatgatgaccccaggcctcccaacccccccaagcccatgcccaaccccaaccccaaccaccccagcagcagcggcagcttcagtgatgctgacctggctgatggagtgtctggaggagagggcaaaggaggcagtgatggcggcggcagccacaggaaggagggggaggaggctgatgcccctggggtcatccctggcatcgtgggcgctgtggtggtggccgtggccggggccatcagcagcttcatcgcctaccagaagaagaagctgtgcttcaaggaaaatggccagctggccggcagcctgggcccctgcatcggcatccggcgggaggctgatggatag

SEQ ID NO: 146860 - DNA, 510 bp, synthetic construct
  misc_feature 1..510: note = Description of Artificial Sequence: Synthetic coding sequence
  source 1..510: mol_type = other DNA
atggcccggggagctgccctggccctgctgctgtttggcctgctgggcgtgctggtggccgccccagatggcggctttgacctgagtgatgccctgcctggagatgactttgacctgggagatgctgtggtggatggagaaaatgatgaccccaggcctcccaacccccccaagcccatgcccaaccccaaccccaaccaccccagcagcagcggcagcttcagtgatgctgacctggctgatggagtgtctggaggagagggcaaaggaggcagtgatggcggcggcagccacaggaaggagggggaggaggctgatgcccctggggtcatccctggcatcgtgggcgctgtggtggtggccgtggccggggccatcagcagcttcatcgcctaccagaagaagaagctgtgcttcaaggaaaatgctgagcagggcgaggtggacatggagagccacagaaatgccaatgctgagcctgctgtgcagaggaccctgctggagaagtag

SEQ ID NO: 146861 - DNA, 558 bp, synthetic construct
  misc_feature 1..558: note = Description of Artificial Sequence: Synthetic coding sequence
  source 1..558: mol_type = other DNA
atggcccggggagctgccctggccctgctgctgtttggcctgctgggcgtgctggtggccgccccagatggcggctttgacctgagtgatgccctgcctgacaatgaaaacaagaagcccacagccatccccaagaagcccagcgctggagatgactttgacctgggagatgctgtggtggatggagaaaatgatgaccccaggcctcccaacccccccaagcccatgcccaaccccaaccccaaccaccccagcagcagcggcagcttcagtgatgctgacctggctgatggagtgtctggaggagagggcaaaggaggcagtgatggcggcggcagccacaggaaggagggggaggaggctgatgcccctggggtcatccctggcatcgtgggcgctgtggtggtggccgtggccggggccatcagcagcttcatcgcctaccagaagaagaagctgtgcttcaaggaaaatgctgagcagggcgaggtggacatggagagccacagaaatgccaatgctgagcctgctgtgcagaggaccctgctggagaagtag

SEQ ID NO: 146862 - DNA, 606 bp, synthetic construct
  misc_feature 1..606: note = Description of Artificial Sequence: Synthetic coding sequence
  source 1..606: mol_type = other DNA
agacgctggggccggcctgctggcacccctggggccagcagcctgcccggccgcacccgctgtgcccatggaggccctggccctgaggaggcccccaccttcagccccaccctcttcctggagcccttccagcgggagaagagcgcctttgtggtgggcgtggccaacagctacatgtggggcggcctgggcagagatggcggctttgacctgagtgatgccctgcctgacaatgaaaacaagaagcccacagccatccccaagaagcccagcgctggagatgactttgacctgggagatgctgtggtggatggagaaaatgatgacccccggccccccaacccccccaagcccatgcccaaccccaaccccaaccaccccagcagcagcggcagcttcagtgatgctgacctggctgatggagtgtctggaggagagggcaagggcggcagtgatggcggcggcagccacaggaaggagggggaggaggctgatgcccctggggtcatccctggcatcgtgggcgctgtggtggtggccgtggccggggccatcagcagcttcatcgcctaccagaagaagaagctgtgcttcaaggagaactag

SEQ ID NO: 146863 - DNA, 438 bp, synthetic construct
  misc_feature 1..438: note = Description of Artificial Sequence: Synthetic coding sequence
  source 1..438: mol_type = other DNA
atggtggcctggaggtctgccttcctggtgtgcctggccttcagcctggccaccctggtgcagaggggcagcggggactttgatgacttcaacctggaggatgctgtgaaggagaccagctctgtgaagccagccctgggcatgtaccacaagctggatggcctgaagcagcagaacttcatcctgagcctcttctggatgctggaggtgctgtaccagggcgtgggctgggccaccttcagcctgaaggccctgggcaagaacctgagcctgaccttccccaccagcggcggcagccgctgcagcctggtgtgtggctgcatcacccccatcagcgcctctgtggtgacctggtgcagccccttctgtgtgtccctgctgagcctgaccaagatgctggtgtctggcttcaaggcccacctggacaaccctggatag

SEQ ID NO: 146864 - DNA, 573 bp, synthetic construct
  misc_feature 1..573: note = Description of Artificial Sequence: Synthetic coding sequence
  source 1..573: mol_type = other DNA
atggtggcctggaggtctgccttcctggtgtgcctggccttcagcctggccaccctggtgcagaggggcagcggggactttgatgacttcaacctggaggatgctgtgaaggagaccagctctgtgaagagaaatgactttgacctggctgatgccctggatgacagaaatgacagagatgatggaagaaggaagcccatcgccggcggcggcggcttcagtgacaaggacctggaggacatcgtgggcggcggggagtacaagccagacaagggcaaaggagatggccgctatggcagcaatgatgaccccggcagcggcatggtggccgagcccggcaccatcgccggcgtggccagcgccctggccatggccctgattggagctgtgagcagctacatctcctaccagcagaagaagttctgcttcagcatccagcagggcctgaatgctgactatgtgaagggggagaacctggaggccgtggtgtgtgaggagccccaggtgaagtacagcaccctgcacacccagagcgctgagcccccacctcctcctgagcccgcccgcatctag

SEQ ID NO: 146865 - DNA, 789 bp, synthetic construct
  misc_feature 1..789: note = Description of Artificial Sequence: Synthetic coding sequence
  source 1..789: mol_type = other DNA
atggtggcctggaggtctgccttcctggtgtgcctggccttcagcctggccaccctggtgcagaggggcagcggggactttgatgacttcaacctggaggatgctgtgaaggagaccagctctgtgaagcagccctgggaccacaccaccaccaccaccaccaacagacctggcaccacccgggccccagccaagcccccaggcagcggcctggacctggctgatgccctggatgaccaggatgatggccgcaggaagccaggcattggaggccgggagcgctggaaccacgtgaccaccaccaccaagaggcctgtgaccacccgggccccagccaacaccctgggcaatgactttgacctggctgatgccctggatgacagaaatgacagagatgatggaagaaggaagcccatcgccggcggcggcggcttcagtgacaaggacctggaggacatcgtgggcggcggggagtacaagccagacaagggcaaaggagatggccgctatggcagcaatgatgaccccggcagcggcatggtggccgagcccggcaccatcgccggcgtggccagcgccctggccatggccctgattggagctgtgagcagctacatctcctaccagcagaagaagttctgcttcagcatccagcagggcctgaatgctgactatgtgaagggggagaacctggaggccgtggtgtgtgaggagccccaggtgaagtacagcaccctgcacacccagagcgctgagcccccacctcctcctgagcccgcccgcatctag

SEQ ID NO: 146866 - DNA, 474 bp, synthetic construct
  misc_feature 1..474: note = Description of Artificial Sequence: Synthetic coding sequence
  source 1..474: mol_type = other DNA
gagaccagctctgtgaagcagccctgggaccacaccaccaccaccaccaccaaccggcccggcaccacccgggccccagccaagcccccaggcagcggcctggacctggctgatgccctggatgaccaggatgatggaagaaggaagccaggcatcggcggccgggagcgctggaaccacgtgaccaccaccaccaagaggcctgtgaccacccgggccccagccaacaccctgggcaatgactttgacctggctgatgccctggatgacagaaatgacagagatgatggccgcaggaagcccatcgccggcggcggcggcttcagtgacaaggacctggaggacatcgtgggcggcggggagtacaagccagacaagggcaaaggagatggccgctatggcagcaatgatgatcctggcagcggcggcttcctgaaccctgaggcccctgtgggccacgtgaagggcaagtag

SEQ ID NO: 146867 - DNA, 570 bp, synthetic construct
  misc_feature 1..570: note = Description of Artificial Sequence: Synthetic coding sequence
  source 1..570: mol_type = other DNA
atggtggcctggaggtctgccttcctggtgtgcctggccttcagcctggccaccctggtgcagaggggcagcggggactttgatgacttcaacctggaggatgctgtgaaggagaccagctctgtgaagcagccctgggaccacaccaccaccaccaccaccaacagacctggcaccacccgggccccagccaagcccccaggcagcggcctggacctggctgatgccctggatgaccaggatgatggccgcaggaagccaggcattggaggaagaggagatggccgctatggcagcaatgatgatcctggcagcggcatggtggccgagcccggcaccatcgccggcgtggccagcgccctggccatggccctgattggagctgtgtcctcctacatctcctaccagcagaagaagttctgcttcagcatccagcagggcctgaatgctgactatgtgaagggggagaacctggaggccgtggtgtgtgaggagccccaggtgaagtacagcaccctgcacacccagagcgctgagcccccacctcctcctgagcccgcccgcatctag

SEQ ID NO: 146868 - DNA, 819 bp, synthetic construct
  misc_feature 1..819: note = Description of Artificial Sequence: Synthetic coding sequence
  source 1..819: mol_type = other DNA
atggtggcctggaggtctgccttcctggtgtgcctggccttcagcctggccaccctggtgcagaggggcagcggggactttgatgacttcaacctggaggatgctgtgaaggagaccagctctgtgaagcagccctgggaccacaccaccaccaccaccaccaacagacctggcaccacccgggccccagccaagcccccaggccccacagagggcagcggcctggacctggctgatgccctggatgaccaggatgatggccgcaggaagccaggcattggaggccgggagcgctggaaccacgtgaccaccaccaccaagaggcctgtgaccacccgggccccagccaacaccctgggcaatgactttgacctggctgatgccctggatgacagaaatgacagagatgatggaagaaggaagcccatcgccggcggcggcggcttcagtgacaaggacctggaggacatcgtgggcggcggggagtacaagccagacaagggcaaaggagatggccgctatggcagcaatgatgaccccggcagcggcatggtggccgagcccggcaccatcgccggcgtggccagcgccctggccatggccctgattggagctgtgagcagctacatctcctaccagcagaagaagttctgcttcagcatccagcacgccgccgccggccaggagggcctgaatgctgactatgtgaagggggagaacctggaggccgtggtgtgtgaggagccccaggtgaagtacagcaccctgcacacccagagcgctgagcccccacctcctcctgagcccgcccgcatctag

SEQ ID NO: 146869 - DNA, 642 bp, synthetic construct
  misc_feature 1..642: note = Description of Artificial Sequence: Synthetic coding sequence
  source 1..642: mol_type = other DNA
atggtggcctggaggtctgccttcctggtgtgcctggccttcagcctggccaccctggtgcagaggggcagcggggactttgatgacttcaacctggaggatgctgtgaaggagaccagctctgtgaagcagcgctggaaccacgtgaccaccaccaccaagaggcctgtgaccacccgggccccagccaacaccctgggcaatgactttgacctggctgatgccctggatgacagaaatgacagagatgatggccgcaggaagcccatcgccggcggcggcggcttcagtgacaaggacctggaggacatcgtgggcggcggggagtacaagccagacaagggcaaaggagatggccgctatggcagcaatgatgatcctggcagcggcatggtggccgagcccggcaccatcgccggcgtggccagcgccctggccatggccctgattggagctgtgtcctcctacatctcctaccagcagaagaagttctgcttcagcatccagcagggcctgaatgctgactatgtgaagggggagaacctggaggccgtggtgtgtgaggagccccaggtgaagtacagcaccctgcacacccagagcgctgagcccccacctcctcctgagcccgcccgcatctag

SEQ ID NO: 146870 - DNA, 1785 bp, synthetic construct
  misc_feature 1..1785: note = Description of Artificial Sequence: Synthetic coding sequence
  source 1..1785: mol_type = other DNA
atggctgctgagagcggggagctgattggagcctgtgagttcatgaaggaccggctgtactttgccaccctgaggaaccggcccaagagcacagtgaacacccactacttcagcattgatgaggagctggtgtatgagaacttctacgccgactttggccccctgaacctggccatggtgtaccgctactgctgcaagctgaacaagaagctgaagagctacagcctgagcaggaagaagatcgtgcactacacctgctttgaccagaggaagagggccaatgctgccttcctgattggagcctatgctgtgatctacctgaagaagaccccagaggaggcctaccgggccctgctgagcggcagcaaccccccctacctgcccttcagagatgccagctttggaaactgcacctacaacctgaccatcctggactgcctgcagggcatcaggaagggcctgcagcacggcttctttgattttgagacctttgatgtggatgaatatgagcactatgaaagagtggagaatggagacttcaactggatcgtgcctgggaagttcctggccttcagcggcccccaccccaagagcaagattgaaaatggctaccccctgcacgcccctgaggcctacttcccctacttcaagaagcacaacgtgacagctgtggtgcggctgaacaagaagatctatgaggccaagcgcttcacagatgctggctttgagcactatgacctcttcttcattgatggcagcacccccagcgacaacatcgtgcggcgcttcctgaacatctgtgagaacacagagggcgccatcgctgtgcactgcaaggccggcctgggccgcacaggcaccctgattgcctgctacgtgatgaagcactaccgcttcacccacgccgagatcatcgcctggatccgcatctgcaggcctggcagcatcatcggcccccagcagcacttcctggaggagaagcaggccagcctgtgggtgcagggcgacatcttccgcagcaagctgaagaaccggcccagcagcgagggcagcatcaacaagatcctgagcggcctggatgacatgagcatcggcggcaacctgagcaagacccagaacatggagagatttggagaggacaacctggaggatgatgatgtggagatgaagaatggcatcacccagggcgacaagctgcgggccctgaagagccagaggcagcccaggaccagccccagctgtgccttcagaagtgatgacaccaagggccaccccagggctgtgtcccagcccttccggctgagcagcagcctgcagggcagcgctgtgaccctgaagaccagcaagatggccctgagccccagcgccacagccaagaggatcaacagaaccagcctgagcagcggggccaccgtgcgctccttcagcatcaacagccggctggccagcagcctgggcaacctgaatgctgccacagatgatcctgagaacaagaagaccagcagcagcagcaaggccggcttcaccgccagccccttcaccaacctgctgaatggcagcagccagcccaccaccaggaactacccagagctgaacaacaaccagtacaacagaagcagcaacagcaatggaggcaacctgaacagccccccaggcccccacagcgccaagacagaggagcacaccaccatcctgcggcccagctacacaggcctgagcagcagcagcgcccgcttcctgagccgcagcatccccagcctgcagagtgaatatgtgcactactag

SEQ ID NO: 146871 - DNA, 1872 bp, synthetic construct
  misc_feature 1..1872: note = Description of Artificial Sequence: Synthetic coding sequence
  source 1..1872: mol_type = other DNA
atggctgctgagagcggggagctgattggagcctgtgagttcatgaaggaccggctgtactttgccaccctgaggaaccggcccaagagcacagtgaacacccactacttcagcattgatgaggagctggtgtatgagaacttctacgccgactttggccccctgaacctggccatggtgtaccgctactgctgcaagctgaacaagaagctgaagagctacagcctgagcaggaagaagatcgtgcactacacctgctttgaccagaggaagagggccaatgctgccttcctgattggagcctatgctgtgatctacctgaagaagaccccagaggaggcctaccgggccctgctgagcggcagcaaccccccctacctgcccttcagagatgccagctttggaaactgcacctacaacctgaccatcctggactgcctgcagggcatcaggaagggcctgcagcacggcttctttgattttgagacctttgatgtggatgaatatgagcactatgaaagagtggagaatggagacttcaactggatcgtgcctgggaagttcctggccttcagcggcccccaccccaagagcaagattgaaaatggctaccccctgcacgcccctgaggcctacttcccctacttcaagaagcacaacgtgacagctgtggtgcggctgaacaagaagatctatgaggccaagcgcttcacagatgctggctttgagcactatgacctcttcttcattgatggcagcacccccagcgacaacatcgtgcggcgcttcctgaacatctgtgagaacacagagggcgccatcgctgtgcactgcaaggccggcctgggccgcacaggcaccctgattgcctgctacgtgatgaagcactaccgcttcacccacgccgagatcatcgcctggatccgcatctgcaggcctggcagcatcatcggcccccagcagcacttcctggaggagaagcaggccagcctgtgggtgcagggcgacatcttccgcagcaagctgaagaaccggcccagcagcgagggcagcatcaacaagatcctgagcggcctggatgacatgagcatcggcggcaacctgagcaagacccagaacatggagagatttggagaggacaacctggaggatgatgatgtggagatgaagaatggcatcacccagggcgacaagctgcgggccctgaagagccagaggcagcccaggaccagccccagctgtgccttcagaagtgatgacaccaagggccaccccagggctgtgtcccagcccttccggctgagcagcagcctgcagggcagcgctgtgaccctgaagaccagcaagatggccctgagccccagcgccacagccaagaggatcaacagaaccagcctgagcagcggggccaccgtgcgctccttcagcatcaacagccggctggccagcagcctgggcaacctgaatgctgccacagatgatcctgagaacaagaagaccagcagcagcagcaaggccggcttcaccgccagccccttcaccaacctgctgaatggcagcagccagcccaccaccaggaactacccagagctgaacaacaaccagtacaacagaagcagcaacagcaatggaggcaacctgaacagccccccaggcccccacagcgccaagacagaggagcacaccaccatcctgcggcccagctacacaggcctgagcagcagcagcgcccgcttcctgagccgcagcatccctgtgtctgcccagaccccacctcctggcccccagaaccctgagtgcaacttctgtgccctgcccagccagccccggctgccccccaagaagttcaacagcgccaaggaggccttctag

SEQ ID NO: 146872 - DNA, 1152 bp, synthetic construct
  misc_feature 1..1152: note = Description of Artificial Sequence: Synthetic coding sequence
  source 1..1152: mol_type = other DNA
atggctgctgagagcggggagctgattggagcctgtgagttcatgaaggaccggctgtactttgccaccctgaggaaccggcccaagagcacagtgaacacccactacttcagcattgatgaggagctggtgtatgagaacttctacgccgactttggccccctgaacctggccatggtgtaccgctactgctgcaagctgaacaagaagctgaagagctacagcctgagcaggaagaagatcgtgcactacacctgctttgaccagaggaagagggccaatgctgccttcctgattggagcctatgctgtgatctacctgaagaagaccccagaggaggcctaccgggccctgctgagcggcagcaaccccccctacctgcccttcagagatgccagctttggaaactgcacctacaacctgaccatcctggactgcctgcagggcatcaggaagggcctgcagcacggcttctttgattttgagacctttgatgtggatgaatatgagcactatgaaagagtggagaatggagacttcaactggatcgtgcctgggaagttcctggccttcagcggcccccaccccaagagcaagattgaaaatggctaccccctgcacgcccctgaggcctacttcccctacttcaagaagcacaacgtgacagctgtggtgcggctgaacaagaagatctatgaggccaagcgcttcacagatgctggctttgagcactatgacctcttcttcattgatggcagcacccccagcgacaacatcgtgcggcgcttcctgaacatctgtgagaacacagagggcgccatcgctgtgcactgcaaggccggcctgggccgcacaggcaccctgattgcctgctacgtgatgaagcactaccgcttcacccacgccgagatcatcgcctggatccgcatctgcaggcctggcagcatcatcggcccccagcagcacttcctggaggagaagcaggccagcctgtgggtgcagggcgacatcttccgcagcaagctgaagaaccggcccagcagcgagggcagcatcaacaagatcctgagcggcctggatgacatgagcatcggcggcaacctgagcaagacccagaacatggagagatttggagaggtgtccttcccctag

SEQ ID NO: 146873 - DNA, 576 bp, synthetic construct
  misc_feature 1..576: note = Description of Artificial Sequence: Synthetic coding sequence
  source 1..576: mol_type = other DNA
atggctgctgagagcggggagctgattggagcctgtgagttcatgaaggaccggctgtactttgccaccctgaggaaccggcccaagagcacagtgaacacccactacttcagcattgatgaggagctggtgtatgagaacttctacgccgactttggccccctgaacctggccatggtgtaccgctactgctgcaagctgaacaagaagctgaagagctacagcctgagcaggaagaagatcgtgcactacacctgctttgaccagaggaagagggccaatgctgccttcctgattggagcctatgctgtgatctacctgaagaagaccccagaggaggcctaccgggccctgctgagcggcagcaaccccccctacctgcccttcagagatgccagctttggaaactgcacctacaacctgaccatcctggactgcctgcagggcatcaggaagggcctgcagcacggcttctttgattttgagacctttgatgtggatgaatatgagcactatgaggtgatcctcttcacccccctgaagcccaccttcctgatcagcaagagcatcatgtag

SEQ ID NO: 146874 - DNA, 822 bp, synthetic construct
  misc_feature 1..822: note = Description of Artificial Sequence: Synthetic coding sequence
  source 1..822: mol_type = other DNA
atgggcaacttcctgagccgggagaacaaggtgcaggtgatcagcgagagtgaccggctgtactttgccaccctgaggaaccggcccaagagcacagtgaacacccactacttcagcattgatgaggagctggtgtatgagaacttctatgctgactttggccccctgaacctggccatggtgtaccgctactgctgcaagctgaacaagaagctgaagagctacagcctgagcaggaagaagatcgtgcactacacctgctttgaccagaggaagagggccaatgctgccttcctgattggagcctatgctgtgatctacctgaagaagaccccagaggaggcctaccgggccctgctgagcggcagcaaccccccctacctgcccttcagagatgccagctttggaaactgcacctacaacctgaccatcctggactgcctgcagggcatcaggaagggcctgcagcacggcttctttgattttgagacctttgatgtggatgaatatgagcactatgagcgggtggagaatggagacttcaactggatcgtgcctgggaagttcctggccttcagcggcccccaccccaagagcaagattgaaaatggctaccccctgcacgcccctgaggcctacttcccctacttcaagaagcacaacgtgacagctgtggtgcggctgaacaagaagatctatgaggccaagcgcttcacagatgctggctttgagcactatgacctcttcttcattgatggcagcacccccagcgacaacatcgtgcggcgcttcctgaacatctgtgaaaatacagagggctag

SEQ ID NO: 146875 - DNA, 1698 bp, synthetic construct
  misc_feature 1..1698: note = Description of Artificial Sequence: Synthetic coding sequence
  source 1..1698: mol_type = other DNA
atggtgtaccgctactgctgcaagctgaacaagaagctgaagagctacagcctgagcaggaagaagatcgtgcactacacctgctttgaccagaggaagagggccaatgctgccttcctgattggagcctatgctgtgatctacctgaagaagaccccagaggaggcctaccgggccctgctgagcggcagcaaccccccctacctgcccttcagagatgccagctttggaaactgcacctacaacctgaccatcctggactgcctgcagggcatcaggaagggcctgcagcacggcttctttgattttgagacctttgatgtggatgaatatgagcactatgaaagagtggagaatggagacttcaactggatcgtgcctgggaagttcctggccttcagcggcccccaccccaagagcaagattgaaaatggctaccccctgcacgcccctgaggcctacttcccctacttcaagaagcacaacgtgacagctgtggtgcggctgaacaagaagatctatgaggccaagcgcttcacagatgctggctttgagcactatgacctcttcttcattgatggcagcacccccagcgacaacatcgtgcggcgcttcctgaacatctgtgagaacacagagggcgccatcgctgtgcactgcaaggccggcctgggccgcacaggcaccctgattgcctgctacgtgatgaagcactaccgcttcacccacgccgagatcatcgcctggatccgcatctgcaggcctggcagcatcatcggcccccagcagcacttcctggaggagaagcaggccagcctgtgggtgcagggcgacatcttccgcagcaagctgaagaaccggcccagcagcgagggcagcatcaacaagatcctgagcggcctggatgacatgagcatcggcggcaacctgagcaagacccagaacatggagagatttggagaggacaacctggaggatgatgatgtggagatgaagaatggcatcacccagggcgacaagctgcgggccctgaagagccagaggcagcccaggaccagccccagctgtgccttcagaagtgatgacaccaagggccaccccagggctgtgtcccagcccttccggctgagcagcagcctgcagggcagcgctgtgaccctgaagaccagcaagatggccctgagccccagcgccacagccaagaggatcaacagaaccagcctgagcagcggggccaccgtgcgctccttcagcatcaacagccggctggccagcagcctgggcaacctgaatgctgccacagatgatcctgagaacaagaagaccagcagcagcagcaaggccggcttcaccgccagccccttcaccaacctgctgaatggcagcagccagcccaccaccaggaactacccagagctgaacaacaaccagtacaacagaagcagcaacagcaatggaggcaacctgaacagccccccaggcccccacagcgccaagacagaggagcacaccaccatcctgcggcccagctacacaggcctgagcagcagcagcgcccgcttcctgagccgcagcatccctgtgtctgcccagaccccacctcctggcccccagaaccctgagtgcaacttctgtgccctgcccagccagccccggctgccccccaagaagttcaacagcgccaaggaggccttctag

SEQ ID NO: 146876 - DNA, 1833 bp, synthetic construct
  misc_feature 1..1833: note = Description of Artificial Sequence: Synthetic coding sequence
  source 1..1833: mol_type = other DNA
atggctgctgagagcggggagctgattggagcctgtgagttcatgaaggaccggctgtactttgccaccctgaggaaccggcccaagagcacagtgaacacccactacttcagcattgatgaggagctggtgtatgagaacttctacgccgactttggccccctgaacctggccatggtgtaccgctactgctgcaagctgaacaagaagctgaagagctacagcctgagcaggaagaagatcgtgcactacacctgctttgaccagaggaagagggccaatgctgccttcctgattggagcctatgctgtgatctacctgaagaagaccccagaggaggcctaccgggccctgctgagcggcagcaaccccccctacctgcccttcagagatgccagctttggaaactgcacctacaacctgaccatcctggactgcctgcagggcatcaggaagggcctgcagcacggcttctttgattttgagacctttgatgtggatgaatatgagcactatgaaagagtggagaatggagacttcaactggatcgtgcctgggaagttcctggccttcagcggcccccaccccaagagcaagattgaaaatggctaccccctgcacgcccctgaggcctacttcccctacttcaagaagcacaacgtgacagctgtggtgcggctgaacaagaagatctatgaggccaagcgcttcacagatgctggctttgagcactatgacctcttcttcattgatggcagcacccccagcgacaacatcgtgcggcgcttcctgaacatctgtgagaacacagagggcgccatcgctgtgcactgcaaggccggcctgggccgcacaggcaccctgattgcctgctacgtgatgaagcactaccgcttcacccacgccgagatcatcgcctggatccgcatctgcaggcctggcagcatcatcggcccccagcagcacttcctggaggagaagcaggccagcctgtgggtgcagggcgacatcttccgcagcaagctgaagaaccggcccagcagcgagggcagcatcaacaagatcctgagcggcctggatgacatgagcatcggcggcaacctgagcaagacccagaacatggagagatttggagaggacaacctggaggatgatgatgtggagatgaagaatggcatcacccagggcgacaagctgcgggccctgaagagccagaggcagcccaggaccagccccagctgtgccttcagaagtgatgacaccaagggccaccccagggctgtgtcccagcccttccggctgagcagcagcctgcagggcagcgctgtgaccctgaagaccagcaagatggccctgagccccagcgccacagccaagaggatcaacagaaccagcctgagcagcggggccaccgtgcgctccttcagcatcaacagccggctggccagcagcctgggcaacctgaatgctgccacagatgatcctgagaacaagaagaccagcagcagcagcaaggccggcttcaccgccagccccttcaccaacctgctgaatggcagcagccagcccaccaccaggaactacccagagctgaacaacaaccagtacaacagaagcagcaacagcaatggaggcaacctgaacagccccccaggcccccacagcgccaagacagaggagcacaccaccatcctgcggcccagctacacaggcctgagcagcagcagcgcccgcttcctgagccgcagcatcccctgcagctgcctgctgctggtgttcaggaagcccttcctgggcagccccctgctgagcctgcccatcagccacctgtag

SEQ ID NO: 146877 - DNA, 1416 bp, synthetic construct
  misc_feature 1..1416: note = Description of Artificial Sequence: Synthetic coding sequence
  source 1..1416: mol_type = other DNA
atgaagaggaagtcagaaagaagaagctcctgggccgccgccccaccctgcagccgccgctgcagcagcaccagccctggggtgaagaagatccgcagcagcacccagcaggaccccaggagaagagacccccaggatgatgtgtacctggacatcacagaccggctgtgctttgccatcctgtacagccggcccaagagcgccagcaatgtgcactacttcagcattgacaatgagctggagtatgagaacttctatgctgactttggccccctgaacctggccatggtgtaccgctactgctgcaagatcaacaagaagctgaagagcatcaccatgctgaggaagaagatcgtgcacttcaccggcagtgaccagaggaagcaggccaatgctgccttcctggtgggctgctacatggtgatctacctgggccgcaccccagaggaggcctaccgcatcctgatctttggagagaccagctacatccccttcagagatgctgcctacggcagctgcaacttctacatcaccctgctggactgcttccacgctgtgaagaaggccatgcagtatggcttcctgaacttcaacagcttcaacctggatgaatatgagcactatgagaaggccgagaatggagacctgaactggatcatcccagaccgcttcatcgccttctgtggcccccacagccgggcccggctggagagcggctaccaccagcacagccctgagacctacatccagtacttcaagaaccacaacgtgaccaccatcatccggctgaacaagaggatgtatgatgccaagcgcttcacagatgctggctttgaccaccacgacctcttctttgctgatggcagcacccccacagatgccatcgtgaaggagttcctggacatctgtgaaaatgctgagggcgccatcgctgtgcactgcaaggccggcctgggccgcacaggcaccctgattgcctgctacatcatgaagcactacaggatgacagctgctgagaccatcgcctgggtgcgcatctgcaggcctggctctgtgattggcccccagcagcagttcctggtgatgaagcagaccaacctgtggctggagggggactacttccggcagaagctgaagggccaggagaatggccagcaccgggccgccttcagcaagctgctgtctggagtggatgacatcagcatcaatggagtggagaaccaggaccagcaggagcctgagccctacagtgatgatgatgagatcaatggagtgacccagggcgaccggctgcgggccctgaagagccggcggcagagcaagaccaatgccatccccctgacagatggctggctgagccaggccgtgaccttcctggaccggctgctgatctggctgggcatccacaaggactag

SEQ ID NO: 146878 - DNA, 1458 bp, synthetic construct
  misc_feature 1..1458: note = Description of Artificial Sequence: Synthetic coding sequence
  source 1..1458: mol_type = other DNA
atgaagaggaagtcagaaagaagaagctcctgggccgccgccccaccctgcagccgccgctgcagcagcaccagccctggggtgaagaagatccgcagcagcacccagcaggaccccaggagaagagacccccaggatgatgtgtacctggacatcacagaccggctgtgctttgccatcctgtacagccggcccaagagcgccagcaatgtgcactacttcagcattgacaatgagctggagtatgagaacttctatgctgactttggccccctgaacctggccatggtgtaccgctactgctgcaagatcaacaagaagctgaagagcatcaccatgctgaggaagaagatcgtgcacttcaccggcagtgaccagaggaagcaggccaatgctgccttcctggtgggctgctacatggtgatctacctgggccgcaccccagaggaggcctaccgcatcctgatctttggagagaccagctacatccccttcagagatgctgcctacggcagctgcaacttctacatcaccctgctggactgcttccacgctgtgaagaaggccatgcagtatggcttcctgaacttcaacagcttcaacctggatgaatatgagcactatgagaaggccgagaatggagacctgaactggatcatcccagaccgcttcatcgccttctgtggcccccacagccgggcccggctggagagcggctaccaccagcacagccctgagacctacatccagtacttcaagaaccacaacgtgaccaccatcatccggctgaacaagaggatgtatgatgccaagcgcttcacagatgctggctttgaccaccacgacctcttctttgctgatggcagcacccccacagatgccatcgtgaaggagttcctggacatctgtgaaaatgctgagggcgccatcgctgtgcactgcaaggccggcctgggccgcacaggcaccctgattgcctgctacatcatgaagcactacaggatgacagctgctgagaccatcgcctgggtgcgcatctgcaggcctggctctgtgattggcccccagcagcagttcctggtgatgaagcagaccaacctgtggctggagggggactacttccggcagaagctgaagggccaggagaatggccagcaccgggccgccttcagcaagctgctgtctggagtggatgacatcagcatcaatggagtggagaaccaggaccagcaggagcctgagccctacagtgatgatgatgagatcaatggagtgacccagggcgaccggctgcgggccctgaagagccggcggcagagcaagaccaatgccatccccctgacctgccccctggccgtgctgaccagcgccctgtgcagcgtggtgatctggtggatcgtgtgtgactacatcctgcccatcctgctcttctgcctggatggcttccgcacccagtag

SEQ ID NO: 146879 - DNA, 1380 bp, synthetic construct
  misc_feature 1..1380: note = Description of Artificial Sequence: Synthetic coding sequence
  source 1..1380: mol_type = other DNA
atgaagaggaagtcagaaagaagaagctcctgggccgccgccccaccctgcagccgccgctgcagcagcaccagccctggggtgaagaagatccgcagcagcacccagcaggaccccaggagaagagacccccaggatgatgtgtacctggacatcacagaccggctgtgctttgccatcctgtacagccggcccaagagcgccagcaatgtgcactacttcagcattgacaatgagctggagtatgagaacttctatgctgactttggccccctgaacctggccatggtgtaccgctactgctgcaagatcaacaagaagctgaagagcatcaccatgctgaggaagaagatcgtgcacttcaccggcagtgaccagaggaagcaggccaatgctgccttcctggtgggctgctacatggtgatctacctgggccgcaccccagaggaggcctaccgcatcctgatctttggagagaccagctacatccccttcagagatgctgcctacggcagctgcaacttctacatcaccctgctggactgcttccacgctgtgaagaaggccatgcagtatggcttcctgaacttcaacagcttcaacctggatgaatatgagcactatgagaaggccgagaatggagacctgaactggatcatcccagaccgcttcatcgccttctgtggcccccacagccgggcccggctggagagcggctaccaccagcacagccctgagacctacatccagtacttcaagaaccacaacgtgaccaccatcatccggctgaacaagaggatgtatgatgccaagcgcttcacagatgctggctttgaccaccacgacctcttctttgctgatggcagcacccccacagatgccatcgtgaaggagttcctggacatctgtgaaaatgctgagggcgccatcgctgtgcactgcaaggccggcctgggccgcacaggcaccctgattgcctgctacatcatgaagcactacaggatgacagctgctgagaccatcgcctgggtgcgcatctgcaggcctggctctgtgattggcccccagcagcagttcctggtgatgaagcagaccaacctgtggctggagggggactacttccggcagaagctgaagggccaggagaatggccagcaccgggccgccttcagcaagctgctgtctggagtggatgacatcagcatcaatggagtggagaaccaggaccagcaggagcctgagccctacagtgatgatgatgagatcaatggagtgacccagggcgaccggctgcgggccctgaagagccggcggcagagcaagaccaatgccatccccctgaccctgagcatcagcaggaccaagacagtgctgaggtag

SEQ ID NO: 146880 - DNA, 1497 bp, synthetic construct
  misc_feature 1..1497: note = Description of Artificial Sequence: Synthetic coding sequence
  source 1..1497: mol_type = other DNA
atgaagaggaagtcagaaagaagaagctcctgggccgccgccccaccctgcagccgccgctgcagcagcaccagccctggggtgaagaagatccgcagcagcacccagcaggaccccaggagaagagacccccaggatgatgtgtacctggacatcacagaccggctgtgctttgccatcctgtacagccggcccaagagcgccagcaatgtgcactacttcagcattgacaatgagctggagtatgagaacttctatgctgactttggccccctgaacctggccatggtgtaccgctactgctgcaagatcaacaagaagctgaagagcatcaccatgctgaggaagaagatcgtgcacttcaccggcagtgaccagaggaagcaggccaatgctgccttcctggtgggctgctacatggtgatctacctgggccgcaccccagaggaggcctaccgcatcctgatctttggagagaccagctacatccccttcagagatgctgcctacggcagctgcaacttctacatcaccctgctggactgcttccacgctgtgaagaaggccatgcagtatggcttcctgaacttcaacagcttcaacctggatgaatatgagcactatgagaaggccgagaatggagacctgaactggatcatcccagaccgcttcatcgccttctgtggcccccacagccgggcccggctggagagcggctaccaccagcacagccctgagacctacatccagtacttcaagaaccacaacgtgaccaccatcatccggctgaacaagaggatgtatgatgccaagcgcttcacagatgctggctttgaccaccacgacctcttctttgctgatggcagcacccccacagatgccatcgtgaaggagttcctggacatctgtgaaaatgctgagggcgccatcgctgtgcactgcaaggccggcctgggccgcacaggcaccctgattgcctgctacatcatgaagcactacaggatgacagctgctgagaccatcgcctgggtgcgcatctgcaggcctggctctgtgattggcccccagcagcagttcctggtgatgaagcagaccaacctgtggctggagggggactacttccggcagaagctgaagggccaggagaatggccagcaccgggccgccttcagcaagctgctgtctggagtggatgacatcagcatcaatggagtggagaaccaggaccagcaggagcctgagccctacagtgatgatgatgagatcaatggagtgacccagggcgaccggctgcgggccctgaagagccggcggcagagcaagaccaatgccatccccctgaccgtcatcctgcagagctctgtgcagagctgcaagaccagcgagcccaacatcagcggcagcgctggcatcaccaagaggaccaccaggtctgccagcaggaagagctctgtgaagagcctgagcatcagcaggaccaagacagtgctgaggtag

SEQ ID NO: 146881 - DNA, 1386 bp, synthetic construct
  misc_feature 1..1386: note = Description of Artificial Sequence: Synthetic coding sequence
  source 1..1386: mol_type = other DNA
atgagccgggagggcgctggggccgccctggtggccgaggtgatcaaggaccggctgtgctttgccatcctgtacagccggcccaagagcgccagcaatgtgcactacttcagcattgacaatgagctggagtatgagaacttctacgccgactttggccccctgaacctggccatggtgtaccgctactgctgcaagatcaacaagaagctgaagagcatcaccatgctgaggaagaagatcgtgcacttcaccggcagtgaccagaggaagcaggccaatgctgccttcctggtgggctgctacatggtgatctacctgggccgcaccccagaggaggcctaccgcatcctgatctttggagagaccagctacatccccttcagagatgctgcctacggcagctgcaacttctacatcaccctgctggactgcttccacgctgtgaagaaggccatgcagtatggcttcctgaacttcaacagcttcaacctggatgaatatgagcactatgagaaggcagaaaatggagacctgaactggatcatcccagaccgcttcatcgccttctgtggcccccacagccgggcccggctggagagcggctaccaccagcacagccctgagacctacatccagtacttcaagaaccacaacgtgaccaccatcatccggctgaacaagaggatgtatgatgccaagcgcttcacagatgctggctttgaccaccacgacctcttctttgctgatggcagcacccccacagatgccatcgtgaaggagttcctggacatctgtgaaaatgctgagggcgccatcgctgtgcactgcaaggccggcctgggccgcacaggcaccctcatcgcctgctacatcatgaagcactacaggatgacagctgctgagaccatcgcctgggtgcgcatctgccggcccggcagcgtcatcggcccccagcagcagttcctggtgatgaagcagaccaacctgtggctggagggggactacttccggcagaagctgaagggccaggagaatggccagcacagagctgccttcagcaagctgctgagcggcgtggatgacatcagcatcaacggggtggagaaccaggaccagcaggagcctgagccctacagtgatgatgatgagatcaacggggtgacccagggcgaccggctgcgggccctgaagagccggcggcagagcaagaccaatgccatccccctgaccgtcatcctgcagagctctgtgcagagctgcaagaccagcgagcccaacatcagcggcagcgctggcatcaccaagaggaccaccaggtctgccagcaggaagagctctgtgaagagcctgagcatcagcaggaccaagacagtgctgaggtag

SEQ ID NO: 146882 - DNA, 1458 bp, synthetic construct; identical to SEQ ID NO: 146878
  misc_feature 1..1458: note = Description of Artificial Sequence: Synthetic coding sequence
  source 1..1458: mol_type = other DNA

SEQ ID NO: 146883 - DNA, 5346 bp, synthetic construct
  misc_feature 1..5346: note = Description of Artificial Sequence: Synthetic coding sequence
  source 1..5346: mol_type = other DNA
atgtctggagaggtgcggctgcggcagctggagcagttcatcctggatggccctgcccagaccaacggccagtgcttctctgtggagaccctgctggacatcctgatctgcctgtatgatgagtgcaacaacagccccctgcggcgggagaagaacatcctggagtacctggagtgggccaagcccttcaccagcaaggtgaagcagatgaggctgcacagagaagattttgagatcctgaaggtgattggccgcggggccttcggggaggtggccgtggtgaagctgaagaatgctgacaaggtgtttgccatgaagatcctgaacaagtgggagatgctgaagagagctgagacagcctgcttccgggaggagagagatgtgctggtgaatggagacaacaagtggatcaccaccctgcactacgccttccaggatgacaacaacctgtacctggtgatggactactacgtgggcggggacctgctgaccctgctgagcaagtttgaggaccggctgcctgaggacatggcccgcttctacctggccgagatggtgattgccattgattctgtgcaccagctgcactacgtgcaccgggacatcaagccagacaacatcctgatggacatgaatggccacatccggctggccgactttggcagctgcctgaagctgatggaggatggcaccgtgcagagctctgtggccgtgggcaccccagactacatcagccctgagatcctgcaggccatggaggatggcaagggccgctatggcccagaatgtgactggtggagcctgggcgtgtgcatgtatgagatgctgtatggagagacccccttctacgccgagagcctggtggagacctacggcaagatcatgaaccacaaggagcgcttccagtttcctgcccaggtgacagatgtgtctgaaaatgccaaggacctgatcagaagactcatctgcagccgggagcaccggctgggccagaatggaattgaggacttcaagaagcaccccttcttcagcggcatcgactgggacaacatccggaactgtgaggccccctacatccctgaggtgagcagccccacagacaccagcaactttgatgtggatgatgactgcctgaagaacagcgagaccatgcccccacccacccacacagccttcagcggccaccacctgccctttgtgggcttcacctacaccagcagctgtgtgctgagtgacaggagctgcctgcgggtgacagctggccccaccagcctggacctggatgtgaatgtgcagaggaccctggacaacaacctggccacagaggcctatgaaagacgcatcaagaggctggagcaggagaagctggagctgagcaggaagctgcaggagagcacccagacagtgcaggccctgcagtacagcacagtggatggccccctgacagccagcaaggacctggagatcaagaacctgaaggaggagattgagaagctgaggaagcaggtgacagagagcagccacctggagcagcagctggaggaggccaatgctgtgcggcaggagctggatgatgccttccggcagatcaaggcctatgagaagcagatcaagaccctgcagcaggagcgggaggacctgaacaaggagctggtgcaggccagcgagcggctgaagaaccagagcaaggagctgaaggatgcccactgccagaggaagctggccatgcaggagttcatggagatcaatgaaaggctgacagagctgcacacccagaagcagaagctggcccggcacgtgcgggacaaggaggaggaggtggacctggtgatgcagaaggtggagagcctgcggcaggagctgcggaggacagagcgggccaagaaggagctggaggtgcacacagaggccctggccgctgaggccagcaaggacaggaagctgcgggagcagagcgagcactacagcaagcagctggagaatgagctggagggcctgaagcagaagcagatctcctacagccctggggtgtgcagcattgagcaccagcaggagatcaccaagctgaagacagacctggagaagaagagcatcttctatgaggaggagctgagcaagcgggagggcatccacgccaatgagatcaagaacctgaagaaggagctgcatgattctgagggccagcagctggccctgaacaaggagatcatgatcctgaaggacaagctggagaagacccggcgggagagccagagcgagcgggaggagtttgaaagtgagttcaagcagcagtatgagcgggagaaggtgctgctgacagaggagaacaagaagctgaccagcgagctggacaagctgaccaccctgtatgagaacctgagcatccacaaccagcagctggaggaggaggtgaaggacctggccgacaagaaggagagcgtggcccactgggaggcccagatcacagagatcatccagtgggtgtctgatgagaaggatgcccggggctacctgcaggccctggccagcaagatgacagaggagctggaggccctgaggaacagcagcctgggcacccgggccacagacatgccctggaagatgagaagatttgccaagctggacatgtctgcccggctggagctgcagagcgccctggatgctgagatccgggccaagcaggccatccaggaggagctgaacaaggtgaaggccagcaacatcatcacagagtgcaagctgaaggacagcgagaagaagaacctggagctgctgtctgaaattgagcagctgatcaaggacacagaggagctgcggtctgagaagggcatcgagcaccaggacagccagcacagcttcctggccttcctgaacacccccacagatgccctggaccagtttgaaacagtggacagcacccccctgtctgtgcacacccccaccctgaggaagaagggctgccccggcagcacaggcttcccccccaagaggaagacccaccagttctttgtgaagagcttcaccacccccaccaagtgccaccagtgcaccagcctgatggtgggcctcatccggcagggctgcagctgtgaggtgtgtggcttcagctgccacatcacctgtgtgaacaaggcccccaccacctgccctgtgcccccagagcagaccaagggccccctgggcatcgacccccagaagggcatcggcacagcctatgagggccacgtgcgcatccccaagccagctggggtgaagaagggctggcagagggccctggccatcgtgtgtgacttcaagctgttcctgtatgacattgctgagggcaaggccagccagcccagcgtggtgatcagccaggtgattgacatgagagatgaggagttctctgtgtcctctgtgctggccagtgatgtgatccacgccagcaggaaggacatcccctgcatcttccgggtgacagccagccagctgagcgccagcaacaacaagtgcagcatcctgatgctggccgacacagaaaatgagaagaacaagtgggtgggcgtgctgtctgagctgcacaagatcctgaagaagaacaagttccgggacagatctgtgtatgtgcccaaggaggcctatgacagcaccctgcccctcatcaagaccacccaggccgccgccatcatcgaccacgagcgcatcgccctgggcaatgaggagggcctgtttgtggtgcacgtgaccaaggatgagatcatccgggtgggggacaacaagaagatccaccagatcgagctgatccccaatgaccagctggtggccgtcatctctggaagaaacagacatgtgcggctcttccccatgtctgccctggatggccgggagacagacttctacaagctgtctgagaccaagggctgccagacagtgaccagcggcaaggtgagacatggagccctgacctgcctgtgtgtggccatgaagaggcaggtgctgtgctatgagctgttccagagcaagaccaggcacaggaagttcaaggagatccaggtgccctacaacgtgcagtggatggccatcttcagcgagcagctgtgtgtgggcttccagagcggcttcctgcgctaccccctgaatggagagggcaacccctacagcatgctgcacagcaatgaccacaccctgtccttcatcgcccaccagcccatggatgccatctgtgctgtggagatcagcagcaaggagtacctgctgtgcttcaacagcatcggcatctacacagactgccagggccgccgcagccggcagcaggagctgatgtggccagccaaccccagcagctgctgctacaatgccccctacctgtctgtgtacagtgaaaatgctgtggacatctttgatgtgaacagcatggagtggatccagaccctgcccctgaagaaggtgcggcccctgaacaatgaaggcagcctgaacctgctgggcctggagaccatccgcctcatctacttcaagaacaagatggccgagggagatgagctggtggtgcctgagaccagtgacaacagcaggaagcagatggtgaggaacatcaacaacaagaggcgctacagcttccgggtgcctgaggaggagaggatgcagcagaggcgggagatgctgcgggaccctgagatgaggaacaagctgatcagcaaccccaccaacttcaaccacatcgcccacatgggccctggagatggcatccagatcctgaaggacctgcccatgcctggcttcccctaccccagcccccaccaccacagcggcctcatcagcagccccatcaactttgagcacatctaccacatgacagtgaacagcgctgagaagttcctgagcccagacagcatcaaccctgagtacagccccagcctgcggtctgtgcccggcacccccagcttcatgaccctgaggaacccccggccccaggagagcaggacagtgttcagcggctctgtgtccatccccagcatcaccaagagcaggcctgagcccggccgctccatgtctgccagcagcggcctgagcgcccggagcagcgcccagaatggaagtgccctgaagcgggagttcagcggcggcagctacagcgccaagaggcagcccatgcccagccccagcgagggcagcctgagcagcggcggcatggaccagggcagtgatgccccagcccgggactttgatggagaggacagcgacagccccaggcacagcacagccagcaacagcagcaacctgagcagcccccccagccctgccagccccaggaagaccaagagcctgagcctggagagcacagaccggggctcctgggacccctag

SEQ ID NO: 146884 - DNA, 2457 bp, synthetic construct
  misc_feature 1..2457: note = Description of Artificial Sequence: Synthetic coding sequence
  source 1..2457: mol_type = other DNA
atgatcctgaaggacaagctggagaagacccggcgggagagccagagcgagcgggaggagtttgaaagtgagttcaagcagcagtatgagcgggagaaggtgctgctgacagaggagaacaagaagctgaccagcgagctggacaagctgaccaccctgtatgagaacctgagcatccacaaccagcagctggaggaggaggtgaaggacctggccgacaagaaggagagcgtggcccactgggaggcccagatcacagagatcatccagtgggtgtctgatgagaaggatgcccggggctacctgcaggccctggccagcaagatgacagaggagctggaggccctgaggaacagcagcctgggcacccgggccacagacatgccctggaagatgagaagatttgccaagctggacatgtctgcccggctggagctgcagagcgccctggatgctgagatccgggccaagcaggccatccaggaggagctgaacaaggtgaaggccagcaacatcatcacagagtgcaagctgaaggacagcgagaagaagaacctggagctgctgtctgaaattgagcagctgatcaaggacacagaggagctgcggtctgagaagggcatcgagcaccaggacagccagcacagcttcctggccttcctgaacacccccacagatgccctggaccagtttgaggacagcttcagcagcagcagcagcagcctgattgacttcctggatgacacagatcctgtggagaacacctacgtgtggaaccccagcgtgaagttccacatccagagccgcagcaccagccccagcaccagcagcgaggccgagcctgtgaagacagtggacagcacccccctgtctgtgcacacccccaccctgaggaagaagggctgccccggcagcacaggcttcccccccaagaggaagacccaccagttctttgtgaagagcttcaccacccccaccaagtgccaccagtgcaccagcctgatggtgggcctcatccggcagggctgcagctgtgaggtgtgtggcttcagctgccacatcacctgtgtgaacaaggcccccaccacctgccctgtgcccccagagcagaccaagggccccctgggcatcgacccccagaagggcattggaacagcctatgagggccacgtgcgcatccccaagccagctggggtgaagaagggctggcagagggccctggccatcgtgtgtgacttcaagctgttcctgtatgacattgctgagggcaaggccagccagcccagcgtggtgatcagccaggtgattgacatgagagatgaggagttctctgtgtcctctgtgctggccagtgatgtgattcatgccagcaggaaggacatcccctgcatcttccgggtgacagccagccagctgagcgccagcaacaacaagtgcagcatcctgatgctggccgacacagaaaatgagaagaacaagtgggtgggcgtgctgtctgagctgcacaagatcctgaagaagaacaagttccgggacagatctgtgtatgtgcccaaggaggcctatgacagcaccctgcccctcatcaagaccacccaggccgccgccatcatcgaccacgagagaattgccctgggcaatgaggagggcctgtttgtggtgcacgtgaccaaggatgagatcatccgggtgggggacaacaagaagatccaccagatcgagctgatccccaatgaccagctggtggccgtcatcagcggcaggaacagacatgtgcggctcttccccatgtctgccctggatggccgggagacagacttctacaagctgtctgagaccaagggctgccagacagtgaccagcggcaaggtgcgccacggggccctgacctgcctgtgtgtggccatgaagaggcaggtgctgtgctatgagctgttccagagcaagaccaggcacaggaagttcaaggagatccaggtgccctacaacgtgcagtggatggccatcttcagcgagcagctgtgtgtgggcttccagagcggcttcctgcgctaccccctgaatggagagggcaacccctacagcatgctgcacagcaatgaccacaccctgtccttcatcgcccaccagcccatggatgccatctgtgctgtggagatcagcagcaaggagtacctgctgtgcttcaacagcatcggcatctacacagactgccagggcagaagaagccggcagcaggagctgatgtggccagccaaccccagcagctgctgctacaatgccccctacctgtctgtgtacagtgaaaatgctgtggacatctttgatgtgaacagcatggagtggatccagaccctgcccctgaagaaggtgcggcccctgaacaatgaaggcagcctgaacctgctgggcctggagaccatccgcctcatctacttcaagaacaagatggcctag

SEQ ID NO: 146885 - DNA, 5076 bp, synthetic construct
  misc_feature 1..5076: note = Description of Artificial Sequence: Synthetic coding sequence
  source 1..5076: mol_type = other DNA
atgtctggagaggtgcggctgcggcagctggagcagttcatcctggatggccctgcccagaccaacggccagtgcttctctgtggagaccctgctggacatcctgatctgcctgtatgatgagtgcaacaacagccccctgcggcgggagaagaacatcctggagtacctggagtgggccaagcccttcaccagcaaggtgaagcagatgaggctgcacagagaagattttgagatcctgaaggtgattggccgcggggccttcggggaggtggccgtggtgaagctgaagaatgctgacaaggtgtttgccatgaagatcctgaacaagtgggagatgctgaagagagctgagacagcctgcttccgggaggagagagatgtgctggtgaatggagacaacaagtggatcaccaccctgcactacgccttccaggatgacaacaacctgtacctggtgatggactactacgtgggcggggacctgctgaccctgctgagcaagtttgaggaccggctgcctgaggacatggcccgcttctacctggccgagatggtgattgccattgattctgtgcaccagctgcactacgtgcaccgggacatcaagccagacaacatcctgatggacatgaatggccacatccggctggccgactttggcagctgcctgaagctgatggaggatggcaccgtgcagagctctgtggccgtgggcaccccagactacatcagccctgagatcctgcaggccatggaggatggcaagggccgctatggcccagaatgtgactggtggagcctgggcgtgtgcatgtatgagatgctgtatggagagacccccttctacgccgagagcctggtggagacctacggcaagatcatgaaccacaaggagcgcttccagtttcctgcccaggtgacagatgtgtctgaaaatgccaaggacctgatcagaagactcatctgcagccgggagcaccggctgggccagaatggaattgaggacttcaagaagcaccccttcttcagcggcatcgactgggacaacatccggaactgtgaggccccctacatccctgaggtgagcagccccacagacaccagcaactttgatgtggatgatgactgcctgaagaacagcgagaccatgcccccacccacccacacagccttcagcggccaccacctgccctttgtgggcttcacctacaccagcagctgtgtgctgagtgacaggagctgcctgcgggtgacagctggccccaccagcctggacctggatgtgaatgtgcagaggaccctggacaacaacctggccacagaggcctatgaaagacgcatcaagaggctggagcaggagaagctggagctgagcaggaagctgcaggagagcacccagacagtgcaggccctgcagtacagcacagtggatggccccctgacagccagcaaggacctggagatcaagaacctgaaggaggagattgagaagctgaggaagcaggtgacagagagcagccacctggagcagcagctggaggaggccaatgctgtgcggcaggagctggatgatgccttccggcagatcaaggcctatgagaagcagatcaagaccctgcagcaggagcgggaggacctgaacaaggagctggtgcaggccagcgagcggctgaagaaccagagcaaggagctgaaggatgcccactgccagaggaagctggccatgcaggagttcatggagatcaatgaaaggctgacagagctgcacacccagaagcagaagctggcccggcacgtgcgggacaaggaggaggaggtggacctggtgatgcagaaggtggagagcctgcggcaggagctgcggaggacagagcgggccaagaaggagctggaggtgcacacagaggccctggccgctgaggccagcaaggacaggaagctgcgggagcagagcgagcactacagcaagcagctggagaatgagctggagggcctgaagcagaagcagatctcctacagccctggggtgtgcagcattgagcaccagcaggagatcaccaagctgaagacagacctggagaagaagagcatcttctatgaggaggagctgagcaagcgggagggcatccacgccaatgagatcaagaacctgaagaaggagctgcatgattctgagggccagcagctggccctgaacaaggagatcatgatcctgaaggacaagctggagaagacccggcgggagagccagagcgagcgggaggagtttgaaagtgagttcaagcagcagtatgagcgggagaaggtgctgctgacagaggagaacaagaagctgaccagcgagctggacaagctgaccaccctgtatgagaacctgagcatccacaaccagcagctggaggaggaggtgaaggacctggccgacaagaaggagagcgtggcccactgggaggcccagatcacagagatcatccagtgggtgtctgatgagaaggatgcccggggctacctgcaggccctggccagcaagatgacagaggagctggaggccctgaggaacagcagcctgggcacccgggccacagacatgccctggaagatgagaagatttgccaagctggacatgtctgcccggctggagctgcagagcgccctggatgctgagatccgggccaagcaggccatccaggaggagctgaacaaggtgaaggccagcaacatcatcacagagtgcaagctgaaggacagcgagaagaagaacctggagctgctgtctgaaattgagcagctgatcaaggacacagaggagctgcggtctgagaagggcatcgagcaccaggacagccagcacagcttcctggccttcctgaacacccccacagatgccctggaccagtttgagaggaagacccaccagttctttgtgaagagcttcaccacccccaccaagtgccaccagtgcaccagcctgatggtgggcctcatccggcagggctgcagctgtgaggtgtgtggcttcagctgccacatcacctgtgtgaacaaggcccccaccacctgccctgtgcccccagagcagaccaagggccccctgggcatcgacccccagaagggcatcggcacagcctatgagggccacgtgcgcatccccaagccagctggggtgaagaagggctggcagagggccctggccatcgtgtgtgacttcaagctgttcctgtatgacattgctgagggcaaggccagccagcccagcgtggtgatcagccaggtgattgacatgagagatgaggagttctctgtgtcctctgtgctggccagtgatgtgatccacgccagcaggaaggacatcccctgcatcttccgggtgacagccagccagctgagcgccagcaacaacaagtgcagcatcctgatgctggccgacacagaaaatgagaagaacaagtgggtgggcgtgctgtctgagctgcacaagatcctgaagaagaacaagttccgggacagatctgtgtatgtgcccaaggaggcctatgacagcaccctgcccctcatcaagaccacccaggccgccgccatcatcgaccacgagcgcatcgccctgggcaatgaggagggcctgtttgtggtgcacgtgaccaaggatgagatcatccgggtgggggacaacaagaagatccaccagatcgagctgatccccaatgaccagctggtggccgtcatctctggaagaaacagacatgtgcggctcttccccatgtctgccctggatggccgggagacagacttctacaagctgtctgagaccaagggctgccagacagtgaccagcggcaaggtgagacatggagccctgacctgcctgtgtgtggccatgaagaggcaggtgctgtgctatgagctgttccagagcaagaccaggcacaggaagttcaaggagatccaggtgccctacaacgtgcagtggatggccatcttcagcgagcagctgtgtgtgggcttccagagcggcttcctgcgctaccccctgaatggagagggcaacccctacagcatgctgcacagcaatgaccacaccctgtccttcatcgcccaccagcccatggatgccatctgtgctgtggagatcagcagcaaggagtacctgctgtgcttcaacagcatcggcatctacacagactgccagggccgccgcagccggcagcaggagctgatgtggccagccaaccccagcagctgctgctacaatgccccctacctgtctgtgtacagtgaaaatgctgtggacatctttgatgtgaacagcatggagtggatccagaccctgcccctgaagaaggtgcggcccctgaacaatgaaggcagcctgaacctgctgggcctggagaccatccgcctcatctacttcaagaacaagatggccgagggagatgagctggtggtgcctgagaccagtgacaacagcaggaagcagatggtgaggaacatcaacaacaagaggcgctacagcttccgggtgcctgaggaggagaggatgcagcagaggcgggagatgctgcgggaccctgagatgaggaacaagctgatcagcaaccccaccaacttcaaccacatcgcccacatgggccctggagatggcatccagatcctgaaggacctgcccatgaacccccggccccaggagagcaggacagtgttcagcggctctgtgtccatccccagcatcaccaagagcaggcctgagcccggccgctccatgtctgccagcagcggcctgagcgcccggagcagcgcccagaatggaagtgccctgaagcgggagttcagcggcggcagctacagcgccaagaggcagcccatgcccagccccagcgagggcagcctgagcagcggcggcatggaccagggcagtgatgccccagcccgggactttgatggagaggacagcgacagccccaggcacagcacagccagcaacagcagcaacctgagcagcccccccagccctgccagccccaggaagaccaagagcctgagcctggagagcacagaccggggctcctgggacccctag

SEQ ID NO: 146886 - DNA, 5199 bp, synthetic construct
  misc_feature 1..5199: note = Description of Artificial Sequence: Synthetic coding sequence
  source 1..5199: mol_type = other DNA
atgtctggagaggtgcggctgcggcagctggagcagttcatcctggatggccctgcccagaccaacggccagtgcttctctgtggagaccctgctggacatcctgatctgcctgtatgatgagtgcaacaacagccccctgcggcgggagaagaacatcctggagtacctggagtgggccaagcccttcaccagcaaggtgaagcagatgaggctgcacagagaagattttgagatcctgaaggtgattggccgcggggccttcggggaggtggccgtggtgaagctgaagaatgctgacaaggtgtttgccatgaagatcctgaacaagtgggagatgctgaagagagctgagacagcctgcttccgggaggagagagatgtgctggtgaatggagacaacaagtggatcaccaccctgcactacgccttccaggatgacaacaacctgtacctggtgatggactactacgtgggcggggacctgctgaccctgctgagcaagtttgaggaccggctgcctgaggacatggcccgcttctacctggccgagatggtgattgccattgattctgtgcaccagctgcactacgtgcaccgggacatcaagccagacaacatcctgatggacatgaatggccacatccggctggccgactttggcagctgcctgaagctgatggaggatggcaccgtgcagagctctgtggccgtgggcaccccagactacatcagccctgagatcctgcaggccatggaggatggcaagggccgctatggcccagaatgtgactggtggagcctgggcgtgtgcatgtatgagatgctgtatggagagacccccttctacgccgagagcctggtggagacctacggcaagatcatgaaccacaaggagcgcttccagtttcctgcccaggtgacagatgtgtctgaaaatgccaaggacctgatcagaagactcatctgcagccgggagcaccggctgggccagaatggaattgaggacttcaagaagcaccccttcttcagcggcatcgactgggacaacatccggaactgtgaggccccctacatccctgaggtgagcagccccacagacaccagcaactttgatgtggatgatgactgcctgaagaacagcgagaccatgcccccacccacccacacagccttcagcggccaccacctgccctttgtgggcttcacctacaccagcagctgtgtgctgagtgacaggagctgcctgcgggtgacagctggccccaccagcctggacctggatgtgaatgtgcagaggaccctggacaacaacctggccacagaggcctatgaaagacgcatcaagaggctggagcaggagaagctggagctgagcaggaagctgcaggagagcacccagacagtgcaggccctgcagtacagcacagtggatggccccctgacagccagcaaggacctggagatcaagaacctgaaggaggagattgagaagctgaggaagcaggtgacagagagcagccacctggagcagcagctggaggaggccaatgctgtgcggcaggagctggatgatgccttccggcagatcaaggcctatgagaagcagatcaagaccctgcagcaggagcgggaggacctgaacaaggagctggtgcaggccagcgagcggctgaagaaccagagcaaggagctgaaggatgcccactgccagaggaagctggccatgcaggagttcatggagatcaatgaaaggctgacagagctgcacacccagaagcagaagctggcccggcacgtgcgggacaaggaggaggaggtggacctggtgatgcagaaggtggagagcctgcggcaggagctgcggaggacagagcgggccaagaaggagctggaggtgcacacagaggccctggccgctgaggccagcaaggacaggaagctgcgggagcagagcgagcactacagcaagcagctggagaatgagctggagggcctgaagcagaagcagatctcctacagccctggggtgtgcagcattgagcaccagcaggagatcaccaagctgaagacagacctggagaagaagagcatcttctatgaggaggagctgagcaagcgggagggcatccacgccaatgagatcaagaacctgaagaaggagctgcatgattctgagggccagcagctggccctgaacaaggagatcatgatcctgaaggacaagctggagaagacccggcgggagagccagagcgagcgggaggagtttgaaagtgagttcaagcagcagtatgagcgggagaaggtgctgctgacagaggagaacaagaagctgaccagcgagctggacaagctgaccaccctgtatgagaacctgagcatccacaaccagcagctggaggaggaggtgaaggacctggccgacaagaaggagagcgtggcccactgggaggcccagatcacagagatcatccagtgggtgtctgatgagaaggatgcccggggctacctgcaggccctggccagcaagatgacagaggagctggaggccctgaggaacagcagcctgggcacccgggccacagacatgccctggaagatgagaagatttgccaagctggacatgtctgcccggctggagctgcagagcgccctggatgctgagatccgggccaagcaggccatccaggaggagctgaacaaggtgaaggccagcaacatcatcacagagtgcaagctgaaggacagcgagaagaagaacctggagctgctgtctgaaattgagcagctgatcaaggacacagaggagctgcggtctgagaagggcatcgagcaccaggacagccagcacagcttcctggccttcctgaacacccccacagatgccctggaccagtttgagaggagccccagctgcaccccagccagcaagggccgcaggacagtggacagcacccccctgtctgtgcacacccccaccctgaggaagaagggctgccccggcagcacaggcttcccccccaagaggaagacccaccagttctttgtgaagagcttcaccacccccaccaagtgccaccagtgcaccagcctgatggtgggcctcatccggcagggctgcagctgtgaggtgtgtggcttcagctgccacatcacctgtgtgaacaaggcccccaccacctgccctgtgcccccagagcagaccaagggccccctgggcatcgacccccagaagggcattggaacagcctatgagggccacgtgcgcatccccaagccagctggggtgaagaagggctggcagagggccctggccatcgtgtgtgacttcaagctgttcctgtatgacattgctgagggcaaggccagccagcccagcgtggtgatcagccaggtgattgacatgagagatgaggagttctctgtgtcctctgtgctggccagtgatgtgattcatgccagcaggaaggacatcccctgcatcttccgggtgacagccagccagctgagcgccagcaacaacaagtgcagcatcctgatgctggccgacacagaaaatgagaagaacaagtgggtgggcgtgctgtctgagctgcacaagatcctgaagaagaacaagttccgggacagatctgtgtatgtgcccaaggaggcctatgacagcaccctgcccctcatcaagaccacccaggccgccgccatcatcgaccacgagagaattgccctgggcaatgaggagggcctgtttgtggtgcacgtgaccaaggatgagatcatccgggtgggggacaacaagaagatccaccagatcgagctgatccccaatgaccagctggtggccgtcatcagcggcaggaacagacatgtgcggctcttccccatgtctgccctggatggccgggagacagacttctacaagctgtctgagaccaagggctgccagacagtgaccagcggcaaggtgcgccacggggccctgacctgcctgtgtgtggccatgaagaggcaggtgctgtgctatgagctgttccagagcaagaccaggcacaggaagttcaaggagatccaggtgccctacaacgtgcagtggatggccatcttcagcgagcagctgtgtgtgggcttccagagcggcttcctgcgctaccccctgaatggagagggcaacccctacagcatgctgcacagcaatgaccacaccctgtccttcatcgcccaccagcccatggatgccatctgtgctgtggagatcagcagcaaggagtacctgctgtgcttcaacagcatcggcatctacacagactgccagggcagaagaagccggcagcaggagctgatgtggccagccaaccccagcagctgctgctacaatgccccctacctgtctgtgtacagtgaaaatgctgtggacatctttgatgtgaacagcatggagtggatccagaccctgcccctgaagaaggtgcggcccctgaacaatgaaggcagcctgaacctgctgggcctggagaccatccgcctcatctacttcaagaacaagatggccgagggagatgagctggtggtgcctgagaccagtgacaacagcaggaagcagatggtgaggaacatcaacaacaagaggcgctacagcttccgggtgcctgaggaggagaggatgcagcagaggcgggagatgctgcgggaccctgagatgaggaacaagctgatcagcaaccccaccaacttcaaccacatcgcccacatgggccctggagatggcatccagatcctgaaggacctgcccatgaacccccggccccaggagagcaggacagtgttttctggctctgtgtccatccccagcatcaccaagagcaggcctgagcccggccgctccatgtctgccagcagcggcctgagcgcccggagcagcgcccagaatggcagcgccctgaagcgggagttcagcggcggcagctacagcgccaagaggcagcccatgcccagccccagcgagggcagcctgagcagcggcggcatggaccagggcagtgatgccccagcccgggactttgatggagaagattctgacagccccaggcacagcacagccagcaacagcagcaacctgagcagcccccccagccctgccagccccaggaagaccaagagcctgagcctggagagcacagaccggggctcctgggacccctag

SEQ ID NO: 146887 - DNA, 5265 bp, synthetic construct
  misc_feature 1..5265: note = Description of Artificial Sequence: Synthetic coding sequence
  source 1..5265: mol_type = other DNA
atgtctggagaggtgcggctgcggcagctggagcagttcatcctggatggccctgcccagaccaacggccagtgcttctctgtggagaccctgctggacatcctgatctgcctgtatgatgagtgcaacaacagccccctgcggcgggagaagaacatcctggagtacctggagtgggccaagcccttcaccagcaaggtgaagcagatgaggctgcacagagaagattttgagatcctgaaggtgattggccgcggggccttcggggaggtggccgtggtgaagctgaagaatgctgacaaggtgtttgccatgaagatcctgaacaagtgggagatgctgaagagagctgagacagcctgcttccgggaggagagagatgtgctggtgaatggagacaacaagtggatcaccaccctgcactacgccttccaggatgacaacaacctgtacctggtgatggactactacgtgggcggggacctgctgaccctgctgagcaagtttgaggaccggctgcctgaggacatggcccgcttctacctggccgagatggtgattgccattgattctgtgcaccagctgcactacgtgcaccgggacatcaagccagacaacatcctgatggacatgaatggccacatccggctggccgactttggcagctgcctgaagctgatggaggatggcaccgtgcagagctctgtggccgtgggcaccccagactacatcagccctgagatcctgcaggccatggaggatggcaagggccgctatggcccagaatgtgactggtggagcctgggcgtgtgcatgtatgagatgctgtatggagagacccccttctacgccgagagcctggtggagacctacggcaagatcatgaaccacaaggagcgcttccagtttcctgcccaggtgacagatgtgtctgaaaatgccaaggacctgatcagaagactcatctgcagccgggagcaccggctgggccagaatggaattgaggacttcaagaagcaccccttcttcagcggcatcgactgggacaacatccggaactgtgaggccccctacatccctgaggtgagcagccccacagacaccagcaactttgatgtggatgatgactgcctgaagaacagcgagaccatgcccccacccacccacacagccttcagcggccaccacctgccctttgtgggcttcacctacaccagcagctgtgtgctgagtgacaggagctgcctgcgggtgacagctggccccaccagcctggacctggatgtgaatgtgcagaggaccctggacaacaacctggccacagaggcctatgaaagacgcatcaagaggctggagcaggagaagctggagctgagcaggaagctgcaggagagcacccagacagtgcaggccctgcagtacagcacagtggatggccccctgacagccagcaaggacctggagatcaagaacctgaaggaggagattgagaagctgaggaagcaggtgacagagagcagccacctggagcagcagctggaggaggccaatgctgtgcggcaggagctggatgatgccttccggcagatcaaggcctatgagaagcagatcaagaccctgcagcaggagcgggaggacctgaacaaggagctggtgcaggccagcgagcggctgaagaaccagagcaaggagctgaaggatgcccactgccagaggaagctggccatgcaggagttcatggagatcaatgaaaggctgacagagctgcacacccagaagcagaagctggcccggcacgtgcgggacaaggaggaggaggtggacctggtgatgcagaaggtggagagcctgcggcaggagctgcggaggacagagcgggccaagaaggagctggaggtgcacacagaggccctggccgctgaggccagcaaggacaggaagctgcgggagcagagcgagcactacagcaagcagctggagaatgagctggagggcctgaagcagaagcagatctcctacagccctggggtgtgcagcattgagcaccagcaggagatcaccaagctgaagacagacctggagaagaagagcatcttctatgaggaggagctgagcaagcgggagggcatccacgccaatgagatcaagaacctgaagaaggagctgcatgattctgagggccagcagctggccctgaacaaggagatcatgatcctgaaggacaagctggagaagacccggcgggagagccagagcgagcgggaggagtttgaaagtgagttcaagcagcagtatgagcgggagaaggtgctgctgacagaggagaacaagaagctgaccagcgagctggacaagctgaccaccctgtatgagaacctgagcatccacaaccagcagctggaggaggaggtgaaggacctggccgacaagaaggagagcgtggcccactgggaggcccagatcacagagatcatccagtgggtgtctgatgagaaggatgcccggggctacctgcaggccctggccagcaagatgacagaggagctggaggccctgaggaacagcagcctgggcacccgggccacagacatgccctggaagatgagaagatttgccaagctggacatgtctgcccggctggagctgcagagcgccctggatgctgagatccgggccaagcaggccatccaggaggagctgaacaaggtgaaggccagcaacatcatcacagagtgcaagctgaaggacagcgagaagaagaacctggagctgctgtctgaaattgagcagctgatcaaggacacagaggagctgcggtctgagaagggcatcgagcaccaggacagccagcacagcttcctggccttcctgaacacccccacagatgccctggaccagtttgaaacagatcctgtggagaacacctacgtgtggaaccccagcgtgaagttccacatccagagccgcagcaccagccccagcaccagcagcgaggccgagcctgtgaagacagtggacagcacccccctgtctgtgcacacccccaccctgaggaagaagggctgccccggcagcacaggcttcccccccaagaggaagacccaccagttctttgtgaagagcttcaccacccccaccaagtgccaccagtgcaccagcctgatggtgggcctcatccggcagggctgcagctgtgaggtgtgtggcttcagctgccacatcacctgtgtgaacaaggcccccaccacctgccctgtgcccccagagcagaccaagggccccctgggcatcgacccccagaagggcattggaacagcctatgagggccacgtgcgcatccccaagccagctggggtgaagaagggctggcagagggccctggccatcgtgtgtgacttcaagctgttcctgtatgacattgctgagggcaaggccagccagcccagcgtggtgatcagccaggtgattgacatgagagatgaggagttctctgtgtcctctgtgctggccagtgatgtgattcatgccagcaggaaggacatcccctgcatcttccgggtgacagccagccagctgagcgccagcaacaacaagtgcagcatcctgatgctggccgacacagaaaatgagaagaacaagtgggtgggcgtgctgtctgagctgcacaagatcctgaagaagaacaagttccgggacagatctgtgtatgtgcccaaggaggcctatgacagcaccctgcccctcatcaagaccacccaggccgccgccatcatcgaccacgagagaattgccctgggcaatgaggagggcctgtttgtggtgcacgtgaccaaggatgagatcatccgggtgggggacaacaagaagatccaccagatcgagctgatccccaatgaccagctggtggccgtcatcagcggcaggaacagacatgtgcggctcttccccatgtctgccctggatggccgggagacagacttctacaagctgtctgagaccaagggctgccagacagtgaccagcggcaaggtgcgccacggggccctgacctgcctgtgtgtggccatgaagaggcaggtgctgtgctatgagctgttccagagcaagaccaggcacaggaagttcaaggagatccaggtgccctacaacgtgcagtggatggccatcttcagcgagcagctgtgtgtgggcttccagagcggcttcctgcgctaccccctgaatggagagggcaacccctacagcatgctgcacagcaatgaccacaccctgtccttcatcgcccaccagcccatggatgccatctgtgctgtggagatcagcagcaaggagtacctgctgtgcttcaacagcatcggcatctacacagactgccagggcagaagaagccggcagcaggagctgatgtggccagccaaccccagcagctgctgctacaatgccccctacctgtctgtgtacagtgaaaatgctgtggacatctttgatgtgaacagcatggagtggatccagaccctgcccctgaagaaggtgcggcccctgaacaatgaaggcagcctgaacctgctgggcctggagaccatccgcctcatctacttcaagaacaagatggccgagggagatgagctggtggtgcctgagaccagtgacaacagcaggaagcagatggtgaggaacatcaacaacaagaggcgctacagcttccgggtgcctgaggaggagaggatgcagcagaggcgggagatgctgcgggaccctgagatgaggaacaagctgatcagcaaccccaccaacttcaaccacatcgcccacatgggccctggagatggcatccagatcctgaaggacctgcccatgaacccccggccccaggagagcaggacagtgttttctggctctgtgtccatccccagcatcaccaagagcaggcctgagcccggccgctccatgtctgccagcagcggcctgagcgcccggagcagcgcccagaatggcagcgccctgaagcgggagttcagcggcggcagctacagcgccaagaggcagcccatgcccagccccagcgagggcagcctgagcagcggcggcatggaccagggcagtgatgccccagcccgggactttgatggagaagattctgacagccccaggcacagcacagccagcaacagcagcaacctgagcagcccccccagccctgccagccccaggaagaccaagagcctgagcctggagagcacagaccggggctcctgggacccctag

SEQ ID NO: 146888 - DNA, 4917 bp, synthetic construct
  misc_feature 1..4917: note = Description of Artificial Sequence: Synthetic coding sequence
  source 1..4917: mol_type = other DNA
atgtctggagaggtgcggctgcggcagctggagcagttcatcctggatggccctgcccagaccaacggccagtgcttctctgtggagaccctgctggacatcctgatctgcctgtatgatgagtgcaacaacagccccctgcggcgggagaagaacatcctggagtacctggagtgggccaagcccttcaccagcaaggtgaagcagatgaggctgcacagagaagattttgagatcctgaaggtgattggccgcggggccttcggggaggtggccgtggtgaagctgaagaatgctgacaaggtgtttgccatgaagatcctgaacaagtgggagatgctgaagagagctgagacagcctgcttccgggaggagagagatgtgctggtgaatggagacaacaagtggatcaccaccctgcactacgccttccaggatgacaacaacctgtacctggtgatggactactacgtgggcggggacctgctgaccctgctgagcaagtttgaggaccggctgcctgaggacatggcccgcttctacctggccgagatggtgattgccattgattctgtgcaccagctgcactacgtgcaccgggacatcaagccagacaacatcctgatggacatgaatggccacatccggctggccgactttggcagctgcctgaagctgatggaggatggcaccgtgcagagctctgtggccgtgggcaccccagactacatcagccctgagatcctgcaggccatggaggatggcaagggccgctatggcccagaatgtgactggtggagcctgggcgtgtgcatgtatgagatgctgtatggagagacccccttctacgccgagagcctggtggagacctacggcaagatcatgaaccacaaggagcgcttccagtttcctgcccaggtgacagatgtgtctgaaaatgccaaggacctgatcagaagactcatctgcagccgggagcaccggctgggccagaatggaattgaggacttcaagaagcaccccttcttcagcggcatcgactgggacaacatccggaactgtgaggccccctacatccctgaggtgagcagccccacagacaccagcaactttgatgtggatgatgactgcctgaagaacagcgagaccatgcccccacccacccacacagccttcagcggccaccacctgccctttgtgggcttcacctacaccagcagctgtgtgctgagtgacaggagctgcctgcgggtgacagctggccccaccagcctggacctggatgtgaatgtgcagaggaccctggacaacaacctggccacagaggcctatgaaagacgcatcaagaggctggagcaggagaagctggagctgagcaggaagctgcaggagagcacccagacagtgcaggccctgcagtacagcacagtggatggccccctgacagccagcaaggacctggagatcaagaacctgaaggaggagattgagaagctgaggaagcaggtgacagagagcagccacctggagcagcagctggaggaggccaatgctgtgcggcaggagctggatgatgccttccggcagatcaaggcctatgagaagcagatcaagaccctgcagcaggagcgggaggacctgaacaagctggaggtgcacacagaggccctggccgctgaggccagcaaggacaggaagctgcgggagcagagcgagcactacagcaagcagctggagaatgagctggagggcctgaagcagaagcagatctcctacagccctggggtgtgcagcattgagcaccagcaggagatcaccaagctgaagacagacctggagaagaagagcatcttctatgaggaggagctgagcaagcgggagggcatccacgccaatgagatcaagaacctgaagaaggagctgcatgacagcgagggccagcagctggccctgaacaaggagatcatgatcctgaaggacaagctggagaagacccggcgggagagccagagcgagcgggaggagtttgagagcgagttcaagcagcagtatgaaagagagaaggtgctgctgacagaggagaacaagaagctgaccagcgagctggacaagctgaccaccctgtatgagaacctgagcatccacaaccagcagctggaggaggaggtgaaggacctggccgacaagaaggagagcgtggcccactgggaggcccagatcacagagatcatccagtgggtgtctgatgagaaggatgcccggggctacctgcaggccctggccagcaagatgacagaggagctggaggccctgaggaacagcagcctgggcacccgggccacagacatgccctggaagatgagaagatttgccaagctggacatgtctgcccggctggagctgcagagcgccctggatgctgagatccgggccaagcaggccatccaggaggagctgaacaaggtgaaggccagcaacatcatcacagagtgcaagctgaaggacagcgagaagaagaacctggagctgctgtctgaaattgagcagctgatcaaggacacagaggagctgcggtctgagaagggcatcgagcaccaggacagccagcacagcttcctggccttcctgaacacccccacagatgccctggaccagtttgagaccgtggacagcacccccctgtctgtgcacacccccaccctgaggaagaagggctgccccggcagcacaggcttcccccccaagaggaagacccaccagttctttgtgaagagcttcaccacccccaccaagtgccaccagtgcaccagcctgatggtgggcctcatccggcagggctgcagctgtgaggtgtgtggcttcagctgccacatcacctgtgtgaacaaggcccccaccacctgccctgtgcccccagagcagaccaagggccccctgggcatcgacccccagaagggcattggaacagcctatgagggccacgtgcgcatccccaagccagctggggtgaagaagggctggcagagggccctggccatcgtgtgtgacttcaagctgttcctgtatgacattgctgagggcaaggccagccagcccagcgtggtgatcagccaggtgattgacatgagagatgaggagttctctgtgtcctctgtgctggccagtgatgtgattcatgccagcaggaaggacatcccctgcatcttccgggtgacagccagccagctgagcgccagcaacaacaagtgcagcatcctgatgctggccgacacagaaaatgagaagaacaagtgggtgggcgtgctgtctgagctgcacaagatcctgaagaagaacaagttccgggacagatctgtgtatgtgcccaaggaggcctatgacagcaccctgcccctcatcaagaccacccaggccgccgccatcatcgaccacgagagaattgccctgggcaatgaggagggcctgtttgtggtgcacgtgaccaaggatgagatcatccgggtgggggacaacaagaagatccaccagatcgagctgatccccaatgaccagctggtggccgtcatcagcggcaggaacagacatgtgcggctcttccccatgtctgccctggatggccgggagacagacttctacaagctgtctgagaccaagggctgccagacagtgaccagcggcaaggtgcgccacggggccctgacctgcctgtgtgtggccatgaagaggcaggtgctgtgctatgagctgttccagagcaagaccaggcacaggaagttcaaggagatccaggtgccctacaacgtgcagtggatggccatcttcagcgagcagctgtgtgtgggcttccagagcggcttcctgcgctaccccctgaatggagagggcaacccctacagcatgctgcacagcaatgaccacaccctgtccttcatcgcccaccagcccatggatgccatctgtgctgtggagatcagcagcaaggagtacctgctgtgcttcaacagcatcggcatctacacagactgccagggcagaagaagccggcagcaggagctgatgtggccagccaaccccagcagctgctgctacaatgccccctacctgtctgtgtacagtgaaaatgctgtggacatctttgatgtgaacagcatggagtggatccagaccctgcccctgaagaaggtgcggcccctgaacaatgaaggcagcctgaacctgctgggcctggagaccatccgcctcatctacttcaagaacaagatggccgagggagatgagctggtggtgcctgagaccagtgacaacagcaggaagcagatggtgaggaacatcaacaacaagaggcgctacagcttccgggtgcctgaggaggagaggatgcagcagaggcgggagatgctgcgggaccctgagatgaggaacaagctgatcagcaaccccaccaacttcaaccacatcgcccacatgggccctggagatggcatccagatcctgaaggacctgcccatgaacccccggccccaggagagcaggacagtgttttctggctctgtgtccatccccagcatcaccaagagcaggcctgagcccggccgctccatgtctgccagcagcggcctgagcgcccggagcagcgcccagaatggcagcgccctgaagcgggagttcagcggcggcagctacagcgccaagaggcagcccatgcccagccccagcgagggcagcctgagcagcggcggcatggaccagggcagtgatgccccagcccgggactttgatggagaagattctgacagccccaggcacagcacagccagcaacagcagcaacctgagcagcccccccagccctgccagccccaggaagaccaagagcctgagcctggagagcacagaccggggctcctgggacccctag

SEQ ID NO: 146889 - DNA, 5160 bp, synthetic construct
  misc_feature 1..5160: note = Description of Artificial Sequence: Synthetic coding sequence
  source 1..5160: mol_type = other DNA
atgtctggagaggtgcggctgcggcagctggagcagttcatcctggatggccctgcccagaccaacggccagtgcttctctgtggagaccctgctggacatcctgatctgcctgtatgatgagtgcaacaacagccccctgcggcgggagaagaacatcctggagtacctggagtgggccaagcccttcaccagcaaggtgaagcagatgaggctgcacagagaagattttgagatcctgaaggtgattggccgcggggccttcggggaggtggccgtggtgaagctgaagaatgctgacaaggtgtttgccatgaagatcctgaacaagtgggagatgctgaagagagctgagacagcctgcttccgggaggagagagatgtgctggtgaatggagacaacaagtggatcaccaccctgcactacgccttccaggatgacaacaacctgtacctggtgatggactactacgtgggcggggacctgctgaccctgctgagcaagtttgaggaccggctgcctgaggacatggcccgcttctacctggccgagatggtgattgccattgattctgtgcaccagctgcactacgtgcaccgggacatcaagccagacaacatcctgatggacatgaatggccacatccggctggccgactttggcagctgcctgaagctgatggaggatggcaccgtgcagagctctgtggccgtgggcaccccagactacatcagccctgagatcctgcaggccatggaggatggcaagggccgctatggcccagaatgtgactggtggagcctgggcgtgtgcatgtatgagatgctgtatggagagacccccttctacgccgagagcctggtggagacctacggcaagatcatgaaccacaaggagcgcttccagtttcctgcccaggtgacagatgtgtctgaaaatgccaaggacctgatcagaagactcatctgcagccgggagcaccggctgggccagaatggaattgaggacttcaagaagcaccccttcttcagcggcatcgactgggacaacatccggaactgtgaggccccctacatccctgaggtgagcagccccacagacaccagcaactttgatgtggatgatgactgcctgaagaacagcgagaccatgcccccacccacccacacagccttcagcggccaccacctgccctttgtgggcttcacctacaccagcagctgtgtgctgagtgacaggagctgcctgcgggtgacagctggccccaccagcctggacctggatgtgaatgtgcagaggaccctggacaacaacctggccacagaggcctatgaaagacgcatcaagaggctggagcaggagaagctggagctgagcaggaagctgcaggagagcacccagacagtgcaggccctgcagtacagcacagtggatggccccctgacagccagcaaggacctggagatcaagaacctgaaggaggagattgagaagctgaggaagcaggtgacagagagcagccacctggagcagcagctggaggaggccaatgctgtgcggcaggagctggatgatgccttccggcagatcaaggcctatgagaagcagatcaagaccctgcagcaggagcgggaggacctgaacaaggagctggtgcaggccagcgagcggctgaagaaccagagcaaggagctgaaggatgcccactgccagaggaagctggccatgcaggagttcatggagatcaatgaaaggctgacagagctgcacacccagaagcagaagctggcccggcacgtgcgggacaaggaggaggaggtggacctggtgatgcagaaggtggagagcctgcggcaggagctgcggaggacagagcgggccaagaaggagctggaggtgcacacagaggccctggccgctgaggccagcaaggacaggaagctgcgggagcagagcgagcactacagcaagcagctggagaatgagctggagggcctgaagcagaagcagatctcctacagccctggggtgtgcagcattgagcaccagcaggagatcaccaagctgaagacagacctggagaagaagagcatcttctatgaggaggagctgagcaagcgggagggcatccacgccaatgagatcaagaacctgaagaaggagctgcatgattctgagggccagcagctggccctgaacaaggagatcatgatcctgaaggacaagctggagaagacccggcgggagagccagagcgagcgggaggagtttgaaagtgagttcaagcagcagtatgagcgggagaaggtgctgctgacagaggagaacaagaagctgaccagcgagctggacaagctgaccaccctgtatgagaacctgagcatccacaaccagcagctggaggaggaggtgaaggacctggccgacaagaaggagagcgtggcccactgggaggcccagatcacagagatcatccagtgggtgtctgatgagaaggatgcccggggctacctgcaggccctggccagcaagatgacagaggagctggaggccctgaggaacagcagcctgggcacccgggccacagacatgccctggaagatgagaagatttgccaagctggacatgtctgcccggctggagctgcagagcgccctggatgctgagatccgggccaagcaggccatccaggaggagctgaacaaggtgaaggccagcaacatcatcacagagtgcaagctgaaggacagcgagaagaagaacctggagctgctgtctgaaattgagcagctgatcaaggacacagaggagctgcggtctgagaagggcatcgagcaccaggacagccagcacagcttcctggccttcctgaacacccccacagatgccctggaccagtttgaaacagtggacagcacccccctgtctgtgcacacccccaccctgaggaagaagggctgccccggcagcacaggcttcccccccaagaggaagacccaccagttctttgtgaagagcttcaccacccccaccaagtgccaccagtgcaccagcctgatggtgggcctcatccggcagggctgcagctgtgaggtgtgtggcttcagctgccacatcacctgtgtgaacaaggcccccaccacctgccctgtgcccccagagcagaccaagggccccctgggcatcgacccccagaagggcatcggcacagcctatgagggccacgtgcgcatccccaagccagctggggtgaagaagggctggcagagggccctggccatcgtgtgtgacttcaagctgttcctgtatgacattgctgagggcaaggccagccagcccagcgtggtgatcagccaggtgattgacatgagagatgaggagttctctgtgtcctctgtgctggccagtgatgtgatccacgccagcaggaaggacatcccctgcatcttccgggtgacagccagccagctgagcgccagcaacaacaagtgcagcatcctgatgctggccgacacagaaaatgagaagaacaagtgggtgggcgtgctgtctgagctgcacaagatcctgaagaagaacaagttccgggacagatctgtgtatgtgcccaaggaggcctatgacagcaccctgcccctcatcaagaccacccaggccgccgccatcatcgaccacgagcgcatcgccctgggcaatgaggagggcctgtttgtggtgcacgtgaccaaggatgagatcatccgggtgggggacaacaagaagatccaccagatcgagctgatccccaatgaccagctggtggccgtcatctctggaagaaacagacatgtgcggctcttccccatgtctgccctggatggccgggagacagacttctacaagctgtctgagaccaagggctgccagacagtgaccagcggcaaggtgagacatggagccctgacctgcctgtgtgtggccatgaagaggcaggtgctgtgctatgagctgttccagagcaagaccaggcacaggaagttcaaggagatccaggtgccctacaacgtgcagtggatggccatcttcagcgagcagctgtgtgtgggcttccagagcggcttcctgcgctaccccctgaatggagagggcaacccctacagcatgctgcacagcaatgaccacaccctgtccttcatcgcccaccagcccatggatgccatctgtgctgtggagatcagcagcaaggagtacctgctgtgcttcaacagcatcggcatctacacagactgccagggccgccgcagccggcagcaggagctgatgtggccagccaaccccagcagctgctgctacaatgccccctacctgtctgtgtacagtgaaaatgctgtggacatctttgatgtgaacagcatggagtggatccagaccctgcccctgaagaaggtgcggcccctgaacaatgaaggcagcctgaacctgctgggcctggagaccatccgcctcatctacttcaagaacaagatggccgagggagatgagctggtggtgcctgagaccagtgacaacagcaggaagcagatggtgaggaacatcaacaacaagaggcgctacagcttccgggtgcctgaggaggagaggatgcagcagaggcgggagatgctgcgggaccctgagatgaggaacaagctgatcagcaaccccaccaacttcaaccacatcgcccacatgggccctggagatggcatccagatcctgaaggacctgcccatgaacccccggccccaggagagcaggacagtgttcagcggctctgtgtccatccccagcatcaccaagagcaggcctgagcccggccgctccatgtctgccagcagcggcctgagcgcccggagcagcgcccagaatggaagtgccctgaagcgggagttcagcggcggcagctacagcgccaagaggcagcccatgcccagccccagcgagggcagcctgagcagcggcggcatggaccagggcagtgatgccccagcccgggactttgatggagaggacagcgacagccccaggcacagcacagccagcaacagcagcaacctgagcagcccccccagccctgccagccccaggaagaccaagagcctgagcctggagagcacagaccggggctcctgggacccctag

SEQ ID NO: 146890 - DNA, 1641 bp, synthetic construct
  misc_feature 1..1641: note = Description of Artificial Sequence: Synthetic coding sequence
  source 1..1641: mol_type = other DNA
tgagatattgctgagggcaaggccagccagcccagcgtggtgatcagccaggtgattgacatgagagatgaggagttctctgtgtcctctgtgctggccagtgatgtgatccacgccagcaggaaggacatcccctgcatcttccgggtgacagccagccagctgagcgccagcaacaacaagtgcagcatcctgatgctggccgacacagaaaatgagaagaacaagtgggtgggcgtgctgtctgagctgcacaagatcctgaagaagaacaagttccgggacagatctgtgtatgtgcccaaggaggcctatgacagcaccctgcccctcatcaagaccacccaggccgccgccatcatcgaccacgagcgcatcgccctgggcaatgaggagggcctgtttgtggtgcacgtgaccaaggatgagatcatccgggtgggggacaacaagaagatccaccagatcgagctgatccccaatgaccagctggtggccgtcatctctggaagaaacagacatgtgcggctcttccccatgtctgccctggatggccgggagacagacttctacaagctgtctgagaccaagggctgccagacagtgaccagcggcaaggtgagacatggagccctgacctgcctgtgtgtggccatgaagaggcaggtgctgtgctatgagctgttccagagcaagaccaggcacaggaagttcaaggagatccaggtgccctacaacgtgcagtggatggccatcttcagcgagcagctgtgtgtgggcttccagagcggcttcctgcgctaccccctgaatggagagggcaacccctacagcatgctgcacagcaatgaccacaccctgtccttcatcgcccaccagcccatggatgccatctgtgctgtggagatcagcagcaaggagtacctgctgtgcttcaacagcatcggcatctacacagactgccagggccgccgcagccggcagcaggagctgatgtggccagccaaccccagcagctgctgctacaatgccccctacctgtctgtgtacagtgaaaatgctgtggacatctttgatgtgaacagcatggagtggatccagaccctgcccctgaagaaggtgcggcccctgaacaatgaaggcagcctgaacctgctgggcctggagaccatccgcctcatctacttcaagaacaagatggccgagggagatgagctggtggtgcctgagaccagtgacaacagcaggaagcagatggtgaggaacatcaacaacaagaggcgctacagcttccgggtgcctgaggaggagaggatgcagcagaggcgggagatgctgcgggaccctgagatgaggaacaagctgatcagcaaccccaccaacttcaaccacatcgcccacatgggccctggagatggcatccagatcctgaaggacctgcccatgaacccccggccccaggagagcaggacagtgttcagcggctctgtgtccatccccagcatcaccaagagcaggcctgagcccggccgctccatgtctgccagcagcggcctgagcgccagcaaatgtcggggctacaggaaggtgcccctgcggcagggcgacccccagctgccccccctgctgagccggggctag

SEQ ID NO: 146891 - DNA, 2187 bp, synthetic construct
  misc_feature 1..2187: note = Description of Artificial Sequence: Synthetic coding sequence
  source 1..2187: mol_type = other DNA
tgagtgtctgatgagaaggatgcccggggctacctgcaggccctggccagcaagatgacagaggagctggaggccctgaggaacagcagcctgggcacccgggccacagacatgccctggaagatgagaagatttgccaagctggacatgtctgcccggctggagctgcagagcgccctggatgctgagatccgggccaagcaggccatccaggaggagctgaacaaggtgaaggccagcaacatcatcacagagtgcaagctgaaggacagcgagaagaagaacctggagctgctgtctgaaattgagcagctgatcaaggacacagaggagctgcggtctgagaagggcatcgagcaccaggacagccagcacagcttcctggccttcctgaacacccccacagatgccctggaccagtttgaggacagcttcagcagcagcagcagcagcctgattgacttcctggatgacacagatcctgtggagaacacctacgtgtggaaccccagcgtgaagttccacatccagagccgcagcaccagccccagcaccagcagcgaggccgagcctgtgaagacagtggacagcacccccctgtctgtgcacacccccaccctgaggaagaagggctgccccggcagcacaggcttcccccccaagaggaagacccaccagttctttgtgaagagcttcaccacccccaccaagtgccaccagtgcaccagcctgatggtgggcctcatccggcagggctgcagctgtgaggtgtgtggcttcagctgccacatcacctgtgtgaacaaggcccccaccacctgccctgtgcccccagagcagaccaagggccccctgggcatcgacccccagaagggcattggaacagcctatgagggccacgtgcgcatccccaagccagctggggtgaagaagggctggcagagggccctggccatcgtgtgtgacttcaagctgttcctgtatgacattgctgagggcaaggccagccagcccagcgtggtgatcagccaggtgattgacatgagagatgaggagttctctgtgtcctctgtgctggccagtgatgtgattcatgccagcaggaaggacatcccctgcatcttccgggtgacagccagccagctgagcgccagcaacaacaagtgcagcatcctgatgctggccgacacagaaaatgagaagaacaagtgggtgggcgtgctgtctgagctgcacaagatcctgaagaagaacaagttccgggacagatctgtgtatgtgcccaaggaggcctatgacagcaccctgcccctcatcaagaccacccaggccgccgccatcatcgaccacgagagaattgccctgggcaatgaggagggcctgtttgtggtgcacgtgaccaaggatgagatcatccgggtgggggacaacaagaagatccaccagatcgagctgatccccaatgaccagctggtggccgtcatcagcggcaggaacagacatgtgcggctcttccccatgtctgccctggatggccgggagacagacttctacaagctgtctgagaccaagggctgccagacagtgaccagcggcaaggtgcgccacggggccctgacctgcctgtgtgtggccatgaagaggcaggtgctgtgctatgagctgttccagagcaagaccaggcacaggaagttcaaggagatccaggtgccctacaacgtgcagtggatggccatcttcagcgagcagctgtgtgtgggcttccagagcggcttcctgcgctaccccctgaatggagagggcaacccctacagcatgctgcacagcaatgaccacaccctgtccttcatcgcccaccagcccatggatgccatctgtgctgtggagatcagcagcaaggagtacctgctgtgcttcaacagcatcggcatctacacagactgccagggcagaagaagccggcagcaggagctgatgtggccagccaaccccagcagctgctgctacaatgccccctacctgtctgtgtacagtgaaaatgctgtggacatctttgatgtgaacagcatggagtggatccagaccctgcccctgaagaaggtgcggcccctgaacaatgaaggcagcctgaacctgctgggcctggagaccatccgcctcatctacttcaagaacaagatggcctag

SEQ ID NO: 146892 - DNA, 3147 bp, synthetic construct
  misc_feature 1..3147: note = Description of Artificial Sequence: Synthetic coding sequence
  source 1..3147: mol_type = other DNA
tgagaaggcatccacgccaatgagatcaagaacctgaagaaggagctgcatgattctgagggccagcagctggccctgaacaaggagatcatgatcctgaaggacaagctggagaagacccggcgggagagccagagcgagcgggaggagtttgaaagtgagttcaagcagcagtatgagcgggagaaggtgctgctgacagaggagaacaagaagctgaccagcgagctggacaagctgaccaccctgtatgagaacctgagcatccacaaccagcagctggaggaggaggtgaaggacctggccgacaagaaggagagcgtggcccactgggaggcccagatcacagagatcatccagtgggtgtctgatgagaaggatgcccggggctacctgcaggccctggccagcaagatgacagaggagctggaggccctgaggaacagcagcctgggcacccgggccacagacatgccctggaagatgagaagatttgccaagctggacatgtctgcccggctggagctgcagagcgccctggatgctgagatccgggccaagcaggccatccaggaggagctgaacaaggtgaaggccagcaacatcatcacagagtgcaagctgaaggacagcgagaagaagaacctggagctgctgtctgaaattgagcagctgatcaaggacacagaggagctgcggtctgagaagggcatcgagcaccaggacagccagcacagcttcctggccttcctgaacacccccacagatgccctggaccagtttgaaacagatcctgtggagaacacctacgtgtggaaccccagcgtgaagttccacatccagagccgcagcaccagccccagcaccagcagcgaggccgagcctgtgaagacagtggacagcacccccctgtctgtgcacacccccaccctgaggaagaagggctgccccggcagcacaggcttcccccccaagaggaagacccaccagttctttgtgaagagcttcaccacccccaccaagtgccaccagtgcaccagcctgatggtgggcctcatccggcagggctgcagctgtgaggtgtgtggcttcagctgccacatcacctgtgtgaacaaggcccccaccacctgccctgtgcccccagagcagaccaagggccccctgggcatcgacccccagaagggcattggaacagcctatgagggccacgtgcgcatccccaagccagctggggtgaagaagggctggcagagggccctggccatcgtgtgtgacttcaagctgttcctgtatgacattgctgagggcaaggccagccagcccagcgtggtgatcagccaggtgattgacatgagagatgaggagttctctgtgtcctctgtgctggccagtgatgtgattcatgccagcaggaaggacatcccctgcatcttccgggtgacagccagccagctgagcgccagcaacaacaagtgcagcatcctgatgctggccgacacagaaaatgagaagaacaagtgggtgggcgtgctgtctgagctgcacaagatcctgaagaagaacaagttccgggacagatctgtgtatgtgcccaaggaggcctatgacagcaccctgcccctcatcaagaccacccaggccgccgccatcatcgaccacgagagaattgccctgggcaatgaggagggcctgtttgtggtgcacgtgaccaaggatgagatcatccgggtgggggacaacaagaagatccaccagatcgagctgatccccaatgaccagctggtggccgtcatcagcggcaggaacagacatgtgcggctcttccccatgtctgccctggatggccgggagacagacttctacaagctgtctgagaccaagggctgccagacagtgaccagcggcaaggtgcgccacggggccctgacctgcctgtgtgtggccatgaagaggcaggtgctgtgctatgagctgttccagagcaagaccaggcacaggaagttcaaggagatccaggtgccctacaacgtgcagtggatggccatcttcagcgagcagctgtgtgtgggcttccagagcggcttcctgcgctaccccctgaatggagagggcaacccctacagcatgctgcacagcaatgaccacaccctgtccttcatcgcccaccagcccatggatgccatctgtgctgtggagatcagcagcaaggagtacctgctgtgcttcaacagcatcggcatctacacagactgccagggcagaagaagccggcagcaggagctgatgtggccagccaaccccagcagctgctgctacaatgccccctacctgtctgtgtacagtgaaaatgctgtggacatctttgatgtgaacagcatggagtggatccagaccctgcccctgaagaaggtgcggcccctgaacaatgaaggcagcctgaacctgctgggcctggagaccatccgcctcatctacttcaagaacaagatggccgagggagatgagctggtggtgcctgagaccagtgacaacagcaggaagcagatggtgaggaacatcaacaacaagaggcgctacagcttccgggtgcctgaggaggagaggatgcagcagaggcgggagatgctgcgggaccctgagatgaggaacaagctgatcagcaaccccaccaacttcaaccacatcgcccacatgggccctggagatggcatccagatcctgaaggacctgcccatgaacccccggccccaggagagcaggacagtgttttctggctctgtgtccatccccagcatcaccaagagcaggcctgagcccggccgctccatgtctgccagcagcggcctgagcgcccggagcagcgcccagaatggcagcgccctgaagcgggagttcagcggcggcagctacagcgccaagaggcagcccatgcccagccccagcgagggcagcctgagcagcggcggcatggaccagggcagtgatgccccagcccgggactttgatggagaagattctgacagccccaggcacagcacagccagcaacagcagcaacctgagcagcccccccagccctgccagccccaggaagaccaagagcctgagcctggagagcacagaccggggctcctgggacccctag

SEQ ID NO: 146893 - DNA, 2955 bp, synthetic construct
  misc_feature 1..2955: note = Description of Artificial Sequence: Synthetic coding sequence
  source 1..2955: mol_type = other DNA
tgacagctggaggaggaggtgaaggacctggccgacaagaaggagagcgtggcccactgggaggcccagatcacagagatcatccagtgggtgtctgatgagaaggatgcccggggctacctgcaggccctggccagcaagatgacagaggagctggaggccctgaggaacagcagcctgggcacccgggccacagacatgccctggaagatgagaagatttgccaagctggacatgtctgcccggctggagctgcagagcgccctggatgctgagatccgggccaagcaggccatccaggaggagctgaacaaggtgaaggccagcaacatcatcacagagtgcaagctgaaggacagcgagaagaagaacctggagctgctgtctgaaattgagcagctgatcaaggacacagaggagctgcggtctgagaagggcatcgagcaccaggacagccagcacagcttcctggccttcctgaacacccccacagatgccctggaccagtttgagaccgtggacagcacccccctgtctgtgcacacccccaccctgaggaagaagggctgccccggcagcacaggcttcccccccaagaggaagacccaccagttctttgtgaagagcttcaccacccccaccaagtgccaccagtgcaccagcctgatggtgggcctcatccggcagggctgcagctgtgaggtgtgtggcttcagctgccacatcacctgtgtgaacaaggcccccaccacctgccctgtgcccccagagcagaccaagggccccctgggcatcgacccccagaagggcattggaacagcctatgagggccacgtgcgcatccccaagccagctggggtgaagaagggctggcagagggccctggccatcgtgtgtgacttcaagctgttcctgtatgacattgctgagggcaaggccagccagcccagcgtggtgatcagccaggtgattgacatgagagatgaggagttctctgtgtcctctgtgctggccagtgatgtgattcatgccagcaggaaggacatcccctgcatcttccgggtgacagccagccagctgagcgccagcaacaacaagtgcagcatcctgatgctggccgacacagaaaatgagaagaacaagtgggtgggcgtgctgtctgagctgcacaagatcctgaagaagaacaagttccgggacagatctgtgtatgtgcccaaggaggcctatgacagcaccctgcccctcatcaagaccacccaggccgccgccatcatcgaccacgagagaattgccctgggcaatgaggagggcctgtttgtggtgcacgtgaccaaggatgagatcatccgggtgggggacaacaagaagatccaccagatcgagctgatccccaatgaccagctggtggccgtcatcagcggcaggaacagacatgtgcggctcttccccatgtctgccctggatggccgggagacagacttctacaagctgtctgagaccaagggctgccagacagtgaccagcggcaaggtgcgccacggggccctgacctgcctgtgtgtggccatgaagaggcaggtgctgtgctatgagctgttccagagcaagaccaggcacaggaagttcaaggagatccaggtgccctacaacgtgcagtggatggccatcttcagcgagcagctgtgtgtgggcttccagagcggcttcctgcgctaccccctgaatggagagggcaacccctacagcatgctgcacagcaatgaccacaccctgtccttcatcgcccaccagcccatggatgccatctgtgctgtggagatcagcagcaaggagtacctgctgtgcttcaacagcatcggcatctacacagactgccagggcagaagaagccggcagcaggagctgatgtggccagccaaccccagcagctgctgctacaatgccccctacctgtctgtgtacagtgaaaatgctgtggacatctttgatgtgaacagcatggagtggatccagaccctgcccctgaagaaggtgcggcccctgaacaatgaaggcagcctgaacctgctgggcctggagaccatccgcctcatctacttcaagaacaagatggccgagggagatgagctggtggtgcctgagaccagtgacaacagcaggaagcagatggtgaggaacatcaacaacaagaggcgctacagcttccgggtgcctgaggaggagaggatgcagcagaggcgggagatgctgcgggaccctgagatgaggaacaagctgatcagcaaccccaccaacttcaaccacatcgcccacatgggccctggagatggcatccagatcctgaaggacctgcccatgcctggcttcccctaccccagcccccaccaccacagcggcctcatcagcagccccatcaactttgagcacatctaccacatgacagtgaacagcgctgagaagttcctgagcccagacagcatcaaccctgagtacagccccagcctgcggtctgtgcccggcacccccagcttcatgaccctgaggaacccccggccccaggagagcaggacagtgttttctggctctgtgtccatccccagcatcaccaagagcaggcctgagcccggccgctccatgtctgccagcagcggcctgagcgcccggagcagcgcccagaatggcagcgccctgaagcgggagttcagcggcggcagctacagcgccaagaggcagcccatgcccagccccagcgagggcagcctgagcagcggcggcatggaccagggcagtgatgccccagcccgggactttgatggagaagattctgacagccccaggcacagcacagccagcaacagcagcaacctgagcagcccccccagccctgccagccccaggaagaccaagagcctgagcctggagagcacagaccggggctcctgggacccctag

SEQ ID NO: 146894 - DNA, 5100 bp, synthetic construct
  misc_feature 1..5100: note = Description of Artificial Sequence: Synthetic coding sequence
  source 1..5100: mol_type = other DNA
atgtctggagaggtgcggctgcggcagctggagcagttcatcctggatggccctgcccagaccaacggccagtgcttctctgtggagaccctgctggacatcctgatctgcctgtatgatgagtgcaacaacagccccctgcggcgggagaagaacatcctggagtacctggagtgggccaagcccttcaccagcaaggtgaagcagatgaggctgcacagagaagattttgagatcctgaaggtgattggccgcggggccttcggggaggtggccgtggtgaagctgaagaatgctgacaaggtgtttgccatgaagatcctgaacaagtgggagatgctgaagagagctgagacagcctgcttccgggaggagagagatgtgctggtgaatggagacaacaagtggatcaccaccctgcactacgccttccaggatgacaacaacctgtacctggtgatggactactacgtgggcggggacctgctgaccctgctgagcaagtttgaggaccggctgcctgaggacatggcccgcttctacctggccgagatggtgattgccattgattctgtgcaccagctgcactacgtgcaccgggacatcaagccagacaacatcctgatggacatgaatggccacatccggctggccgactttggcagctgcctgaagctgatggaggatggcaccgtgcagagctctgtggccgtgggcaccccagactacatcagccctgagatcctgcaggccatggaggatggcaagggccgctatggcccagaatgtgactggtggagcctgggcgtgtgcatgtatgagatgctgtatggagagacccccttctacgccgagagcctggtggagacctacggcaagatcatgaaccacaaggagcgcttccagtttcctgcccaggtgacagatgtgtctgaaaatgccaaggacctgatcagaagactcatctgcagccgggagcaccggctgggccagaatggaattgaggacttcaagaagcaccccttcttcagcggcatcgactgggacaacatccggaactgtgaggccccctacatccctgaggtgagcagccccacagacaccagcaactttgatgtggatgatgactgcctgaagaacagcgagaccatgcccccacccacccacacagccttcagcggccaccacctgccctttgtgggcttcacctacaccagcagctgtgtgctgagtgacaggagctgcctgcgggtgacagctggccccaccagcctggacctggatgtgaatgtgcagaggaccctggacaacaacctggccacagaggcctatgaaagacgcatcaagaggctggagcaggagaagctggagctgagcaggaagctgcaggagagcacccagacagtgcaggccctgcagtacagcacagtggatggccccctgacagccagcaaggacctggagatcaagaacctgaaggaggagattgagaagctgaggaagcaggtgacagagagcagccacctggagcagcagctggaggaggccaatgctgtgcggcaggagctggatgatgccttccggcagatcaaggcctatgagaagcagatcaagaccctgcagcaggagcgggaggacctgaacaaggagctggtgcaggccagcgagcggctgaagaaccagagcaaggagctgaaggatgcccactgccagaggaagctggccatgcaggagttcatggagatcaatgaaaggctgacagagctgcacacccagaagcagaagctggcccggcacgtgcgggacaaggaggaggaggtggacctggtgatgcagaaggtggagagcctgcggcaggagctgcggaggacagagcgggccaagaaggagctggaggtgcacacagaggccctggccgctgaggccagcaaggacaggaagctgcgggagcagagcgagcactacagcaagcagctggagaatgagctggagggcctgaagcagaagcagatctcctacagccctggggtgtgcagcattgagcaccagcaggagatcaccaagctgaagacagacctggagaagaagagcatcttctatgaggaggagctgagcaagcgggagggcatccacgccaatgagatcaagaacctgaagaaggagctgcatgattctgagggccagcagctggccctgaacaaggagatcatgatcctgaaggacaagctggagaagacccggcgggagagccagagcgagcgggaggagtttgaaagtgagttcaagcagcagtatgagcgggagaaggtgctgctgacagaggagaacaagaagctgaccagcgagctggacaagctgaccaccctgtatgagaacctgagcatccacaaccagcagctggaggaggaggtgaaggacctggccgacaagaaggagagcgtggcccactgggaggcccagatcacagagatcatccagtgggtgtctgatgagaaggatgcccggggctacctgcaggccctggccagcaagatgacagaggagctggaggccctgaggaacagcagcctgggcacccgggccacagacatgccctggaagatgagaagatttgccaagctggacatgtctgcccggctggagctgcagagcgccctggatgctgagatccgggccaagcaggccatccaggaggagctgaacaaggtgaaggccagcaacatcatcacagagtgcaagctgaaggacagcgagaagaagaacctggagctgctgtctgaaattgagcagctgatcaaggacacagaggagctgcggtctgagaaggccagcaaaggaagaagaacagtggacagcacccccctgtctgtgcacacccccaccctgaggaagaagggctgccccggcagcacaggcttcccccccaagaggaagacccaccagttctttgtgaagagcttcaccacccccaccaagtgccaccagtgcaccagcctgatggtgggcctcatccggcagggctgcagctgtgaggtgtgtggcttcagctgccacatcacctgtgtgaacaaggcccccaccacctgccctgtgcccccagagcagaccaagggccccctgggcatcgacccccagaagggcatcggcacagcctatgagggccacgtgcgcatccccaagccagctggggtgaagaagggctggcagagggccctggccatcgtgtgtgacttcaagctgttcctgtatgacattgctgagggcaaggccagccagcccagcgtggtgatcagccaggtgattgacatgagagatgaggagttctctgtgtcctctgtgctggccagtgatgtgatccacgccagcaggaaggacatcccctgcatcttccgggtgacagccagccagctgagcgccagcaacaacaagtgcagcatcctgatgctggccgacacagaaaatgagaagaacaagtgggtgggcgtgctgtctgagctgcacaagatcctgaagaagaacaagttccgggacagatctgtgtatgtgcccaaggaggcctatgacagcaccctgcccctcatcaagaccacccaggccgccgccatcatcgaccacgagcgcatcgccctgggcaatgaggagggcctgtttgtggtgcacgtgaccaaggatgagatcatccgggtgggggacaacaagaagatccaccagatcgagctgatccccaatgaccagctggtggccgtcatctctggaagaaacagacatgtgcggctcttccccatgtctgccctggatggccgggagacagacttctacaagctgtctgagaccaagggctgccagacagtgaccagcggcaaggtgagacatggagccctgacctgcctgtgtgtggccatgaagaggcaggtgctgtgctatgagctgttccagagcaagaccaggcacaggaagttcaaggagatccaggtgccctacaacgtgcagtggatggccatcttcagcgagcagctgtgtgtgggcttccagagcggcttcctgcgctaccccctgaatggagagggcaacccctacagcatgctgcacagcaatgaccacaccctgtccttcatcgcccaccagcccatggatgccatctgtgctgtggagatcagcagcaaggagtacctgctgtgcttcaacagcatcggcatctacacagactgccagggccgccgcagccggcagcaggagctgatgtggccagccaaccccagcagctgctgctacaatgccccctacctgtctgtgtacagtgaaaatgctgtggacatctttgatgtgaacagcatggagtggatccagaccctgcccctgaagaaggtgcggcccctgaacaatgaaggcagcctgaacctgctgggcctggagaccatccgcctcatctacttcaagaacaagatggccgagggagatgagctggtggtgcctgagaccagtgacaacagcaggaagcagatggtgaggaacatcaacaacaagaggcgctacagcttccgggtgcctgaggaggagaggatgcagcagaggcgggagatgctgcgggaccctgagatgaggaacaagctgatcagcaaccccaccaacttcaaccacatcgcccacatgggccctggagatggcatccagatcctgaaggacctgcccatgaacccccggccccaggagagcaggacagtgttcagcggctctgtgtccatccccagcatcaccaagagcaggcctgagcccggccgctccatgtctgccagcagcggcctgagcgcccggagcagcgcccagaatggaagtgccctgaagcgggagttcagcggcggcagctacagcgccaagaggcagcccatgcccagccccagcgagggcagcctgagcagcggcggcatggaccagggcagtgatgccccagcccgggactttgatggagaggacagcgacagccccaggcacagcacagccagcaacagcagcaacctgagcagcccccccagccctgccagccccaggaagaccaagagcctgagcctggagagcacagaccggggctcctgggacccctag

SEQ ID NO: 146895 - DNA, 5136 bp, synthetic construct
  misc_feature 1..5136: note = Description of Artificial Sequence: Synthetic coding sequence
  source 1..5136: mol_type = other DNA
atgtctgccaaggtgcggctgaagaagctggagcagctgctgctggatggcccctggagaaatgaaagtgccctgtctgtggagaccctgctggatgtgctggtgtgcctgtacacagagtgcagccacagcgccctgcggcgggacaagtatgtggccgagttcctggagtgggccaagcccttcacccagctggtgaaggagatgcagctgcaccgggaggactttgagatcatcaaggtgattggccgcggggcctttggagaggtggccgtggtgaagatgaagaacacagagcgcatctatgccatgaagatcctgaacaagtgggagatgctgaagagagctgagacagcctgcttccgggaggagagagatgtgctggtgaatggagactgccagtggatcacagccctgcactacgccttccaggatgagaaccacctgtacctggtgatggactactacgtgggcggggacctgctgaccctgctgagcaagtttgaggacaagctgcctgaggacatggcccgcttctacatcggggagatggtgctggccatcgacagcatccaccagctgcactacgtgcaccgggacatcaagccagacaacgtgctgctggatgtgaatggccacatccggctggccgactttggcagctgcctgaagatgaatgatgatggcaccgtgcagagctctgtggccgtgggcaccccagactacatcagccctgagatcctgcaggccatggaggatggcatgggcaagtatggcccagaatgtgactggtggagcctgggcgtgtgcatgtatgagatgctgtatggagagacccccttctatgcagagagcctggtggagacctacggcaagatcatgaaccacgaggagcgcttccagttccccagccacgtgacagatgtgtctgaggaggccaaggacctgatccagaggctcatctgcagccgggagcggcggctgggccagaatggaattgaggacttcaagaagcacgccttctttgagggcctgaactgggagaacatccggaacctggaggccccctacatcccagatgtgagcagccccagcgacaccagcaactttgatgtggatgatgatgtgctgaggaacacagagatcctgcccccaggcagccacacaggcttcagcggcctgcacctgcccttcatcggcttcaccttcaccacagagagctgcttcagtgaccggggcagcctgaagagcatcatgcagagcaacaccctgaccaaggatgaagatgtgcagagggacctggagcacagcctgcagatggaggcctatgaaagacgcatccggcggctggagcaggagaagctggagctgagcaggaagctgcaggagagcacccagacagtgcagagcctgcacggcagcagccgggccctgagcaacagcaacagagacaaggagatcaagaagctgaatgaggagattgaaaggctgaagaacaagattgctgacagcaaccggctggagcggcagctggaggacacagtggccctgcggcaggagcgggaggacagcacccagaggctgcggggcctggagaagcagcaccgggtggtgcggcaggagaaggaggagctgcacaagcagctggtggaggccagcgagcggctgaagagccaggccaaggagctgaaggatgcccaccagcagaggaagctggccctgcaggagttcagcgagctgaatgaaagaatggccgagctgcgggcccagaagcagaaggtgtcccggcagctgcgggacaaggaggaggagatggaggtggccacccagaaggtggatgccatgaggcaggagatgagaagagctgagaagctgaggaaggagctggaggcccagctggatgatgctgtggccgaggccagcaaggagaggaagctgcgggagcacagcgagaacttctgcaagcagatggagagcgagctggaggccctgaaggtgaagcagggcggcagaggagctggggccaccctggagcaccagcaggagatcagcaagatcaagtctgagctggagaagaaggtgctcttctatgaggaggagctggtgagaagagaggccagccacgtgctggaggtgaagaatgtgaagaaggaggtgcatgacagcgagagccaccagctggccctgcagaaggagatcctgatgctgaaggacaagctggagaagagcaagcgggagcggcacaatgagatggaggaggccgtgggcaccatcaaggacaagtatgaaagagagcgggccatgctgtttgatgagaacaagaagctgacagcagaaaatgagaagctgtgcagctttgtggacaagctgacagcccagaaccggcagctggaggatgagctgcaggacctggccgccaagaaggagagcgtggcccactgggaggcccagattgctgagatcatccagtgggtgtctgatgagaaggatgcccggggctacctgcaggccctggccagcaagatgacagaggagctggaggccctgcggagcagcagcctgggcagcaggaccctggaccccctgtggaaggtgcggcgcagccagaagctggacatgtctgcccggctggagctgcagagcgccctggaggccgagatccgggccaagcagctggtgcaggaggagctgaggaaggtgaaggatgccaacctgaccctggagagcaagctgaaggacagcgaggccaagaaccgggagctgctggaggagatggagatcctgaagaagaagatggaggagaagttccgggctgacaccggcctgaagctgcctgacttccaggacagcatctttgagtacttcaacacagcccccctggcccatgacctgaccttccgcaccagcagcgccagcgagcaggagacccaggcccccaagccagaggccagccccagcatgtctgtggccgccagcgagcagcaggaggacatggcccggcccccccagaggcccagcgctgtgcccctgcccaccacccaggccctggccctggccggccccaagcccaaggcccaccagttcagcatcaagagcttcagcagccccacccagtgcagccactgcaccagcctgatggtgggcctcatccggcagggctacgcctgtgaggtgtgcagctttgcctgccacgtgtcctgcaaggatggagccccccaggtgtgccccatccccccagagcagagcaagaggcccctgggcgtggatgtgcagaggggcatcggcacagcctacaagggccacgtgaaggtgcccaagcccaccggggtgaagaagggctggcagagggcctatgctgtggtgtgtgactgcaagctgttcctgtatgacctgcctgagggcaagagcacccagcccggggtcatcgccagccaggtgctggacctgagagatgatgagttctctgtgtcctctgtgctggccagtgatgtgatccacgccacccggcgggacatcccctgcatcttccgggtgacagccagcctgctgggcgcccccagcaagaccagcagcctgctgatcctgacagaaaatgaaaatgagaagaggaagtgggtgggcatcctggagggcctgcagagcatcctgcacaagaaccggctgaggaaccaggtggtgcacgtgcccctggaggcctatgacagcagcctgcccctcatcaaggccatcctgacagctgccatcgtggatgctgacagaattgctgtgggcctggaggagggcctgtatgtgattgaggtgaccagagatgtgattgtgcgggctgctgactgcaagaaggtgcaccagatcgagctggccccccgggagaagatcgtcatcctgctgtgtggcaggaaccaccacgtgcacctgtacccctggagcagcctggatggagctgagggcagctttgacatcaagctgcctgagaccaagggctgccagctgatggccacagccaccctgaagaggaacagcggcacctgcctgtttgtggccgtgaagaggctcatcctgtgctatgagatccagaggaccaagcccttccacaggaagttcaatgagatcgtggcccctggctctgtgcagtgcctggccgtgctgcgggaccggctgtgtgtgggctaccccagcggcttctgcctgctgagcatccagggagatggccagcccctgaacctggtgaaccccaatgaccccagcctggccttcctgagccagcagagctttgatgccctgtgtgctgtggagctggagagcgaggagtacctgctgtgcttcagccacatgggcctgtatgtggacccccagggcagaagagcccgggcccaggagctgatgtggccagctgcccctgtggcctgcagctgcagccccacccacgtgacagtgtacagtgaatatggagtggatgtgtttgatgtgaggaccatggagtgggtgcagaccatcggcctgcggcgcatccggcccctgaacagcgagggcaccctgaacctgctgaactgtgagccccccaggctcatctacttcaagagcaagttcagcggggctgtgctgaatgtgcctgacaccagtgacaacagcaagaagcagatgctgcggaccaggagcaagagaagatttgtgttcaaggtgcctgaggaggagcggctgcagcagaggcgggagatgctgcgggaccctgagctgcggagcaagatgatcagcaaccccaccaacttcaaccacgtggcccacatgggccctggagatggcatgcaggtgctgatggacctgcccctgtctgctgtgccccccagccaggaggagcggcccggccctgcccccaccaacctggcccggcagccccccagcaggaacaagccctacatctcctggcccagcagcggcggcagcgagcccagcgtgacagtgcccctgcgctccatgtctgaccctgaccaggactttgacaaggagccagacagcgacagcaccaagcacagcacccccagcaacagcagcaaccccagcggcccccccagccccaacagcccccacaggagccagctgcccctggagggcctggagcagcctgcctgtgacacctag

SEQ ID NO: 146896 - DNA, 1593 bp, synthetic construct
  misc_feature 1..1593: note = Description of Artificial Sequence: Synthetic coding sequence
  source 1..1593: mol_type = other DNA
aaggtgagaagaagccagaagctggacatgtctgcccggctggagctgcagagcgccctggaggccgagatccgggccaagcagctggtgcaggaggagctgaggaaggtgaaggatgccaacctgaccctggagagcaagctgaaggacagcgaggccaagaaccgggagctgctggaggagatggagatcctgaagaagaagatggaggagaagttccgggctgacaccggcctgaagctgcctgacttccaggacagcatctttgagtacttcaacacagcccccctggcccatgacctgaccttccgcaccagcagcgccagcgagcaggagacccaggcccccaagccagaggccagccccagcatgtctgtggccgccagcgagcagcaggagcccaaggcccaccagttcagcatcaagagcttcagcagccccacccagtgcagccactgcaccagcctgatggtgggcctcatccggcagggctacgcctgtgaggtgtgcagctttgcctgccacgtgtcctgcaaggatggagccccccaggtgtgccccatccccccagagcagagcaagaggcccctgggcgtggatgtgcagaggggcattggaacagcctacaagggccacgtgaaggtgcccaagcccactggagtgaagaagggctggcagagggcctatgctgtggtgtgtgactgcaagctgttcctgtatgacctgcctgagggcaagagcacccagcccggggtgattgccagccaggtgctggacctgagagatgatgagttctctgtgtcctctgtgctggccagtgatgtgattcatgccacccggcgggacatcccctgcatcttccgggtgacagccagcctgctgggcgcccccagcaagaccagcagcctgctgatcctgacagaaaatgaaaatgagaagaggaagtgggtgggcatcctggagggcctgcagagcatcctgcacaagaaccggctgaggaaccaggtggtgcacgtgcccctggaggcctatgacagcagcctgcccctcatcaaggccatcctgacagctgccatcgtggatgctgacagaattgctgtgggcctggaggagggcctgtatgtgattgaggtgaccagagatgtgattgtgcgggctgctgactgcaagaaggtgcaccagatcgagctggccccccgggagaagatcgtcatcctgctgtgtggcaggaaccaccacgtgcacctgtacccctggagcagcctggatggagctgagggcagctttgacatcaagctgcctgagaccaagggctgccagctgatggccacagccaccctgaagagaaattctggcacctgcctgtttgtggccgtgaagaggctcatcctgtgctatgagatccagaggaccaagcccttccacaggaagttcaatgaaattgtggcccctggctctgtgcagtgcctggccgtgctgcgggaccggctgtgtgtgggctaccccagcggcttctgcctgctgagcatccagggagatggccagcccctgaacctggtgaaccccaatgaccccagcctggccttcctgtag

SEQ ID NO: 146897 - DNA, 4656 bp, synthetic construct
  misc_feature 1..4656: note = Description of Artificial Sequence: Synthetic coding sequence
  source 1..4656: mol_type = other DNA
atggagcggcggctgcgggccctggagcagctggcccggggggaggccggcggctgccccggcctggatggcctgctggacctgctgctggccctgcaccacgagctgagcagcggccccctgcggcgggagaggtctgtggcccagttcctgtcctgggccagcccctttgtgtccaaggtgaaggagctgcggctgcagagagatgactttgagatcctgaaggtgattggccgcggggccttcggggaggtgacagtggtgcggcagagggacaccggccagatctttgccatgaagatgctgcacaagtgggagatgctgaagagagctgagacagcctgcttccgggaggagagagatgtgctggtgaagggggacagccgctgggtgaccaccctgcactacgccttccaggatgaggagtacctgtacctggtgatggactactatgctggaggagacctgctgaccctgctgagcagatttgaggaccggctgcccccagagctggcccagttctacctggccgagatggtgctggccatccacagcctgcaccagctgggctacgtgcacagagatgtgaagccagacaacgtgctgctggatgtgaatggccacatccggctggccgactttggcagctgcctgcggctgaacaccaacggcatggtggacagctctgtggccgtgggcaccccagactacatcagccctgagatcctgcaggccatggaggagggcaagggccactacggcccccagtgtgactggtggagcctgggcgtgtgtgcctatgagctgctgtttggagagacccccttctacgccgagagcctggtggagacctacggcaagatcatgaaccacgaggaccacctgcagttccccccagatgtgcctgatgtgcctgccagcgcccaggacctgatccggcagctgctgtgccggcaggaggagcggctgggccggggcggcctggatgacttcaggaaccaccccttctttgaaggagtggactgggagcggctggccagcagcacagccccctacatccctgagctgcggggccccatggacaccagcaactttgatgtggatgatgacaccctgaaccaccctggcaccctgcccccacccagccatggagccttcagcggccaccacctgccctttgtgggcttcacctacaccagcggcagccacagccctgagagcagcagcgaggcctgggccgccctggagaggaagctgcagtgcctggagcaggagaaggtggagctgagcaggaagcaccaggaggccctgcacgcccccacagaccaccgggagctggagcagctgaggaaggaggtgcagaccctgcgggaccggctgcctgagatgctgcgggacaaggccagcctgagccagacagatggccccccagctggcagccctggccaggacagcgacctgcggcaggagctggaccggctgcaccgggagctggccgagggccgggccggcctgcaggcccaggagcaggagctgtgccgggcccagggccagcaggaggagctgctgcagaggctgcaggaggcccaggagcgggaggccgccacagccagccagacccgggccctgagcagccagctggaggaggcccgggccgcccagcgggagctggaggcccaggtgagcagcctgagccggcaggtgacccagctgcagggccagtgggagcagaggctggaggagagcagccaggccaagaccatccacacagccagcgagaccaacggcatgggccccccagagggcggcccccaggaggcccagctgaggaaggaggtggccgccctgcgggagcagctggagcaggcccacagccaccggcccagcggcaaggaggaggccctgtgccagctgcaggaggagaacagaaggctgagccgggagcaggagcggctggaggccgagctggcccaggagcaggagagcaagcagaggctggagggggagcggcgggagacagagagcaactgggaggcccagctggccgacatcctgtcctgggtgaatgatgagaaggtgtcccggggctacctgcaggccctggccaccaagatggccgaggagctggagagcctgagaaatgtgggcacccagaccctgcctgcccggcccctggaccaccagtggaaggcccggcggctgcagaagatggaggccagcgcccggctggagctgcagagcgccctggaggccgagatccgggccaagcagggcctgcaggagcggctgacccaggtgcaggaggcccagctgcaggccgagcggcggctgcaggaggccgagaagcagagccaggccctgcagcaggagctggccatgctgcgggaggagctgcgggcccggggccctgtggacaccaagcccagcaacagcctcatccccttcctgtccttccgcagcagcgagaaggacagcgccaaggaccccggcatcagcggggaggccaccaggcatggaggagagccagacctgcggcctgagggcagaagaagcctgaggatgggcgctgtgttcccccgggcccccacagccaacacagccagcacagagggcctgcctgccaagccaggcagccacaccctgcggcccaggagcttccccagccccaccaagtgcctgcgctgcaccagcctgatgctgggcctgggccggcagggcctgggctgtgatgcctgtggctacttctgccacaccacctgtgccccccaggccccaccctgccctgtgcccccagacctgctgaggacagccctgggcgtgcaccctgagaccggcaccggcacagcctatgagggcttcctgtctgtgccccggcccagcggcgtgagaagaggctggcagagggtgtttgctgccctgagtgacagccggctgctgctgtttgatgccccagacctgcggctgagcccccccagcggggccctgctgcaggtgctggacctgcgggacccccagttcagcgccacccctgtgctggccagtgatgtgatccacgcccagagccgggacctgccccgcatcttccgggtgaccaccagccagctggccgtgccccccaccacctgcaccgtgctgctgctggccgagagcgagggggagcgggagcgctggctgcaggtgctgggggagctgcagaggctgctgctggatgcccggccccggcccaggcctgtgtacaccctgaaggaggcctatgacaatggcctgcccctgctgccccacaccctgtgtgccgccatcctggaccaggaccggctggccctgggcacagaggagggcctgtttgtgatccacctgcggagcaatgacatcttccaggtgggagaatgtagaagagtgcagcagctgaccctgagccccagcgctggcctgctggtggtgctgtgtggccggggccccagcgtgcggctgtttgccctggccgagctggagaacatcgaggtggccggggccaagatccctgagagccggggctgccaggtgctggccgccggcagcatcctgcaggcccggacccctgtgctgtgtgtggccgtgaagaggcaggtgctgtgctaccagctgggccctggccctggcccctggcagaggcgcatccgggagctgcaggccccagccaccgtgcagagcctgggcctgctgggggaccggctgtgtgtgggcgctgctgggggctttgccctgtaccccctgctgaatgaagctgcccccctggccctgggcgccggcctggtgcctgaggagctgccccccagccggggcggcctgggggaggccctgggcgctgtggagctgagcctgtctgagttcctgctgctcttcaccacagctggcatctacgtggatggagctggcaggaagagccggggccacgagctgctgtggccagctgcccccatgggctggggctatgctgccccctacctgaccgtcttcagcgagaacagcattgatgtgtttgatgtgagaagagctgagtgggtgcagacagtgcccctgaagaaggtgcggcccctgaaccctgagggcagcctcttcctgtatggaacagagaaggtgcggctgacctacctgaggaaccagctggccgagaaggatgaatttgacatcccagacctgacagacaacagccggcggcagctgttccgcaccaagagcaagaggcgcttcttcttccgggtgtctgaggagcagcagaagcagcagaggcgggagatgctgaaggacccctttgtgcgcagcaagctgatcagcccccccaccaacttcaaccacctggtgcacgtgggccctgccaacggccggcctggggcccgggacaagagccctgcccctgaggagaagggccgggtggcccggggcagcggcccccagaggccccacagcttcagcgaggccctgcggcggcctgcctccatgggcagcgagggcctgggcggagatgctgaccccatgaagaggaagccctggaccagcctgagcagcgagagcgtgtcctgcccccagggcagcctgagccctgccaccagcctgatgcaggtgtctgagcggcccaggagcctgcccctgagccctgagctggagagcagcccctag

SEQ ID NO: 146898 - DNA, 1176 bp, synthetic construct
  misc_feature 1..1176: note = Description of Artificial Sequence: Synthetic coding sequence
  source 1..1176: mol_type = other DNA
atgcctggcccccagggcggccgcggggccgccaccatgagcctgggcaagctgagccctgtgggctgggtgagcagcagccagggcaagaggcggctgacagctgacatgatcagccaccccctgggggacttccgccacaccatgcacgtgggcagaggaggagatgtgtttggagacaccagcttcctgagcaaccacggcggcagcagcggcagcacccacaggagccccaggagcttcctggccaagaagctgcagctggtgcggcgggtgggcgccccacccaggaggatggccagccccccagcccccagccctgcccccccagccatcagccccatcatcaagaatgccatcagcctgccccagctgaaccaggccgcctatgacagcctggtggtgggcaagctgagctttgacagcagccccaccagcagcacagatggccacagcagctatggcctggacagcggcttctgcaccatcagccggctgcccaggtctgagaagccccatgaccgggacagagatggcagcttccccagcgagcccggcctgcggcggagtgacagcctgctgtccttccggctggacctggacctgggccccagcctgctgtctgagctgctgggcgtgatgagcctgcctgaggccccagctgctgagaccccagccccagctgccaaccccccagcccccacagccaaccccactggacctgctgccaaccccccagccaccacagccaaccccccagccccagctgccaaccccagcgccccagctgccacccccactggacctgctgccaaccccccagccccagctgccagcagcacccctcatggccactgccccaacggggtgacagctggcctgggccctgtggccgaggtgaagagcagccctgtgggcggcggcccccggggccctgctggccctgccctgggccgccactggggcgccggctgggatggcggccaccactacccagagatggatgcccggcaggagcgggtggaggtgctgccccaggcccgggcctcctgggagagcctggatgaggagtggagggccccccaggccggcagcaggacccctgtgcccagcacagtgcaggccaacacctttgaatttgctgatgctgaagaagatgatgaggtgaaggtgtag

SEQ ID NO: 146899 - DNA, 183 bp, synthetic construct
  misc_feature 1..183: note = Description of Artificial Sequence: Synthetic coding sequence
  source 1..183: mol_type = other DNA
atgcctggcccccagggcggccgcggggccgccaccatgagcctgggcaagctgagccctgtgggctgggtgagcagcagccagggcaagaggcggctgacagctgacatgatcagccaccccctgggggacttccgccacaccatgcacgtgggcagaggaggagatgtgtttggagactag

SEQ ID NO: 146900 - DNA, 213 bp, synthetic construct
  misc_feature 1..213: note = Description of Artificial Sequence: Synthetic coding sequence
  source 1..213: mol_type = other DNA
atgcctggcccccagggcggccgcggggccgccaccatgagcctgggcaagctgagccctgtgggctgggtgagcagcagccagggcaagaggcggctgacagctgacatgatcagccaccccctgggggacttccgccacaccatgcacgtgggcagaggaggagatgtgtttggagacaccagcttcctgagcaaccacggcggcagctag

SEQ ID NO: 146901 - DNA, 147 bp, synthetic construct
  misc_feature 1..147: note = Description of Artificial Sequence: Synthetic coding sequence
  source 1..147: mol_type = other DNA
atgcctggcccccagggcggccgcggggccgccaccatgagcctgggcaagctgagccctgtgggctgggtgagcagcagccagggcaagaggcggctgacagctgacatgatcagccaccccctgggggacttccgccacacctag

SEQ ID NO: 146902 - DNA, 633 bp, synthetic construct
  misc_feature 1..633: note = Description of Artificial Sequence: Synthetic coding sequence
  source 1..633: mol_type = other DNA
atgagcaccaaggtgcccatctacctgaagaggggcagcaggaagggcaagaaggagaagctgcgggacctgctgagcagtgacatgatcagcccccccctgggggacttccgccacaccatccacatcggcagcggcggcggcagtgacatgtttggagacatctccttcctgcagggcaagttccacctgctgcccggcaccatggtggagggcccagaagaagatggcacctttgacctgcccttccagttcaccaggacagccaccgtgtgtggccgggagctgcctgatggccccagccccctgctgaagaatgccatcagcctgcctgtgattggaggcccccaggccctgaccctgcccacagcccaggccccacccaagccaccccggctgcacctggagaccccccagcccagcccccaggagggcggctctgtggacatctggagaattcctgagaccggcagccccaacagcggcctgaccccagagagcggggctgaggagcccttcctgagcaatgccagcagcctgctgagcctgcacgtggacctgggccccagcatcctggatgatgtgctgcagatcatggaccaggacctggacagcatgcagatccccacctag

SEQ ID NO: 146903 - DNA, 633 bp, synthetic construct; identical to SEQ ID NO: 146902
  misc_feature 1..633: note = Description of Artificial Sequence: Synthetic coding sequence
  source 1..633: mol_type = other DNA

SEQ ID NO: 146904 - DNA, 633 bp, synthetic construct; identical to SEQ ID NO: 146902
  misc_feature 1..633: note = Description of Artificial Sequence: Synthetic coding sequence
  source 1..633: mol_type = other DNA

SEQ ID NO: 146905 - DNA, 765 bp, synthetic construct
  misc_feature 1..765: note = Description of Artificial Sequence: Synthetic coding sequence
  source 1..765: mol_type = other DNA
atgcctgccaagacccccatctacctgaaggccgccaacaacaagaagggcaagaagttcaagctgcgggacatcctgagcccagacatgatcagcccccccctgggggacttccgccacaccatccacatcggcaaggagggccagcatgatgtgtttggagacatctccttcctgcagggcaactatgagctgctgcccggcaaccaggagaaggcccacctgggccagtttcctggccacaatgagttcttccgggccaacagcaccagtgacagcgtcttcacagagacccccagccctgtgctgaagaatgccatcagcctgcccaccatcggcggcagccaggccctgatgctgcccctgctgagccctgtgaccttcaacagcaagcaggagagctttggacctgccaagctgccccggctgagctgtgagcctgtgatggaggagaaggcccaggagaagagcagcctgctggagaatggcaccgtgcaccagggcgacacctcctggggcagcagcggcagcgccagccagagcagccagggccgggacagccacagcagcagcctgtctgagcagtacccagactggccagctgaggacatgtttgaccaccccaccccctgtgagctgatcaagggcaagaccaagtctgaggagagcctgagtgacctgaccggcagcctgctgagcctgcagctggacctgggccccagcctgctggatgaggtgctgaatgtgatggacaagaacaagtag

SEQ ID NO: 146906 - DNA, 45 bp, synthetic construct
  misc_feature 1..45: note = Description of Artificial Sequence: Synthetic coding sequence
  source 1..45: mol_type = other DNA
atgcctgccaagacccccatctacctgaaggccgccaacaactag

SEQ ID NO: 146907 - DNA, 108 bp, synthetic construct
  misc_feature 1..108: note = Description of Artificial Sequence: Synthetic coding sequence
  source 1..108: mol_type = other DNA
atgcctgccaagacccccatctacctgaaggccgccaacaacaagaagggcaagaagttcaagctgcgggacatcctgagcccagacatgatcagcccccccctgtag

SEQ ID NO: 146908 - DNA, 651 bp, synthetic construct
  misc_feature 1..651: note = Description of Artificial Sequence: Synthetic coding sequence
  source 1..651: mol_type = other DNA
atgcctgccaagacccccatctacctgaaggccgccaacaacaagaagggcaagaagttcaagctgcgggacatcctgagcccagacatgatcagcccccccctgggggacttccgccacaccatccacatcggcaaggagggccagcatgatgtgtttggagacatctccttcctgcagggcaactatgagctgctgcccggcaaccaggagaaggcccacctgggccagtttcctggccacaatgagttcttccgggccaacagcaccagtgacagcgtcttcacagagacccccagccctgtgctgaagaatgccatcagcctgcccaccatcggcggcagccaggccctgatgctgcccctgctgagccctgtgaccttcaacagcaagcaggagagctttggacctgccaagctgccccggctgagctgtgagcctgtgatggaggagaaggcccaggagaagagcagcctgctggagaatggcaccgtgcaccagggcgacacctcctggggcagcagcggcagcgccagccagagcagccagggccgggacagccacagcagcagcctgtctgagcagtacccagactggccagctgaggacatgtttgaccaccccaccccctgtgagctgatcaagggctag

SEQ ID NO: 146909 - DNA, 1071 bp, synthetic construct
  misc_feature 1..1071: note = Description of Artificial Sequence: Synthetic coding sequence
  source 1..1071: mol_type = other DNA
atgcccatcctgaagcagctggtgagcagctctgtgcacagcaagaggaggagcagagctgacctgacagctgagatgatcagcgcccccctgggggacttccgccacaccatgcacgtgggccgggctggagatgcctttggagacaccagcttcctgaacagcaaggccggggagccagatggagagagcctggatgagcagcccagcagcagcagcagcaagaggagcctgctgagcaggaagttccggggcagcaagaggagccagagcgtgaccagaggagagcgggagcagagggacatgctgggcagcctgcgggacagcgccctgtttgtgaagaatgccatgagcctgccccagctgaatgagaaggaggccgctgagaagggcaccagcaagctgcccaagagcctgagcagcagccctgtgaagaaggccaatgatggagagggcggagatgaggaggccggcacagaggaggccgtgcccaggagaaatggagctgctggcccccacagcccagaccccctgctggatgagcaggccttcggggacctgacagacctgcctgtggtgcccaaggccacctacggcctgaagcatgctgagagcatcatgtccttccacatcgacctgggccccagcatgctgggagatgtgctgagcatcatggacaaggaggagtgggaccctgaggagggggagggcggctaccatggagatgagggcgccgccggcaccatcacccaggccccaccctatgctgtggccgccccacccctggcccggcaggagggcaaggccggccctgacctgcccagcctgcccagccacgccctggaggatgagggctgggccgctgctgcccccagccctggcagcgcccgctccatgggcagccacaccacccgggacagcagcagcctgagcagctgcaccagcggcatcctggaggagaggagccctgccttccggggccctgaccgggcccgggctgctgtgtcccggcagcctgacaaggagttctccttcatggatgaggaggaggaggatgagatccgggtgtag

SEQ ID NO: 146910 - DNA, 861 bp, synthetic construct
  misc_feature 1..861: note = Description of Artificial Sequence: Synthetic coding sequence
  source 1..861: mol_type = other DNA
atgcccatcctgaagcagctggtgagcagctctgtgcacagcaagaggaggagcagagctgacctgacagctgagatgatcagcgcccccctgggggacttccgccacaccatgcacgtgggccgggctggagatgcctttggagacaccagcttcctgaacagcaaggctgctgagaagggcaccagcaagctgcccaagagcctgagcagcagccctgtgaagaaggccaatgatggagagggcggagatgaggaggccggcacagaggaggccgtgcccaggagaaatggagctgctggcccccacagcccagaccccctgctggatgagcaggccttcggggacctgacagacctgcctgtggtgcccaaggccacctacggcctgaagcatgctgagagcatcatgtccttccacatcgacctgggccccagcatgctgggagatgtgctgagcatcatggacaaggaggagtgggaccctgaggagggggagggcggctaccatggagatgagggcgccgccggcaccatcacccaggccccaccctatgctgtggccgccccacccctggcccggcaggagggcaaggccggccctgacctgcccagcctgcccagccacgccctggaggatgagggctgggccgctgctgcccccagccctggcagcgcccgctccatgggcagccacaccacccgggacagcagcagcctgagcagctgcaccagcggcatcctggaggagaggagccctgccttccggggccctgaccgggcccgggctgctgtgtcccggcagcctgacaaggagttctccttcatggatgaggaggaggaggatgagatccgggtgtag

SEQ ID NO: 146911 - DNA, 1551 bp, synthetic construct
  misc_feature 1..1551: note = Description of Artificial Sequence: Synthetic coding sequence
  source 1..1551: mol_type = other DNA
atgaccctgctgatcaccggggacagcatcgtgtctgctgaggccgtgtgggaccacgtgaccatggccaaccgggagctggccttcaaggctggagatgtgatcaaggtgctggatgccagcaacaaggactggtggtggggccagattgatgatgaggagggctggttccctgccagctttgtgcggctgtgggtgaaccaggaggatgaggtggaggagggccccagtgatgtgcagaatggccacctggaccccaacagcgactgcctgtgcctgggccggcccctgcagaacagagaccagatgagggccaacgtcatcaatgagatcatgagcacagagcggcactacatcaagcacctgaaggacatctgtgagggctacctgaagcagtgcaggaagaggcgggacatgttcagtgatgagcagctgaaggtgatctttggaaatattgaggacatctaccgcttccagatgggctttgtgcgggacctggagaagcagtacaacaatgatgacccccacctgtctgagatcggcccctgcttcctggagcaccaggacggcttctggatctacagcgagtactgcaacaaccacctggatgcctgcatggagctgagcaagctgatgaaggacagccgctaccagcacttctttgaggcctgccgcctgctgcagcagatgattgatattgccattgatggcttcctgctgacccctgtgcagaagatctgcaagtaccccctgcagctggccgagctgctgaagtacacagcccaggaccacagcgactaccgctacgtggccgccgccctggccgtgatgagaaatgtgacccagcagatcaatgaaaggaagaggcggctggagaacatcgacaagatcgcccagtggcaggcctctgtgctggactgggagggggaggacatcctggacaggagcagcgagctgatctacaccggggagatggcctggatctaccagccctacggcaggaaccagcagagggtcttcttcctgtttgaccaccagatggtgctgtgcaagaaggacctgatccggcgggacatcctgtactacaagggcagaattgacatggacaagtatgaggtggtggacattgaagatggaagagatgatgacttcaacgtgtccatgaagaatgccttcaagctgcacaacaaggagacagaggagatccacctgttctttgccaagaagctggaggagaagatccgctggctgcgggccttccgggaggagaggaagatggtgcaggaggatgagaagattggatttgagatcagcgagaaccagaagaggcaggccgccatgacagtgaggaaggtgcccaagcagaagggcgtgaacagcgcccggtctgtgcccccatcctaccccccaccccaggaccccctgaaccacggccagtacctggtgcctgatggcatcgcccagagccaggtgtttgagttcacagagcccaagaggagccagagccccttctggcagaacttcagccggctgacccccttcaagaagtag

SEQ ID NO: 146912 - DNA, 1245 bp, synthetic construct
  misc_feature 1..1245: note = Description of Artificial Sequence: Synthetic coding sequence
  source 1..1245: mol_type = other DNA
atgagggccaacgtcatcaatgagatcatgagcacagagcggcactacatcaagcacctgaaggacatctgtgagggctacctgaagcagtgcaggaagaggcgggacatgttcagtgatgagcagctgaaggtgatctttggaaatattgaggacatctaccgcttccagatgggctttgtgcgggacctggagaagcagtacaacaatgatgacccccacctgtctgagatcggcccctgcttcctggagcaccaggacggcttctggatctacagcgagtactgcaacaaccacctggatgcctgcatggagctgagcaagctgatgaaggacagccgctaccagcacttctttgaggcctgccgcctgctgcagcagatgattgatattgccattgatggcttcctgctgacccctgtgcagaagatctgcaagtaccccctgcagctggccgagctgctgaagtacacagcccaggaccacagcgactaccgctacgtggccgccgccctggccgtgatgagaaatgtgacccagcagatcaatgaaaggaagaggcggctggagaacatcgacaagatcgcccagtggcaggcctctgtgctggactgggagggggaggacatcctggacaggagcagcgagctgatctacaccggggagatggcctggatctaccagccctacggcaggaaccagcagagggtcttcttcctgtttgaccaccagatggtgctgtgcaagaaggacctgatccggcgggacatcctgtactacaagggcagaattgacatggacaagtatgaggtggtggacattgaagatggaagagatgatgacttcaacgtgtccatgaagaatgccttcaagctgcacaacaaggagacagaggagatccacctgttctttgccaagaagctggaggagaagatccgctggctgcgggccttccgggaggagaggaagatggtgcaggaggatgagaagattggatttgagatcagcgagaaccagaagaggcaggccgccatgacagtgaggaaggtgcccaagcagaagggcgtgaacagcgcccggtctgtgcccccatcctaccccccaccccaggaccccctgaaccacggccagtacctggtgcctgatggcatcgcccagagccaggtgtttgagttcacagagcccaagaggagccagagccccttctggcagaacttcagccggctgacccccttcaagaagtag

SEQ ID NO: 146913 - DNA, 1488 bp, synthetic construct
  misc_feature 1..1488: note = Description of Artificial Sequence: Synthetic coding sequence
  source 1..1488: mol_type = other DNA
atggccaaccgggagctggccttcaaggctggagatgtgatcaaggtgctggatgccagcaacaaggactggtggtggggccagattgatgatgaggagggctggttccctgccagctttgtgcggctgtgggtgaaccaggaggatgaggtggaggagggccccagtgatgtgcagaatggccacctggaccccaacagcgactgcctgtgcctgggccggcccctgcagaacagagaccagatgagggccaacgtcatcaatgagatcatgagcacagagcggcactacatcaagcacctgaaggacatctgtgagggctacctgaagcagtgcaggaagagaagagacatgttcagtgatgagcagctgaaggtgatcttcggcaacatcgaggacatctaccgcttccagatgggctttgtgcgggacctggagaagcagtacaacaatgatgacccccacctgtctgaaattggcccctgcttcctggagcaccaggacggcttctggatctacagcgagtactgcaacaaccacctggatgcctgcatggagctgagcaagctgatgaaggacagccgctaccagcacttctttgaggcctgccgcctgctgcagcagatgattgacatcgccattgatggcttcctgctgacccctgtgcagaagatctgcaagtaccccctgcagctggccgagctgctgaagtacacagcccaggaccacagcgactaccgctacgtggccgccgccctggccgtgatgagaaatgtgacccagcagatcaatgaaaggaagaggcggctggagaacatcgacaagatcgcccagtggcaggcctctgtgctggactgggagggggaggacatcctggacaggagcagcgagctgatctacacaggagagatggcctggatctaccagccctatggaagaaaccagcagagggtcttcttcctgtttgaccaccagatggtgctgtgcaagaaggacctgatcagaagagacatcctgtactacaagggcagaattgacatggacaagtatgaggtggtggacattgaagatggaagagatgatgacttcaacgtgtccatgaagaatgccttcaagctgcacaacaaggagacagaggagatccacctgttctttgccaagaagctggaggagaagatccgctggctgcgggccttccgggaggagaggaagatggtgcaggaggatgagaagattggatttgagatcagcgagaaccagaagaggcaggccgccatgacagtgaggaaggtgcccaagcagaagggcgtgaacagcgcccggtctgtgccccccagctaccccccaccccaggaccccctgaaccacggccagtacctggtgcctgatggcatcgcccagagccaggtgtttgagttcacagagcccaagaggagccagagccccttctggcagaacttcagccggctgacccccttcaagaagtag

SEQ ID NO: 146914 - DNA, 1437 bp, synthetic construct
  misc_feature 1..1437: note = Description of Artificial Sequence: Synthetic coding sequence
  source 1..1437: mol_type = other DNA
atgctgatcaccggggacagcatcgtgtctgctgaggccgtgtgggaccacgtgaccatggccaaccgggagctggccttcaaggctggagatgtgatcaaggtgctggatgccagcaacaaggactggtggtggggccagattgatgatgaggagggctggttccctgccagctttgtgcggctgtgggtgaaccaggaggatgaggtggaggagggccccagtgatgtgcagaatggccacctggaccccaacagcgactgcctgtgcctgggccggcccctgcagaacagagaccagatgagggccaacgtcatcaatgagatcatgagcacagagcggcactacatcaagcacctgaaggacatctgtgagggctacctgaagcagtgcaggaagaggcgggacatgttcagtgatgagcagctgaaggtgatctttggaaatattgaggacatctaccgcttccagatgggctttgtgcgggacctggagaagcagtacaacaatgatgacccccacctgtctgagatcggcccctgcttcctggagcaccaggacggcttctggatctacagcgagtactgcaacaaccacctggatgcctgcatggagctgagcaagctgatgaaggacagccgctaccagcacttctttgaggcctgccgcctgctgcagcagatgattgatattgccattgatggcttcctgctgacccctgtgcagaagatctgcaagtaccccctgcagctggccgagctgctgaagtacacagcccaggaccacagcgactaccgctacgtggccgccgccctggccgtgatgagaaatgtgacccagcagatcaatgaaaggaagaggcggctggagaacatcgacaagatcgcccagtggcaggcctctgtgctggactgggagggggaggacatcctggacaggagcagcgagctgatctacaccggggagatggcctggatctaccagccctacggcaggaaccagcagagggtcttcttcctgtttgaccaccagatggtgctgtgcaagaaggacctgatccggcgggacatcctgtactacaagggcagaattgacatggacaagtatgaggtggtggacattgaagatggaagagatgatgacttcaacgtgtccatgaagaatgccttcaagctgcacaacaaggagacagaggagatccacctgttctttgccaagaagctggaggagaagatccgctggctgcgggccttccgggaggagaggaagatggtgcaggaggatgagaagattggatttgagatcagcgagaaccagaagaggcaggccgccatgacagtgaggaagctgcccttcccccagctgtctgaggcccgcatctgcagccccaagggctttgccagcgtcttcaacggcacctgctgcggggagagctag

SEQ ID NO: 146915 - DNA, 732 bp, synthetic construct
  misc_feature 1..732: note = Description of Artificial Sequence: Synthetic coding sequence
  source 1..732: mol_type = other DNA
atgattgacatcgccattgatggcttcctgctgacccctgtgcagaagatctgcaagtaccccctgcagctggccgagctgctgaagtacacagcccaggaccacagcgactaccgctacgtggccgccgccctggccgtgatgagaaatgtgacccagcagatcaatgaaaggaagaggcggctggagaacatcgacaagatcgcccagtggcaggcctctgtgctggactgggaggacctgatcagaagagacatcctgtactacaagggcagaattgacatggacaagtatgaggtggtggacattgaagatggaagagatgatgacttcaacgtgtccatgaagaatgccttcaagctgcacaacaaggagacagaggagatccacctgttctttgccaagaagctggaggagaagatccgctggctgcgggccttccgggaggagaggaagatggtgcaggaggatgagaagattggatttgagatcagcgagaaccagaagaggcaggccgccatgacagtgaggaaggtgcccaagcagaagggcgtgaacagcgcccggtctgtgccccccagctaccccccaccccaggaccccctgaaccacggccagtacctggtgcctgatggcatcgcccagagccaggtgtttgagttcacagagcccaagaggagccagagccccttctggcagaacttcagccggctgacccccttcaagaagtag

SEQ ID NO: 146916 - DNA, 1392 bp, synthetic construct
  misc_feature 1..1392: note = Description of Artificial Sequence: Synthetic coding sequence
  source 1..1392: mol_type = other DNA
atgcagtggatccggggcggcagcggcatgctgtgggtgaaccaggaggatgaggtggaggagggccccagtgatgtgcagaatggccacctggaccccaacagcgactgcctgtgcctgggccggcccctgcagaacagagaccagatgagggccaacgtcatcaatgagatcatgagcacagagcggcactacatcaagcacctgaaggacatctgtgagggctacctgaagcagtgcaggaagagaagagacatgttcagtgatgagcagctgaaggtgatcttcggcaacatcgaggacatctaccgcttccagatgggctttgtgcgggacctggagaagcagtacaacaatgatgacccccacctgtctgaaattggcccctgcttcctggagcaccaggacggcttctggatctacagcgagtactgcaacaaccacctggatgcctgcatggagctgagcaagctgatgaaggacagccgctaccagcacttctttgaggcctgccgcctgctgcagcagatgattgacatcgccattgatggcttcctgctgacccctgtgcagaagatctgcaagtaccccctgcagctggccgagctgctgaagtacacagcccaggaccacagcgactaccgctacgtggccgccgccctggccgtgatgagaaatgtgacccagcagatcaatgaaaggaagaggcggctggagaacatcgacaagatcgcccagtggcaggcctctgtgctggactgggagggggaggacatcctggacaggagcagcgagctgatctacacaggagagatggcctggatctaccagccctatggaagaaaccagcagagggtcttcttcctgtttgaccaccagatggtgctgtgcaagaaggacctgatcagaagagacatcctgtactacaagggcagaattgacatggacaagtatgaggtggtggacattgaagatggaagagatgatgacttcaacgtgtccatgaagaatgccttcaagctgcacaacaaggagacagaggagatccacctgttctttgccaagaagctggaggagaagatccgctggctgcgggccttccgggaggagaggaagatggtgcaggaggatgagaagattggatttgagatcagcgagaaccagaagaggcaggccgccatgacagtgaggaaggtgcccaagcagaagggcgtgaacagcgcccggtctgtgccccccagctaccccccaccccaggaccccctgaaccacggccagtacctggtgcctgatggcatcgcccagagccaggtgtttgagttcacagagcccaagaggagccagagccccttctggcagaacttcagccggctgacccccttcaagaagtag

SEQ ID NO: 146917 - DNA, 2409 bp, synthetic construct
  misc_feature 1..2409: note = Description of Artificial Sequence: Synthetic coding sequence
  source 1..2409: mol_type = other DNA
atgccccgcatcatgatcaagggcggcgtgtggaggaacacagaagatgagatcctgaaggctgctgtgatgaagtatggcaagaaccagtggagccgcatcgccagcctgctgcacaggaagagcgccaagcagtgcaaggcccgctggtatgagtggctggaccccagcatcaagaagacagagtggagccgggaggaggaggagaagctgctgcacctggccaagctgatgcccacccagtggaggaccatcgcccccatcattggaagaacagctgcccagtgcctggagcactatgagttcctgctggacaaggccgcccagagggacaatgaggaggagaccacagatgaccccaggaagctgaagccaggagaaattgaccccaaccctgagaccaagccagcccggccagaccccatcgacatggatgaagatgagctggagatgctgtctgaggcccgggcccggctggccaacacccagggcaagaaggccaagaggaaggcccgggagaagcagctggaggaggcccggcggctggccgccctgcagaagaggcgggagctgcgggccgccggcatcgagatccagaagaagaggaagaggaagaggggcgtggactacaatgctgagatcccctttgagaagaagccagccctgggcttctatgacaccagcgaggagaactaccaggccctggatgctgacttcaggaagctgcggcagcaggacctggatggagagctgcggtctgagaaggagggccgggacaggaagaaggacaagcagcacctgaagaggaagaaggagagtgacctgcccagcgccatcctgcagaccagcggcgtgtctgagttcaccaagaagaggagcaagctggtgctgcctgccccccagatcagtgatgctgagctgcaggaggtggtgaaggtgggccaggccagcgagatcgcccggcagacagctgaggagagcggcatcaccaacagcgccagcagcaccctgctgtctgagtacaacgtgaccaacaacagcgtggccctgcggacccccaggaccccagccagccaggaccgcatcctgcaggaggcccagaacctgatggccctgaccaacgtggacacccccctgaagggcggcctgaacacccccctgcacgagagtgacttctctggagtgaccccccagaggcaggtggtgcagacccccaacacagtgctgagcacccccttccgcacccccagcaatggagctgagggcctgacccccaggagcggcaccacccccaagcctgtgatcaacagcaccccaggccgcacccccctgcgggacaagctgaacatcaacccagaagatggcatggctgactacagcgaccccagctatgtgaagcagatggagcgggagagccgggagcacctgcggctgggcctgctgggcctgcctgcccccaagaatgactttgagatcgtgctgcctgaaaatgctgagaaggagctggaggagcgggagattgatgacacctacattgaagatgctgctgatgtggatgccaggaagcaggccatcagagatgctgagcgggtgaaggagatgaagaggatgcacaaggctgtgcagaaggacctgccccggcccagcgaggtgaatgagaccatcctgcggcccctgaatgtggagccccccctgacagacctgcagaagtctgaggagctgatcaagaaggagatgatcaccatgctgcactatgacctgctgcaccacccctatgagcccagcggcaacaagaagggcaagacagtgggcttcggcaccaacaacagcgagcacatcacctacctggagcacaacccctatgagaagttcagcaaggaggagctgaagaaggcccaggatgtgctggtgcaggagatggaggtggtgaagcagggcatgagccatggagagctgagcagcgaggcctacaaccaggtgtgggaggagtgctacagccaggtgctgtacctgcccggccagagccgctacacccgggccaacctggccagcaagaaggacagaattgagagcctggagaagaggctggagatcaacagaggccacatgaccacagaggccaagagagctgccaagatggagaagaagatgaagatcctgctgggcggctaccagagccgggccatgggcctgatgaagcagctgaatgacctgtgggaccagatcgagcaggcccacctggagctgcggacctttgaggagctgaagaagcatgaagattctgccatcccccggcggctggagtgcctgaaggaggatgtgcagaggcagcaggagcgggagaaggagctgcagcacagatatgctgacctgctgctggagaaggagaccctgaagagcaagttctag

SEQ ID NO: 146918 - DNA, 1455 bp, synthetic construct
  misc_feature 1..1455: note = Description of Artificial Sequence: Synthetic coding sequence
  source 1..1455: mol_type = other DNA
atgaggcacagcaagaggacctactgcccagactgggatgacaaggactgggactatggcaagtggaggagcagcagcagccacaagaggaggaagaggagccacagcagcgcccaggagaacaagcgctgcaagtacaaccacagcaagatgtgtgacagccactacctggagagccgcagcatcaatgagaaggactaccacagccgccgctacattgatgagtacagaaatgactacacccagggctgtgagcccggccaccggcagagggaccacgagagccgctaccagaaccacagcagcaagagcagcggccgcagcggccgcagcagctacaagagcaagcaccgcatccaccacagcaccagccaccggcgcagccacggcaagagccacaggaggaagaggaccaggtctgtggaggatgatgaggagggccacctgatctgccagagcggagatgtgctgagcgcccgctatgaaattgtggacaccctgggggagggcgccttcggcaaggtggtggagtgcatcgaccacaaggccggcggcagacatgtggccgtgaagatcgtgaagaatgtggaccgctactgtgaggccgcccggtctgagatccaggtgctggagcacctgaacaccacagaccccaacagcaccttccgctgtgtgcagatgctggagtggtttgagcaccacggccacatctgcatcgtgtttgagctgctgggcctgagcacctatgacttcatcaaggaaaatggcttcctgcccttccggctggaccacatcaggaagatggcctaccagatctgcaagtctgtgaacttcctgcacagcaacaagctgacccacacagacctgaagccagagaacatcctgtttgtgcagagcgactacacagaggcctacaaccccaagatcaagagagatgagaggaccctcatcaacccagacatcaaggtggtggactttggcagcgccacctatgatgatgagcaccacagcaccctggtgtccaccaggcactaccgggcccctgaggtgatcctggccctgggctggagccagccctgtgatgtgtggagcatcggctgcatcctgattgagtactacctgggcttcaccgtcttccccacccatgacagcaaggagcacctggccatgatggagcgcatcctgggccccctgcccaagcacatgatccagaagaccaggaagaggaagtacttccaccacgaccggctggactgggatgagcacagcagcgctggccgctacgtgtcccggcgctgcaagcccctgaaggagttcatgctgagccaggatgtggagcacgagcggctgtttgacctgatccagaagatgctggagtatgaccctgccaagaggatcaccctgcgggaggccctgaagcaccccttctttgacctgctgaagaagagcatctag

SEQ ID NO: 146919 - DNA, 1365 bp, synthetic construct
  misc_feature 1..1365: note = Description of Artificial Sequence: Synthetic coding sequence
  source 1..1365: mol_type = other DNA
atgaggcacagcaagaggacctactgcccagactgggatgacaaggactgggactatggcaagtggaggagcagcagcagccacaagaggaggaagaggagccacagcagcgcccaggagaacaagcgctgcaagtacaaccacagcaagatgtgtgacagccactacctggagagccgcagcatcaatgagaaggactaccacagccgccgctacattgatgagtacagaaatgactacacccagggctgtgagcccggccaccggcagagggaccacgagagccgctaccagaaccacagcagcaagagcagcggccgcagcggccgcagcagctacaagagcaagcaccgcatccaccacagcaccagccaccggcgcagccatggagatgaaattgtggacaccctgggggagggcgccttcggcaaggtggtggagtgcatcgaccacaaggccggcggcagacatgtggccgtgaagatcgtgaagaatgtggaccgctactgtgaggccgcccggtctgagatccaggtgctggagcacctgaacaccacagaccccaacagcaccttccgctgtgtgcagatgctggagtggtttgagcaccacggccacatctgcatcgtgtttgagctgctgggcctgagcacctatgacttcatcaaggaaaatggcttcctgcccttccggctggaccacatcaggaagatggcctaccagatctgcaagtctgtgaacttcctgcacagcaacaagctgacccacacagacctgaagccagagaacatcctgtttgtgcagagcgactacacagaggcctacaaccccaagatcaagagagatgagaggaccctcatcaacccagacatcaaggtggtggactttggcagcgccacctatgatgatgagcaccacagcaccctggtgtccaccaggcactaccgggcccctgaggtgatcctggccctgggctggagccagccctgtgatgtgtggagcatcggctgcatcctgattgagtactacctgggcttcaccgtcttccccacccatgacagcaaggagcacctggccatgatggagcgcatcctgggccccctgcccaagcacatgatccagaagaccaggaagaggaagtacttccaccacgaccggctggactgggatgagcacagcagcgctggccgctacgtgtcccggcgctgcaagcccctgaaggagttcatgctgagccaggatgtggagcacgagcggctgtttgacctgatccagaagatgctggagtatgaccctgccaagaggatcaccctgcgggaggccctgaagcaccccttctttgacctgctgaagaagagcatctag

SEQ ID NO: 146920 - DNA, 1581 bp, synthetic construct
  misc_feature 1..1581: note = Description of Artificial Sequence: Synthetic coding sequence
  source 1..1581: mol_type = other DNA
atggctgctggaagaagacctgccagcgccctgtggccagagcggcggggcagccccctgcggggggacctgctgggcttccagaatgtgcgggagcccagcagctgtggggagaccctgagcggcatgaggcacagcaagaggacctactgcccagactgggatgacaaggactgggactatggcaagtggaggagcagcagcagccacaagaggaggaagaggagccacagcagcgcccaggagaacaagcgctgcaagtacaaccacagcaagatgtgtgacagccactacctggagagccgcagcatcaatgagaaggactaccacagccgccgctacattgatgagtacagaaatgactacacccagggctgtgagcccggccaccggcagagggaccacgagagccgctaccagaaccacagcagcaagagcagcggccgcagcggccgcagcagctacaagagcaagcaccgcatccaccacagcaccagccaccggcgcagccacggcaagagccacaggaggaagaggaccaggtctgtggaggatgatgaggagggccacctgatctgccagagcggagatgtgctgagcgcccgctatgaaattgtggacaccctgggggagggcgccttcggcaaggtggtggagtgcatcgaccacaaggccggcggcagacatgtggccgtgaagatcgtgaagaatgtggaccgctactgtgaggccgcccggtctgagatccaggtgctggagcacctgaacaccacagaccccaacagcaccttccgctgtgtgcagatgctggagtggtttgagcaccacggccacatctgcatcgtgtttgagctgctgggcctgagcacctatgacttcatcaaggaaaatggcttcctgcccttccggctggaccacatcaggaagatggcctaccagatctgcaagtctgtgaacttcctgcacagcaacaagctgacccacacagacctgaagccagagaacatcctgtttgtgcagagcgactacacagaggcctacaaccccaagatcaagagagatgagaggaccctcatcaacccagacatcaaggtggtggactttggcagcgccacctatgatgatgagcaccacagcaccctggtgtccaccaggcactaccgggcccctgaggtgatcctggccctgggctggagccagccctgtgatgtgtggagcatcggctgcatcctgattgagtactacctgggcttcaccgtcttccccacccatgacagcaaggagcacctggccatgatggagcgcatcctgggccccctgcccaagcacatgatccagaagaccaggaagaggaagtacttccaccacgaccggctggactgggatgagcacagcagcgctggccgctacgtgtcccggcgctgcaagcccctgaaggagttcatgctgagccaggatgtggagcacgagcggctgtttgacctgatccagaagatgctggagtatgaccctgccaagaggatcaccctgcgggaggccctgaagcaccccttctttgacctgctgaagaagagcatctag

SEQ ID NO: 146921 - DNA, 1494 bp, synthetic construct
  misc_feature 1..1494: note = Description of Artificial Sequence: Synthetic coding sequence
  source 1..1494: mol_type = other DNA
atgccccacccccggcgctaccacagcagcgagcggggcagccggggcagctaccgggagcactaccgcagcaggaagcacaagagaagaagaagccgctcctggagcagcagcagtgacaggaccaggagaagaagaagagaggacagctaccacgtgcgcagccgctcctatgatgacaggagcagtgacagaagagtgtatgaccggcgctactgcggcagctacagaagaaatgactacagccgggacagaggagatgcctactatgacacagactaccgccacagctatgagtaccagcgggagaacagcagctaccgcagccagaggagcagcaggaggaagcacagaagaagaagaagaagaagcaggaccttcagccgcagcagcagccacagcagccggcgggccaagtctgtggaggatgatgctgagggccacctgatctaccacgtgggggactggctgcaggagagatatgaaattgtgtccaccctgggggagggcaccttcggccgggtggtgcagtgtgtggaccaccggcggggcggggcccgggtggccctgaagatcatcaagaatgtggagaagtacaaggaggccgcccggctggagatcaacgtgctggagaagatcaatgagaaggaccctgacaacaagaacctgtgtgtgcagatgtttgactggtttgactaccacggccacatgtgcatcagctttgagctgctgggcctgagcacctttgacttcctgaaggacaacaactacctgccctaccccatccaccaggtgcgccacatggccttccagctgtgccaggccgtgaagttcctgcatgacaacaagctgacccacacagacctgaagccagagaacatcctgtttgtgaacagcgactatgagctgacctacaacctggagaagaagagagatgagaggtctgtgaagagcacagctgtgcgggtggtggactttggcagcgccacctttgaccacgagcaccacagcaccatcgtgtccaccaggcactaccgggcccctgaggtgatcctggagctgggctggagccagccctgtgatgtgtggagcatcggctgcatcatctttgagtactacgtgggcttcaccctcttccagacccatgacaaccgggagcacctggccatgatggagcgcatcctgggccccatccccagcaggatgatcaggaagaccaggaagcagaagtacttctaccggggccgcctggactgggatgagaacaccagcgctggccgctacgtgcgggagaactgcaagcccctgcggcgctacctgaccagcgaggccgaggagcaccaccagctgtttgacctgattgagagcatgctggagtatgagcccgccaagaggctgaccctgggggaggccctgcagcaccccttctttgcccggctgcgggcagagccccccaacaagctgtgggacagcagccgggacatcagcaggtag

SEQ ID NO: 146922 - DNA, 1497 bp, synthetic construct
  misc_feature 1..1497: note = Description of Artificial Sequence: Synthetic coding sequence
  source 1..1497: mol_type = other DNA
atgccccacccccggcgctaccacagcagcgagcggggcagccggggcagctaccgggagcactaccgcagcaggaagcacaagagaagaagaagccgctcctggagcagcagcagtgacaggaccaggagaagaagaagagaggacagctaccacgtgcgcagccgcagcagctatgatgacaggagcagtgaccggcgggtgtatgaccggcgctactgcggcagctacagaagaaatgactacagccgggacagaggagatgcctactatgacacagactaccgccacagctatgagtaccagcgggagaacagcagctaccgcagccagaggagcagcaggaggaagcacagaagaagaagaagaagaagcaggaccttcagccgcagcagcagccacagcagcagaagagccaagtctgtggaggatgatgctgagggccacctgatctaccacgtgggggactggctgcaggagagatatgagatcgtgtccaccctgggggagggcaccttcggccgggtggtgcagtgtgtggaccacagaagaggaggagcccgggtggccctgaagatcatcaagaatgtggagaagtacaaggaggccgcccggctggagatcaacgtgctggagaagatcaatgagaaggaccctgacaacaagaacctgtgtgtgcagatgtttgactggtttgactaccacggccacatgtgcatcagctttgagctgctgggcctgagcacctttgacttcctgaaggacaacaactacctgccctaccccatccaccaggtgcgccacatggccttccagctgtgccaggccgtgaagttcctgcatgacaacaagctgacccacacagacctgaagccagagaacatcctgtttgtgaacagcgactatgagctgacctacaacctggagaagaagagagatgagaggtctgtgaagagcacagctgtgcgggtggtggactttggaagtgccacctttgaccacgagcaccacagcaccatcgtgtccaccaggcactaccgggcccctgaggtgatcctggagctgggctggagccagccctgtgatgtgtggagcatcggctgcatcatctttgagtactacgtgggcttcaccctcttccagacccatgacaaccgggagcacctggccatgatggagcgcatcctgggccccatccccagcaggatgatcaggaagaccaggaagcagaagtacttctaccggggccgcctggactgggatgagaacaccagcgctggccgctacgtgcgggagaactgcaagcccctgcggcgctacctgaccagcgaggccgaggagcaccaccagctgtttgacctgattgaatccatgctggagtatgagcccgccaagaggctgaccctgggggaggccctgcagcaccccttctttgcccggctgcgggcagagccccccaacaagctgtgggacagcagccgggacatcagcaggtag

SEQ ID NO: 146923 - DNA, 1500 bp, synthetic construct
  misc_feature 1..1500: note = Description of Artificial Sequence: Synthetic coding sequence
  source 1..1500: mol_type = other DNA
atgccccacccccggcgctaccacagcagcgagcggggcagccggggcagctaccgggagcactaccgcagcaggaagcacaagagaagaagaagccgctcctggagcagcagcagtgacaggaccaggagaagaagaagagaggacagctaccacgtgcgcagccgcagcagctatgatgacaggagcagtgaccggcgggtgtatgaccggcgctactgcggcagctacagaagaaatgactacagccgggacagaggagatgcctactatgacacagactaccgccacagctatgagtaccagcgggagaacagcagctaccgcagccagaggagcagcaggaggaagcacagaagaagaagaagaagaagcaggaccttcagccgcagcagcagccagcacagcagccggcgggccaagtctgtggaggatgatgctgagggccacctgatctaccacgtgggggactggctgcaggagagatatgaaattgtgtccaccctgggggagggcaccttcggccgggtggtgcagtgtgtggaccaccggcggggcggggcccgggtggccctgaagatcatcaagaatgtggagaagtacaaggaggccgcccggctggagatcaacgtgctggagaagatcaatgagaaggaccctgacaacaagaacctgtgtgtgcagatgtttgactggtttgactaccacggccacatgtgcatcagctttgagctgctgggcctgagcacctttgacttcctgaaggacaacaactacctgccctaccccatccaccaggtgcgccacatggccttccagctgtgccaggccgtgaagttcctgcatgacaacaagctgacccacacagacctgaagccagagaacatcctgtttgtgaacagcgactatgagctgacctacaacctggagaagaagagagatgagaggtctgtgaagagcacagctgtgcgggtggtggactttggcagcgccacctttgaccacgagcaccacagcaccatcgtgtccaccaggcactaccgggcccctgaggtgatcctggagctgggctggagccagccctgtgatgtgtggagcatcggctgcatcatctttgagtactacgtgggcttcaccctcttccagacccatgacaaccgggagcacctggccatgatggagcgcatcctgggccccatccccagcaggatgatcaggaagaccaggaagcagaagtacttctaccggggccgcctggactgggatgagaacaccagcgctggccgctacgtgcgggagaactgcaagcccctgcggcgctacctgaccagcgaggccgaggagcaccaccagctgtttgacctgattgagagcatgctggagtatgagcccgccaagaggctgaccctgggggaggccctgcagcaccccttctttgcccggctgcgggcagagccccccaacaagctgtgggacagcagccgggacatcagcaggtag

SEQ ID NO: 146924 - DNA, 816 bp, synthetic construct
  misc_feature 1..816: note = Description of Artificial Sequence: Synthetic coding sequence
  source 1..816: mol_type = other DNA
atgtttgactggtttgactaccacggccacatgtgcatcagctttgagctgctgggcctgagcacctttgacttcctgaaggacaacaactacctgccctaccccatccaccaggtgcgccacatggccttccagctgtgccaggccgtgaagttcctgcatgacaacaagctgacccacacagacctgaagccagagaacatcctgtttgtgaacagcgactatgagctgacctacaacctggagaagaagagagatgagaggtctgtgaagagcacagctgtgcgggtggtggactttggcagcgccacctttgaccacgagcaccacagcaccatcgtgtccaccaggcactaccgggcccctgaggtgatcctggagctgggctggagccagccctgtgatgtgtggagcatcggctgcatcatctttgagtactacgtgggcttcaccctcttccagacccatgacaaccgggagcacctggccatgatggagcgcatcctgggccccatccccagcaggatgatcaggaagaccaggaagcagaagtacttctaccggggccgcctggactgggatgagaacaccagcgctggccgctacgtgcgggagaactgcaagcccctgcggcgctacctgaccagcgaggccgaggagcaccaccagctgtttgacctgattgagagcatgctggagtatgagcccgccaagaggctgaccctgggggaggccctgcagcaccccttctttgcccggctgcgggcagagccccccaacaagctgtgggacagcagccgggacatcagcaggtag

SEQ ID NO: 146925 - DNA, 1500 bp, synthetic construct; identical to SEQ ID NO: 146923
  misc_feature 1..1500: note = Description of Artificial Sequence: Synthetic coding sequence
  source 1..1500: mol_type = other DNA

SEQ ID NO: 146926 - DNA, 1473 bp, synthetic construct
  misc_feature 1..1473: note = Description of Artificial Sequence: Synthetic coding sequence
  source 1..1473: mol_type = other DNA
atgcaccactgcaagcgctaccgcagccctgagccagacccctacctgagctaccgctggaagagaagaagaagctacagccgggagcacgagggccgcctgcgctaccccagcagaagagagcccccaccaagaagaagccgcagccgcagccatgaccggctgccctaccagaggcgctaccgggagcggcgggacagcgacacctaccgctgtgaggagaggagccccagctttggagaggactactacggccccagccgcagccgccacagaagaagaagccgggagcggggcccctaccgcaccaggaagcacgcccaccactgccacaagaggaggaccaggagctgcagcagcgccagcagccgcagccagcagagcagcaagaggagcagccgctctgtggaggatgacaaggagggccacctggtgtgccgcatcggggactggctgcaggagagatatgagatcgtgggcaacctgggggagggcaccttcggcaaggtggtggagtgcctggaccacgcccggggcaagagccaggtggccctgaagatcatcagaaatgtgggcaagtaccgggaggccgcccggctggagatcaacgtgctgaagaagatcaaggagaaggacaaggagaacaagttcctgtgtgtgctgatgtctgactggttcaacttccacggccacatgtgcatcgcctttgagctgctgggcaagaacacctttgagttcctgaaggagaacaacttccagccctaccccctgccccacgtgcgccacatggcctaccagctgtgccacgccctgcgcttcctgcacgagaaccagctgacccacacagacctgaagccagagaacatcctgtttgtgaacagcgagtttgagaccctgtacaatgagcacaagagctgtgaggagaagtctgtgaagaacaccagcatccgggtggccgactttggaagtgccacctttgaccacgagcaccacaccaccatcgtggccaccaggcactaccggcccccagaggtgatcctggagctgggctgggcccagccctgtgatgtgtggagcatcggctgcatcctgtttgagtactaccggggcttcaccctcttccagacccatgagaaccgggagcacctggtgatgatggagaagatcctgggccccatccccagccacatgatccacaggaccaggaagcagaagtacttctacaagggcggcctggtgtgggatgagaacagcagtgatggccgctacgtgaaggagaactgcaagcccctgaagagctacatgctgcaggacagcctggagcacgtgcagctgtttgacctgatgaggaggatgctggagtttgatcctgcccagaggatcaccctggccgaggccctgctgcaccccttctttgctggcctgaccccagaggagaggagcttccacaccagcaggaaccccagcaggtag

SEQ ID NO: 146927 - DNA, 459 bp, synthetic construct
  misc_feature 1..459: note = Description of Artificial Sequence: Synthetic coding sequence
  source 1..459: mol_type = other DNA
atgcaccactgcaagcgctaccgcagccctgagccagacccctacctgagctaccgctggaagagaagaagaagctacagccgggagcacgagggccgcctgcgctaccccagcagaagagagcccccaccaagaagaagccgcagccgcagccatgaccggctgccctaccagaggcgctaccgggagcggcgggacagcgacacctaccgctgtgaggagaggagccccagctttggagaggactactacggccccagccgcagccgccacagaagaagaagccgggagcggggcccctaccgcaccaggaagcacgcccaccactgccacaagaggaggaccaggagctgcagcagcgccagctccatgaggctgtggggcacctgggtgaaggcccccctggcccgctggtggagcgcctggaccatgcctgagggcagcctgcggctgccctag

SEQ ID NO: 146928 - DNA, 1404 bp, synthetic construct
  misc_feature 1..1404: note = Description of Artificial Sequence: Synthetic coding sequence
  source 1..1404: mol_type = other DNA
atgcaccactgcaagcgctaccgcagccctgagccagacccctacctgagctaccgctggaagagaagaagaagctacagccgggagcacgagggccgcctgcgctaccccagcagaagagagcccccaccaagaagaagccgcagccgcagccatgaccggctgccctaccagaggcgctaccgggagcggcgggacagcgacacctaccgctgtgaggagaggagccccagctttggagaggactactacggccccagccgcagccgccacagaagaagaagccgggagcggggcccctaccgcaccaggaagcacgcccaccactgccacaagaggaggaccaggagctgcagcagcgccagcagccgcagccagcagagcagcaagaggagcagccgctctgtggaggatgacaaggagggccacctggtgtgccgcatcggggactggctgcaggagcgctggaagagccaggtggccctgaagatcatcagaaatgtgggcaagtaccgggaggccgcccggctggagatcaacgtgctgaagaagatcaaggagaaggacaaggagaacaagttcctgtgtgtgctgatgtctgactggttcaacttccacggccacatgtgcatcgcctttgagctgctgggcaagaacacctttgagttcctgaaggagaacaacttccagccctaccccctgccccacgtgcgccacatggcctaccagctgtgccacgccctgcgcttcctgcacgagaaccagctgacccacacagacctgaagccagagaacatcctgtttgtgaacagcgagtttgagaccctgtacaatgagcacaagagctgtgaggagaagtctgtgaagaacaccagcatccgggtggccgactttggcagcgccacctttgaccacgagcaccacaccaccatcgtggccaccaggcactacagacctcctgaggtgatcctggagctgggctgggcccagccctgtgatgtgtggagcatcggctgcatcctgtttgagtactaccggggcttcaccctcttccagacccatgaaaatcgggagcacctggtgatgatggagaagatcctgggccccatccccagccacatgatccacaggaccaggaagcagaagtacttctacaagggcggcctggtgtgggatgagaacagcagtgatggccgctacgtgaaggagaactgcaagcccctgaagagctacatgctgcaggacagcctggagcacgtgcagctgtttgacctgatgaggaggatgctggagtttgatcctgcccagaggatcaccctggccgaggccctgctgcaccccttctttgctggcctgaccccagaggagaggagcttccacaccagcaggaaccccagcaggtag

SEQ ID NO: 146929 - DNA, 1473 bp, synthetic construct; identical to SEQ ID NO: 146926
  misc_feature 1..1473: note = Description of Artificial Sequence: Synthetic coding sequence
  source 1..1473: mol_type = other DNA

SEQ ID NO: 146930 - DNA, 1917 bp, synthetic construct
  misc_feature 1..1917: note = Description of Artificial Sequence: Synthetic coding sequence
  source 1..1917: mol_type = other DNA
atgcctgtgctgagcgcccggcggcgggagctggccgaccatgctggcagcggcagaagaagtggccccagccccacagcccggagcggcccccacctgagcgccctgcgggcccagcctgcccgggccgcccacctgagcggccggggcacctacgtgcggcgggacacagctgggggcggccctggccaggcccggcccctgggccccccaggcaccagcctgctgggccgcggggccaggagaagtggagagggctggtgccctggggcctttgagagcggggcccgggccgcccggccccccagccgggtggagccccggctggccacagctgccagccgggagggcgccggcctgcccagggctgaggtggccgccggcagcggccgcggggcccggtctggagagtggggcctggccgctgctggggcctgggagaccatgcaccactgcaagcgctaccgcagccctgagccagacccctacctgagctaccgctggaagagaagaagaagctacagccgggagcacgagggccgcctgcgctaccccagcagaagagagcccccaccaagaagaagccgcagccgcagccatgaccggctgccctaccagaggcgctaccgggagcggcgggacagcgacacctaccgctgtgaggagaggagccccagctttggagaggactactacggccccagccgcagccgccacagaagaagaagccgggagcggggcccctaccgcaccaggaagcacgcccaccactgccacaagaggaggaccaggagctgcagcagcgccagcagccgcagccagcagagcagcaagaggagcagccgctctgtggaggatgacaaggagggccacctggtgtgccgcatcggggactggctgcaggagagatatgagatcgtgggcaacctgggggagggcaccttcggcaaggtggtggagtgcctggaccacgcccggggcaagagccaggtggccctgaagatcatcagaaatgtgggcaagtaccgggaggccgcccggctggagatcaacgtgctgaagaagatcaaggagaaggacaaggagaacaagttcctgtgtgtgctgatgtctgactggttcaacttccacggccacatgtgcatcgcctttgagctgctgggcaagaacacctttgagttcctgaaggagaacaacttccagccctaccccctgccccacgtgcgccacatggcctaccagctgtgccacgccctgcgcttcctgcacgagaaccagctgacccacacagacctgaagccagagaacatcctgtttgtgaacagcgagtttgagaccctgtacaatgagcacaagagctgtgaggagaagtctgtgaagaacaccagcatccgggtggccgactttggaagtgccacctttgaccacgagcaccacaccaccatcgtggccaccaggcactaccggcccccagaggtgatcctggagctgggctgggcccagccctgtgatgtgtggagcatcggctgcatcctgtttgagtactaccggggcttcaccctcttccagacccatgagaaccgggagcacctggtgatgatggagaagatcctgggccccatccccagccacatgatccacaggaccaggaagcagaagtacttctacaagggcggcctggtgtgggatgagaacagcagtgatggccgctacgtgaaggagaactgcaagcccctgaagagctacatgctgcaggacagcctggagcacgtgcagctgtttgacctgatgaggaggatgctggagtttgatcctgcccagaggatcaccctggccgaggccctgctgcaccccttctttgctggcctgaccccagaggagaggagcttccacaccagcaggaaccccagcaggtag

SEQ ID NO: 146931 - DNA, 327 bp, synthetic construct
  misc_feature 1..327: note = Description of Artificial Sequence: Synthetic coding sequence
  source 1..327: mol_type = other DNA
atgagcctgaccagcagcagctctgtgcgggtggagtggattgctgctgtgaccatcgctgctggaacagctgccatcggctacctggcctacaagcgcttctacgtgaaggaccacaggaacaaggccatgatcaacctgcacatccagaaggacaaccccaagatcgtgcacgcctttgacatggaggacctgggggacaaggctgtgtactgccgctgctggaggagcaagaagttccccttctgtgatggagcccacaccaagcacaatgaggagaccggggacaacgtgggccccctcatcatcaagaagaaggagacctag

SEQ ID NO: 146932 - DNA, 408 bp, synthetic construct
  misc_feature 1..408: note = Description of Artificial Sequence: Synthetic coding sequence
  source 1..408: mol_type = other DNA
atggtgctggagagcgtggccagaattgtgaaggtgcagctgcctgcctacctgaagaggctgcctgtgcctgagagcatcaccggctttgcccggctgactgtgtctgagtggctgcggctgctgcccttcctgggcgtgctggccctgctgggctacctggccgtgcggcccttcctgcccaagaagaagcagcagaaggacagcctcatcaacctgaagatccagaaggagaaccccaaggtggtgaatgagatcaacatcgaggacctgtgcctgaccaaggccgcctactgccgctgctggaggagcaagaccttccctgcctgtgatggcagccacaacaagcacaatgagctgactggagacaacgtgggccccctcatcctgaagaagaaggaggtgtag

SEQ ID NO: 146933 - DNA, 384 bp, synthetic construct
  misc_feature 1..384: note = Description of Artificial Sequence: Synthetic coding sequence
  source 1..384: mol_type = other DNA
atgagaggagctggggccatcctgcggcctgctgcccggggggcccgggacctgaacccccggcgggacatcagctcctggctggcccagtggttccccaggaccccagcccggtctgtggtggccctgaagacccccatcaaggtggagctggtggccggcaagacctaccgctggtgtgtgtgtggccgcagcaagaagcagcccttctgtgatggcagccacttcttccagaggacaggcctgagccccctgaagttcaaggcccaggagaccaggatggtggccctgtgcacctgcaaggccacccagaggcctccctactgtgatggcacccacaggtctgagcgggtgcagaaggccgaggtgggcagccccctgtag

SEQ ID NO: 146934 - DNA, 1740 bp, synthetic construct
  misc_feature 1..1740: note = Description of Artificial Sequence: Synthetic coding sequence
  source 1..1740: mol_type = other DNA
atgcccagcgccagctgtgacaccctgctggatgacatcgaggacatcgtgtcccaggaggacagcaagccccaggacagacactttgtgaggaaggatgtggtgcccaaggtgagaagaagaaacacccagaagtacctgcaggaggaggagaacagcccccccagcgacagcaccatccctggcatccagaagatctggatccgcacctggggctgcagccacaacaacagtgatggagagtacatggccggccagctggccgcctacggctacaagatcacagaaaatgccagtgatgctgacctgtggctgctgaacagctgcaccgtgaagaacccagctgaggaccacttcaggaacagcatcaagaaggcccaggaggagaacaagaagatcgtgctggccggctgtgtgccccaggcccagccccggcaggactacctgaagggcctgagcatcattggagtgcagcagattgacagagtggtggaggtggtggaggagaccatcaagggccacagcgtgcggctgctgggccagaagaaggacaatggaagaaggctgggcggggcccggctggacctgcccaagatcaggaagaaccccctgattgagatcatcagcatcaacacaggctgcctgaatgcctgcacctactgcaagaccaagcacgcccggggcaacctggccagctaccccattgatgagctggtggaccgggccaagcagagcttccaggagggcgtgtgtgagatctggctgaccagcgaggacaccggggcctacggccgggacatcggcaccaacctgcccaccctgctgtggaagctggtggaggtgattcctgagggcgccatgctgcggctgggcatgaccaaccccccctacatcctggagcacctggaggagatggccaagatcctgaaccacccccgggtgtatgccttcctgcacatccctgtgcagagcgccagtgacagcgtgctgatggagatgaagcgggagtactgtgtggccgacttcaagagggtggtggacttcctgaaggagaaggtgcccggcatcaccatcgccacagacatcatctgtggcttccctggagaaacagaccaggacttccaggagaccgtgaagctggtggaggagtacaagttccccagcctcttcatcaaccagttctacccccggcccggcaccccagctgccaagatggagcaggtgcctgcccaggtgaagaagcagaggaccaaggacctgagcagggtcttccacagctacagcccctatgaccacaagatcggggagcggcagcaggtgctggtgacagaggagagctttgacagcaagttctacgtggcccacaaccagttctatgagcaggtgctggtgcccaagaacccagccttcatgggcaagatggtggaggtggacatctatgagagcggcaagcacttcatgaagggccagcctgtgtctgatgccaaggtgtacacccccagcatcagcaagcccctggccaagggggaggtgtctggcctgaccaaggacttcagaaatggcctgggcaaccagctgagcagcggcagccacaccagcgctgccagccagtgtgacagcgccagcagcaggatggtgctgcccatgccccggctgcaccaggactgtgccctgaggatgtctgtgggcctggccctgctgggcctgctgtttgccttctttgtgaaggtgtacaactag

SEQ ID NO: 146935 - DNA, 1740 bp, synthetic construct; identical to SEQ ID NO: 146934
  misc_feature 1..1740: note = Description of Artificial Sequence: Synthetic coding sequence
  source 1..1740: mol_type = other DNA

SEQ ID NO: 146936 - DNA, 1467 bp, synthetic construct
  misc_feature 1..1467: note = Description of Artificial Sequence: Synthetic coding sequence
  source 1..1467: mol_type = other DNA
atgctgagccgccgctatgaaggagagatccccaagaacatctgcaagaggaagaagacagtgcaccaggtgacagaaaatgccagtgatgctgacctgtggctgctgaacagctgcaccgtgaagaacccagctgaggaccacttcaggaacagcatcaagaaggcccaggaggagaacaagaagatcgtgctggccggctgtgtgccccaggcccagccccggcaggactacctgaagggcctgagcatcattggagtgcagcagattgacagagtggtggaggtggtggaggagaccatcaagggccacagcgtgcggctgctgggccagaagaaggacaatggaagaaggctgggcggggcccggctggacctgcccaagatcaggaagaaccccctgattgagatcatcagcatcaacacaggctgcctgaatgcctgcacctactgcaagaccaagcacgcccggggcaacctggccagctaccccattgatgagctggtggaccgggccaagcagagcttccaggagggcgtgtgtgagatctggctgaccagcgaggacaccggggcctacggccgggacatcggcaccaacctgcccaccctgctgtggaagctggtggaggtgattcctgagggcgccatgctgcggctgggcatgaccaaccccccctacatcctggagcacctggaggagatggccaagatcctgaaccacccccgggtgtatgccttcctgcacatccctgtgcagagcgccagtgacagcgtgctgatggagatgaagcgggagtactgtgtggccgacttcaagagggtggtggacttcctgaaggagaaggtgcccggcatcaccatcgccacagacatcatctgtggcttccctggagaaacagaccaggacttccaggagaccgtgaagctggtggaggagtacaagttccccagcctcttcatcaaccagttctacccccggcccggcaccccagctgccaagatggagcaggtgcctgcccaggtgattggagagcggcagcaggtgctggtgacagaggagagctttgacagcaagttctacgtggcccacaaccagttctatgagcaggtgctggtgcccaagaacccagccttcatgggcaagatggtggaggtggacatctatgaaagtggcaagcacttcatgaagggccagcctgtgtctgatgccaaggtgtacacccccagcatcagcaagcccctggccaagggggaggtgtctggcctgaccaaggacttcagaaatggcctgggcaaccagctgagcagcggcagccacaccagcgctgccagccagtgtgacagcgccagcagcaggatggtgctgcccatgccccggctgcaccaggactgtgccctgaggatgtctgtgggcctggccctgctgggcctgctgtttgccttctttgtgaaggtgtacaactag

SEQ ID NO: 146937 - DNA, 4824 bp, synthetic construct
  misc_feature 1..4824: note = Description of Artificial Sequence: Synthetic coding sequence
  source 1..4824: mol_type = other DNA
atgatggacctggtgctggaggaggatgtgacagtgcccggcaccctgagcggctgcagcggcctggtgcccagcgtgcctgatgacctggatggcatcaaccccaatgccggcctgggcaatggcctgctgcccaacgtgtctgaggagaccgtgagccccacccgggccaggaacatgaaggactttgagaaccagatcacagagctgaagaaggagaacttcaacctgaagctgcgcatctacttcctggaggagaggatgcagcaggagttccacggccccacagagcacatctacaagaccaacatcgagctgaaggtggaggtggagagcctgaagcgggagctgcaggagcgggagcagctgctgatcaaggccagcaaggctgtggagagcctggccgaggccggcggcagcgagatccagagggtgaaggaggatgccaggaagaaggtgcagcaggtggaggacctgctgaccaagaggatcctgctgctggagaaggccaaggatgtgacagctgcccaggccgagctggagaaggcctttgctggaacagaaacagagaaggccctgcggctgcggctggagagcaagctgtctgagatgaagaagatgcatgaaggagacctggccatggccctggtgctggatgagaaggaccggctgattgaggagctgaagctgagcctgaagagcaaggaggccctgatccagtgcctgaaggaggagaagagccagatggcctgcccagatgaaaatgtgagcagcggggagctgcggggcctgtgtgccgccccccgggaggagaaggagcgggagacagaggccgcccagatggagcaccagaaggagagaaattcctttgaggagcgcatccaggccctggaggaggacctgcgggagaaggagcgggagatcgccacagagaagaagaacagcctgaagagggacaaggccatccagggcctgaccatggccctgaagagcaaggagaagaaggtggaggagctgaacagcgagattgagaagctgtctgctgcctttgccaaggcccgggaggccctgcagaaggcccagacccaggagttccagggctctgaagattatgaaacagccctgagcggcaaggaggccctgtctgctgccctgcggagccagaacctgaccaagagcacagagaaccaccggctgcggcgcagcatcaagaagatcacccaggagctgagtgacctgcagcaggagcgggagcggctggagaaggacctggaggaggcccaccgggagaagagcaaaggagactgcaccatccgggacctgagaaatgaggtggagaagctgagaaatgaggtgaatgaaagagagaaggccatggagaaccgctacaagagcctgctgtctgagagcaacaagaagctgcacaaccaggagcaggtgatcaagcacctgacagagagcaccaaccagaaggatgtgctgctgcagaagttcaatgagaaggacctggaggtgatccagcagaactgctacctgatggctgctgaggacctggagctgcggtctgagggcctcatcacagagaagtgcagcagccagcagcccccaggcagcaagaccatcttcagcaaggagaagaagcagagcagtgactatgaggagctgatccaggtgctgaagaaggagcaggacatctacacccacctggtgaagagcctgcaggagagtgacagcatcaacaacctgcaggccgagctgaacaagatctttgccctgaggaagcagctggagcaggatgtgctgagctaccagaacctgaggaagaccctggaggagcagatcagcgagatcagaagaagagaggagagcttcagcctgtacagcgaccagaccagctacctgagcatctgcctggaggagaacaaccgcttccaggtggagcacttcagccaggaggagctgaagaagaaggtgtctgacctgatccagctggtgaaggagctgtacacagacaaccagcacctgaagaagaccatctttgacctgagctgcatgggcttccagggcaatggcttcccagaccggctggccagcacagagcagacagaggaggccaagaagagccggctgcccatcctgatcaagcccagccgcagcctgggcaacatgtaccgcctgcctgccacccaggaggtggtgacccagctgcagagccagatcctggagctgcagggcgagctgaaggagttcaagacctgcaacaagcagctgcaccagaagctgatcctggccgaggccgtgatggagggccggcccaccccagacaagaccctgctgaatgcccagccccctgtgggcgccgcctaccaggacagccctggagagcagaagggcatcaagaccaccagctctgtgtggagggacaaggagatggacagcgaccagcagaggagctatgaaattgattctgagatctgccccccagatgacctggccagcctgcccagctgcaaggaaaatccagaagatgtgctgagccccacctctgtggccacctacctgagcagcaagagccagcccagcgccaaggtgtctgtgatgggcacagaccagagcgagagcatcaacaccagcaatgaaacagagtacctgaagcagaagatccatgacctggagacagagctggagggctaccagaacttcatcttccagctgcagaagcacagccagtgcagcgaggccatcatcaccgtgctgtgtggcacagagggcgcccaggacggcctgagcaagcccaagaatggaagtgatggagaggagatgaccttcagcagcctgcaccaggtgcgctacgtgaagcacgtgaagatcctgggccccctggcccctgagatgattgacagccgggtgctggagaacctgaagcagcagctggaggagcaggagtacaagctgcagaaggagcagaacctgaacatgcagctgttcagcgagatccacaacctgcagaacaagttccgggacctgagccccccaagatatgacagcctggtgcagagccaggcccgggagctgagcctgcagaggcagcagatcaaggatggccacggcatctgtgtgatcagccggcagcacatgaacaccatgatcaaggcctttgaggagctgctgcaggccagtgatgtggactactgtgtggccgagggcttccaggagcagctgaaccagtgtgccgagctgctggagaagctggagaagctgttcctgaatggcaagtctgtgggcgtggagatgaacacccagaatgagctgatggagcgcatcgaggaggacaacctgacctaccagcacctgctgcctgagagccctgagcccagcgccagccacgccctgagtgactatgagaccagcgagaagagcttcttcagccgggaccagaagcaggacaatgaaacagagaagacctctgtgatggtgaacagcttcagccaggacctgctgatggagcacatccaggagatccgcaccctgaggaagaggctggaggagagcatcaagaccaatgagaagctgaggaagcagctggagcggcagggcagcgagtttgtgcagggcagcaccagcatctttgccagcggcagcgagctgcacagcagcctgaccagcgagatccacttcctgaggaagcagaaccaggccctgaatgccatgctgatcaagggcagccgggacaagcagaaggaaaatgacaagctgcgggagagcctgagcaggaagacagtgtccctggagcacctgcagcgggagtatgcctctgtgaaggaggagaatgaaaggctgcagaaggagggcagcgagaaggagcggcacaaccagcagctgatccaggaggtgcgctgcagcggccaggagctgagccgggtgcaggaggaggtgaagctgcggcagcagctgctgagccagaatgacaagctgctgcagagcctgcgggtggagctgaaggcctatgagaagctggatgaggagcaccggcggctgcgggaggccagcggggagggctggaagggccaggaccccttccgggacctgcacagcctgctgatggagatccaggccctgcggctgcagctggagaggagcattgagaccagcagcaccctgcagagccggctgaaggagcagctggcccggggagctgagaaggcccaggagggcgccctgaccctggccgtgcaggccgtgtccatccctgaggtgcccctgcagcctgacaagcatgatggagacaagtaccccatggagagtgacaacagctttgacctgtttgacagcagccaggccgtgacccccaagtctgtgtctgagaccccacccctgtctggaaatgacacagacagcctgagctgtgacagcggcagcagcgccaccagcaccccctgtgtgtcccggctggtgacaggccaccacctgtgggccagcaagaatggccgccacgtgctgggcctgattgaggactatgaggccctgctgaagcagatcagccagggccagaggctgctggccgagatggacatccagacccaggaggcccccagcagcaccagccaggagctgggcaccaagggcccccacccagcccccctgagcaagtttgtgtcctctgtgtccacagccaagctgaccctggaggaggcctacagaaggctgaagctgctgtggagggtgtccctgcctgaagatggccagtgccccctgcactgtgagcagatcggggagatgaaggccgaggtgaccaagctgcacaagaagctgaagaagagctag

SEQ ID NO: 146938 - DNA, 5682 bp, synthetic construct
  misc_feature 1..5682: note = Description of Artificial Sequence: Synthetic coding sequence
  source 1..5682: mol_type = other DNA
atgatggacctggtgctggaggaggatgtgacagtgcccggcaccctgagcggctgcagcggcctggtgcccagcgtgcctgatgacctggatggcatcaaccccaatgccggcctgggcaatggcctgctgcccaacgtgtctgaggagaccgtgagccccacccgggccaggaacatgaaggactttgagaaccagatcacagagctgaagaaggagaacttcaacctgaagctgcgcatctacttcctggaggagaggatgcagcaggagttccacggccccacagagcacatctacaagaccaacatcgagctgaaggtggaggtggagagcctgaagcgggagctgcaggagcgggagcagctgctgatcaaggccagcaaggctgtggagagcctggccgaggccggcggcagcgagatccagagggtgaaggaggatgccaggaagaaggtgcagcaggtggaggacctgctgaccaagaggatcctgctgctggagaaggatgtgacagctgcccaggccgagctggagaaggcctttgctggaacagaaacagagaaggccctgcggctgcggctggagagcaagctgtctgagatgaagaagatgcatgaaggagacctggccatggccctggtgctggatgagaaggaccggctgattgaggagctgaagctgagcctgaagagcaaggaggccctgatccagtgcctgaaggaggagaagagccagatggcctgcccagatgaaaatgtgagcagcggggagctgcggggcctgtgtgccgccccccgggaggagaaggagcgggagacagaggccgcccagatggagcaccagaaggagagaaattcctttgaggagcgcatccaggccctggaggaggacctgcgggagaaggagcgggagatcgccacagagaagaagaacagcctgaagagggacaaggccatccagggcctgaccatggccctgaagagcaaggagaagaaggtggaggagctgaacagcgagattgagaagctgtctgctgcctttgccaaggcccgggaggccctgcagaaggcccagacccaggagttccagggctctgaagattatgaaacagccctgagcggcaaggaggccctgtctgctgccctgcggagccagaacctgaccaagagcacagagaaccaccggctgcggcgcagcatcaagaagatcacccaggagctgagtgacctgcagcaggagcgggagcggctggagaaggacctggaggaggcccaccgggagaagagcaaaggagactgcaccatccgggacctgagaaatgaggtggagaagctgagaaatgaggtgaatgaaagagagaaggccatggagaaccgctacaagagcctgctgtctgagagcaacaagaagctgcacaaccaggagcaggtgatcaagcacctgacagagagcaccaaccagaaggatgtgctgctgcagaagttcaatgagaaggacctggaggtgatccagcagaactgctacctgatggctgctgaggacctggagctgcggtctgagggcctcatcacagagaagtgcagcagccagcagcccccaggcagcaagaccatcttcagcaaggagaagaagcagagcagtgactatgaggagctgatccaggtgctgaagaaggagcaggacatctacacccacctggtgaagagcctgcaggagagtgacagcatcaacaacctgcaggccgagctgaacaagatctttgccctgaggaagcagctggagcaggatgtgctgagctaccagaacctgaggaagaccctggaggagcagatcagcgagatcagaagaagagaggaggagagcttcagcctgtacagcgaccagaccagctacctgagcatctgcctggaggagaacaaccgcttccaggtggagcacttcagccaggaggagctgaagaagaaggtgtctgacctgatccagctggtgaaggagctgtacacagacaaccagcacctgaagaagaccatctttgacctgagctgcatgggcttccagggcaatggcttcccagaccggctggccagcacagagcagacagagctgctggccagcaaggaggatgaggacaccatcaagattggagaagatgatgagatcaacttcctgagtgaccagcacctgcagcagagcaatgagatcatgaaggacctgagcaaaggaggctgcaagaatggctacctgcggcacacagagagcaagatcagtgactgtgatggagcccacgcccctggctgcctggaggagggcgccttcatcaacctgctggcccccctcttcaatgagaaggccaccctgctgctggagagcaggccagacctgctgaaggtggtgcgggagctgctgctgggccagctgttcctgacagagcaggaggtgtctggagagcacctggatggcaagacagagaagacccccaagcagaagggggagctggtgcactttgtgcagaccaacagcttcagcaagccccatgatgagctgaagctgagctgtgaggcccagctggtgaaggccggggaggtgcccaaggtgggcctgaaggatgcctctgtgcagacagtggccacagaaggagacctgctgcgcttcaagcatgaggccacccgggaggcctgggaggagaagcccatcaacacagccctgtctgctgagcacaggcctgagaacctgcatggagtgcccggctggcaggccgccctgctgagcctgcccggcatcaccaaccgggaggccaagaagagccggctgcccatcctgatcaagcccagccgcagcctgggcaacatgtaccgcctgcctgccacccaggaggtggtgacccagctgcagagccagatcctggagctgcagggcgagctgaaggagttcaagacctgcaacaagcagctgcaccagaagctgatcctggccgaggccgtgatggagggccggcccaccccagacaagaccctgctgaatgcccagccccctgtgggcgccgcctaccaggacagccctggagagcagaagggcatcaagaccaccagctctgtgtggagggacaaggagatggacagcgaccagcagaggagctatgaaattgattctgagatctgccccccagatgacctggccagcctgcccagctgcaaggaaaatccagaagatgtgctgagccccacctctgtggccacctacctgagcagcaagagccagcccagcgccaaggtgtctgtgatgggcacagaccagagcgagagcatcaacaccagcaatgaaacagagtacctgaagcagaagatccatgacctggagacagagctggagggctaccagaacttcatcttccagctgcagaagcacagccagtgcagcgaggccatcatcaccgtgctgtgtggcacagagggcgcccaggacggcctgagcaagcccaagaatggaagtgatggagaggagatgaccttcagcagcctgcaccaggtgcgctacgtgaagcacgtgaagatcctgggccccctggcccctgagatgattgacagccgggtgctggagaacctgaagcagcagctggaggagcaggagtacaagctgcagaaggagcagaacctgaacatgcagctgttcagcgagatccacaacctgcagaacaagttccgggacctgagccccccaagatatgacagcctggtgcagagccaggcccgggagctgagcctgcagaggcagcagatcaaggatggccacggcatctgtgtgatcagccggcagcacatgaacaccatgatcaaggcctttgaggagctgctgcaggccagtgatgtggactactgtgtggccgagggcttccaggagcagctgaaccagtgtgccgagctgctggagaagctggagaagctgttcctgaatggcaagtctgtgggcgtggagatgaacacccagaatgagctgatggagcgcatcgaggaggacaacctgacctaccagcacctgctgcctgagagccctgagcccagcgccagccacgccctgagtgactatgagaccagcgagaagagcttcttcagccgggaccagaagcaggacaatgaaacagagaagacctctgtgatggtgaacagcttcagccaggacctgctgatggagcacatccaggagatccgcaccctgaggaagaggctggaggagagcatcaagaccaatgagaagctgaggaagcagctggagcggcagggcagcgagtttgtgcagggcagcaccagcatctttgccagcggcagcgagctgcacagcagcctgaccagcgagatccacttcctgaggaagcagaaccaggccctgaatgccatgctgatcaagggcagccgggacaagcagaaggaaaatgacaagctgcgggagagcctgagcaggaagacagtgtccctggagcacctgcagcgggagtatgcctctgtgaaggaggagaatgaaaggctgcagaaggagggcagcgagaaggagcggcacaaccagcagctgatccaggaggtgcgctgcagcggccaggagctgagccgggtgcaggaggaggtgaagctgcggcagcagctgctgagccagaatgacaagctgctgcagagcctgcgggtggagctgaaggcctatgagaagctggatgaggagcaccggcggctgcgggaggccagcggggagggctggaagggccaggaccccttccgggacctgcacagcctgctgatggagatccaggccctgcggctgcagctggagaggagcattgagaccagcagcaccctgcagagccggctgaaggagcagctggcccggggagctgagaaggcccaggagggcgccctgaccctggccgtgcaggccgtgtccatccctgaggtgcccctgcagcctgacaagcatgatggagacaagtaccccatggagagtgacaacagctttgacctgtttgacagcagccaggccgtgacccccaagtctgtgtctgagaccccacccctgtctggaaatgacacagacagcctgagctgtgacagcggcagcagcgccaccagcaccccctgtgtgtcccggctggtgacaggccaccacctgtgggccagcaagaatggccgccacgtgctgggcctgattgaggactatgaggccctgctgaagcagatcagccagggccagaggctgctggccgagatggacatccagacccaggaggcccccagcagcaccagccaggagctgggcaccaagggcccccacccagcccccctgagcaagtttgtgtcctctgtgtccacagccaagctgaccctggaggaggcctacagaaggctgaagctgctgtggagggtgtccctgcctgaagatggccagtgccccctgcactgtgagcagatcggggagatgaaggccgaggtgaccaagctgcacaagaagctgtttgagcaggagaagaagctgcagaacaccatgaagctgctgcagctgagcaagaggcaggagaaggtgatctttgaccagctggtggtgacccacaagatcctgaggaaggcccggggcaacctggagctgcggcctgggggcgcccaccctggcacctgcagccccagcaggcctggcagctag

SEQ ID NO: 146939 - DNA, 5559 bp, synthetic construct
  misc_feature 1..5559: note = Description of Artificial Sequence: Synthetic coding sequence
  source 1..5559: mol_type = other DNA
atgatggacctggtgctggaggaggatgtgacagtgcccggcaccctgagcggctgcagcggcctggtgcccagcgtgcctgatgacctggatggcatcaaccccaatgccggcctgggcaatggcctgctgcccaacgtgtctgaggagaccgtgagccccacccgggccaggaacatgaaggactttgagaaccagatcacagagctgaagaaggagaacttcaacctgaagctgcgcatctacttcctggaggagaggatgcagcaggagttccacggccccacagagcacatctacaagaccaacatcgagctgaaggtggaggtggagagcctgaagcgggagctgcaggagcgggagcagctgctgatcaaggccagcaaggctgtggagagcctggccgaggccggcggcagcgagatccagagggtgaaggaggatgccaggaagaaggtgcagcaggtggaggacctgctgaccaagaggatcctgctgctggagaaggatgtgacagctgcccaggccgagctggagaaggcctttgctggaacagaaacagagaaggccctgcggctgcggctggagagcaagctgtctgagatgaagaagatgcatgaaggagacctggccatggccctggtgctggatgagaaggaccggctgattgaggagctgaagctgagcctgaagagcaaggaggccctgatccagtgcctgaaggaggagaagagccagatggcctgcccagatgaaaatgtgagcagcggggagctgcggggcctgtgtgccgccccccgggaggagaaggagcgggagacagaggccgcccagatggagcaccagaaggagagaaattcctttgaggagcgcatccaggccctggaggaggacctgcgggagaaggagcgggagatcgccacagagaagaagaacagcctgaagagggacaaggccatccagggcctgaccatggccctgaagagcaaggagaagaaggtggaggagctgaacagcgagattgagaagctgtctgctgcctttgccaaggcccgggaggccctgcagaaggcccagacccaggagttccagggctctgaagattatgaaacagccctgagcggcaaggaggccctgtctgctgccctgcggagccagaacctgaccaagagcacagagaaccaccggctgcggcgcagcatcaagaagatcacccaggagctgagtgacctgcagcaggagcgggagcggctggagaaggacctggaggaggcccaccgggagaagagcaaaggagactgcaccatccgggacctgagaaatgaggtggagaagctgagaaatgaggtgaatgaaagagagaaggccatggagaaccgctacaagagcctgctgtctgagagcaacaagaagctgcacaaccaggagcaggtgatcaagcacctgacagagagcaccaaccagaaggatgtgctgctgcagaagttcaatgagaaggacctggaggtgatccagcagaactgctacctgatggctgctgaggacctggagctgcggtctgagggcctcatcacagagaagtgcagcagccagcagcccccaggcagcaagaccatcttcagcaaggagaagaagcagagcagtgactatgaggagctgatccaggtgctgaagaaggagcaggacatctacacccacctggtgaagagcctgcaggagagtgacagcatcaacaacctgcaggccgagctgaacaagatctttgccctgaggaagcagctggagcaggatgtgctgagctaccagaacctgaggaagaccctggaggagcagatcagcgagatcagaagaagagaggaggagagcttcagcctgtacagcgaccagaccagctacctgagcatctgcctggaggagaacaaccgcttccaggtggagcacttcagccaggaggagctgaagaagaaggtgtctgacctgatccagctggtgaaggagctgtacacagacaaccagcacctgaagaagaccatctttgacctgagctgcatgggcttccagggcaatggcttcccagaccggctggccagcacagagcagacagagctgctggccagcaaggaggatgaggacaccatcaagattggagaagatgatgagatcaacttcctgagtgaccagcacctgcagcagagcaatgagatcatgaaggacctgagcaaaggaggctgcaagaatggctacctgcggcacacagagagcaagatcagtgactgtgatggagcccacgcccctggctgcctggaggagggcgccttcatcaacctgctggcccccctcttcaatgagaaggccaccctgctgctggagagcaggccagacctgctgaaggtggtgcgggagctgctgctgggccagctgttcctgacagagcaggaggtgtctggagagcacctggatggcaagacagagaagacccccaagcagaagggggagctggtgcactttgtgcagaccaacagcttcagcaagccccatgatgagctgaagctgagctgtgaggcccagctggtgaaggccggggaggtgcccaaggtgggcctgaaggatgcctctgtgcagacagtggccacagaaggagacctgctgcgcttcaagcatgaggccacccgggaggcctgggaggagaagcccatcaacacagccctgtctgctgagcacaggcctgagaacctgcatggagtgcccggctggcaggccgccctgctgagcctgcccggcatcaccaaccgggaggccaagaagagccggctgcccatcctgatcaagcccagccgcagcctgggcaacatgtaccgcctgcctgccacccaggaggtggtgacccagctgcagagccagatcctggagctgcagggcgagctgaaggagttcaagacctgcaacaagcagctgcaccagaagctgatcctggccgaggccgtgatggagggccggcccaccccagacaagaccctgctgaatgacagcgagatctgccccccagatgacctggccagcctgcccagctgcaaggagaacccagaagatgtgctgagccccacctctgtggccacctacctgagcagcaagagccagcccagcgccaaggtgtctgtgatgggcacagaccagagcgagagcatcaacaccagcaatgaaacagagtacctgaagcagaagatccatgacctggagacagagctggagggctaccagaacttcatcttccagctgcagaagcacagccagtgcagcgaggccatcatcaccgtgctgtgtggcacagaaggagcccaggacggcctgagcaagcccaagaatggaagtgatggagaggagatgaccttcagcagcctgcaccaggtgcgctacgtgaagcacgtgaagatcctgggccccctggcccctgagatgattgacagccgggtgctggagaacctgaagcagcagctggaggagcaggagtacaagctgcagaaggagcagaacctgaacatgcagctgttcagcgagatccacaacctgcagaacaagttccgggacctgagcccccccaggtatgacagcctggtgcagagccaggcccgggagctgagcctgcagaggcagcagatcaaggatggccacggcatctgtgtgatcagccggcagcacatgaacaccatgatcaaggcctttgaggagctgctgcaggccagtgatgtggactactgtgtggccgagggcttccaggagcagctgaaccagtgtgccgagctgctggagaagctggagaagctgttcctgaatggcaagtctgtgggcgtggagatgaacacccagaatgagctgatggagagaattgaggaggacaacctgacctaccagcacctgctgcctgagagccctgagcccagcgccagccacgccctgagtgactatgagaccagcgagaagagcttcttcagccgggaccagaagcaggacaatgaaacagagaagacctctgtgatggtgaacagcttcagccaggacctgctgatggagcacatccaggagatccgcaccctgaggaagaggctggaggagagcatcaagaccaatgagaagctgaggaagcagctggagcggcagggcagcgagtttgtgcagggcagcaccagcatctttgccagcggcagcgagctgcacagcagcctgaccagcgagatccacttcctgaggaagcagaaccaggccctgaatgccatgctgatcaagggcagccgggacaagcagaaggaaaatgacaagctgcgggagagcctgagcaggaagacagtgtccctggagcacctgcagcgggagtatgcctctgtgaaggaggagaatgaaaggctgcagaaggagggcagcgagaaggagcggcacaaccagcagctgatccaggaggtgcgctgcagcggccaggagctgagccgggtgcaggaggaggtgaagctgcggcagcagctgctgagccagaatgacaagctgctgcagagcctgcgggtggagctgaaggcctatgagaagctggatgaggagcaccggcggctgcgggaggccagcggggagggctggaagggccaggaccccttccgggacctgcacagcctgctgatggagatccaggccctgcggctgcagctggagaggagcattgagaccagcagcaccctgcagagccggctgaaggagcagctggcccggggagctgagaaggcccaggagggcgccctgaccctggccgtgcaggccgtgtccatccctgaggtgcccctgcagcctgacaagcatgatggagacaagtaccccatggagagtgacaacagctttgacctgtttgacagcagccaggccgtgacccccaagtctgtgtctgagaccccacccctgtctggaaatgacacagacagcctgagctgtgacagcggcagcagcgccaccagcaccccctgtgtgtcccggctggtgacaggccaccacctgtgggccagcaagaatggaagacatgtgctgggcctgattgaagattatgaggccctgctgaagcagatcagccagggccagaggctgctggccgagatggacatccagacccaggaggcccccagcagcaccagccaggagctgggcaccaagggcccccacccagcccccctgagcaagtttgtgtcctctgtgtccacagccaagctgaccctggaggaggcctaccgccgcctgaagctgctgtggagggtgtccctgcctgaagatggccagtgccccctgcactgtgagcagattggagagatgaaggccgaggtgaccaagctgcacaagaagctgtttgagcaggagaagaagctgcagaacaccatgaagctgctgcagctgagcaagaggcaggagaaggtgatctttgaccagctggtggtgacccacaagatcctgaggaaggcccggggcaacctggagctgcggcctggaggagcccaccctggcacctgcagccccagccggcccggcagctag

SEQ ID NO: 146940 - DNA, 5445 bp, synthetic construct
  misc_feature 1..5445: note = Description of Artificial Sequence: Synthetic coding sequence
  source 1..5445: mol_type = other DNA
atgatggacctggtgctggaggaggatgtgacagtgcccggcaccctgagcggctgcagcggcctggtgcccagcgtgcctgatgacctggatggcatcaaccccaatgccggcctgggcaatggcctgctgcccaacgtgtctgaggagaccgtgagccccacccgggccaggaacatgaaggactttgagaaccagatcacagagctgaagaaggagaacttcaacctgaagctgcgcatctacttcctggaggagaggatgcagcaggagttccacggccccacagagcacatctacaagaccaacatcgagctgaaggtggaggtggagagcctgaagcgggagctgcaggagcgggagcagctgctgatcaaggccagcaaggctgtggagagcctggccgaggccggcggcagcgagatccagagggtgaaggaggatgccaggaagaaggtgcagcaggtggaggacctgctgaccaagaggatcctgctgctggagaaggatgtgacagctgcccaggccgagctggagaaggcctttgctggaacagaaacagagaaggccctgcggctgcggctggagagcaagctgtctgagatgaagaagatgcatgaaggagacctggccatggccctggtgctggatgagaaggaccggctgattgaggagctgaagctgagcctgaagagcaaggaggccctgatccagtgcctgaaggaggagaagagccagatggcctgcccagatgaaaatgtgagcagcggggagctgcggggcctgtgtgccgccccccgggaggagaaggagcgggagacagaggccgcccagatggagcaccagaaggagagaaattcctttgaggagcgcatccaggccctggaggaggacctgcgggagaaggagcgggagatcgccacagagaagaagaacagcctgaagagggacaaggccatccagggcctgaccatggccctgaagagcaaggagaagaaggtggaggagctgaacagcgagattgagaagctgtctgctgcctttgccaaggcccgggaggccctgcagaaggcccagacccaggagttccagggctctgaagattatgaaacagccctgagcggcaaggaggccctgtctgctgccctgcggagccagaacctgaccaagagcacagagaaccaccggctgcggcgcagcatcaagaagatcacccaggagctgagtgacctgcagcaggagcgggagcggctggagaaggacctggaggaggcccaccgggagaagagcaaaggagactgcaccatccgggacctgagaaatgaggtggagaagctgagaaatgaggtgaatgaaagagagaaggccatggagaaccgctacaagagcctgctgtctgagagcaacaagaagctgcacaaccaggagcaggtgatcaagcacctgacagagagcaccaaccagaaggatgtgctgctgcagaagttcaatgagaaggacctggaggtgatccagcagaactgctacctgatggctgctgaggacctggagctgcggtctgagggcctcatcacagagaagtgcagcagccagcagcccccaggcagcaagaccatcttcagcaaggagaagaagcagagcagtgactatgaggagctgatccaggtgctgaagaaggagcaggacatctacacccacctggtgaagagcctgcaggagagtgacagcatcaacaacctgcaggccgagctgaacaagatctttgccctgaggaagcagctggagcaggatgtgctgagctaccagaacctgaggaagaccctggaggagcagatcagcgagatcagaagaagagaggaggagagcttcagcctgtacagcgaccagaccagctacctgagcatctgcctggaggagaacaaccgcttccaggtggagcacttcagccaggaggagctgaagaagaaggtgtctgacctgatccagctggtgaaggagctgtacacagacaaccagcacctgaagaagaccatctttgacctgagctgcatgggcttccagggcaatggcttcccagaccggctggccagcacagagcagacagagctgctggccagcaaggaggatgaggacaccatcaagattggagaagatgatgagatcaacttcctgagtgaccagcacctgcagcagagcaatgagatcatgaaggacctgagcaaaggaggctgcaagaatggctacctgcggcacacagagagcaagatcagtgactgtgatggagcccacgcccctggctgcctggaggagggcgccttcatcaacctgctggcccccctcttcaatgagaaggccaccctgctgctggagagcaggccagacctgctgaaggtggtgcgggagctgctgctgggccagctgttcctgacagagcaggaggtgtctggagagcacctggatggcaagacagagaagacccccaagcagaagggggagctggtgcactttgtgcagaccaacagcttcagcaagccccatgatgagctgaagctgagctgtgaggcccagctggtgaaggccggggaggtgcccaaggtgggcctgaaggatgcctctgtgcagacagtggccacagaaggagacctgctgcgcttcaagcatgaggccacccgggaggcctgggaggagaagcccatcaacacagccctgtctgctgagcacaggcctgagaacctgcatggagtgcccggctggcaggccgccctgctgagcctgcccggcatcaccaaccgggaggccaagaagagccggctgcccatcctgatcaagcccagccgcagcctgggcaacatgtaccgcctgcctgccacccaggaggtggtgacccagctgcagagccagatcctggagctgcagggcgagctgaaggagttcaagacctgcaacaagcagctgcaccagaagctgatcctggccgaggccgtgatggagggccggcccaccccagacaagaccctgctgaatgcccagccccctgtgggcgccgcctaccaggacagccctggagagcagaagggcatcaagaccaccagctctgtgtggagggacaaggagatggacagcgaccagcagaggagctatgaaattgattctgagatctgccccccagatgacctggccagcctgcccagctgcaaggaaaatccagaagatgtgctgagccccacctctgtggccacctacctgagcagcaagagccagcccagcgccaaggtgtctgtgatgggcacagaccagagcgagagcatcaacaccagcaatgaaacagagtacctgaagcagaagatccatgacctggagacagagctggagggctaccagaacttcatcttccagctgcagaagcacagccagtgcagcgaggccatcatcaccgtgctgtgtggcacagagggcgcccaggacggcctgagcaagcccaagaatggaagtgatggagaggagatgaccttcagcagcctgcaccaggtgcgctacgtgaagcacgtgaagatcctgggccccctggcccctgagatgattgacagccgggtgctggagaacctgaagcagcagctggaggagcaggagtacaagctgcagaaggagcagaacctgaacatgcagctgttcagcgagatccacaacctgcagaacaagttccgggacctgagccccccaagatatgacagcctggtgcagagccaggcccgggagctgagcctgcagaggcagcagatcaaggatggccacggcatctgtgtgatcagccggcagcacatgaacaccatgatcaaggcctttgaggagctgctgcaggccagtgatgtggactactgtgtggccgagggcttccaggagcagctgaaccagtgtgccgagctgctggagaagctggagaagctgttcctgaatggcaagtctgtgggcgtggagatgaacacccagaatgagctgatggagcgcatcgaggaggacaacctgacctaccagcacctgctgcctgagagccctgagcccagcgccagccacgccctgagtgactatgagaccagcgagaagagcttcttcagccgggaccagaagcaggacaatgaaacagagaagacctctgtgatggtgaacagcttcagccaggacctgctgatggagcacatccaggagatccgcaccctgaggaagaggctggaggagagcatcaagaccaatgagaagctgaggaagcagctggagcggcagggcagcgagtttgtgcagggcagcaccagcatctttgccagcggcagcgagctgcacagcagcctgaccagcgagatccacttcctgaggaagcagaaccaggccctgaatgccatgctgatcaagggcagccgggacaagcagaaggaaaatgacaagctgcgggagagcctgagcaggaagacagtgtccctggagcacctgcagcgggagtatgcctctgtgaaggaggagaatgaaaggctgcagaaggagggcagcgagaaggagcggcacaaccagcagctgatccaggaggtgcgctgcagcggccaggagctgagccgggtgcaggaggaggtgaagctgcggcagcagctgctgagccagaatgacaagctgctgcagagcctgcgggtggagctgaaggcctatgagaagctggatgaggagcaccggcggctgagagatggagacaagtaccccatggagagtgacaacagctttgacctgtttgacagcagccaggccgtgacccccaagtctgtgtctgagaccccacccctgtctggaaatgacacagacagcctgagctgtgacagcggcagcagcgccaccagcaccccctgtgtgtcccggctggtgacaggccaccacctgtgggccagcaagaatggaagacatgtgctgggcctgattgaagattatgaggccctgctgaagcagatcagccagggccagaggctgctggccgagatggacatccagacccaggaggcccccagcagcaccagccaggagctgggcaccaagggcccccacccagcccccctgagcaagtttgtgtcctctgtgtccacagccaagctgaccctggaggaggcctaccgccgcctgaagctgctgtggagggtgtccctgcctgaagatggccagtgccccctgcactgtgagcagattggagagatgaaggccgaggtgaccaagctgcacaagaagctgtttgagcaggagaagaagctgcagaacaccatgaagctgctgcagctgagcaagaggcaggagaaggtgatctttgaccagctggtggtgacccacaagatcctgaggaaggcccggggcaacctggagctgcggcctggaggagcccaccctggcacctgcagccccagccggcccggcagctag

SEQ ID NO: 146941 - DNA, 5586 bp, synthetic construct
  misc_feature 1..5586: note = Description of Artificial Sequence: Synthetic coding sequence
  source 1..5586: mol_type = other DNA
atgatggacctggtgctggaggaggatgtgacagtgcccggcaccctgagcggctgcagcggcctggtgcccagcgtgcctgatgacctggatggcatcaaccccaatgccggcctgggcaatggcctgctgcccaacgtgtctgaggagaccgtgagccccacccgggccaggaacatgaaggactttgagaaccagatcacagagctgaagaaggagaacttcaacctgaagctgcgcatctacttcctggaggagaggatgcagcaggagttccacggccccacagagcacatctacaagaccaacatcgagctgaaggtggaggtggagagcctgaagcgggagctgcaggagcgggagcagctgctgatcaaggccagcaaggctgtggagagcctggccgaggccggcggcagcgagatccagagggtgaaggaggatgccaggaagaaggtgcagcaggtggaggacctgctgaccaagaggatcctgctgctggagaaggatgtgacagctgcccaggccgagctggagaaggcctttgctggaacagaaacagagaaggccctgcggctgcggctggagagcaagctgtctgagatgaagaagatgcatgaaggagacctggccatggccctggtgctggatgagaaggaccggctgattgaggagctgaagctgagcctgaagagcaaggaggccctgatccagtgcctgaaggaggagaagagccagatggcctgcccagatgaaaatgtgagcagcggggagctgcggggcctgtgtgccgccccccgggaggagaaggagcgggagacagaggccgcccagatggagcaccagaaggagagaaattcctttgaggagcgcatccaggccctggaggaggacctgcgggagaaggagcgggagatcgccacagagaagaagaacagcctgaagagggacaaggccatccagggcctgaccatggccctgaagagcaaggagaagaaggtggaggagctgaacagcgagattgagaagctgtctgctgcctttgccaaggcccgggaggccctgcagaaggcccagacccaggagttccagggctctgaagattatgaaacagccctgagcggcaaggaggccctgtctgctgccctgcggagccagaacctgaccaagagcacagagaaccaccggctgcggcgcagcatcaagaagatcacccaggagctgagtgacctgcagcaggagcgggagcggctggagaaggacctggaggaggcccaccgggagaagagcaaaggagactgcaccatccgggacctgagaaatgaggtggagaagctgagaaatgaggtgaatgaaagagagaaggccatggagaaccgctacaagagcctgctgtctgagagcaacaagaagctgcacaaccaggagcaggtgatcaagcacctgacagagagcaccaaccagaaggatgtgctgctgcagaagttcaatgagaaggacctggaggtgatccagcagaactgctacctgatggctgctgaggacctggagctgcggtctgagggcctcatcacagagaagtgcagcagccagcagcccccaggcagcaagaccatcttcagcaaggagaagaagcagagcagtgactatgaggagctgatccaggtgctgaagaaggagcaggacatctacacccacctggtgaagagcctgcaggagagtgacagcatcaacaacctgcaggccgagctgaacaagatctttgccctgaggaagcagctggagcaggatgtgctgagctaccagaacctgaggaagaccctggaggagcagatcagcgagatcagaagaagagaggaggagagcttcagcctgtacagcgaccagaccagctacctgagcatctgcctggaggagaacaaccgcttccaggtggagcacttcagccaggaggagctgaagaagaaggtgtctgacctgatccagctggtgaaggagctgtacacagacaaccagcacctgaagaagaccatctttgacctgagctgcatgggcttccagggcaatggcttcccagaccggctggccagcacagagcagacagagatcatgaaggacctgagcaaaggaggctgcaagaatggctacctgcggcacacagagagcaagatcagtgactgtgatggagcccacgcccctggctgcctggaggagggcgccttcatcaacctgctggcccccctcttcaatgagaaggccaccctgctgctggagagcaggccagacctgctgaaggtggtgcgggagctgctgctgggccagctgttcctgacagagcaggaggtgtctggagagcacctggatggcaagacagagaagacccccaagcagaagggggagctggtgcactttgtgcagaccaacagcttcagcaagccccatgatgagctgaagctgagctgtgaggcccagctggtgaaggccggggaggtgcccaaggtgggcctgaaggatgcctctgtgcagacagtggccacagaaggagacctgctgcgcttcaagcatgaggccacccgggaggcctgggaggagaagcccatcaacacagccctgtctgctgagcacaggcctgagaacctgcatggagtgcccggctggcaggccgccctgctgagcctgcccggcatcaccaaccgggaggccaagaagagccggctgcccatcctgatcaagcccagccgcagcctgggcaacatgtaccgcctgcctgccacccaggaggtggtgacccagctgcagagccagatcctggagctgcagggcgagctgaaggagttcaagacctgcaacaagcagctgcaccagaagctgatcctggccgaggccgtgatggagggccggcccaccccagacaagaccctgctgaatgcccagccccctgtgggcgccgcctaccaggacagccctggagagcagaagggcatcaagaccaccagctctgtgtggagggacaaggagatggacagcgaccagcagaggagctatgaaattgattctgagatctgccccccagatgacctggccagcctgcccagctgcaaggaaaatccagaagatgtgctgagccccacctctgtggccacctacctgagcagcaagagccagcccagcgccaaggtgtctgtgatgggcacagaccagagcgagagcatcaacaccagcaatgaaacagagtacctgaagcagaagatccatgacctggagacagagctggagggctaccagaacttcatcttccagctgcagaagcacagccagtgcagcgaggccatcatcaccgtgctgtgtggcacagagggcgcccaggacggcctgagcaagcccaagaatggaagtgatggagaggagatgaccttcagcagcctgcaccaggtgcgctacgtgaagcacgtgaagatcctgggccccctggcccctgagatgattgacagccgggtgctggagaacctgaagcagcagctggaggagcaggagtacaagctgcagaaggagcagaacctgaacatgcagctgttcagcgagatccacaacctgcagaacaagttccgggacctgagccccccaagatatgacagcctggtgcagagccaggcccgggagctgagcctgcagaggcagcagatcaaggatggccacggcatctgtgtgatcagccggcagcacatgaacaccatgatcaaggcctttgaggagctgctgcaggccagtgatgtggactactgtgtggccgagggcttccaggagcagctgaaccagtgtgccgagctgctggagaagctggagaagctgttcctgaatggcaagtctgtgggcgtggagatgaacacccagaatgagctgatggagcgcatcgaggaggacaacctgacctaccagcacctgctgcctgagagccctgagcccagcgccagccacgccctgagtgactatgagaccagcgagaagagcttcttcagccgggaccagaagcaggacaatgaaacagagaagacctctgtgatggtgaacagcttcagccaggacctgctgatggagcacatccaggagatccgcaccctgaggaagaggctggaggagagcatcaagaccaatgagaagctgaggaagcagctggagcggcagggcagcgagtttgtgcagggcagcaccagcatctttgccagcggcagcgagctgcacagcagcctgaccagcgagatccacttcctgaggaagcagaaccaggccctgaatgccatgctgatcaagggcagccgggacaagcagaaggaaaatgacaagctgcgggagagcctgagcaggaagacagtgtccctggagcacctgcagcgggagtatgcctctgtgaaggaggagaatgaaaggctgcagaaggagggcagcgagaaggagcggcacaaccagcagctgatccaggaggtgcgctgcagcggccaggagctgagccgggtgcaggaggaggtgaagctgcggcagcagctgctgagccagaatgacaagctgctgcagagcctgcgggtggagctgaaggcctatgagaagctggatgaggagcaccggcggctgcgggaggccagcggggagggctggaagggccaggaccccttccgggacctgcacagcctgctgatggagatccaggccctgcggctgcagctggagaggagcattgagaccagcagcaccctgcagagccggctgaaggagcagctggcccggggagctgagaaggcccaggagggcgccctgaccctggccgtgcaggccgtgtccatccctgaggtgcccctgcagcctgacaagcatgatggagacaagtaccccatggagagtgacaacagctttgacctgtttgacagcagccaggccgtgacccccaagtctgtgtctgagaccccacccctgtctggaaatgacacagacagcctgagctgtgacagcggcagcagcgccaccagcaccccctgtgtgtcccggctggtgacaggccaccacctgtgggccagcaagaatggccgccacgtgctgggcctgattgaggactatgaggccctgctgaagcagatcagccagggccagaggctgctggccgagatggacatccagacccaggaggcccccagcagcaccagccaggagctgggcaccaagggcccccacccagcccccctgagcaagtttgtgtcctctgtgtccacagccaagctgaccctggaggaggcctacagaaggctgaagctgctgtggagggtgtccctgcctgaagatggccagtgccccctgcactgtgagcagatcggggagatgaaggccgaggtgaccaagctgcacaagaagctgtttgagcaggagaagaagctgcagaacaccatgaagctgctgcagctgagcaagaggcaggagaaggtgatctttgaccagctggtggtgacccacaagatcctgaggaaggcccggggcaacctggagctgcggcctgggggcgcccaccctggcacctgcagccccagcaggcctggcagctag

SEQ ID NO: 146942 - DNA, 1521 bp, synthetic construct
  misc_feature 1..1521: note = Description of Artificial Sequence: Synthetic coding sequence
  source 1..1521: mol_type = other DNA
atggaggaccaccagcacgtgcccatcgacatccagaccagcaagctgctggactggctggtggacagaagacactgcagcctgaagtggcagagcctggtgctgaccatccgggagaagatcaatgctgccatccaggacatgcctgagagcgaggagatcgcccagctgctgagcggcagctacatccactacttccactgcctgcgcatcctggacctgctgaagggcacagaggccagcaccaagaacatcttcggccgctacagcagccagaggatgaaggactggcaggagatcatcgccctgtatgagaaggacaacacctacctggtggagctgagcagcctgctggtgagaaatgtgaactatgagatccccagcctgaagaagcagatcgccaagtgccagcagctgcagcaggagtacagcaggaaggaggaggagtgccaggccggggctgctgagatgagggagcagttctaccacagctgcaagcagtatggcatcactggagaaaatgtgcggggggagctgctggccctggtgaaggacctgcccagccagctggccgagattggagctgctgcccagcagagcctgggggaggccattgatgtgtaccaggcctctgtgggctttgtgtgtgagagccccacagagcaggtgctgcccatgctgcgctttgtgcagaagaggggcaacagcacagtgtatgagtggaggactggaacagagcccagcgtggtggagcggccccacctggaggagctgcctgagcaggtggccgaggatgccatcgactggggagactttggagtggaggccgtgtctgagggcacagattctggcatctctgctgaggccgccggcatcgactggggcatcttccctgagagtgacagcaaggaccctggaggagatggcatcgactggggagatgatgctgtggccctgcagatcaccgtgctggaggccggcacccaggcccctgagggcgtggcccggggcccagatgccctgaccctgctggagtacacagagaccaggaaccagttcctggatgagctgatggagctggagatcttcctggcccagagagctgtggagctgtctgaggaggctgatgtgctgtctgtgtcccagttccagctggccccagccatcctgcagggccagaccaaggagaagatggtgaccatggtgtctgtgctggaggacctgattggcaagctgaccagcctgcagctgcagcacctgttcatgatcctggccagccccaggtatgtggacagagtgacagagttcctgcagcagaagctgaagcagagccagctgctggccctgaagaaggagctgatggtgcagaagcagcaggaggccctggaggagcaggccgccctggagcccaagctggacctgctgctggagaagaccaaggagctgcagaagctgattgaggccgacatcagcaagcgctacagcggccggcctgtgaacctgatgggcaccagcctgtag

SEQ ID NO: 146943 - DNA, 1596 bp, synthetic construct
  misc_feature 1..1596: note = Description of Artificial Sequence: Synthetic coding sequence
  source 1..1596: mol_type = other DNA
atgaggcggcagagcatgaccagcgccacccgggacctgcacacagccctggatggcaaggccacccagggcggcaagaaggaccaccagcacgtgcccatcgacatccagaccagcaagctgctggactggctggtggaccggcggcactgcagcctgaagtggcagagcctggtgctgaccatccgggagaagatcaatgctgccatccaggacatgcctgagagcgaggagatcgcccagctgctgagcggcagctacatccactacttccactgcctgcgcatcctggacctgctgaagggcacagaggccagcaccaagaacatcttcggccgctacagcagccagaggatgaaggactggcaggagatcatcgccctgtatgagaaggacaacacctacctggtggagctgagcagcctgctggtgagaaatgtgaactatgagatccccagcctgaagaagcagatcgccaagtgccagcagctgcagcaggagtacagcaggaaggaggaggagtgccaggccggggctgctgagatgagggagcagttctaccacagctgcaagcagtatggcatcaccggggagaatgtgcggggggagctgctggccctggtgaaggacctgcccagccagctggccgagatcggggctgctgcccagcagagcctgggggaggccattgatgtgtaccaggcctctgtgggctttgtgtgtgagagccccacagagcaggtgctgcccatgctgcgctttgtgcagaagaggggcaacagcacagtgtatgagtggaggactggaacagagcccagcgtggtggagcggccccacctggaggagctgcctgagcaggtggctgaagatgccatcgactggggagactttggagtggaggccgtgtctgagggcacagacagcggcatctctgctgaggccgccggcatcgactggggcatcttccctgagagtgacagcaaggaccctggaggagatggcatcgactggggagatgatgctgtggccctgcagatcaccgtgctggaggccggcacccaggcccctgagggcgtggcccggggcccagatgccctgaccctgctggagtacacagagaccaggaaccagttcctggatgagctgatggagctggagatcttcctggcccagagagctgtggagctgtctgaggaggctgatgtgctgtctgtgtcccagttccagctggccccagccatcctgcagggccagaccaaggagaagatggtgaccatggtgtctgtgctggaggacctgattggcaagctgaccagcctgcagctgcagcacctgttcatgatcctggccagcccccgctacgtggacagagtgacagagttcctgcagcagaagctgaagcagagccagctgctggccctgaagaaggagctgatggtgcagaagcagcaggaggccctggaggagcaggccgccctggagcccaagctggacctgctgctggagaagaccaaggagctgcagaagctgattgaagctgacatcagcaagcgctacagcggccggcctgtgaacctgatgggcaccagcctgtag

SEQ ID NO: 146944 - DNA, 3864 bp, synthetic construct
  misc_feature 1..3864: note = Description of Artificial Sequence: Synthetic coding sequence
  source 1..3864: mol_type = other DNA
atgcacccagacctgggccccctgtgcaccctgctgtatgtgaccctgaccatcctgtgcagctctgtgtccagtgacctggccccctacttcaccagcgagcccctgtctgctgtgcagaagctgggcggccctgtggtgctgcactgcagcgcccagcctgtgaccacccgcatctcctggctgcacaacgggaagaccctggatggcaacctggagcacgtgaagatccaccagggcaccctgaccatcctgagcctgaacagcagcctgctgggctactaccagtgcctggccaacaacagcattggagccatcgtgtctggccctgccaccgtgtctgtggccgtgctgggggactttggcagcagcaccaagcacgtgatcacagctgaggagaagtctgctggcttcatcggctgccgggtgcctgagagcaaccccaaggccgaggtgcgctacaagatccggggcaagtggctggagcacagcacagagaactacctgatcctgcccagcggcaacctgcagatcctgaatgtgtccctggaggacaagggcagctacaagtgtgccgcctacaaccctgtgacccaccagctgaaggtggagcccatcggcaggaagctgctggtgtcccggcccagcagtgatgatgtgcacatcctgcaccccacccacagccaggccctggccgtgctgagccgcagccctgtgaccctggagtgtgtggtgtctggagtgcctgccccccaggtgtactggctgaaggatggccaggacatcgcccctggcagcaactggaggcggctgtacagccacctggccacagattctgtggaccctgctgacagcggcaactacagctgcatggccggcaacaagtctggagatgtgaagtatgtgacctacatggtgaatgtgctggagcacgccagcatcagcaagggcctgcaggaccagatcgtgtccctgggcgccaccgtgcacttcacctgtgatgtgcacggcaacccagcccccaactgcacctggttccacaatgcccagcccatccaccccagcgcccggcacctgacagctggaaatggcctgaagatcagcggcgtgacagtggaggatgtgggcatgtaccagtgtgtggccgacaatggcatcggcttcatgcacagcacaggccgcctggagattgaaaatgatggcggcttcaagcctgtgatcatcacagcccctgtgtctgccaaggtggctgatggagactttgtgaccctgagctgcaatgccagcggcctgcctgtgcctgtgatccgctggtatgacagccacggcctcatcaccagccaccccagccaggtgctgcggagcaagagcaggaagagccagctgagcaggcctgagggcctgaacctggagcctgtgtactttgtgctgagccaggccggggccagcagcctgcacatccaggccgtgacccaggagcacgccggcaagtacatctgtgaggccgccaatgagcacggcaccacccaggccgaggccagcctgatggtggtgccctttgagaccaacaccaaggccgagaccgtgaccctgcctgatgctgcccagaatgatgacaggagcaagagagatggcagcgagaccggcctgctgagcagcttccctgtgaaggtgcaccccagcgctgtggagagcgcccctgagaagaatgccagcggcatctctgtgcctgatgcccccatcatcctgagccccccccagacccacaccccagacacctacaacctggtgtggagggctgggaaggatggcggcctgcccatcaatgcctactttgtgaagtacaggaagctggatgatggagtgggcatgctgggctcctggcacacagtgcgggtgcccggctctgaaaatgagctgcacctggccgagctggagcccagcagcctgtatgaggtgctgatggtggcccggtctgctgctggggagggccagcctgccatgctgaccttccgcaccagcaaggagaagacagccagcagcaagaacacccaggccagcagcccccctgtgggcatccccaagtaccctgtggtgtctgaggccgccaacaacaactttggagtggtgctgacagacagcagccgccacagcggcgtgcctgaggccccagaccggcccaccatcagcacagccagcgagacctctgtgtatgtgacctggatcccccgggccaacggcggcagccccatcacagccttcaaggtggagtacaagaggatgaggaccagcaactggctggtggccgctgaggacatcccccccagcaagctgtctgtggaggtgcgcagcctggagcccggcagcacctacaagttccgggtcatcgccatcaaccactatggagagagcttccgcagcagcgccagccggccctaccaggtggtgggcttccccaaccgcttcagcagccggcccatcaccggcccccacatcgcctacacagaagctgtgtctgacacccagatcatgctgaagtggacctacatccccagcagcaacaacaacacccccatccagggcttctacatctactaccggcccacagacagcgacaatgacagcgactacaagagagatgtggtggagggcagcaagcagtggcacatgattggccacctgcagcctgagaccagctatgacatcaagatgcagtgcttcaatgaaggaggagagagcgagttcagcaatgtgatgatctgtgagaccaaggtgaagagggtgcctggggccagcgagtaccctgtgaaggacctgagcaccccacccaacagcctgggcagcggcggcaatgtgggccctgccaccagccctgcccggagcagtgacatgctgtacctgattgtgggctgtgtgctgggcgtgatggtgctgatcctgatggtgttcatcgccatgtgcctgtggaagaaccggcagcagaacaccatccagaagtatgaccccccaggctacctgtaccagggcagtgacatgaatggccagatggtggactacaccaccctgagcggggccagccagatcaatggaaatgtgcatggaggcttcctgaccaatggaggcctgagcagcggctacagccacctgcaccacaaggtgcccaatgctgtgaatggcatcgtgaatggcagcctgaatggaggcctgtacagcggccacagcaacagcctgaccaggacccacgtggactttgagcacccccaccacctggtgaatggaggcggcatgtacacagctgtgccccagattgaccccctggagtgtgtgaactgcaggaactgcaggaacaacaaccgctgcttcaccaagaccaacagcaccttcagcagcagccccccacctgtggtgcctgtggtggccccctacccccaggacggcctggagatgaagcccctgagccacgtgaaggtgcctgtgtgcctgaccagcgctgtgcctgactgtggccagctgcctgaggagagcgtgaaggacaacgtggagcctgtgcccacccagaggacctgctgccaggacatcgtgaatgatgtgtccagtgatggctctgaagatcctgctgagttcagccggggccaggagggcatgatcaacctgcgcatcccagaccacctgcagctggccaagagctgtgtgtgggagggggacagctgtgcccacagcgagacagagatcaacatcgtgtcctggaatgccctgatcctgccccctgtgcctgagggctgtgccgagaagaccatgtggagccccccaggcatccccctggacagccccacagaggtgctgcagcagccccgggagacctag

SEQ ID NO: 146945 - DNA, 3795 bp, synthetic construct
  misc_feature 1..3795: note = Description of Artificial Sequence: Synthetic coding sequence
  source 1..3795: mol_type = other DNA
atgcacccagacctgggccccctgtgcaccctgctgtatgtgaccctgaccatcctgtgcagctctgtgtccagtgacctggccccctacttcaccagcgagcccctgtctgctgtgcagaagctgggcggccctgtggtgctgcactgcagcgcccagcctgtgaccacccgcatctcctggctgcacaacgggaagaccctggatggcaacctggagcacgtgaagatccaccagggcaccctgaccatcctgagcctgaacagcagcctgctgggctactaccagtgcctggccaacaacagcattggagccatcgtgtctggccctgccaccgtgtctgtggccgtgctgggggactttggcagcagcaccaagcacgtgatcacagctgaggagaagtctgctggcttcatcggctgccgggtgcctgagagcaaccccaaggccgaggtgcgctacaagatccggggcaagtggctggagcacagcacagagaactacctgatcctgcccagcggcaacctgcagatcctgaatgtgtccctggaggacaagggcagctacaagtgtgccgcctacaaccctgtgacccaccagctgaaggtggagcccatcggcaggaagctgctggtgtcccggcccagcagtgatgatgtgcacatcctgcaccccacccacagccaggccctggccgtgctgagccgcagccctgtgaccctggagtgtgtggtgtctggagtgcctgccccccaggtgtactggctgaaggatggccaggacatcgcccctggcagcaactggaggcggctgtacagccacctggccacagattctgtggaccctgctgacagcggcaactacagctgcatggccggcaacaagtctggagatgtgaagtatgtgacctacatggtgaatgtgctggagcacgccagcatcagcaagggcctgcaggaccagatcgtgtccctgggcgccaccgtgcacttcacctgtgatgtgcacggcaacccagcccccaactgcacctggttccacaatgcccagcccatccaccccagcgcccggcacctgacagctggaaatggcctgaagatcagcggcgtgacagtggaggatgtgggcatgtaccagtgtgtggccgacaatggcatcggcttcatgcacagcacaggccgcctggagattgaaaatgatggcggcttcaagcctgtgatcatcacagcccctgtgtctgccaaggtggctgatggagactttgtgaccctgagctgcaatgccagcggcctgcctgtgcctgtgatccgctggtatgacagccacggcctcatcaccagccaccccagccaggtgctgcggagcaagagcaggaagagccagctgagcaggcctgagggcctgaacctggagcctgtgtactttgtgctgagccaggccggggccagcagcctgcacatccaggccgtgacccaggagcacgccggcaagtacatctgtgaggccgccaatgagcacggcaccacccaggccgaggccagcctgatggtggtgccctttgagaccaacaccaaggccgagaccgtgaccctgcctgatgctgcccagaatgatgacaggagcaagagagatggcagcgagaccggcctgctgagcagcttccctgtgaaggtgcaccccagcgctgtggagagcgcccctgagaagaatgccagcggcatctctgtgcctgatgcccccatcatcctgagccccccccagacccacaccccagacacctacaacctggtgtggagggctgggaaggatggcggcctgcccatcaatgcctactttgtgaagtacaggaagctggatgatggagtgggcatgctgggctcctggcacacagtgcgggtgcccggctctgaaaatgagctgcacctggccgagctggagcccagcagcctgtatgaggtgctgatggtggcccggtctgctgctggggagggccagcctgccatgctgaccttccgcaccagcaaggagaagacagccagcagcaagaacacccaggccagcagcccccctgtgggcatccccaagtaccctgtggtgtctgaggccgccaacaacaactttggagtggtgctgacagacagcagccgccacagcggcgtgcctgaggccccagaccggcccaccatcagcacagccagcgagacctctgtgtatgtgacctggatcccccgggccaacggcggcagccccatcacagccttcaaggtggagtacaagaggatgaggaccagcaactggctggtggccgctgaggacatcccccccagcaagctgtctgtggaggtgcgcagcctggagcccggcagcacctacaagttccgggtcatcgccatcaaccactatggagagagcttccgcagcagcgccagccggccctaccaggtggtgggcttccccaaccgcttcagcagccggcccatcaccggcccccacatcgcctacacagaagctgtgtctgacacccagatcatgctgaagtggacctacatccccagcagcaacaacaacacccccatccagggcttctacatctactaccggcccacagacagcgacaatgacagcgactacaagagagatgtggtggagggcagcaagcagtggcacatgattggccacctgcagcctgagaccagctatgacatcaagatgcagtgcttcaatgaaggaggagagagcgagttcagcaatgtgatgatctgtgagaccaaggtgaagagggtgcctggggccagcgagtaccctgtgaaggacctgagcaccccacccaacagcctgggcagcggcggcaatgtgggccctgccaccagccctgcccggagcagtgacatgctgtacctgattgtgggctgtgtgctgggcgtgatggtgctgatcctgatggtgttcatcgccatgtgcctgtggaagaaccggcagcagaacaccatccagaagtatgaccccccaggctacctgtaccagggcagtgacatgaatggccagatggtggactacaccaccctgagcggggccagccagatcaatggaaatgtgcatggaggcttcctgaccaatggaggcctgagcagcggctacagccacctgcaccacaaggtgcccaatgctgtgaatggcatcgtgaatggcagcctgaatggaggcctgtacagcggccacagcaacagcctgaccaggacccacgtggactttgagcacccccaccacctggtgaatggaggcggcatgtacacagctgtgccccagattgaccccctggagtgtgtgaactgcaggaactgcaggaacaacaaccgctgcttcaccaagaccaacagcaccttcagcagcagccccccacctgtggtgcctgtggtggccccctacccccaggacggcctggagatgaagcccctgagccacgtgaaggtgcctgtgtgcctgaccagcgctgtgcctgactgtggccagctgcctgaggagagcgtgaaggacaacgtggagcctgtgcccacccagaggacctgctgccaggacatcgtgaatgatgtgtccagtgatggctctgaagatcctgctgagttcagcagaggagacagctgtgcccacagcgagacagagatcaacatcgtgtcctggaatgccctgatcctgccccctgtgcctgagggctgtgccgagaagaccatgtggagccccccaggcatccccctggacagccccacagaggtgctgcagcagccccgggagacctag

SEQ ID NO: 146946 - DNA, 1386 bp, synthetic construct
  misc_feature 1..1386: note = Description of Artificial Sequence: Synthetic coding sequence
  source 1..1386: mol_type = other DNA
atgctggagctgcggcaccggggcagctgccccggcccccgggaggccgtgtccccaccccaccgggagggggaggccgccggcggggaccatgaaacagagagcaccagtgacaaggagacagacattgatgacagatatggagacctggacagcaggacagacagcgacatccctgagatcccccccagcagtgacaggaccccagagatcctgaagaaggccctgagcggcctgagcagccgctggaagaactggtggatccggggcatcctgaccctgaccatgatcagcctcttcttcctgatcatctacatgggcagcttcatgctgatgctgctggtgctgggcatccaggtgaagtgcttccacgagatcatcaccatcggctacagagtgtaccacagctatgacctgccctggttccgcaccctgtcctggtacttcctgctgtgtgtgaactacttcttctacggggagaccgtggccgactactttgccacctttgtgcagcgggaggagcagctgcagttcctgatccgctaccaccgcttcatcagctttgccctgtacctggccggcttctgcatgtttgtgctgagcctggtgaagaagcactaccgcctgcagttctacatgtttgcctggacccacgtgaccctgctgatcaccgtgacccagagccacctggtgatccagaacctgtttgagggcatgatctggttcctggtgcccatcagcagcgtcatctgcaatgacatcacagcctacctgtttggcttcttctttggaagaacacccctcatcaagctgagccccaagaagacctgggagggcttcatcggcggcttcttcagcacagtggtgtttggcttcatcgccgcctacgtgctgagcaagtaccagtactttgtgtgccctgtggagtacagaagtgatgtgaacagctttgtgacagaatgtgagcccagcgagctgttccagctgcagacctacagcctgccccccttcctgaaggctgtgctgcggcaggagcgggtgtccctgtaccccttccagatccacagcatcgccctgagcacctttgccagcctcatcggcccctttggaggcttctttgccagcggcttcaagagggccttcaagatcaaggactttgccaacaccatccctggccatggaggcatcatggacagatttgactgccagtacctgatggccacctttgtgcacgtgtacatcaccagcttcatccggggccccaaccccagcaaggtgctgcagcagctgctggtgctgcagcctgagcagcagctgaacatctacaagaccctgaagacccacctgattgagaagggcatcctgcagcccaccctgaaggtgtag

SEQ ID NO: 146947 - DNA, 978 bp, synthetic construct
  misc_feature 1..978: note = Description of Artificial Sequence: Synthetic coding sequence
  source 1..978: mol_type = other DNA
atgagccggctgcggcaccccaggacccgctacttcctgctgtgtgtgaactacttcttctatggagagaccgtgacagactacttcttcaccctggtgcagcgggaggagcccctgcgcatcctgagcaagtaccaccgcttcatctccttcaccctgtacctgattggcttctgcatgtttgtgctgagcctggtgaagaagcactaccgcctgcagttctacatgtttggctggacccacgtgaccctgctgattgtggtgacccagagccacctggtgatccacaacctgtttgagggcatgatctggttcatcgtgcccatcagctgtgtgatctgcaatgacatcatggcctacatgtttggcttcttcttcggccgcacccccctcatcaagctgagccccaagaagacctgggagggcttcatcggcggcttctttgccaccgtggtgtttggcctgctgctgtcctatgtgatgagcggctaccgctgctttgtgtgccctgtggagtacaacaatgacaccaacagcttcaccgtggactgtgagcccagcgacctcttccggctgcaggagtacaacatccctggggtcatccagagcgtgattggctggaagacagtgaggatgtaccccttccagatccacagcatcgccctgagcacctttgccagcctgattggcccctttggaggcttctttgccagcggcttcaagagggccttcaagatcaaggactttgccaacaccatccctggccacggcggcatcatggacagatttgactgccagtacctgatggccacctttgtgaatgtgtacatcgccagcttcatccggggccccaaccccagcaagctgatccagcagttcctgaccctgcggccagaccagcagctgcacatcttcaacaccctgcggagccacctgattgacaagggcatgctgaccagcaccacagaagatgaatag

SEQ ID NO: 146948 - DNA, 753 bp, synthetic construct
  misc_feature 1..753: note = Description of Artificial Sequence: Synthetic coding sequence
  source 1..753: mol_type = other DNA
atgagccggctgcggcaccccaggacccgctggaagaactggtgggtgcggggcatcctgaccctggccatgattgccttcttcttcatcatcatctacctgggccccatggtgctgatgatcatcgtgatgtgtgtgcagatcaagtgcttccacgagatcatcaccatcggctacaacgtgtaccacagctatgacctgccctggttccgcaccctgtcctggtacttcctgctgtgtgtgaactacttcttctacggggagaccgtgacagactacttcttcaccctggtgcagcgggaggagcccctgcgcatcctgagcaagtaccaccgcttcatctccttcaccctgtacctgattggcttctgcatgtttgtgctgagcctggtgaagaagcactaccgcctgcagttctacatgtttggctggacccacgtgaccctgctgattgtggtgacccagagccacctggtgatccacaacctgtttgagggcatgatctggttcatcgtgcccatcagctgtgtgatctgcaatgacatcatggcctacatgtttggcttcttctttggaagaacacccctcatcaagctgagccccaagaagacctgggagggcttcatcggcggcttctttgccaccgtggtgtttggcctgctgctgtcctatgtgatgagcggctaccgctgctttgtgtgccctgtggagtacaacaatgacaccaacagcttcaccgtggactgtgagtag

SEQ ID NO: 146949 - DNA, 1338 bp, synthetic construct
  misc_feature 1..1338: note = Description of Artificial Sequence: Synthetic coding sequence
  source 1..1338: mol_type = other DNA
atgacagagctgcggcagagggtggcccacgagcctgtggcccccccagaggacaaggagagcgagagcgaggccaaggtggatggagaaacagccagtgacagcgagagcagagctgagagcgcccccctgcctgtgtctgcagatgacaccccagaggtgctgaacagagccctgagcaacctgagcagccgctggaagaactggtgggtgcggggcatcctgaccctggccatgattgccttcttcttcatcatcatctacctgggccccatggtgctgatgatcatcgtgatgtgtgtgcagatcaagtgcttccacgagatcatcaccatcggctacaacgtgtaccacagctatgacctgccctggttccgcaccctgtcctggtacttcctgctgtgtgtgaactacttcttctatggagagaccgtgacagactacttcttcaccctggtgcagcgggaggagcccctgcgcatcctgagcaagtaccaccgcttcatctccttcaccctgtacctgattggcttctgcatgtttgtgctgagcctggtgaagaagcactaccgcctgcagttctacatgtttggctggacccacgtgaccctgctgattgtggtgacccagagccacctggtgatccacaacctgtttgagggcatgatctggttcatcgtgcccatcagctgtgtgatctgcaatgacatcatggcctacatgtttggcttcttcttcggccgcacccccctcatcaagctgagccccaagaagacctgggagggcttcatcggcggcttctttgccaccgtggtgtttggcctgctgctgtcctatgtgatgagcggctaccgctgctttgtgtgccctgtggagtacaacaatgacaccaacagcttcaccgtggactgtgagcccagcgacctcttccggctgcaggagtacaacatccctggggtcatccagagcgtgattggctggaagacagtgaggatgtaccccttccagatccacagcatcgccctgagcacctttgccagcctgattggcccctttggaggcttctttgccagcggcttcaagagggccttcaagatcaaggactttgccaacaccatccctggccacggcggcatcatggacagatttgactgccagtacctgatggccacctttgtgaatgtgtacatcgccagcttcatccggggccccaaccccagcaagctgatccagcagttcctgaccctgcggccagaccagcagctgcacatcttcaacaccctgcggagccacctgattgacaagggcatgctgaccagcaccacagaagatgaatag

SEQ ID NO: 146950 - DNA, 648 bp, synthetic construct
  misc_feature 1..648: note = Description of Artificial Sequence: Synthetic coding sequence
  source 1..648: mol_type = other DNA
atgtttgtgctgagcctggtgaagaagcactaccgcctgcagttctacatgtttggctggacccacgtgaccctgctgattgtggtgacccagagccacctggtgatccacaacctgtttgagggcatgatctggttcatcgtgcccatcagctgtgtgatctgcaatgacatcatggcctacatgtttggcttcttctttggaagaacacccctcatcaagctgagccccaagaagacctgggagggcttcatcggcggcttctttgccaccgtggtgtttggcctgctgaagacagtgaggatgtaccccttccagatccacagcatcgccctgagcacctttgccagcctgattggcccctttggaggcttctttgccagcggcttcaagagggccttcaagatcaaggactttgccaacaccatccctggccacggcggcatcatggacagatttgactgccagtacctgatggccacctttgtgaatgtgtacatcgccagcttcatccggggccccaaccccagcaagctgatccagcagttcctgaccctgcggccagaccagcagctgcacatcttcaacaccctgcggagccacctgattgacaagggcatgctgaccagcaccacagaagatgaatag

SEQ ID NO: 146951 - DNA, 3675 bp, synthetic construct
  misc_feature 1..3675: note = Description of Artificial Sequence: Synthetic coding sequence
  source 1..3675: mol_type = other DNA
atggagcccctgctgctgggccggggcctgattgtgtacctgatgttcctgctgctgaagttcagcaaggccatcgagatccccagctctgtgcagcaggtgcccaccatcatcaagcagagcaaggtgcaggtggccttcccctttgatgagtacttccagattgaatgtgaggccaagggcaaccctgagcccaccttctcctggaccaaggatggcaaccccttctacttcacagaccaccgcatcatccccagcaacaacagcggcaccttccgcatccccaatgaaggccacatcagccacttccagggcaagtaccgctgctttgccagcaacaagctgggcatcgccatgtctgaggagattgagttcatcgtgcccagcgtgcccaagttccccaaggagaagattgaccccctggaggtggaggagggggaccccatcgtgctgccctgcaacccccccaagggcctgccccccctgcacatctactggatgaacatcgagctggagcacatcgagcaggatgagcgggtgtacatgagccagaagggggacctgtactttgccaacgtggaggagaaggacagcagaaatgactactgctgctttgctgccttcccccggctgcggaccatcgtgcagaagatgcccatgaagctgactgtgaacagcctgaagcacgccaatgacagcagcagcagcacagaaattggcagcaaggccaacagcatcaagcagaggaagcccaagctgctgctgcccccaacagagagcggcagcgagagcagcatcaccatcctgaagggggagatcctgctgctggagtgctttgctgagggcctgcccaccccccaggtggactggaacaagattggaggagacctgcccaagggccgggagaccaaggaaaattatggcaagaccctgaagattgaaaatgtgtcctaccaggacaagggcaactaccgctgcacagccagcaacttcctgggcacagccacccatgacttccacgtgattgtggaggagcccccacgctggaccaagaagccccagagcgctgtgtacagcacaggcagcaatggcatcctgctgtgtgaggccgagggggagccccagcccaccatcaagtggagggtgaatggcagccctgtggacaaccacccctttgctggagatgtggtgttcccccgggagatctccttcaccaacctgcagcccaaccacacagctgtgtaccagtgtgaggccagcaatgtgcacggcaccatcctggccaatgccaacattgatgtggtggatgtgcggcccctcatccagaccaaggatggagaaaattatgccaccgtggtgggctacagcgccttcctgcactgtgagttctttgccagccctgaggccgtggtgtcctggcagaaggtggaggaggtgaagcccctggagggccgccgctaccacatctatgaaaatggcaccctgcagatcaacagaaccacagaagaagatgctggcagctacagctgctgggtggagaatgccatcggcaagacagctgtgacagccaacctggacatcagaaatgccaccaagctgcgggtgagccccaagaacccccgcatccccaagctgcacatgctggagctgcactgtgagagcaaatgtgacagccacctgaagcacagcctgaagctgtcctggagcaaggatggagaggcctttgagatcaatggaacagaagatggccgcatcatcattgatggagccaacctgaccatcagcaatgtgaccctggaggaccagggcatctactgctgcagcgcccacacagccctggacagcgctgctgacatcacccaggtgacagtgctggatgtgcctgaccccccagagaacctgcacctgtctgagcggcagaacagatctgtgcggctgacctgggaggccggggctgaccacaacagcaacatcagcgagtacatcgtggagtttgagggcaacaaggaggagcccggccgctgggaggagctgaccagggtgcagggcaagaagaccaccgtcatcctgcccctggccccctttgtgcgctaccagttccgggtgattgctgtgaatgaggtgggccgcagccagcccagccagcccagcgaccaccacgagaccccacctgctgccccagacaggaacccccagaacatccgggtgcaggccagccagcccaaggagatgatcatcaagtgggagcccctgaagtccatggagcagaatggacctggcctggagtacagagtgacctggaagccccagggcgcccctgtggagtgggaggaggagaccgtgaccaaccacaccctgcgggtgatgaccccagctgtgtatgccccctatgatgtgaaggtgcaggccatcaaccagctgggcagcggccctgacccccagagcgtgaccctgtacagcggggaggactacccagacacagcccctgtgatccacggcgtggatgtgatcaacagcaccctggtgaaggtgacctggagcacagtgcccaaggacagagtgcacggccgcctgaagggctaccagatcaactggtggaagaccaagagcctgctggatggccgcacccaccccaaggaggtgaacatcctgcgcttcagcggccagaggaacagcggcatggtgcccagcctggatgccttcagcgagttccacctgactgtgctggcctacaacagcaagggggccggccctgagagcgagccctacatcttccagaccccagagggcgtgcctgagcagcccaccttcctgaaggtgatcaaggtggacaaggacacagccaccctgtcctggggcctgcccaagaagctgaatggaaacctgaccggctacctgctgcagtaccagatcatcaatgacacctatgagatcggggagctgaatgacatcaacatcaccacccccagcaagcccagctggcacctgagcaacctgaatgccaccaccaagtacaagttctacctgcgggcctgcaccagccagggctgcggcaagcccatcacagaggagagcagcaccctgggggagggcagcaaaggaattggcaagatctctggagtgaacctgacccagaagacccaccccatcgaggtgtttgagcctggagctgagcacatcgtgcggctgatgaccaagaactggggagacaatgacagcatcttccaggatgtgattgagacccggggccgggagtatgccggcctgtatgatgacatcagcacccagggctggttcatcggcctgatgtgtgccatcgccctgctgaccctgctgctgctgactgtgtgctttgtgaagaggaacagaggaggcaagtacagcgtgaaggagaaggaggacctgcacccagaccctgagatccagagcgtgaaggatgagacctttggagagtacagcgacagtgatgagaagcccctgaagggcagcctgcggagcctgaacagagacatgcagcccacagagagcgctgacagcctggtggagtatggagagggggaccacggcctcttctctgaagatggcagcttcatcggggcctatgccggcagcaaggagaagggctctgtggagagcaatggcagcagcacagccaccttccccctgcgggcctag

SEQ ID NO: 146952 - DNA, 3627 bp, synthetic construct
  misc_feature 1..3627: note = Description of Artificial Sequence: Synthetic coding sequence
  source 1..3627: mol_type = other DNA
atggagcccctgctgctgggccggggcctgattgtgtacctgatgttcctgctgctgaagttcagcaaggccatcgagatccccagctctgtgcagcaggtgcccaccatcatcaagcagagcaaggtgcaggtggccttcccctttgatgagtacttccagattgaatgtgaggccaagggcaaccctgagcccaccttctcctggaccaaggatggcaaccccttctacttcacagaccaccgcatcatccccagcaacaacagcggcaccttccgcatccccaatgaaggccacatcagccacttccagggcaagtaccgctgctttgccagcaacaagctgggcatcgccatgtctgaggagattgagttcatcgtgcccagcgtgcccaagttccccaaggagaagattgaccccctggaggtggaggagggggaccccatcgtgctgccctgcaacccccccaagggcctgccccccctgcacatctactggatgaacatcgagctggagcacatcgagcaggatgagcgggtgtacatgagccagaagggggacctgtactttgccaacgtggaggagaaggacagcagaaatgactactgctgctttgctgccttcccccggctgcggaccatcgtgcagaagatgcccatgaagctgactgtgaacagcagcaacagcatcaagcagaggaagcccaagctgctgctgcccccaacagagagcggcagcgagagcagcatcaccatcctgaagggggagatcctgctgctggagtgctttgctgagggcctgcccaccccccaggtggactggaacaagattggaggagacctgcccaagggccgggagaccaaggaaaattatggcaagaccctgaagattgaaaatgtgtcctaccaggacaagggcaactaccgctgcacagccagcaacttcctgggcacagccacccatgacttccacgtgattgtggaggagcccccacgctggaccaagaagccccagagcgctgtgtacagcacaggcagcaatggcatcctgctgtgtgaggccgagggggagccccagcccaccatcaagtggagggtgaatggcagccctgtggacaaccacccctttgctggagatgtggtgttcccccgggagatctccttcaccaacctgcagcccaaccacacagctgtgtaccagtgtgaggccagcaatgtgcacggcaccatcctggccaatgccaacattgatgtggtggatgtgcggcccctcatccagaccaaggatggagaaaattatgccaccgtggtgggctacagcgccttcctgcactgtgagttctttgccagccctgaggccgtggtgtcctggcagaaggtggaggaggtgaagcccctggagggccgccgctaccacatctatgaaaatggcaccctgcagatcaacagaaccacagaagaagatgctggcagctacagctgctgggtggagaatgccatcggcaagacagctgtgacagccaacctggacatcagaaatgccaccaagctgcgggtgagccccaagaacccccgcatccccaagctgcacatgctggagctgcactgtgagagcaaatgtgacagccacctgaagcacagcctgaagctgtcctggagcaaggatggagaggcctttgagatcaatggaacagaagatggccgcatcatcattgatggagccaacctgaccatcagcaatgtgaccctggaggaccagggcatctactgctgcagcgcccacacagccctggacagcgctgctgacatcacccaggtgacagtgctggatgtgcctgaccccccagagaacctgcacctgtctgagcggcagaacagatctgtgcggctgacctgggaggccggggctgaccacaacagcaacatcagcgagtacatcgtggagtttgagggcaacaaggaggagcccggccgctgggaggagctgaccagggtgcagggcaagaagaccaccgtcatcctgcccctggccccctttgtgcgctaccagttccgggtgattgctgtgaatgaggtgggccgcagccagcccagccagcccagcgaccaccacgagaccccacctgctgccccagacaggaacccccagaacatccgggtgcaggccagccagcccaaggagatgatcatcaagtgggagcccctgaagtccatggagcagaatggacctggcctggagtacagagtgacctggaagccccagggcgcccctgtggagtgggaggaggagaccgtgaccaaccacaccctgcgggtgatgaccccagctgtgtatgccccctatgatgtgaaggtgcaggccatcaaccagctgggcagcggccctgacccccagagcgtgaccctgtacagcggggaggactacccagacacagcccctgtgatccacggcgtggatgtgatcaacagcaccctggtgaaggtgacctggagcacagtgcccaaggacagagtgcacggccgcctgaagggctaccagatcaactggtggaagaccaagagcctgctggatggccgcacccaccccaaggaggtgaacatcctgcgcttcagcggccagaggaacagcggcatggtgcccagcctggatgccttcagcgagttccacctgactgtgctggcctacaacagcaagggggccggccctgagagcgagccctacatcttccagaccccagagggcgtgcctgagcagcccaccttcctgaaggtgatcaaggtggacaaggacacagccaccctgtcctggggcctgcccaagaagctgaatggaaacctgaccggctacctgctgcagtaccagatcatcaatgacacctatgagatcggggagctgaatgacatcaacatcaccacccccagcaagcccagctggcacctgagcaacctgaatgccaccaccaagtacaagttctacctgcgggcctgcaccagccagggctgcggcaagcccatcacagaggagagcagcaccctgggggagggcagcaaaggaattggcaagatctctggagtgaacctgacccagaagacccaccccatcgaggtgtttgagcctggagctgagcacatcgtgcggctgatgaccaagaactggggagacaatgacagcatcttccaggatgtgattgagacccggggccgggagtatgccggcctgtatgatgacatcagcacccagggctggttcatcggcctgatgtgtgccatcgccctgctgaccctgctgctgctgactgtgtgctttgtgaagaggaacagaggaggcaagtacagcgtgaaggagaaggaggacctgcacccagaccctgagatccagagcgtgaaggatgagacctttggagagtacagcgacagtgatgagaagcccctgaagggcagcctgcggagcctgaacagagacatgcagcccacagagagcgctgacagcctggtggagtatggagagggggaccacggcctcttctctgaagatggcagcttcatcggggcctatgccggcagcaaggagaagggctctgtggagagcaatggcagcagcacagccaccttccccctgcgggcctag

SEQ ID NO: 146953 - DNA, 291 bp, synthetic construct
  misc_feature 1..291: note = Description of Artificial Sequence: Synthetic coding sequence
  source 1..291: mol_type = other DNA
atggagcccctgctgctgggccggggcctgattgtgtacctgatgttcctgctgctgaagttcagcaaggccatcgagatccccagctctgtgcagcaggtgcccaccatcatcaagcagagcaaggtgcaggtggccttcccctttgatgagtacttccagattgaatgtgaggccaagggcaaccctgagcccaccttctcctggaccaaggatggcaaccccttctacttcacagaccaccgcatcatccccagcaacaacagcggcaccttccgcatccccaactag

SEQ ID NO: 146954 - DNA, 201 bp, synthetic construct
  misc_feature 1..201: note = Description of Artificial Sequence: Synthetic coding sequence
  source 1..201: mol_type = other DNA
atggagcccctgctgctgggccggggcctgattgtgtacctgatgttcctgctgctgaagttcagcaaggccatcgagatccccagctctgtgcagcaggtgcccaccatcatcaagcagagcaaggtgcaggtggccttcccctttgatgagtacttccagattgaatgtgaggccaagggcaaccctgagcccacctag

SEQ ID NO: 146955 - DNA, 546 bp, synthetic construct
  misc_feature 1..546: note = Description of Artificial Sequence: Synthetic coding sequence
  source 1..546: mol_type = other DNA
atggagcccctgctgctgggccggggcctgattgtgtacctgatgttcctgctgctgaagttcagcaaggccatcgagatccccagctctgtgcagcaggtgcccaccatcatcaagcagagcaaggtgcaggtggccttcccctttgatgagtacttccagattgaatgtgaggccaagggcaaccctgagcccaccttctcctggaccaaggatggcaaccccttctacttcacagaccaccgcatcatccccagcaacaacagcggcaccttccgcatccccaatgaaggccacatcagccacttccagggcaagtaccgctgctttgccagcaacaagctgggcatcgccatgtctgaggagattgagttcatcgtgcccagcgtgcccaagttccccaaggagaagattgaccccctggaggtggaggagggggaccccatcgtgctgccctgcaacccccccaagggcctgccccccctgcacatctactggatgaacatcgagctggagcacatcgagcaggatgagcgggtgtactag

SEQ ID NO: 146956 - DNA, 954 bp, synthetic construct
  misc_feature 1..954: note = Description of Artificial Sequence: Synthetic coding sequence
  source 1..954: mol_type = other DNA
tgaagcgtgaccctgtacagcggggaggactacccagacacagcccctgtgattcatggagtggatgtgatcaacagcaccctggtgaaggtgacctggagcacagtgcccaaggacagagtgcacggccgcctgaagggctaccagatcaactggtggaagaccaagagcctgctggatggccgcacccaccccaaggaggtgaacatcctgcgcttcagcggccagagaaattctggcatggtgcccagcctggatgccttcagcgagttccacctgactgtgctggcctacaacagcaaaggagctggccctgagagcgagccctacatcttccagaccccagagggcgtgcctgagcagcccaccttcctgaaggtgatcaaggtggacaaggacacagccaccctgtcctggggcctgcccaagaagctgaatggaaacctgaccggctacctgctgcagtaccagatcatcaatgacacctatgaaattggagagctgaatgacatcaacatcaccacccccagcaagcccagctggcacctgagcaacctgaatgccaccaccaagtacaagttctacctgcgggcctgcaccagccagggctgtgggaagcccatcacagaggagagcagcaccctgggggagggcaagtatgccggcctgtatgatgacatcagcacccagggctggttcatcggcctgatgtgtgccatcgccctgctgaccctgctgctgctgactgtgtgctttgtgaagaggaacagaggaggcaagtacagcgtgaaggagaaggaggacctgcacccagaccctgagatccagagcgtgaaggatgagacctttggagagtacagcgacagtgatgagaagcccctgaagggcagcctgcggagcctgaacagagacatgcagcccacagagagcgctgacagcctggtggagtactag

SEQ ID NO: 146957 - DNA, 258 bp, synthetic construct
  misc_feature 1..258: note = Description of Artificial Sequence: Synthetic coding sequence
  source 1..258: mol_type = other DNA
atggagcccctgctgctgggccggggcctgattgtgtacctgatgttcctgctgctgaagttcagcaaggccatcgagatccccagctctgtgcagcaggtgcccaccatcatcaagcagagcaaggtgcaggtggccttcccctttgatgagtacttccagattgaatgtgaggccaagggcaaccctgagcccaccttctcctggaccaaggatggcaaccccttctacttcacagaccaccgcatcatcccctag

SEQ ID NO: 146958 - DNA, 450 bp, synthetic construct
  misc_feature 1..450: note = Description of Artificial Sequence: Synthetic coding sequence
  source 1..450: mol_type = other DNA
atggagagccggggcaagagcgccagcagccccaagccagacaccaaggtgccccaggtgaccacagaggccaaggtgcccccagctgctgatggcaaggcccccctgaccaagcccagcaagaaggaggccccagctgagaagcagcagcccccagctgcccccaccacagccccagccaagaagaccagcgccaaggctgaccctgccctgctgaacaaccacagcaacctgaagccagcccccaccgtgcccagcagcccagatgccaccccagagcccaagggccctggagatggagcagaagaagatgaggccgccagcggcggccctgggggccggggcccctggagctgtgagaacttcaaccccctgctggtggccggcggcgtggccgtggccgccatcgccctgatcctgggcgtggccttcctggtgaggaagaagtag

SEQ ID NO: 146959 - DNA, 627 bp, synthetic construct
  misc_feature 1..627: note = Description of Artificial Sequence: Synthetic coding sequence
  source 1..627: mol_type = other DNA
atgagcagcgagcccccaccaccctacccaggcggccccacagcccccctgctggaggagaagagcggggccccacccaccccaggccgcagcagccctgctgtgatgcagcccccacctggcatgcccctgcccccagctgacatcggccccccaccctatgagcccccaggccaccccatgccccagcccggcttcatccccccccacatgtctgcagatggcacctacatgcctcctggcttctacccacctcctggcccccacccccccatgggctactacccacctggcccctacaccccaggcccctacccaggccctgggggccacacagccaccgtgctggtgcccagcggggccgccaccaccgtgacagtgctgcagggcgagatctttgaaggagcccctgtgcagacagtgtgcccccactgccagcaggccatcaccaccaagatctcctatgaaattggcctgatgaactttgtgctgggcttcttctgctgcttcatgggctgtgacctgggctgctgcctgatcccctgcctgatcaatgacttcaaggatgtgacccacacctgccccagctgcaaggcctacatctacacctacaagaggctgtgctag

SEQ ID NO: 146960 - DNA, 456 bp, synthetic construct
  misc_feature 1..456: note = Description of Artificial Sequence: Synthetic coding sequence
  source 1..456: mol_type = other DNA
atggccgccagcacctccatggtgcctgtggccgtgacagctgctgtggcccctgtgctgagcatcaacagcgacttcagtgacctgcgggagatcaagaagcagctgctgctgattgctggcctgacccgggagcggggcctgctgcacagcagcaagtggagcgctgagctggccttcagcctgcctgccctgcccctggccgagctgcagcccccaccacccatcacagaagaagatgcccaggacatggatgcctacaccctggccaaggcctactttgatgtgaaggagtatgaccgggccgcccacttcctgcacggctgcaacagcaagaaggcctacttcctgtacatgtacagccgctacctggtgcgggccatcctgaagtgccacagcgccttcagcgagaccagcatcttccgcaccaacgggaaggtgaagagcttcaagtag

SEQ ID NO: 146961 - DNA, 1794 bp, synthetic construct
  misc_feature 1..1794: note = Description of Artificial Sequence: Synthetic coding sequence
  source 1..1794: mol_type = other DNA
atggccgccagcacctccatggtgcctgtggccgtgacagctgctgtggcccctgtgctgagcatcaacagcgacttcagtgacctgcgggagatcaagaagcagctgctgctgattgctggcctgacccgggagcggggcctgctgcacagcagcaagtggagcgctgagctggccttcagcctgcctgccctgcccctggccgagctgcagcccccaccacccatcacagaagaagatgcccaggacatggatgcctacaccctggccaaggcctactttgatgtgaaggagtatgaccgggccgcccacttcctgcacggctgcaacagcaagaaggcctacttcctgtacatgtacagccgctacctgtctggagagaagaagaaggatgatgagaccgtggacagcctgggccccctggagaagggccaggtgaagaatgaggccctgcgggagctgcgggtggagctgagcaagaagcaccaggcccgggagctggatggcttcggcctgtacctgtatggagtggtgctgaggaagctggacctggtgaaggaggccattgatgtgtttgtggaggccacccacgtgctgcccctgcactggggcgcctggctggagctgtgcaacctgatcacagacaaggagatgctgaagttcctgagcctgcctgacacctggatgaaggagttcttcctggcccacatctacacagagctgcagctgattgaggaggccctgcagaagtaccagaacctgattgatgtgggcttcagcaagagcagctacatcgtgtcccagattgctgtggcctaccacaacatccgggacatcgacaaggccctgagcatcttcaatgagctgaggaagcaggacccctacagaattgagaacatggacaccttcagcaacctgctgtatgtgcgctccatgaagtctgagctgagctacctggcccacaacctgtgtgaaattgacaagtacagagtggagacctgctgcgtgattggcaactactacagcctgcggagccagcacgagaaggccgccctgtacttccagagggccctgaagctgaacccccgctacctgggcgcctggaccctgatgggccacgagtacatggagatgaagaacaccagcgctgccatccaggcctacagacatgccatcgaggtgaacaagagggactaccgggcctggtacggcctgggccagacctatgagatcctgaagatgcccttctactgcctgtactactacagaagagcccaccagctgcggcccaatgacagcaggatgctggtggccctgggagaatgttatgagaagctgaaccagctggtggaggccaagaagtgctactggagggcctatgctgtgggagatgtggagaagatggccctggtgaagctggccaagctgcacgagcagctgacagaaagtgagcaggccgcccagtgctacatcaagtacatccaggacatctacagctgtggggagatcgtggagcacctggaggagagcacagccttccgctacctggcccagtactacttcaagtgcaagctgtgggatgaggccagcacctgtgcccagaagtgctgtgccttcaatgacacccgggaggagggcaaggccctgctgcggcagatcctgcagctgaggaaccagggcgagacccccaccacagaggtgcctgcccccttcttcctgcctgccagcctgagcgccaacaacacccccaccaggagagtgagccccctgaacctgagctctgtgaccccctag

SEQ ID NO: 146962 - DNA, 1575 bp, synthetic construct
  misc_feature 1..1575: note = Description of Artificial Sequence: Synthetic coding sequence
  source 1..1575: mol_type = other DNA
atggagctgggccctgagcccccccacagaagaaggctgctgtttgcctgcagccccccaccagccagccagcctgtggtgaaggccctgtttggagccagcgctgctgggggcctgagccctgtgaccaacctgactgtgaccatggaccagctgcagggcctgggcagtgactatgagcagcccctggaggtgaagaacaacagcaacctgcagaggatgggcagcagcgagagcacagacagcggcttctgcctggacagccctggccccctggacagcaaggagaacctggagaaccccatgaggcgcatccacagcctgccccagaagctgctgggctgcagccctgccctgaagaggagccacagcgacagcctggaccatgacatcttccagctgattgatcctgatgagaacaaggaaaatgaggcctttgagttcaagaagcctgtgcggcctgtgtcccggggctgcctgcacagccacggcctgcaggagggcaaggacctcttcacccagaggcagaacagcgccccagccaggatgctgagcagcaatgaaagagacagcagcgagcccggcaacttcatccccctcttcaccccccagagccctgtgacagccaccctgagtgatgaagatgatggctttgtggacctgctggatggagagaacctgaagaatgaggaggagacccccagctgcatggccagcctgtggacagcccccctggtgatgaggaccaccaacctggacaaccgctgcaagctgtttgacagccccagcctgtgcagcagcagcaccaggtctgtgctgaagaggcctgagaggagccaggaggagagccccccaggcagcaccaagaggaggaagtccatgtctggggccagccccaaggagagcaccaaccctgagaaggcccacgagaccctgcaccagagcctgagcctggccagcagccccaagggcaccatcgagaacatcctggacaatgacccccgggacctgattggagacttcagcaagggctacctgttccacacagtggccggcaagcaccaggacctgaagtacatcagccctgagatcatggcctctgtgctgaatggcaagtttgccaacctgatcaaggagtttgtgatcatcgactgccgctacccctatgaatatgaaggaggccacatcaagggagctgtgaacctgcacatggaggaggaggtggaggacttcctgctgaagaagcccatcgtgcccacagatggcaagagggtcatcgtggtgttccactgtgagttcagcagcgagcggggccccaggatgtgccgctacgtgcgggagcgggaccggctgggcaatgagtaccccaagctgcactacccagagctgtatgtgctgaagggcggctacaaggagttcttcatgaagtgccagagctactgtgagcccccatcctaccggcccatgcaccacgaggacttcaaggaggacctgaagaagttccgcaccaagagcaggacctgggccggggagaagagcaagcgggagatgtacagccggctgaagaagctgtag

SEQ ID NO: 146963 - DNA, 1455 bp, synthetic construct
  misc_feature 1..1455: note = Description of Artificial Sequence: Synthetic coding sequence
  source 1..1455: mol_type = other DNA
atggagctgggccctgagcccccccacagaagaaggctgctgtttgcctgcagccccccaccagccagccagcctgtggtgaaggccctgtttggagccagcgctgctgggggcctgagccctgtgaccaacctgactgtgaccatggaccagctgcagggcctgggcagtgactatgagcagcccctggaggtgaagaacaacagcaacctgcagaggatgggcagcagcgagagcacagacagcggcttctgcctggacagccctggccccctggacagcaaggagaacctggagaaccccatgaggcgcatccacagcctgccccagaagctgctgggctgcagccctgccctgaagaggagccacagcgacagcctggaccatgacatcttccagctgattgatcctgatgagaacaaggagaacctgagcagcaatgaaagagacagcagcgagcccggcaacttcatccccctcttcaccccccagagccctgtgacagccaccctgagtgatgaagatgatggctttgtggacctgctggatggagagaacctgaagaatgaggaggagacccccagctgcatggccagcctgtggacagcccccctggtgatgaggaccaccaacctggacaaccgctgcaagctgtttgacagccccagcctgtgcagcagcagcaccaggtctgtgctgaagaggcctgagaggagccaggaggagagccccccaggcagcaccaagaggaggaagtccatgtctggggccagccccaaggagagcaccaaccctgagaaggcccacgagaccctgcaccagagcctgagcctggccagcagccccaagggcaccatcgagaacatcctggacaatgacccccgggacctgattggagacttcagcaagggctacctgttccacacagtggccggcaagcaccaggacctgaagtacatcagccctgagatcatggcctctgtgctgaatggcaagtttgccaacctgatcaaggagtttgtgatcatcgactgccgctacccctatgaatatgaaggaggccacatcaagggagctgtgaacctgcacatggaggaggaggtggaggacttcctgctgaagaagcccatcgtgcccacagatggcaagagggtcatcgtggtgttccactgtgagttcagcagcgagcggggccccaggatgtgccgctacgtgcgggagcgggaccggctgggcaatgagtaccccaagctgcactacccagagctgtatgtgctgaagggcggctacaaggagttcttcatgaagtgccagagctactgtgagcccccatcctaccggcccatgcaccacgaggacttcaaggaggacctgaagaagttccgcaccaagagcaggacctgggccggggagaagagcaagcgggagatgtacagccggctgaagaagctgtag

SEQ ID NO: 146964 - DNA, 432 bp, synthetic construct
  misc_feature 1..432: note = Description of Artificial Sequence: Synthetic coding sequence
  source 1..432: mol_type = other DNA
atggagctgggccctgagcccccccacagaagaaggctgctgtttgcctgcagccccccaccagccagccagcctgtggtgaaggccctgtttggagccagcgctgctgggggcctgagccctgtgaccaacctgactgtgaccatggaccagctgcagggcctgggcagtgactatgagcagcccctggaggtgaagaacaacagcaacctgcagaggatgggcagcagcgagagcacagacagcggcttctgcctggacagccctggccccctggacagcaaggagaacctggagaaccccatgaggcgcatccacagcctgccccagaagctgctgggctgcagccctgccctgaagaggagccacagcgacagcctggaccatgacatcttccagctgattgatcctgatgagaacaaggagaactag

SEQ ID NO: 146965 - DNA, 1743 bp, synthetic construct
  misc_feature 1..1743: note = Description of Artificial Sequence: Synthetic coding sequence
  source 1..1743: mol_type = other DNA
atggaggtgccccagcctgagcccgcccctggcagcgccctgagccctgctggggtgtgtggcggggcccagaggcctggccacctgcccggcctgctgctgggcagccacggcctgctgggcagccctgtgcgggctgctgccagcagccctgtgaccaccctgacccagaccatgcatgacctggccggcctgggcagcgagacccccaagagccaggtgggcaccctgctcttccgcagccgcagccggctgacccacctgagcctgagccggcgggccagcgagagcagcctgagcagcgagagcagcgagagcagtgatgctggcctgtgcatggacagccccagccccatggacccccacatggccgagcagacctttgagcaggccatccaggccgccagccgcatcatcagaaatgagcagtttgccatccgccgcttccagagcatgcctgtgcggctgctgggccacagccctgtgctgaggaacatcaccaacagccaggccccagatggaagaaggaagtctgaggccggcagcggggccgccagcagcagcggggaggacaaggaaaatgatggctttgtgttcaagatgccctggaagcccacccaccccagcagcacccacgccctggccgagtgggccagccggcgggaggcctttgcccagaggcccagcagcgccccagacctgatgtgcctgagcccagacaggaagatggaggtggaggagctgagccccctggccctgggccgcttcagcctgaccccagctgagggggacacagaagaagatgatggctttgtggacatcctggagagtgacctgaaggatgatgatgctgtgcccccaggcatggagagcctcatcagcgcccccctggtgaagaccctggagaaggaggaggagaaggacctggtgatgtacagcaagtgccagaggctcttccgcagccccagcatgccctgcagcgtcatccggcccatcctgaagaggctggagcggccccaggaccgggacacccctgtgcagaacaagagaagaagatctgtgaccccacctgaggagcagcaggaggccgaggagcccaaggcccgggtgctgcggagcaagagcctgtgccatgatgaaattgagaacctgctggacagcgaccaccgggagctgattggagactacagcaaggccttcctgctgcagacagtggatggcaagcaccaggacctgaagtacatcagccctgagaccatggtggccctgctgaccgggaagttcagcaacatcgtggacaagtttgtgattgtggactgccgctacccctatgaatatgagggcggccacatcaagacagctgtgaacctgcccctggagagagatgctgagagcttcctgctgaagagccccatcgccccctgcagcctggacaagagggtcatcctgatcttccactgtgagttcagcagcgagcggggccccaggatgtgccgcttcatccgggagcgggacagagctgtgaatgactaccccagcctgtactacccagagatgtacatcctgaagggcggctacaaggagttcttcccccagcaccccaacttctgtgagccccaggactaccggcccatgaaccacgaggccttcaaggatgagctgaagaccttccggctgaagaccaggtcctgggccggggagaggagccggcgggagctgtgcagccggctgcaggaccagtag

SEQ ID NO: 146966 - DNA, 1620 bp, synthetic construct
  misc_feature 1..1620: note = Description of Artificial Sequence: Synthetic coding sequence
  source 1..1620: mol_type = other DNA
atggaggtgccccagcctgagcccgcccctggcagcgccctgagccctgctggggtgtgtggcggggcccagaggcctggccacctgcccggcctgctgctgggcagccacggcctgctgggcagccctgtgcgggctgctgccagcagccctgtgaccaccctgacccagaccatgcatgacctggccggcctgggcagcgagacccccaagagccaggtgggcaccctgctcttccgcagccgcagccggctgacccacctgagcctgagccggcgggccagcgagagcagcctgagcagcgagagcagcgagagcagtgatgctggcctgtgcatggacagccccagccccatggacccccacatggccgagcagacctttgagcaggccatccaggccgccagccgcatcatcagaaatgagcagtttgccatccgccgcttccagagcatgccagatggctttgtgttcaagatgccctggaagcccacccaccccagcagcacccacgccctggccgagtgggccagcagaagagaggcctttgcccagaggcccagcagcgccccagacctgatgtgcctgagcccagacaggaagatggaggtggaggagctgagccccctggccctgggccgcttcagcctgaccccagctgagggggacacagaggaggatgatggctttgtggacatcctggagagtgacctgaaggatgatgatgctgtgcccccaggcatggagagcctcatcagcgcccccctggtgaagaccctggagaaggaggaggagaaggacctggtgatgtacagcaagtgccagaggctcttccgcagccccagcatgccctgcagcgtcatccggcccatcctgaagaggctggagcggccccaggaccgggacacccctgtgcagaacaagagaagaagatctgtgaccccacctgaggagcagcaggaggccgaggagcccaaggcccgggtgctgcggagcaagagcctgtgccatgatgaaattgagaacctgctggacagcgaccaccgggagctgattggagactacagcaaggccttcctgctgcagacagtggatggcaagcaccaggacctgaagtacatcagccctgagaccatggtggccctgctgaccgggaagttcagcaacatcgtggacaagtttgtgattgtggactgccgctacccctatgaatatgaaggaggccacatcaagacagctgtgaacctgcccctggagagagatgctgagagcttcctgctgaagagccccatcgccccctgcagcctggacaagagggtcatcctgatcttccactgtgagttcagcagcgagcggggccccaggatgtgccgcttcatccgggagcgggacagagctgtgaatgactaccccagcctgtactacccagagatgtacatcctgaagggcggctacaaggagttcttcccccagcaccccaacttctgtgagccccaggactaccggcccatgaaccacgaggccttcaaggatgagctgaagaccttccggctgaagaccaggtcctgggccggggagaggagcagaagagagctgtgcagccggctgcaggaccagtag

SEQ ID NO: 146967 - DNA, 1551 bp, synthetic construct
  misc_feature 1..1551: note = Description of Artificial Sequence: Synthetic coding sequence
  source 1..1551: mol_type = other DNA
atgcacagcgagacccccaagagccaggtgggcaccctgctcttccgcagccgcagccggctgacccacctgagcctgagccggcgggccagcgagagcagcctgagcagcgagagcagcgagagcagtgatgctggcctgtgcatggacagccccagccccatggacccccacatggccgagcagacctttgagcaggccatccaggccgccagccgcatcatcagaaatgagcagtttgccatccgccgcttccagagcatgcctgtgcggctgctgggccacagccctgtgctgaggaacatcaccaacagccaggccccagatggaagaaggaagtctgaggccggcagcggggccgccagcagcagcggggaggacaaggaaaatgatggctttgtgttcaagatgccctggaagcccacccaccccagcagcacccacgccctggccgagtgggccagccggcgggaggcctttgcccagaggcccagcagcgccccagacctgatgtgcctgagcccagacaggaagatggaggtggaggagctgagccccctggccctgggccgcttcagcctgaccccagctgagggggacacagaagaagatgatggctttgtggacatcctggagagtgacctgaaggatgatgatgctgtgcccccaggcatggagagcctcatcagcgcccccctggtgaagaccctggagaaggaggaggagaaggacctggtgatgtacagcaagtgccagaggctcttccgcagccccagcatgccctgcagcgtcatccggcccatcctgaagaggctggagcggccccaggaccgggacacccctgtgcagaacaagagaagaagatctgtgaccccacctgaggagcagcaggaggccgaggagcccaaggcccgggtgctgcggagcaagagcctgtgccatgatgaaattgagaacctgctggacagcgaccaccgggagctgattggagactacagcaaggccttcctgctgcagacagtggatggcaagcaccaggacctgaagtacatcagccctgagaccatggtggccctgctgaccgggaagttcagcaacatcgtggacaagtttgtgattgtggactgccgctacccctatgaatatgagggcggccacatcaagacagctgtgaacctgcccctggagagagatgctgagagcttcctgctgaagagccccatcgccccctgcagcctggacaagagggtcatcctgatcttccactgtgagttcagcagcgagcggggccccaggatgtgccgcttcatccgggagcgggacagagctgtgaatgactaccccagcctgtactacccagagatgtacatcctgaagggcggctacaaggagttcttcccccagcaccccaacttctgtgagccccaggactaccggcccatgaaccacgaggccttcaaggatgagctgaagaccttccggctgaagaccaggtcctgggccggggagaggagccggcgggagctgtgcagccggctgcaggaccagtag

SEQ ID NO: 146968 - DNA, 1470 bp, synthetic construct
  misc_feature 1..1470: note = Description of Artificial Sequence: Synthetic coding sequence
  source 1..1470: mol_type = other DNA
atgcacagcgagacccccaagagccaggtgggcaccctgctcttccgcagccgcagccggctgacccacctgagcctgagccggcgggccagcgagagcagcctgagcagcgagagcagcgagagcagtgatgctggcctgtgcatggacagccccagccccatggacccccacatggccgagcagacctttgagcaggccatccaggccgccagccgcatcatcagaaatgagcagtttgccatccgccgcttccagagcatgcctgtgcggctgctgggccacagccctgtgctgaggaacatcaccaacagccaggccccagatggaagaaggaagtctgaggccggcagcggggccgccagcagcagcggggaggacaaggaaaatgatggctttgtgttcaagatgccctggaagcccacccaccccagcagcacccacgccctggccgagtgggccagccggcgggaggcctttgcccagaggcccagcagcgccccagacctgatgtgcctgagcccagacaggaagatggaggtggaggagctgagccccctggccctgggccgcttcagcctgaccccagctgagggggacacagaagaagatgatggctttgtggacatcctggagagtgacctgaaggacctggtgatgtacagcaagtgccagaggctcttccgcagccccagcatgccctgcagcgtcatccggcccatcctgaagaggctggagcggccccaggaccgggacacccctgtgcagaacaagagaagaagatctgtgaccccacctgaggagcagcaggaggccgaggagcccaaggcccgggtgctgcggagcaagagcctgtgccatgatgaaattgagaacctgctggacagcgaccaccgggagctgattggagactacagcaaggccttcctgctgcagacagtggatggcaagcaccaggacctgaagtacatcagccctgagaccatggtggccctgctgaccgggaagttcagcaacatcgtggacaagtttgtgattgtggactgccgctacccctatgaatatgaaggaggccacatcaagacagctgtgaacctgcccctggagagagatgctgagagcttcctgctgaagagccccatcgccccctgcagcctggacaagagggtcatcctgatcttccactgtgagttcagcagcgagcggggccccaggatgtgccgcttcatccgggagcgggacagagctgtgaatgactaccccagcctgtactacccagagatgtacatcctgaagggcggctacaaggagttcttcccccagcaccccaacttctgtgagccccaggactaccggcccatgaaccacgaggccttcaaggatgagctgaagaccttccggctgaagaccaggtcctgggccggggagaggagcagaagagagctgtgcagccggctgcaggaccagtag

SEQ ID NO: 146969 - DNA, 1701 bp, synthetic construct
  misc_feature 1..1701: note = Description of Artificial Sequence: Synthetic coding sequence
  source 1..1701: mol_type = other DNA
atggaggtgccccagcctgagcccgcccctggcagcgccctgagccctgctggggtgtgtggcggggcccagaggcctggccacctgcccggcctgctgctgggcagccacggcctgctgggcagccctgtgcgggctgctgccagcagccctgtgaccaccctgacccagaccatgcatgacctggccggcctgggcagccgcagccggctgacccacctgagcctgagccggcgggccagcgagagcagcctgagcagcgagagcagcgagagcagtgatgctggcctgtgcatggacagccccagccccatggacccccacatggccgagcagacctttgagcaggccatccaggccgccagccgcatcatcagaaatgagcagtttgccatccgccgcttccagagcatgcctgtgcggctgctgggccacagccctgtgctgaggaacatcaccaacagccaggccccagatggaagaaggaagtctgaggccggcagcggggccgccagcagcagcggggaggacaaggaaaatgatggctttgtgttcaagatgccctggaagcccacccaccccagcagcacccacgccctggccgagtgggccagccggcgggaggcctttgcccagaggcccagcagcgccccagacctgatgtgcctgagcccagacaggaagatggaggtggaggagctgagccccctggccctgggccgcttcagcctgaccccagctgagggggacacagaagaagatgatggctttgtggacatcctggagagtgacctgaaggatgatgatgctgtgcccccaggcatggagagcctcatcagcgcccccctggtgaagaccctggagaaggaggaggagaaggacctggtgatgtacagcaagtgccagaggctcttccgcagccccagcatgccctgcagcgtcatccggcccatcctgaagaggctggagcggccccaggaccgggacacccctgtgcagaacaagagaagaagatctgtgaccccacctgaggagcagcaggaggccgaggagcccaaggcccgggtgctgcggagcaagagcctgtgccatgatgaaattgagaacctgctggacagcgaccaccgggagctgattggagactacagcaaggccttcctgctgcagacagtggatggcaagcaccaggacctgaagtacatcagccctgagaccatggtggccctgctgaccgggaagttcagcaacatcgtggacaagtttgtgattgtggactgccgctacccctatgaatatgagggcggccacatcaagacagctgtgaacctgcccctggagagagatgctgagagcttcctgctgaagagccccatcgccccctgcagcctggacaagagggtcatcctgatcttccactgtgagttcagcagcgagcggggccccaggatgtgccgcttcatccgggagcgggacagagctgtgaatgactaccccagcctgtactacccagagatgtacatcctgaagggcggctacaaggagttcttcccccagcaccccaacttctgtgagccccaggactaccggcccatgaaccacgaggccttcaaggatgagctgaagaccttccggctgaagaccaggtcctgggccggggagaggagccggcgggagctgtgcagccggctgcaggaccagtag

SEQ ID NO: 146970 - DNA, 2475 bp, synthetic construct
  misc_feature 1..2475: note = Description of Artificial Sequence: Synthetic coding sequence
  source 1..2475: mol_type = other DNA
atgacagtgctgcaggagcctgtgcaggccgccatctggcaggccctgaaccactacgcctacagagatgctgtgttcctggccgagcggctgtatgcagaggtgcacagcgaggaggccctcttcctgctggccacctgctactacagaagtggcaaggcctacaaggcctaccgcctgctgaagggccacagctgcaccaccccccagtgcaagtacctgctggccaagtgctgcgtggacctgagcaagctggccgagggggagcagatcctgtctggaggagtcttcaacaagcagaagagccatgatgacatcgtgacagaatttggagacagcgcctgcttcaccctgagcctgctgggccacgtgtactgcaagacagaccggctggccaagggcagcgagtgctaccagaagagcctgagcctgaaccccttcctgtggagcccctttgagagcctgtgtgagatcggggagaagccagaccctgaccagaccttcaagttcaccagcctgcagaacttcagcaactgcctgcccaacagctgcaccacccaggtgcccaaccacagcctgagccaccggcagcctgagaccgtgctgacagagaccccccaggacaccatcgagctgaaccggctgaacctggagagcagcaacagcaagtacagcctgaacacagacagctctgtgtcctacattgattctgctgtgatcagcccagacacagtgcccctgggcaccggcaccagcatcctgagcaagcaggtgcagaacaagcccaagacaggccgcagcctgctgggcggccctgctgccctgagccccctgacccccagctttggcatcctgcccctggagacccccagccctggagatggcagctacctgcagaactacaccaacaccccacctgtgattgatgtgcccagcactggagcccccagcaagaagtctgtggcccgcatcggccagacaggcaccaagtctgtgttcagccagagcggcaacagccgggaggtgacccccatcctggcccagacccagagcagcggcccccagaccagcaccaccccccaggtgctgagccccaccatcaccagccccccaaatgccctgccccggcgcagcagccgcctcttcaccagtgacagcagcaccaccaaggagaacagcaagaagctgaagatgaagtttcctcccaagatccccaacaggaagaccaagagcaagaccaacaagggcggcatcacccagcccaacatcaatgacagcctggagatcaccaagctggacagcagcatcatcagcgagggcaagatcagcaccatcaccccccagatccaggccttcaacctgcagaaggctgctgctgagggcctgatgagcctgctgcgggagatgggcaagggctacctggccctgtgcagctacaactgcaaggaggccatcaacatcctgagccacctgcccagccaccactacaacacaggctgggtgctgtgccagatcggccgggcctactttgagctgtctgagtacatgcaggccgagcgcatcttcagcgaggtgagaagaattgagaactacagagtggagggcatggagatctacagcaccaccctgtggcacctgcagaaggatgtggccctgtctgtgctgagcaaggacctgacagacatggacaagaacagccctgaggcctggtgtgccgccggcaactgcttcagcctgcagcgggagcatgacatcgccatcaagttcttccagagggccatccaggtggaccccaactatgcctatgcctacaccctgctgggccatgaatttgtgctgacagaggagctggacaaggccctggcctgcttcagaaatgccatccgggtgaaccccaggcactacaatgcctggtacggcctgggcatgatctactacaagcaggagaagttcagcctggccgagatgcacttccagaaggccctggacatcaacccccagagctctgtgctgctgtgccacatcggcgtggtgcagcacgccctgaagaagtctgagaaggccctggacaccctgaacaaggccatcgtcatcgaccccaagaaccccctgtgcaagttccaccgggcctctgtgctgtttgccaatgagaagtacaagagcgccctgcaggagctggaggagctgaagcagatcgtgcccaaggagagcctggtgtacttcctgattggcaaggtgtacaagaagctgggccagacccacctggccctgatgaacttctcctgggccatggacctggaccccaagggggccaacaaccagatcaaggaggccatcgacaagcgctacctgcctgatgatgaggagcccatcacccaggaggagcagatcatgggcacagatgagagccaggagagctccatgacagatgctgatgacacccagctgcacgccgctgagagtgatgagttctag

SEQ ID NO: 146971 - DNA, 2292 bp, synthetic construct
  misc_feature 1..2292: note = Description of Artificial Sequence: Synthetic coding sequence
  source 1..2292: mol_type = other DNA
atggccagcaccaagcccctgtgcctgccccgctgtggcttccccaggaggacccccctgtgccggcggctggccgagggggagcagatcctgagcggcggcgtcttcaacaagcagaagagccatgatgacatcgtgacagaatttggagacagcgcctgcttcaccctgagcctgctgggccacgtgtactgcaagacagaccggctggccaagggcagcgagtgctaccagaagagcctgagcctgaaccccttcctgtggagcccctttgagagcctgtgtgaaattggagagaagccagaccctgaccagaccttcaagttcaccagcctgcagaacttcagcaactgcctgcccaacagctgcaccacccaggtgcccaaccacagcctgagccaccggcagcctgagaccgtgctgacagagaccccccaggacaccatcgagctgaaccggctgaacctggagagcagcaacagcaagtacagcctgaacacagacagctctgtgtcctacatcgacagcgctgtgatcagcccagacacagtgcccctgggcaccggcaccagcatcctgagcaagcaggtgcagaacaagcccaagacaggccgcagcctgctgggcggccctgctgccctgagccccctgacccccagctttggcatcctgcccctggagacccccagccctggagatggcagctacctgcagaactacaccaacaccccacctgtgattgatgtgcccagcactggagcccccagcaagaagtctgtggccagaattggccagacaggcaccaagagcgtcttcagccagagcggcaacagccgggaggtgacccccatcctggcccagacccagagcagcggcccccagaccagcaccaccccccaggtgctgagccccaccatcaccagccccccaaatgccctgcccaggaggagcagccgcctcttcaccagtgacagcagcaccaccaaggagaacagcaagaagctgaagatgaagttcccccccaagatccccaacaggaagaccaagagcaagaccaacaagggcggcatcacccagcccaacatcaatgacagcctggagatcaccaagctggacagcagcatcatcagcgagggcaagatcagcaccatcaccccccagatccaggccttcaacctgcagaaggctgctgctgagggcctgatgagcctgctgcgggagatgggcaagggctacctggccctgtgcagctacaactgcaaggaggccatcaacatcctgagccacctgcccagccaccactacaacacaggctgggtgctgtgccagatcggccgggcctactttgagctgtctgagtacatgcaggccgagcgcatcttcagcgaggtgagaagaattgagaactacagagtggagggcatggagatctacagcaccaccctgtggcacctgcagaaggatgtggccctgtctgtgctgagcaaggacctgacagacatggacaagaacagccctgaggcctggtgtgccgccggcaactgcttcagcctgcagcgggagcatgacatcgccatcaagttcttccagagggccatccaggtggaccccaactatgcctatgcctacaccctgctgggccacgagtttgtgctgacagaggagctggacaaggccctggcctgcttcagaaatgccatccgggtgaaccccaggcactacaatgcctggtacggcctgggcatgatctactacaagcaggagaagttcagcctggccgagatgcacttccagaaggccctggacatcaacccccagagctctgtgctgctgtgccacatcggcgtggtgcagcacgccctgaagaagtctgagaaggccctggacaccctgaacaaggccatcgtgattgaccccaagaaccccctgtgcaagttccaccgggcctctgtgctgtttgccaatgagaagtacaagagcgccctgcaggagctggaggagctgaagcagatcgtgcccaaggagagcctggtgtacttcctgattggcaaggtgtacaagaagctgggccagacccacctggccctgatgaacttctcctgggccatggacctggaccccaagggggccaacaaccagatcaaggaggccatcgacaagcgctacctgcctgatgatgaggagcccatcacccaggaggagcagatcatgggcacagatgagagccaggagagctccatgacagatgctgatgacacccagctgcatgctgctgagagtgatgagttctag

SEQ ID NO: 146972 - DNA, 2472 bp, synthetic construct
  misc_feature 1..2472: note = Description of Artificial Sequence: Synthetic coding sequence
  source 1..2472: mol_type = other DNA
atgacagtgctgcaggagcctgtgcaggccgccatctggcaggccctgaaccactacgcctacagagatgctgtgttcctggccgagcggctgtatgcagaggtgcacagcgaggaggccctcttcctgctggccacctgctactacagaagtggcaaggcctacaaggcctaccgcctgctgaagggccacagctgcaccaccccccagtgcaagtacctgctggccaagtgctgcgtggacctgagcaagctggccgagggggagcagatcctgtctggaggagtcttcaacaagcagaagagccatgatgacatcgtgacagaatttggagacagcgcctgcttcaccctgagcctgctgggccacgtgtactgcaagacagaccggctggccaagggcagcgagtgctaccagaagagcctgagcctgaaccccttcctgtggagcccctttgagagcctgtgtgagatcggggagaagccagaccctgaccagaccttcaagttcaccagcctgcagaacttcagcaactgcctgcccaacagctgcaccacccaggtgcccaaccacagcctgagccaccggcagcctgagaccgtgctgacagagaccccccaggacaccatcgagctgaaccggctgaacctggagagcagcaacagcaagtacagcctgaacacagacagctctgtgtcctacattgattctgctgtgatcagcccagacacagtgcccctgggcaccggcaccagcatcctgagcaagcaggtgcagaacaagcccaagacaggccgcagcctgctgggcggccctgctgccctgagccccctgacccccagctttggcatcctgcccctggagacccccagccctggagatggcagctacctgcagaactacaccaacaccccacctgtgattgatgtgcccagcactggagcccccagcaagaagtctgtggcccgcatcggccagacaggcaccaagtctgtgttcagccagagcggcaacagccgggaggtgacccccatcctggcccagacccagagcagcggcccccagaccagcaccaccccccaggtgctgagccccaccatcaccagccccccaaatgccctgccccggcgcagcagccgcctcttcaccagtgacagcagcaccaccaaggagaacagcaagaagctgaagatgaagtttcctcccaagatccccaacaggaagaccaagagcaagaccaacaagggcggcatcacccagcccaacatcaatgacagcctggagatcaccaagctggacagcagcatcatcagcgagggcaagatcagcaccatcaccccccagatccaggccttcaacctgcagaaggctgctgctggcctgatgagcctgctgcgggagatgggcaagggctacctggccctgtgcagctacaactgcaaggaggccatcaacatcctgagccacctgcccagccaccactacaacacaggctgggtgctgtgccagatcggccgggcctactttgagctgtctgagtacatgcaggccgagcgcatcttcagcgaggtgagaagaattgagaactacagagtggagggcatggagatctacagcaccaccctgtggcacctgcagaaggatgtggccctgtctgtgctgagcaaggacctgacagacatggacaagaacagccctgaggcctggtgtgccgccggcaactgcttcagcctgcagcgggagcatgacatcgccatcaagttcttccagagggccatccaggtggaccccaactatgcctatgcctacaccctgctgggccacgagtttgtgctgacagaggagctggacaaggccctggcctgcttcagaaatgccatccgggtgaaccccaggcactacaatgcctggtacggcctgggcatgatctactacaagcaggagaagttcagcctggccgagatgcacttccagaaggccctggacatcaacccccagagctctgtgctgctgtgccacatcggcgtggtgcagcacgccctgaagaagtctgagaaggccctggacaccctgaacaaggccatcgtgattgaccccaagaaccccctgtgcaagttccaccgggcctctgtgctgtttgccaatgagaagtacaagagcgccctgcaggagctggaggagctgaagcagatcgtgcccaaggagagcctggtgtacttcctgattggcaaggtgtacaagaagctgggccagacccacctggccctgatgaacttctcctgggccatggacctggaccccaagggggccaacaaccagatcaaggaggccatcgacaagcgctacctgcctgatgatgaggagcccatcacccaggaggagcagatcatgggcacagatgagagccaggagagctccatgacagatgctgatgacacccagctgcatgctgctgagagtgatgagttctag

SEQ ID NO: 146973 - DNA, 2493 bp, synthetic construct
  misc_feature 1..2493: note = Description of Artificial Sequence: Synthetic coding sequence
  source 1..2493: mol_type = other DNA
atgacagtgctgcaggagcctgtgcaggccgccatctggcaggccctgaaccactacgcctacagagatgctgtgttcctggccgagcggctgtatgcagaggtgcacagcgaggaggccctcttcctgctggccacctgctactacagaagtggcaaggcctacaaggcctaccgcctgctgaagggccacagctgcaccaccccccagtgcaagtacctgctggccaagtgctgcgtggacctgagcaagctggccgagggggagcagatcctgtctggaggagtcttcaacaagcagaagagccatgatgacatcgtgacagaatttggagacagcgcctgcttcaccctgagcctgctgggccacgtgtactgcaagacagaccggctggccaagggcagcgagtgctaccagaagagcctgagcctgaaccccttcctgtggagcccctttgagagcctgtgtgagatcggggagaagccagaccctgaccagaccttcaagttcaccagcctgcagaacttcagcaactgcctgcccaacagctgcaccacccaggtgcccaaccacagcctgagccaccggcagcctgagaccgtgctgacagagaccccccaggacaccatcgagctgaaccggctgaacctggagagcagcaacagcaagtacagcctgaacacagacagctctgtgtcctacattgattctgctgtgatcagcccagacacagtgcccctgggcaccggcaccagcatcctgagcaagcaggtgcagaacaagcccaagacaggccgcagcctgctgggcggccctgctgccctgagccccctgacccccagctttggcatcctgcccctggagacccccagccctggagatggcagctacctgcagaactacaccaacaccccacctgtgattgatgtgcccagcactggagcccccagcaagaagaccttccgggtgctgcagagcgtggcccgcatcggccagacaggcaccaagtctgtgttcagccagagcggcaacagccgggaggtgacccccatcctggcccagacccagagcagcggcccccagaccagcaccaccccccaggtgctgagccccaccatcaccagccccccaaatgccctgccccggcgcagcagccgcctcttcaccagtgacagcagcaccaccaaggagaacagcaagaagctgaagatgaagtttcctcccaagatccccaacaggaagaccaagagcaagaccaacaagggcggcatcacccagcccaacatcaatgacagcctggagatcaccaagctggacagcagcatcatcagcgagggcaagatcagcaccatcaccccccagatccaggccttcaacctgcagaaggctgctgctgagggcctgatgagcctgctgcgggagatgggcaagggctacctggccctgtgcagctacaactgcaaggaggccatcaacatcctgagccacctgcccagccaccactacaacacaggctgggtgctgtgccagatcggccgggcctactttgagctgtctgagtacatgcaggccgagcgcatcttcagcgaggtgagaagaattgagaactacagagtggagggcatggagatctacagcaccaccctgtggcacctgcagaaggatgtggccctgtctgtgctgagcaaggacctgacagacatggacaagaacagccctgaggcctggtgtgccgccggcaactgcttcagcctgcagcgggagcatgacatcgccatcaagttcttccagagggccatccaggtggaccccaactatgcctatgcctacaccctgctgggccatgaatttgtgctgacagaggagctggacaaggccctggcctgcttcagaaatgccatccgggtgaaccccaggcactacaatgcctggtacggcctgggcatgatctactacaagcaggagaagttcagcctggccgagatgcacttccagaaggccctggacatcaacccccagagctctgtgctgctgtgccacatcggcgtggtgcagcacgccctgaagaagtctgagaaggccctggacaccctgaacaaggccatcgtcatcgaccccaagaaccccctgtgcaagttccaccgggcctctgtgctgtttgccaatgagaagtacaagagcgccctgcaggagctggaggagctgaagcagatcgtgcccaaggagagcctggtgtacttcctgattggcaaggtgtacaagaagctgggccagacccacctggccctgatgaacttctcctgggccatggacctggaccccaagggggccaacaaccagatcaaggaggccatcgacaagcgctacctgcctgatgatgaggagcccatcacccaggaggagcagatcatgggcacagatgagagccaggagagctccatgacagatgctgatgacacccagctgcacgccgctgagagtgatgagttctag

SEQ ID NO: 146974 - DNA, 1740 bp, synthetic construct
  misc_feature 1..1740: note = Description of Artificial Sequence: Synthetic coding sequence
  source 1..1740: mol_type = other DNA
atgtctgctgccatcgccgccctggccgccagctatggcagcggcagcggcagcgagagtgacagcgacagcgagagcagccgctgccccctgcctgctgctgacagcctgatgcacctgaccaagagccccagcagcaagcccagcctggccgtggccgtggacagcgcccctgaggtggccgtgaaggaggacctggagaccggggtgcacctggaccctgctgtgaaggaggtgcagtacaaccccacctatgagaccatgtttgcccctgagtttggacctgagaaccccttccgcacccagcagatggccgcccccaggaacatgctgagcggctatgcagagcccgcccacatcaatgacttcatgtttgagcagcagaggaggacctttgccacctacggctacgccctggaccccagcctggacaaccaccaggtgtctgccaagtacatcggctctgtggaggaggccgagaagaaccagggcctgactgtgtttgagaccggccagaagaagacagagaagaggaagaagttcaaggaaaatgatgccagcaacattgatggcttcctgggcccctgggccaagtatgtggatgagaaggatgtggccaagcccagcgaggaggagcagaaggagctggatgagatcacagccaagaggcagaagaagggcaagcaggaggaggagaagccaggagaggagaagaccatcctgcacgtgaaggagatgtatgactaccagggccgcagctacctgcacatcccccaggatgtgggcgtgaacctgcggagcaccatgcctcctgagaagtgctacctgcccaagaagcagatccacgtgtggagcggccacaccaagggcgtgtctgctgtgcggctcttccccctgagcggccacctgctgctgagctgcagcatggactgcaagatcaagctgtgggaggtgtatggagagcggcgctgcctgcggaccttcatcggccacagcaaggctgtgcgggacatctgcttcaacacagctggcacccagttcctgtctgctgcctatgaccgctacctgaagctgtgggacacagaaacaggccagtgcatcagccgcttcaccaacaggaaggtgccctactgtgtgaagttcaacccagatgaggacaagcagaacctgtttgtggccggcatgtctgacaagaagatcgtgcagtgggacatccgctctggagagatcgtgcaggagtatgacagacacctgggcgctgtgaacaccatcgtgtttgtggatgaaaatagaagatttgtgtccaccagtgatgacaagagcctgcgggtgtgggagtgggacatccctgtggacttcaagtacatcgccgagcccagcatgcacagcatgcctgctgtgaccctgagccccaacgggaagtggctggcctgccagagcatggacaaccagatcctgatctttggagcccagaaccgcttccggctgaacaagaagaagatcttcaagggccacatggtggccggctacgcctgccaggtggacttctccccagacatgtcctatgtgatctctggagatggaaatggcaagctgaacatctgggactggaagaccaccaagctgtacagccgcttcaaggcccatgacaaggtgtgcatcggggctgtgtggcacccccatgagaccagcaaggtgatcacctgtggctgggatggcctcatcaagctgtgggactag

SEQ ID NO: 146975 - DNA, 1620 bp, synthetic construct
  misc_feature 1..1620: note = Description of Artificial Sequence: Synthetic coding sequence
  source 1..1620: mol_type = other DNA
atgtctgctgccatcgccgccctggccgccagctatggcagcggcagcggcagcgagagtgacagcgacagcgagagcagccgctgccccctgcctgctgctgacagcctgatgcacctgaccaagagccccagcagcaagcccagcctggccgtggccgtggacagcgcccctgaggtggccgtgaaggaggacctggagaccggggtgcacctggaccctgctgtgaaggaggtgcagtacaaccccacctatgagaccatgtttgcccctgagtttggacctgagaaccccttccgcacccagcagatggccgcccccaggaacatgctgagcggctatgcagagcccgcccacatcaatgacttcatgtttgagcagcagaggaggacctttgccacctacggctacgccctggaccccagcctggacaaccaccaggtgtctgccaagtacatcggctctgtggaggaggccgagaagaaccagggcctgactgtgtttgagaccggccagaagaagacagagaagaggaagaagttcaaggaaaatgatgccagcaacattgatggcttcctgggcccctgggccaagtatgtggatgagaaggatgtggccaagcccagcgaggaggagcagaaggagctggatgagatcacagccaagaggcagaagaagggcaagcaggaggaggagaagccaggagaggagaagaccatcctgcacgtgaaggagatgtatgactaccagggccgcagctacctgcacatcccccaggatgtgggcgtgaacctgcggagcaccatgcctcctgagaagtgctacctgcccaagaagcagatccacgtgtggagcggccacaccaagggcgtgtctgctgtgcggctcttccccctgagcggccacctgctgctgagctgcagcatggactgcaagatcaagctgtgggaggtgtatggagagcggcgctgcctgcggaccttcatcggccacagcaaggctgtgcgggacatctgcttcaacacagctggcacccagttcctgtctgctgcctatgaccgctacctgaagctgtgggacacagaaacaggccagtgcatcagccgcttcaccaacaggaaggtgccctactgtgtgaagttcaacccagatgaggacaagcagaacctgtttgtggccggcatgtctgacaagaagatcgtgcagtgggacatccgctctggagagatcgtgcaggagtatgacagacacctgggcgctgtgaacaccatcgtgtttgtggatgaaaatagaagatttgtgtccaccagtgatgacaagagcctgcgggtgtgggagtgggacatccctgtggacttcaagtacatcgccgagcccagcatgcacagcatgcctgctgtgaccctgagccccaacgggaagtggctggcctgccagagcatggacaaccagatcctgatctttggagcccagaaccgcttccggctgaacaagaagaagatcttcaagggccacatggtggccggctacgcctgccaggtggacttctccccagacatgagggtgccccagagcttccagaacctgaaggaggtgacagctggcccccaggagggctag

SEQ ID NO: 146976 - DNA, 1740 bp, synthetic construct; identical to SEQ ID NO: 146974
  misc_feature 1..1740: note = Description of Artificial Sequence: Synthetic coding sequence
  source 1..1740: mol_type = other DNA

SEQ ID NO: 146977 - DNA, 1620 bp, synthetic construct; identical to SEQ ID NO: 146975
  misc_feature 1..1620: note = Description of Artificial Sequence: Synthetic coding sequence
  source 1..1620: mol_type = other DNA

SEQ ID NO: 146978 - DNA, 378 bp, synthetic construct
  misc_feature 1..378: note = Description of Artificial Sequence: Synthetic coding sequence
  source 1..378: mol_type = other DNA
tgaaacatgctgagcggctacgccgagcccgcccacatcaatgacttcatgtttgagcagcagaggaggacctttgccacctacggctacgccctggaccccagcctggacaaccaccaggtgtctgccaagtacatcggctctgtggaggaggccgagaagaaccagggcctgactgtgtttgaaacaggccagaagaagacagagaagaggaagaagttcaaggaaaatgatgccagcaacattgatggcttcctgggcccctgggccaagtatgtggatgagaaggatgtggccaagcccagcgaggtgtcctttgatgtgttcaactgccagttccgctacaccctgtacctgtatgagggctacctgcactag

SEQ ID NO: 146979 - DNA, 495 bp, synthetic construct
  misc_feature 1..495: note = Description of Artificial Sequence: Synthetic coding sequence
  source 1..495: mol_type = other DNA
atgtctgctgccatcgccgccctggccgccagctatggcagcggcagcggcagcgagagtgacagcgacagcgagagcagccgctgccccctgcctgctgctgacagcctgatgcacctgaccaagagccccagcagcaagcccagcctggccgtggccgtggacagcgcccctgaggtggccgtgaaggaggacctggagaccggggtgcacctggaccctgctgtgaaggaggtgcagtacaaccccacctatgagaccatgtttgcccctgagtttggacctgagaaccccttccgcacccagcagatggccgcccccaggaacatgctgagcggctatgcagagcccgcccacatcaatgacttcatgtttgagcagcagaggaggacctttgccacctacggctacgccctggaccccagcctggacaaccaccaggtgtctgccaagtacatcggctctgtggaggaggccgagaagatcaaggtgtag

SEQ ID NO: 146980 - DNA, 213 bp, synthetic construct
  misc_feature 1..213: note = Description of Artificial Sequence: Synthetic coding sequence
  source 1..213: mol_type = other DNA
atggccgcccccaggaacatgctgagcggctacgccgagcccgcccacatcaatgacttcatgtttgagcagcagaggaggacctttgccacctacggctacgccctggaccccagcctggacaaccaccaggtgtctgccaagtacatcggctctgtggaggaggccgagaagaaccagggcctgactgtgtttgaaacaggccagaagtag

SEQ ID NO: 146981 - DNA, 1305 bp, synthetic construct
  misc_feature 1..1305: note = Description of Artificial Sequence: Synthetic coding sequence
  source 1..1305: mol_type = other DNA
atgagcatcctgaagatccacgcccgggagatctttgacagccggggcaaccccaccgtggaggtggacctcttcaccagcaagggcctcttccgggctgctgtgcccagcggggccagcacaggcatctatgaggccctggagctgcgggacaatgacaagacccgctacatgggcaagggcgtgtccaaggctgtggagcacatcaacaagaccatcgccccagccctggtgtccaagaagctgaatgtgacagagcaggagaagattgacaagctgatgattgagatggatggaacagagaacaagagcaagtttggagccaatgccatcctgggcgtgtccctggccgtgtgcaaggccggggctgtggagaagggcgtgcccctgtaccgccacatcgctgacctggccggcaacagcgaggtgatcctgcctgtgcctgccttcaacgtcatcaatggaggcagccatgctggcaacaagctggccatgcaggagttcatgatcctgcctgtgggcgccgccaacttccgggaggccatgagaattggagctgaggtgtaccacaacctgaagaatgtcatcaaggagaagtatggcaaggatgccaccaacgtgggagatgaaggaggctttgcccccaacatcctggagaacaaggagggcctggagctgctgaagacagccatcggcaaggccggctacacagacaaggtggtgattggcatggatgtggccgccagcgagttcttccgcagcggcaagtatgacctggacttcaagagcccagatgaccccagccgctacatcagcccagaccagctggccgacctgtacaagagcttcatcaaggactaccctgtggtgtccattgaggacccctttgaccaggatgactggggcgcctggcagaagttcaccgccagcgctggcatccaggtggtgggagatgacctgactgtgaccaaccccaagagaattgccaaggctgtgaatgagaagagctgcaactgcctgctgctgaaggtgaaccagatcggctctgtgacagagagcctgcaggcctgcaagctggcccaggccaacggctggggcgtgatggtgagccacaggtctggagaaacagaggacaccttcatcgctgacctggtggtgggcctgtgcaccggccagatcaagacaggagccccctgccgctctgagcggctggccaagtacaaccagctgctgagaattgaggaggagctgggcagcaaggccaagtttgctggcaggaacttcaggaaccccctggccaagtag

SEQ ID NO: 146982 - DNA, 360 bp, synthetic construct
  misc_feature 1..360: note = Description of Artificial Sequence: Synthetic coding sequence
  source 1..360: mol_type = other DNA
atgaggaagacagccagcagctgcccagccagcctgacctgtgactgctacgccacagacaaggtgtgcagcatctgcctgagccggcggcagcaggtggcccccagggctggcaccccaggcttccgggcccctgaggtgctgaccaagtgccccaaccagaccaccgggaagagcatcctgtgcagcaaggaggtgcctgcccaggacctgaggaagctgtgtgagcggctgcggggcatggacagcagcacccccaagctgaccagtgacatccagggccacgccagccaccagcctgccatcagcgagaagacagaccacaaggccagctgcctggtgcagaccccacctggatag

SEQ ID NO: 146983 - DNA, 474 bp, synthetic construct
  misc_feature 1..474: note = Description of Artificial Sequence: Synthetic coding sequence
  source 1..474: mol_type = other DNA
atggaggccagcctgggcatccagatggatgagcccatggccttcagcccccagagggaccgcttccaggccgagggcagcctgaagaagaatgagcagaacttcaagctggccggcgtgaagaaggacatcgagaagctgtatgaggccgtgccccagctgagcaatgtgttcaagattgaggacaagatcggggagggcaccttcagctctgtgtacctggccacagcccagctgcaggtgggccctgaggagaagatcgccctgaagcacctgatccccaccagccaccccatcagaattgctgctgagctgcagtgcctgactgtggccggcggccaggacaacgtgatgggcgtgaagtactgcttcaggaagaatgaccacgtggtgattgccatgccctacctggagcacgagagcttcctggacatcctgaacagcctgtccttccaggaggtgcgggagtactag

SEQ ID NO: 146984 - DNA, 1725 bp, synthetic construct
  misc_feature 1..1725: note = Description of Artificial Sequence: Synthetic coding sequence
  source 1..1725: mol_type = other DNA
atggaggccagcctgggcatccagatggatgagcccatggccttcagcccccagagggaccgcttccaggccgagggcagcctgaagaagaatgagcagaacttcaagctggccggcgtgaagaaggacatcgagaagctgtatgaggccgtgccccagctgagcaatgtgttcaagattgaggacaagatcggggagggcaccttcagctctgtgtacctggccacagcccagctgcaggtgggccctgaggagaagatcgccctgaagcacctgatccccaccagccaccccatcagaattgctgctgagctgcagtgcctgactgtggccggcggccaggacaacgtgatgggcgtgaagtactgcttcaggaagaatgaccacgtggtgattgccatgccctacctggagcacgagagcttcctggacatcctgaacagcctgtccttccaggaggtgcgggagtacatgctgaacctcttcaaggccctgaagaggatccaccagtttggaattgtgcacagagatgtgaagcccagcaacttcctgtacaacagaaggctgaagaagtatgccctggtggactttggcctggcccagggcacccatgacaccaagattgagctgctgaagtttgtgcagagcgaggcccagcaggagcgctgcagccagaacaagagccacatcatcaccggcaacaagatccccctgagcggccctgtgcccaaggagctggaccagcagagcaccaccaaggcctctgtgaagaggccctacaccaatgcccagatccagatcaagcagggcaaggatggcaaggagggctctgtgggcctgtctgtgcagaggtctgtgtttggagagaggaacttcaacatccacagcagcatcagccatgagagccctgctgtgaagctgatgaagcagagcaagacagtggatgtgctgagcaggaagctggccaccaagaagaaggccatcagcaccaaggtgatgaacagcgctgtgatgaggaagacagccagcagctgcccagccagcctgacctgtgactgctacgccacagacaaggtgtgcagcatctgcctgagccggcggcagcaggtggccccccgggccggcaccccaggcttccgggcccctgaggtgctgaccaagtgccccaaccagaccacagccatcgacatgtggagcgctggggtcatcttcctgagcctgctgagcggccgctaccccttctacaaggccagtgatgacctgacagccctggcccagatcatgaccatccggggcagccgggagaccatccaggccgccaagaccttcggcaagagcatcctgtgcagcaaggaggtgcctgcccaggacctgaggaagctgtgtgagcggctgcggggcatggacagcagcacccccaagctgaccagtgacatccagggccacgccagccaccagcctgccatcagcgagaagacagaccacaaggccagctgcctggtgcagaccccacctggccagtacagcggcaacagcttcaagaagggggacagcaacagctgtgagcactgctttgatgagtacaacaccaacctggagggctggaatgaggtgcctgatgaggcctatgacctgctggacaagctgctggacctgaacccagccagccgcatcacagctgaggaggccctgctgcaccccttcttcaaggacatgagcctgtag

SEQ ID NO: 146985 - DNA, 1641 bp, synthetic construct
  misc_feature 1..1641: note = Description of Artificial Sequence: Synthetic coding sequence
  source 1..1641: mol_type = other DNA
atggaggccagcctgggcatccagatggatgagcccatggccttcagcccccagagggaccgcttccaggccgagggcagcctgaagaagaatgagcagaacttcaagctggccggcaccttcagctctgtgtacctggccacagcccagctgcaggtgggccctgaggagaagatcgccctgaagcacctgatccccaccagccaccccatcagaattgctgctgagctgcagtgcctgactgtggccggcggccaggacaacgtgatgggcgtgaagtactgcttcaggaagaatgaccacgtggtgattgccatgccctacctggagcacgagagcttcctggacatcctgaacagcctgtccttccaggaggtgcgggagtacatgctgaacctcttcaaggccctgaagaggatccaccagtttggaattgtgcacagagatgtgaagcccagcaacttcctgtacaacagaaggctgaagaagtatgccctggtggactttggcctggcccagggcacccatgacaccaagattgagctgctgaagtttgtgcagagcgaggcccagcaggagcgctgcagccagaacaagagccacatcatcaccggcaacaagatccccctgagcggccctgtgcccaaggagctggaccagcagagcaccaccaaggcctctgtgaagaggccctacaccaatgcccagatccagatcaagcagggcaaggatggcaaggagggctctgtgggcctgtctgtgcagaggtctgtgtttggagagaggaacttcaacatccacagcagcatcagccatgagagccctgctgtgaagctgatgaagcagagcaagacagtggatgtgctgagcaggaagctggccaccaagaagaaggccatcagcaccaaggtgatgaacagcgctgtgatgaggaagacagccagcagctgcccagccagcctgacctgtgactgctacgccacagacaaggtgtgcagcatctgcctgagccggcggcagcaggtggccccccgggccggcaccccaggcttccgggcccctgaggtgctgaccaagtgccccaaccagaccacagccatcgacatgtggagcgctggggtcatcttcctgagcctgctgagcggccgctaccccttctacaaggccagtgatgacctgacagccctggcccagatcatgaccatccggggcagccgggagaccatccaggccgccaagaccttcggcaagagcatcctgtgcagcaaggaggtgcctgcccaggacctgaggaagctgtgtgagcggctgcggggcatggacagcagcacccccaagctgaccagtgacatccagggccacgccagccaccagcctgccatcagcgagaagacagaccacaaggccagctgcctggtgcagaccccacctggccagtacagcggcaacagcttcaagaagggggacagcaacagctgtgagcactgctttgatgagtacaacaccaacctggagggctggaatgaggtgcctgatgaggcctatgacctgctggacaagctgctggacctgaacccagccagccgcatcacagctgaggaggccctgctgcaccccttcttcaaggacatgagcctgtag

SEQ ID NO: 146986 - DNA, 3453 bp, synthetic construct
  misc_feature 1..3453: note = Description of Artificial Sequence: Synthetic coding sequence
  source 1..3453: mol_type = other DNA
atggcccagtttggaggccagaagaaccccccctgggccacccagttcaccgccacagctgtgtcccagcctgctgccctgggcgtgcagcagcccagcctgctgggcgccagccccaccatctacacccagcagacagccctggccgctgctggcctgaccacccagaccccagccaactaccagctgacccagacagctgccctgcagcagcaggccgctgctgctgctgctgccctgcagcagcagtacagccagccccagcaggccctgtacagcgtgcagcagcagctgcagcagccccagcagaccctgctgacccagcctgctgtggccctgcccaccagcctgagcctgagcaccccccagcccacagcccagatcaccgtgtcctaccccacccccaggagcagccagcagcagacccagccccagaagcagagggtcttcaccggggtggtgaccaagctgcatgacacctttggatttgtggatgaagatgtgttcttccagctgtctgctgtgaagggcaagaccccccaggtgggggacagagtgctggtggaggccacctacaaccccaacatgcccttcaagtggaatgcccagaggatccagaccctgcccaaccagaaccagagccagacccagcccctgctgaagaccccacctgctgtgctgcagcccatcgccccccagaccaccttcggcgtgcagacccagccccagccccagagcctgctgcaggcccagatctctgctgccagcatcacccccctgctgcagacccagccccagcccctgctgcagcagccccagcagaaggccggcctgctgcagccccctgtgagaattgtgtcccagccccagcctgcccggcggctggacccccccagccgcttcagcggcagaaatgacagaggagaccaggtgcccaacaggaaggatgacaggagccgggagcgggagcgggagaggagaagaagccgggagaggagcccccagaggaagaggagccgggagaggagcccccggcgggagcgggagaggagccccaggagagtgcggcgggtggtgccccgctacacagtgcagttcagcaagttcagcctggactgccccagctgtgacatgatggagctgcggcggcgctaccagaacctgtacatccccagcgacttctttgatgcccagttcacctgggtggatgccttccccctgagccggcccttccagctgggcaactactgcaacttctacgtgatgcaccgggaggtggagagcctggagaagaacatggccatcctggaccccccagatgctgaccacctgtacagcgccaaggtgatgctgatggccagccccagcatggaggacctgtaccacaagagctgtgccctggccgaggacccccaggagctgagagatggcttccagcacccagcccggctggtgaagttcctggtgggcatgaagggcaaggatgaggccatggccatcggcggccactggagccccagcctggatggccctgaccctgagaaggaccccagcgtgctgatcaagacagccatccgctgctgcaaggccctgaccggcatcgacctgtctgtgtgcacccagtggtacagatttgctgagatccgctaccacaggcctgaggagacccacaagggccgcacagtgcctgcccacgtggagaccgtggtgctcttcttcccagatgtgtggcactgcctgcccaccaggtctgagtgggagaccctgagccggggctacaagcagcagctggtggagaagctgcagggcgagaggaaggaggctgatggagagcaggatgaggaggagaaggatgatggagaggccaaggagatcagcacccccacccactggagcaagctggaccccaagaccatgaaggtgaatgacctgaggaaggagctggagagccgggccctgagcagcaagggcctgaagagccagctgattgcccggctgaccaagcagctgaaggtggaggagcagaaggaggagcagaaggagctggagaagtctgagaaggaggaggatgaagatgatgacaggaagtcagaagatgacaaggaggaggaggagaggaagaggcaggaggagattgaaaggcagaggcgggagcggcgctacatcctgcctgatgagcccgccatcatcgtgcaccccaactgggccgccaagagcggcaagtttgactgcagcatcatgagcctgtctgtgctgctggactaccgcctggaggacaacaaggagcacagctttgaggtgtccctgtttgctgagctgttcaatgagatgctgcagagggactttggagtgcgcatctacaagagcctgctgagcctgcctgagaaggaggacaagaaggagaaggacaagaagagcaagaaggatgagaggaaggacaagaaggaggagagagatgatgaaacagatgagcccaagcccaagaggaggaagtctggagatgacaaggacaagaaggaggacagagatgagaggaagaaggaggacaagaggaaggatgacagcaaggatgatgatgaaacagaggaggacaacaaccaggatgaatatgaccccatggaggccgaggaggctgaagatgaggaggatgacagagatgaggaggagatgaccaagagagatgacaagagggacatcaaccgctactgcaaggagcggcccagcaaggacaaggagaaggagaagacccagatgatcaccatcaacagagacctgctgatggcctttgtgtactttgaccagagccactgcggctacctgctggagaaggacctggaggagatcctgtacaccctgggcctgcacctgagccgggcccaggtgaagaagctgctgaacaaggtggtgctgcgggagagctgcttctacaggaagctgacagacaccagcaaggatgaagaaaatcatgaggagagcgagagcctgcaggaggacatgctgggcaaccggctgctgctgcccacccccaccgtgaagcaggagagcaaggatgtggaggagaatgtgggcctgattgtgtacaacggggccatggtggatgtgggcagcctgctgcagaagctggagaagtctgagaaggtgcgggcagaggtggagcagaagctgcagctgctggaggagaagacagatgaagatgagaagaccatcctgaacctggagaacagcaacaagagcctgagcggggagctgcgggaggtgaagaaggacctgagccagctgcaggagaacctgaagatcagcgagaacatgaacctgcagtttgagaaccagatgaacaagaccatccggaacctgagcacagtgatggatgagatccacacagtgctgaagaaggacaacgtgaagaatgaagacaaggaccagaagagcaaagaaaatggagcctctgtgtag

SEQ ID NO: 146987 - DNA, 3408 bp, synthetic construct
  misc_feature 1..3408: note = Description of Artificial Sequence: Synthetic coding sequence
  source 1..3408: mol_type = other DNA
atggcccagtttggaggccagaagaaccccccctgggccacccagttcaccgccacagctgtgtcccagcctgctgccctgggcgtgcagcagcccagcctgctgggcgccagccccaccatctacacccagcagacagccctggccgctgctggcctgaccacccagaccccagccaactaccagctgacccagacagctgccctgcagcagcaggccgctgctgctgctgctgccctgcagcagctgcagcagccccagcagaccctgctgacccagcctgctgtggccctgcccaccagcctgagcctgagcaccccccagcccacagcccagatcaccgtgtcctaccccacccccaggagcagccagcagcagacccagccccagaagcagagggtcttcaccggggtggtgaccaagctgcatgacaccttcggctttgtggatgaagatgtgttcttccagctgtctgctgtgaagggcaagaccccccaggtgggggacagagtgctggtggaggccacctacaaccccaacatgcccttcaagtggaatgcccagaggatccagaccctgcccaaccagaaccagagccagacccagcccctgctgaagaccccacctgctgtgctgcagcccatcgccccccagaccacctttggagtgcagacccagccccagccccagagcctgctgcaggcccagatctctgctgccagcatcacccccctgctgcagacccagccccagcccctgctgcagcagccccagcagaaggccggcctgctgcagccccctgtgcgcatcgtgtcccagccccagcctgcccggcggctggacccccccagccgcttctctggaagaaatgacagaggagaccaggtgcccaacaggaaggatgacaggagccgggagcgggagcgggagcggcggcgcagccgggagaggagcccccagaggaagaggagccgggagaggagcccccggcgggagcgggagaggagcccccggcgggtgagaagagtggtgccccgctacacagtgcagttcagcaagttcagcctggactgccccagctgtgacatgatggagctgcggcggcgctaccagaacctgtacatccccagcgacttctttgatgcccagttcacctgggtggatgccttccccctgagccggcccttccagctgggcaactactgcaacttctacgtgatgcaccgggaggtggagagcctggagaagaacatggccatcctggaccccccagatgctgaccacctgtacagcgccaaggtgatgctgatggccagccccagcatggaggacctgtaccacaagagctgtgccctggccgaggacccccaggagctgagagatggcttccagcacccagcccggctggtgaagttcctggtgggcatgaagggcaaggatgaggccatggccatcggcggccactggagccccagcctggatggccctgaccctgagaaggaccccagcgtgctgatcaagacagccatccgctgctgcaaggccctgactggaattgacctgtctgtgtgcacccagtggtacagatttgctgagatccgctaccacaggcctgaggagacccacaagggccgcacagtgcctgcccacgtggagaccgtggtgctcttcttcccagatgtgtggcactgcctgcccaccaggtctgagtgggagaccctgagccggggctacaagcagcagctggtggagaagctgcagggcgagaggaaggaggctgatggagagcaggatgaggaggagaaggatgatggagaggccaaggagatcagcacccccacccactggagcaagctggaccccaagaccatgaaggtgaatgacctgaggaaggagctggagagccgggccctgagcagcaagggcctgaagagccagctgattgcccggctgaccaagcagctgaaggtggaggagcagaaggaggagcagaaggagctggagaagtctgagaaggaggaggatgaagatgatgacaggaagtcagaagatgacaaggaggaggaggagaggaagaggcaggaggagattgagcggcagaggcgggagcggcgctacatcctgcctgatgagcccgccatcatcgtgcaccccaactgggccgccaagagcggcaagtttgactgcagcatcatgagcctgtctgtgctgctggactaccgcctggaggacaacaaggagcacagctttgaggtgtccctgtttgctgagctgttcaatgagatgctgcagagggactttggagtgcgcatctacaagagcctgctgagcctgcctgagaaggaggacaagaaggagaaggacaagaagagcaagaaggatgagaggaaggacaagaaggaggagagagatgatgaaacagatgagcccaagcccaagaggaggaagtctggagatgacaaggacaagaaggaggacagagatgagaggaagaaggaggacaagaggaaggatgacagcaaggatgatgatgaaacagaggaggacaacaaccaggatgaatatgaccccatggaggccgaggaggccgaggatgaagaagatgacagagatgaggaggagatgaccaagagagatgacaagagggacatcaaccgctactgcaaggagcggcccagcaaggacaaggagaaggagaagacccagatgatcaccatcaacagagacctgctgatggcctttgtgtactttgaccagagccactgcggctacctgctggagaaggacctggaggagatcctgtacaccctgggcctgcacctgagccgggcccaggtgaagaagctgctgaacaaggtggtgctgcgggagagctgcttctacaggaagctgacagacaccagcaaggatgaggagaaccacgaggagagcgagagcctgcaggaggacatgctgggcaaccggctgctgctgcccacccccaccgtgaagcaggagagcaaggatgtggaggagaatgtgggcctcatcgtgtacaatggagccatggtggatgtgggcagcctgctgcagaagctggagaagtctgagaaggtgcgggcagaggtggagcagaagctgcagctgctggaggagaagacagatgaagatgagaagaccatcctgaacctggagaacagcaacaagagcctgtctggagagctgcgggaggtgaagaaggacctgagccagctgcaggagaacctgaagatcagcgagaacatgaacctgcagtttgagaaccagatgaacaagaccatccggaacctgagcacagtgatggatgagatccacacagtgctgaagaaggacaacgtgaagaatgaagacaaggaccagaagagcaaagaaaatggagcctctgtgtag

SEQ ID NO: 146988 - DNA, 360 bp, synthetic construct
  misc_feature 1..360: note = Description of Artificial Sequence: Synthetic coding sequence
  source 1..360: mol_type = other DNA
atggcccagtttggaggccagaagaaccccccctgggccacccagttcaccgccacagctgtgtcccagcctgctgccctgggcgtgcagcagcccagcctgctgggcgccagccccaccatctacacccagcagacagccctggccgctgctggcctgaccacccagaccccagccaactaccagctgacccagacagctgccctgcagcagcaggccgctgctgctgctgctgccctgcagcagcagtacagccagccccagcaggccctgtacagcgtgcagcagcagctgcagcagccccagcagaccctgctgacccagcctgctgtggccctgcccaccagcctgagcctgtag

SEQ ID NO: 146989 - DNA, 516 bp, synthetic construct
  misc_feature 1..516: note = Description of Artificial Sequence: Synthetic coding sequence
  source 1..516: mol_type = other DNA
atggcccagtttggaggccagaagaaccccccctgggccacccagttcaccgccacagctgtgtcccagcctgctgccctgggcgtgcagcagcccagcctgctgggcgccagccccaccatctacacccagcagacagccctggccgctgctggcctgaccacccagaccccagccaactaccagctgacccagacagctgccctgcagcagcaggccgctgctgctgctgctgccctgcagcagcagtacagccagccccagcaggccctgtacagcgtgcagcagcagctgcagcagccccagcagaccctgctgacccagcctgctgtggccctgcccaccagcctgagcctgagcaccccccagcccacagcccagatcaccgtgtcctaccccacccccaggagcagccagcagcagacccagccccagaagcagagggtcttcaccggggtggtgaccaagctgcatgacacctttggatttgtggatgaagatgtgttcttccagtag

SEQ ID NO: 146990 - DNA, 3132 bp, synthetic construct
  misc_feature 1..3132: note = Description of Artificial Sequence: Synthetic coding sequence
  source 1..3132: mol_type = other DNA
atggcccagtttggaggccagaagaaccccccctgggccacccagttcaccgccacagctgtgtcccagcctgctgccctgggcgtgcagcagcccagcctgctgggcgccagccccaccatctacacccagcagacagccctggccgctgctggcctgaccacccagaccccagccaactaccagctgacccagacagctgccctgcagcagcaggccgctgctgctgctgctgccctgcagcagctgcagcagccccagcagaccctgctgacccagcctgctgtggccctgcccaccagcctgagcctgagcaccccccagcccacagcccagatcaccgtgtcctaccccacccccaggagcagccagcagcagacccagccccagaagcagagggtcttcaccggggtggtgaccaagctgcatgacaccttcggctttgtggatgaagatgtgttcttccagctgtctgctgtgaagggcaagaccccccaggtgggggacagagtgctggtggaggccacctacaaccccaacatgcccttcaagtggaatgcccagaggatccagaccctgcccaaccagaaccagagccagacccagcccctgctgaagaccccacctgctgtgctgcagcccatcgccccccagaccacctttggagtgcagacccagccccagccccagagcctgctgcaggcccagatctctgctgccagcatcacccccctgctgcagacccagccccagcccctgctgcagcagccccagcagaaggccggcctgctgcagccccctgtgcgcatcgtgtcccagccccagcctgcccggcggctggacccccccagccgcttctctggaagaaatgacagaggagaccaggtgcccaacaggaaggatgacaggagccgggagcgggagcgggagcggcggcgcagccgggagaggagcccccagaggaagaggagccgggagaggagcccccggcgggagcgggagaggagcccccggcgggtgagaagagtggtgccccgctacacagtgcagttcagcaagttcagcctggactgccccagctgtgacatgatggagctgcggcggcgctaccagaacctgtacatccccagcgacttctttgatgcccagttcacctgggtggatgccttccccctgagccggcccttccagctgggcaactactgcaacttctacgtgatgcaccgggaggtggagagcctggagaagaacatggccatcctggaccccccagatgctgaccacctgtacagcgccaaggtgatgctgatggccagccccagcatggaggacctgtaccacaagagctgtgccctggccgaggacccccaggagctgagagatggcttccagcacccagcccggctggtgaagttcctggtgggcatgaagggcaaggatgaggccatggccatcggcggccactggagccccagcctggatggccctgaccctgagaaggaccccagcgtgctgatcaagacagccatccgctgctgcaaggccctgactggaattgacctgtctgtgtgcacccagtggtacagatttgctgagatccgctaccacaggcctgaggagacccacaagggccgcacagtgcctgcccacgtggagaccgtggtgctcttcttcccagatgtgtggcactgcctgcccaccaggtctgagtgggagaccctgagccggggctacaagcagcagctggtggagaagctgcagggcgagaggaaggaggctgatggagagcaggatgaggaggagaaggatgatggagaggccaaggagatcagcacccccacccactggagcaagctggaccccaagaccatgaaggtgaatgacctgaggaaggagctggagagccgggccctgagcagcaagggcctgaagagccagctgattgcccggctgaccaagcagctgaaggtggaggagcagaaggaggagcagaaggagctggagaagtctgagaaggaggaggatgaagatgatgacaggaagtcagaagatgacaaggaggaggaggagaggaagaggcaggaggagattgagcggcagaggcgggagcggcgctacatcctgcctgatgagcccgccatcatcgtgcaccccaactgggccgccaagagcggcaagtttgactgcagcatcatgagcctgtctgtgctgctggactaccgcctggaggacaacaaggagcacagctttgaggtgtccctgtttgctgagctgttcaatgagatgctgcagagggactttggagtgcgcatctacaagagcctgctgagcctgcctgagaaggaggacaagaaggagaaggacaagaagagcaagaaggatgagaggaaggacaagaaggaggagagagatgatgaaacagatgagcccaagcccaagaggaggaagtctggagatgacaaggacaagaaggaggacagagatgagaggaagaaggaggacaagaggaaggatgacagcaaggatgatgatgaaacagaggaggacaacaaccaggatgaatatgaccccatggaggccgaggaggccgaggatgaagaagatgacagagatgaggaggagatgaccaagagagatgacaagagggacatcaaccgctactgcaaggagcggcccagcaaggacaaggagaaggagaagacccagatgatcaccatcaacagagacctgctgatggcctttgtgtactttgaccagagccactgcggctacctgctggagaaggacctggaggagatcctgtacaccctgggcctgcacctgagccgggcccaggtgaagaagctgctgaacaaggtggtgctgcgggagagctgcttctacaggaagctgacagacaccagcaaggatgaggagaaccacgaggagagcgagagcctgcaggaggacatgctgggcaaccggctgctgctgcccacccccaccgtgaagcaggagagcaaggatgtggaggagaatgtgggcctcatcgtgtacaatggagccatggtggatgtgggcagcctgctgcagaagctggagaagtctgagaaggtgcgggcagaggtggagcagaagctgcagctgctgtag

SEQ ID NO: 146991 - DNA, 726 bp, synthetic construct
  misc_feature 1..726: note = Description of Artificial Sequence: Synthetic coding sequence
  source 1..726: mol_type = other DNA
atgtttgcccggggcctgaagaggaaatgtgtgggccatgaagaagatgtggagggcgccctggccggcctgaagacagtgtcctcctacagcctgcagaggcagagcctgctggacatgagcctggtgaagctgcagctgtgccacatgctggtggagcccaacctgtgccgctctgtgctgattgccaacacagtgcggcagatccaggaggagatgacccaggacggcacctggaggacagtggccccccaggccgctgagcgggcccccctggaccggctggtgtccacagagatcctgtgccgggccgcctggggccaggagggcgcccacccagcccctggcctgggagatggccacacccagggccctgtgtctgacctgtgccctgtgaccagcgcccaggcccccaggcacctgcagagcagcgcctgggagatggatggccccagagaaaatagaggcagcttccacaagagcctggaccagatctttgagaccctggagaccaagaaccccagctgcatggaggagctgttcagtgatgtggacagcccctactatgacctggacacagtgctgaccggcatgatgggcggggcccggcccggcccctgtgagggcctggagggcctggccccagccaccccaggccccagcagcagctgcaagagtgacctgggggagctggaccacgtggtggagatcctggtggagacctag

SEQ ID NO: 146992 - DNA, 726 bp, synthetic construct; identical to SEQ ID NO: 146991
  misc_feature 1..726: note = Description of Artificial Sequence: Synthetic coding sequence
  source 1..726: mol_type = other DNA

SEQ ID NO: 146993 - DNA, 759 bp, synthetic construct
  misc_feature 1..759: note = Description of Artificial Sequence: Synthetic coding sequence
  source 1..759: mol_type = other DNA
atgagcggccgccgcaccaggtctgggggcgccgcccagaggagcggcccccgggcccccagccccaccaagcccctgcggcgcagccagaggaagagcggcagcgagctgcccagcatcctgcctgagatctggcccaagacccccagcgctgctgctgtgaggaagcccatcgtgctgaagagaattgtggcccatgctgtggaggtgcctgctgtgcagagccccaggaggagcccccgcatctccttcttcctggagaaggaaaatgagcccccaggccgggagctgaccaaggaggacctcttcaagacccacagcgtgcctgccacccccaccagcacccctgtgcccaaccctgaggccgagagcagcagcaaggagggggagctggatgcccgggacctggagatgagcaagaaggtgagaagaagctacagccggctggagaccctgggcagcgccagcaccagcaccccaggccgccgcagctgcttcggctttgagggcctgctgggcgctgaggacctgagcggcgtgtcccctgtggtgtgcagcaagctgacagaggtgccccgggtgtgtgccaagccctgggccccagacatgaccctgcccggcatcagccccccacctgagaagcagaagaggaagaagaagaagatgcctgagatcctgaagacagagctggatgagtgggccgccgccatgaatgctgagtttgaagctgctgagcagtttgacctgctggtggagtag

SEQ ID NO: 146994 - DNA, 216 bp, synthetic construct
  misc_feature 1..216: note = Description of Artificial Sequence: Synthetic coding sequence
  source 1..216: mol_type = other DNA
cagttcctggaccaggaggactggggcccccagaggaccagcaaggagatccggcagctgcagaatgactgcatgaggctgcgggagagcctgaacaccacccaggtgcacaacctggccctgggggagaagctgcagaacctgcccaccctgctgtacaagagcctgaaggagggcgcccaggccatccaggaggaggcccaggccatccagtag

SEQ ID NO: 146995 - DNA, 1353 bp, synthetic construct
  misc_feature 1..1353: note = Description of Artificial Sequence: Synthetic coding sequence
  source 1..1353: mol_type = other DNA
atggatgcccggcgggtgccccagaaggacctgcgggtgaagaagaacctgaagaagttccgctacgtgaagctgatctccatggagaccagcagcagcagtgatgacagctgtgacagctttgccagtgacaactttgccaacaccaagcccaagttcagaagtgacatcagcgaggagctggccaacgtgttctatgaagattctgacaatgaaagcttctgtggcttcagcgagagcgaggtgcaggatgtgctggaccactgcggcttcctgcagaagcccaggccagatgtgaccaatgagctggccggcatcttccacgccgacagtgatgatgagagcttctgtggcttcagcgagagcgagatccaggacggcatgaggctgcagagcgtgcgggagggctgcaggaccaggagccagtgccgccacagcggccccctgcgggtggccatgaagtttcctgcccggagcaccaggggggccaccaacaagaaggccgagagccggcagcccagtgaaaattctgtgacagacagcaacagcgacagtgaagatgaaagtggcatgaacttcctggagaagagggccctgaacatcaagcagaacaaggccatgctggccaagctgatgtctgagctggagagcttccctggcagcttccggggccgccaccccctgcccggcagtgacagccagagccggcggcccaggaggaggaccttccctggggtggccagcagaagaaatcctgagcggcgggcccggcccctgaccaggagccgcagccgcatcctgggcagcctggatgccctgcccatggaggaggaggaggaggaggacaagtacatgctggtgaggaagaggaagacagtggatggctacatgaatgaagatgacctgcccaggagccgccgcagccgcagctctgtgaccctgccccacatcatccggcctgtggaggagatcacagaggaggagctggagaatgtgtgcagcaacagccgggagaagatctacaacagaagcctgggcagcacctgccaccagtgccggcagaagaccatcgacaccaagaccaactgcaggaacccagactgctggggcgtgcggggccagttctgtggcccctgcctgaggaaccgctacggggaggaggtgagagatgccctgctggaccccaactggcactgccccccctgccggggcatctgcaactgcagcttctgccggcagagagatggccgctgtgccaccggggtgctggtgtacctggccaagtaccacggctttggaaatgtgcacgcctacctgaagagcctgaagcaggagtttgagatgcaggcctag

SEQ ID NO: 146996 - DNA, 1116 bp, synthetic construct
  misc_feature 1..1116: note = Description of Artificial Sequence: Synthetic coding sequence
  source 1..1116: mol_type = other DNA
atggatgcccggcgggtgccccagaaggacctgcgggtgaagaagaacctgaagaagttccgctacgtgaagctgatctccatggagaccagcagcagcagtgatgacagctgtgacagctttgccagtgacaactttgccaacacccggctgcagagcgtgcgggagggctgcaggaccaggagccagtgccgccacagcggccccctgcgggtggccatgaagtttcctgcccggagcaccaggggggccaccaacaagaaggccgagagccggcagcccagcgagaacagcgtgacagacagcaacagcgacagtgaagatgagagcggcatgaacttcctggagaagagggccctgaacatcaagcagaacaaggccatgctggccaagctgatgtctgagctggagagcttccctggcagcttccggggccgccaccccctgcccggcagtgacagccagagcagaagacccaggaggaggaccttccctggggtggccagcagaagaaatcctgagcggcgggcccggcccctgaccaggagccgcagccgcatcctgggcagcctggatgccctgcccatggaggaggaggaggaggaggacaagtacatgctggtgaggaagaggaagacagtggatggctacatgaatgaagatgacctgcccaggagcagaagaagccgcagctctgtgaccctgccccacatcatccggcctgtggaggagatcacagaggaggagctggagaatgtgtgcagcaacagccgggagaagatctacaacagaagcctgggcagcacctgccaccagtgccggcagaagaccatcgacaccaagaccaactgcagaaatccagactgctggggcgtgcggggccagttctgtggcccctgcctgaggaacagatatggagaggaggtgagagatgccctgctggaccccaactggcactgccccccctgccggggcatctgcaactgcagcttctgccggcagagagatggccgctgtgccactggagtgctggtgtacctggccaagtaccacggctttggaaatgtgcacgcctacctgaagagcctgaagcaggagtttgagatgcaggcctag

SEQ ID NO: 146997 - DNA, 966 bp, synthetic construct
  misc_feature 1..966: note = Description of Artificial Sequence: Synthetic coding sequence
  source 1..966: mol_type = other DNA
atggatgcccggcgggtgccccagaaggacctgcgggtgaagaagaacctgaagaagttccgctacgtgaagctgatctccatggagaccagcagcagcagtgatgacagctgtgacagctttgccagtgacaactttgccaacacccggctgcagagcgtgcgggagggctgcaggaccaggagccagtgccgccacagcggccccctgcgggtggccatgaagtttcctgcccggagcaccaggggggccaccaacaagaaggccgagagccggcagcccagcgagaacagcgtgacagacagcaacagcgacagtgaagatgagagcggcatgaacttcctggagaagagggccctgaacatcaagcagaacaaggccatgctggccaagctgatgtctgagctggagagcttccctggcagcttccggggccgccaccccctgcccggcagtgacagccagagcagaagacccaggaggaggaccttccctggggtggccagcagaagaaatcctgagcggcgggcccggcccctgaccaggagccgcagccgcatcctgggcagcctggatgccctgcccatggaggaggaggaggaggaggacaagtacatgctggtgaggaagaggaagacagtggatggctacatgaatgaagatgacctgcccaggagcagaagaagccgcagctctgtgaccctgccccacatcatccggcctgtggaggagatcacagaggaggagctggagaatgtgtgcagcaacagccgggagaagatctacaacagaagcctgaactggcactgccccccctgccggggcatctgcaactgcagcttctgccggcagagagatggccgctgtgccactggagtgctggtgtacctggccaagtaccacggctttggaaatgtgcacgcctacctgaagagcctgaagcaggagtttgagatgcaggcctag

SEQ ID NO: 146998 - DNA, 1263 bp, synthetic construct
  misc_feature 1..1263: note = Description of Artificial Sequence: Synthetic coding sequence
  source 1..1263: mol_type = other DNA
atggagaccctgagcagcgaggagagctgtgacagctttgacagcctggagagcggcaagcagcaggatgtgcgcttccacagcaagtacttcacagaggagctgcggcgcatcttcatcgaggacacagattctgaaacagaggactttgctggcttcacccagagcgacctgaatggcaagaccaaccctgaggtgatggtggtggagagtgacctgagtgatgatggcaaggccagcctggtgtctgaggaggaggaggatgaggaggaggacaaggccaccccaagaagaagccgcagccgccgcagcagcatcggcctgcgggtggccttccagttccccaccaagaagctggccaacaagccagacaagaacagcagcagcgagcagctgttcagcagcgcccggctgcagaatgagaagaagaccatcctggagaggaagaaggactgccggcaggtgatccagcgggaggacagcaccagcgagagtgaagatgacagcagagatgagagccaggagagcagtgatgccctgctgaagaggaccatgaacatcaaggagaacaaggccatgctggcccagctgctggccgagctgaacagcatgccagacttcttccctgtgaggacccccaccagcgccagcaggaagaagacagtgagaagagccttcagcgagggccagatcaccaggaggatgaaccccaccaggtctgcccggcccccagagaagtttgccctggagaacttcaccgtgtctgctgccaagtttgctgaggagttctacagcttcagaagaaggaagaccatcggcggcaaatgtcgggagtacagaagaagacaccgcatcagcagcttccggcctgtggaggacatcacagaggaggacctggagaatgtggccatcaccgtgcgggacaagatctatgacaaggtgctgggcaacacctgccaccagtgccggcagaagaccatcgacaccaagacagtgtgcaggaaccagggctgctgcggcgtgcggggccagttctgtggcccctgcctgaggaaccgctacggggaggatgtgcgcagcgccctgctggaccctgactgggtgtgccccccctgccggggcatctgcaactgcagctactgcaggaagagagatggccgctgtgccaccggcatcctgatccacctggccaagttctacggctatgacaacgtgaaggagtacctggagagcctgcagaaggagctggtggaggacaactag

SEQ ID NO: 146999 - DNA, 1227 bp, synthetic construct
  misc_feature 1..1227: note = Description of Artificial Sequence: Synthetic coding sequence
  source 1..1227: mol_type = other DNA
atggagctggccacccgctaccagatccccaaggaggtggccgacatcttcaatgcccccagtgatgatgaggagtttgtgggcttcagagatgatgtgcccatggagaccctgagcagcgaggagagctgtgacagctttgacagcctggagagcggcaagcaggtggtggagagtgacctgagtgatgatggcaaggccagcctggtgtctgaggaggaggaggatgaggaggaggacaaggccaccccaagaagaagccgcagccgccgcagcagcatcggcctgcgggtggccttccagttccccaccaagaagctggccaacaagccagacaagaacagcagcagcgagcagctgttcagcagcgcccggctgcagaatgagaagaagaccatcctggagaggaagaaggactgccggcaggtgatccagcgggaggacagcaccagcgagagtgaagatgacagcagagatgagagccaggagagcagtgatgccctgctgaagaggaccatgaacatcaaggagaacaaggccatgctggcccagctgctggccgagctgaacagcatgccagacttcttccctgtgaggacccccaccagcgccagcaggaagaagacagtgagaagagccttcagcgagggccagatcaccaggaggatgaaccccaccaggtctgcccggcccccagagaagtttgccctggagaacttcaccgtgtctgctgccaagtttgctgaggagttctacagcttcagaagaaggaagaccatcggcggcaaatgtcgggagtacagaagaagacaccgcatcagcagcttccggcctgtggaggacatcacagaggaggacctggagaatgtggccatcaccgtgcgggacaagatctatgacaaggtgctgggcaacacctgccaccagtgccggcagaagaccatcgacaccaagacagtgtgcaggaaccagggctgctgcggcgtgcggggccagttctgtggcccctgcctgaggaaccgctacggggaggatgtgcgcagcgccctgctggaccctgactgggtgtgccccccctgccggggcatctgcaactgcagctactgcaggaagagagatggccgctgtgccaccggcatcctgatccacctggccaagttctacggctatgacaacgtgaaggagtacctggagagcctgcagaaggagctggtggaggacaactag

SEQ ID NO: 147000 - DNA, 1365 bp, synthetic construct
  misc_feature 1..1365: note = Description of Artificial Sequence: Synthetic coding sequence
  source 1..1365: mol_type = other DNA
atggagctggccacccgctaccagatccccaaggaggtggccgacatcttcaatgcccccagtgatgatgaggagtttgtgggcttcagagatgatgtgcccatggagaccctgagcagcgaggagagctgtgacagctttgacagcctggagagcggcaagcagcaggatgtgcgcttccacagcaagtacttcacagaggagctgcggcgcatcttcatcgaggacacagattctgaaacagaggactttgctggcttcacccagagcgacctgaatggcaagaccaaccctgaggtgatggtggtggagagtgacctgagtgatgatggcaaggccagcctggtgtctgaggaggaggaggatgaggaggaggacaaggccaccccaagaagaagccgcagccgccgcagcagcatcggcctgcgggtggccttccagttccccaccaagaagctggccaacaagccagacaagaacagcagcagcgagcagctgttcagcagcgcccggctgcagaatgagaagaagaccatcctggagaggaagaaggactgccggcaggtgatccagcgggaggacagcaccagcgagagtgaagatgacagcagagatgagagccaggagagcagtgatgccctgctgaagaggaccatgaacatcaaggagaacaaggccatgctggcccagctgctggccgagctgaacagcatgccagacttcttccctgtgaggacccccaccagcgccagcaggaagaagacagtgagaagagccttcagcgagggccagatcaccaggaggatgaaccccaccaggtctgcccggcccccagagaagtttgccctggagaacttcaccgtgtctgctgccaagtttgctgaggagttctacagcttcagaagaaggaagaccatcggcggcaaatgtcgggagtacagaagaagacaccgcatcagcagcttccggcctgtggaggacatcacagaggaggacctggagaatgtggccatcaccgtgcgggacaagatctatgacaaggtgctgggcaacacctgccaccagtgccggcagaagaccatcgacaccaagacagtgtgcaggaaccagggctgctgcggcgtgcggggccagttctgtggcccctgcctgaggaaccgctacggggaggatgtgcgcagcgccctgctggaccctgactgggtgtgccccccctgccggggcatctgcaactgcagctactgcaggaagagagatggccgctgtgccaccggcatcctgatccacctggccaagttctacggctatgacaacgtgaaggagtacctggagagcctgcagaaggagctggtggaggacaactag

SEQ ID NO: 147001 - DNA, 291 bp, synthetic construct
  misc_feature 1..291: note = Description of Artificial Sequence: Synthetic coding sequence
  source 1..291: mol_type = other DNA
atggagaccctgagcagcgaggagagctgtgacagctttgacagcctggagagcggcaagcagcaggatgtgcgcttccacagcaagtacttcacagaggagctgcggcgcatcttcatcgaggacacagattctgaaacagaggactttgctggcttcacccagagcgacctgaatggcaagaccaaccctgaggtgatggtggtggagagtgacctgagtgatgatggcaaggccagcctggtgtctgaggaggaggaggatgaggaggaggacaaggccaccccctag

SEQ ID NO: 147002 - DNA, 843 bp, synthetic construct
  misc_feature 1..843: note = Description of Artificial Sequence: Synthetic coding sequence
  source 1..843: mol_type = other DNA
atggcccccaggaagggcagcagccgggtggccaagaccaacagcctgcggcggaggaagctggccagcttcctgaaggactttgaccgggaggtggagatccgcatcaagcagattgaaagtgaccggcagaacctgctgaaggaggtggacaacctgtacaacatcgagatcctgcggctgcccaaggccctgcgggagatgaactggctggactactttgccctgggcggcaacaagcaggccctggaggaggccgccacagctgacctggacatcacagagatcaacaagctgacagctgaggccatccagacccccctgaagagcgccaagaccaggaaggtgatccaggtggatgagatgattgtggaggaggaggaggaggaggagaatgaaaggaagaacctgcagacagcccgggtgaagcgctgcccccccagcaagaagaggacccagagcatccagggcaagggcaagggcaagaggagcagccgggccaacacagtgaccccagctgtgggccgcctggaggtgtccatggtgaagcccaccccaggcctgacccccaggtttgacagcagggtcttcaagaccccaggcctgcggaccccagctgctggggagcgcatctacaacatctctggaaatggcagccccctggccgacagcaaggagatcttcctgactgtgcctgtgggcggcggggagagcctgcggctgctggccagtgacctgcagaggcacagcatcgcccagctggaccctgaggccctgggcaacatcaagaagctgagcaaccggctggcccagatctgcagcagcatccgcacccacaagtag

SEQ ID NO: 147003 - DNA, 843 bp, synthetic construct; identical to SEQ ID NO: 147002
  misc_feature 1..843: note = Description of Artificial Sequence: Synthetic coding sequence
  source 1..843: mol_type = other DNA

SEQ ID NO: 147004 - DNA, 414 bp, synthetic construct
  misc_feature 1..414: note = Description of Artificial Sequence: Synthetic coding sequence
  source 1..414: mol_type = other DNA
atgcccaactttgctggcacctggaagatgaggagcagcgagaactttgatgagctgctgaaggccctgggcgtgaatgccatgctgaggaaggtggccgtggccgccgccagcaagccccacgtggagatccggcaggatggagaccagttctacatcaagaccagcaccaccgtgaggaccacagagatcaacttcaaggtgggggagggctttgaggaggagaccgtggatggcaggaaatgtcgcagcctggccacctgggagaatgaaaacaagatccactgcacccagaccctgctggagggagatggccccaagacctactggacccgggagctggccaatgatgagctgatcctgacctttggagcagatgatgtggtgtgcacccgcatctacgtgcgggagtag

SEQ ID NO: 147005 - DNA, 249 bp, synthetic construct
  misc_feature 1..249: note = Description of Artificial Sequence: Synthetic coding sequence
  source 1..249: mol_type = other DNA
atgcccaacttcagcggcaactggaagatcatccgctctgagaactttgaggagctgctgaaggtgctgggcgtgaatgtgatgctgaggaagattgctgtggccgccgccagcaagccagctgtggagatcaagcaggagggggacaccttctacatcaagaccagcaccaccgtgaggaccacagagatcaacttcaaggtgggggaggagtttgaggagcagacagtggatggccggccctgctag

SEQ ID NO: 147006 - DNA, 417 bp, synthetic construct
  misc_feature 1..417: note = Description of Artificial Sequence: Synthetic coding sequence
  source 1..417: mol_type = other DNA
atgcccaacttcagcggcaactggaagatcatccgctctgagaactttgaggagctgctgaaggtgctgggcgtgaatgtgatgctgaggaagattgctgtggccgccgccagcaagccagctgtggagatcaagcaggagggggacaccttctacatcaagaccagcaccaccgtgaggaccacagagatcaacttcaaggtgggggaggagtttgaggagcagacagtggatggccggccctgcaagagcctggtgaagtgggagagcgagaacaagatggtgtgtgagcagaagctgctgaagggggagggccccaagacctcctggacccgggagctgaccaatgatggagagctgatcctgaccatgacagcagatgatgtggtgtgcaccagggtgtatgtgcgggagtag

SEQ ID NO: 147007 - DNA, 417 bp, synthetic construct; identical to SEQ ID NO: 147006
  misc_feature 1..417: note = Description of Artificial Sequence: Synthetic coding sequence
  source 1..417: mol_type = other DNA

SEQ ID NO: 147008 - DNA, 744 bp, synthetic construct
  misc_feature 1..744: note = Description of Artificial Sequence: Synthetic coding sequence
  source 1..744: mol_type = other DNA
atgggcaccagcagcacagacagccagcaggccggccaccggcgctgcagcaccagcaacaccagcgctgagaacctgacctgcctgagcctgcccggcagccctgggaagacagcccccctgcccggccctgcccaggccggggccggccagcccctgcccaagggctgtgccgctgtgaaggccgaggtgggcatcccagccccccacaccagccaggaggtgcgcatccacatccggcggctgctgtcctgggccgcccctggggcctgtggcctgcggagcaccccctgtgccctgccccaggccctgccccaggcccggccctgccccggccgctggttcttccctggctgcagcctgcccactggaggagcccagaccatcctgagcctgtggacctggaggcacttcctgaactgggccctgcagcagcgggaggagaacagcggccgggcccggcgggtgccccctgtgcccaggacagcccctgtgtccaaaggagagggcagccaccccccccagaacagcaatggagagaaggtgaagaccatcaccccagatgtgggcctgcaccagagcctgaccagtgaccccaccgtggccgtgctgcgggccaagagggcccctgaggcccacccccccaggagctgcagcggcagcctgacagcccgggtgtgccacatgggcgtgtgccagggccagggcgacacagaagatggccgcatgaccctgatgggctag

SEQ ID NO: 147009 - DNA, 744 bp, synthetic construct; identical to SEQ ID NO: 147008
  misc_feature 1..744: note = Description of Artificial Sequence: Synthetic coding sequence
  source 1..744: mol_type = other DNA

SEQ ID NO: 147010 - DNA, 4218 bp, synthetic construct
  misc_feature 1..4218: note = Description of Artificial Sequence: Synthetic coding sequence
  source 1..4218: mol_type = other DNA
atggccgcccggagcccccccagcccccaccccagccccccagcccggcagctgggccccaggagcccccgggtgggcagaggagctgaggtgcacgccatgaggtctgaggccagcggctttgctggggccgcccgggaggtggtggctgatgaaagtgacaagatctgggtgggggaggagggcagcggcggccggcggggccctggaggagctgccccagcccacgcccccctgctgagcgcccccatgggcagccggcggctggagggcatctctgtggaggaggccatggtgaccaggacccagctgctggaggaggagctgagcagcctgaaggaggagctggccctgtgccaggccgacaaggagtttgtgtggagcctgtggaagaggctgcaggtgaccaacccagacctgacccaggtggtgtccctggtggtggagcgggagaagcagaagtctgaggccaaggacaggaaggtgctggagatcctgcaggtgaaggatgccaagatccaggagtttgagcagcgggagagcgtgctgaagcaggagatcaatgacctggtgaagaggaagattgctgtggatgaggagaatgccttcctgaggaaggagttcagtgacctggagaagaagttcaaggacaagagccaggagatcaaggacaccaaggaatgtgtgcagaacaaggaggagcagaaccggctggtgatcaagaacctggaggaggagaacaagaagctgagcacccgctgcacagacctgctgaatgacctggagaagctgaggaagcaggaggcccacctgaggaaggagaagtacagcacagatgccaagatcaagacctttgaggacaacctgattgaggccaggaaggaggtggaggtgtcccagagcaagtacaatgccctgagcctgcagctgagcaacaagcagacagagctgatccagaaggacatggacatcaccctggtgcggcaggagctgcaggagctgcagaacctgtacaagcagaacagcacccacacagcccagcaggccgagctgatccagcagctgcaggtgctgaacatggacacccagaaggtgctgaggaaccaggaggatgtgcacacagctgagagcatctcctaccagaagctgtacaatgagctgcacatctgctttgagaccaccaagagcaatgaggccatgctgcggcagagcgtgaccaacctgcaggaccagctgctgcagaaggagcaggagaatgccaagctgaaggagaagctgcaggagagccagggcgcccccctgcccctgccccaggagagtgaccctgactacagcgcccaggtgccccaccggcccagcctgagcagcctggagaccctgatggtgtcccagaagtcagaaattgagtacctgcaggagaagctgaagatcgccaatgagaagctgtctgagaacatcagcgccaacaagggcttcagcaggaagagcatcatgaccagcgctgagggcaagcacaaggagccccctgtgaagaggagccgcagcctgagccccaagagcagcttcacagattctgaggagctgcagaagctgaggaaggccgagaggaagattgagaacctggagaaggccctgcagctgaagagccaggagaatgatgagctgagagatgcccacgagaagaggaaggagcggctgcagatgctgcagaccaactacagagctgtgaaggagcagctgaagcagtgggaggagggcagcggcatgacagagatcaggaagatcaagagagctgacccccagcagctgcggcaggaggacagtgatgctgtgtggaatgagctggcctacttcaagcgggagaaccaggagctgatgatccagaagatgaacctggaggaggagctggatgagctgaaggtgcacatcagcattgacaaggccgccatccaggagctgaacagatgtgtggccgagcggcgggaggagcagctgttccgcagcggggaggatgatgaggtgaagaggagcaccccagagaagaatggcaaggagatgctggagcagaccctgcagaaggtgacagagctggagaaccggctgaagagctttgagaagaggagcaggaagctgaaggagggcaacaagaagctgatgaaggaaaatgacttcctgaagagcctgctgaagcagcagcaggaggacacagagacccgggagaaggagctggagcagatcatcaagggcagcaaggatgtggagaaggagaacacagagctgcaggtgaagatcagcgagctggagacagaggtgaccagcctgcggcggcaggtggccgaggccaatgccctgagaaatgaaaatgaggagctgatcaaccccatggagaagagccaccagagcgctgaccgggccaagtctgagatggccaccatgaaggtgcgcagcggccgctatgactgcaagaccaccatgaccaaggtgaagttcaaggccgccaagaagaactgcagcgtgggccgccaccacacagtgctgaaccacagcatcaaggtgatgagcaatgtgtttgagaacctgagcaaggatggctgggaggatgtgtctgagagcagcagtgacagcgaggcccagaccagccagaccctgggcaccatcatcgtggagaccagccagaagatcagccccacagaagatggcaaggaccagaaggagagtgaccccacagaggacagccagacccagggcaaggagatcgtgcagacctacctgaacattgatggcaagacccccaaggactacttccatgacaagaatgccaagaagcccaccttccagaagaagaactgcaagatgcagaagagcagccacacagctgtgcccaccagggtgaaccgggagaagtacaagaacatcacagcccagaagagcagcagcaacatcatcctgctgcgggagcgcatcatcagcctgcagcagcagaacagcgtgctgcagaatgccaagaagacagctgagctgtctgtgaaggagtacaaggaggtgaatgagaagctgctgcaccagcagcaggtgtctgaccagcgcttccagaccagccggcagaccatcaagaagctgaacctggacctggccggcctgaggaaggagaaggaggacctgctgaagaagctggagagcagcagcgagatcaccagcctggccgaggagaacagccaggtgaccttcccccgcatccaggtgaccagcctgagccccagccgctccatggacctggagatgaagcagctgcagtacaagctgaagaatgccaccaatgagctgaccaagcagagcagcaatgtgaagaccctgaagtttgagctgctggccaaggaggagcacatcaaggagatgcatgagaagatcagcaggatggagcgggacatcaccatgaagaggcacctgattgaggacctgaagttccggcagaaggtgaacctggagagcaacaagagcttcagcgagatgctgcagaacctggacaagaaggtgaagaccctgacagaggagtgcagcaacaagaaggtgtccattgacagcctgaagcagaggctgaatgtggccgtgaaggagaagagccagtatgagcagatgtaccagaagagcaaggaggagctggagaagaaggacctgaagctgaccctgctggtgagccgcatcagcgagacagaaagtgccatggccgagattgaaacagctgccagcaagcagctgcaggagctggccctgcagagcgagcaggtgctggagggcgcccagaagaccctgctgctggccaatgagaaggtggaggagttcaccacctttgtgaaggccctggccaaggagctgcagaatgatgtgcacgtggtgcggcggcagatccgggagctgaagaagatgaagaagaacagagatgcctgcaagaccagcacccacaaggcccagaccctggccgccagcatcctgaacatcagcagaagtgacctggaggagatcctggacacagaggaccaggtggagattgagaagaccaagattgatgctgaaaatgacaaggagtggatgctgtacatccagaagctgctggagggccagagcctggccctgagcccccggctgaagtgcaatggagccatcgtggcccaccagaacctgcggctgcctgacagcagcagcagcgccagcgccagctag

SEQ ID NO: 147011 - DNA, 1176 bp, synthetic construct
  misc_feature 1..1176: note = Description of Artificial Sequence: Synthetic coding sequence
  source 1..1176: mol_type = other DNA
atggccgcccggagcccccccagcccccaccccagccccccagcccggcagctgggccccaggagcccccgggtgggcagaggagctgaggtgcacgccatgaggtctgaggccagcggctttgctggggccgcccgggaggtggtggctgatgaaagtgacaagatctgggtgggggaggagggcagcggcggccggcggggccctggaggagctgccccagcccacgcccccctgctgagcgcccccatgggcagccggcggctggagggcatctctgtggaggaggccatggtgaccaggacccagctgctggaggaggagctgagcagcctgaaggaggagctggccctgtgccaggccgacaaggagtttgtgtggagcctgtggaagaggctgcaggtgaccaacccagacctgacccaggtggtgtccctggtggtggagcgggagaagcagaagtctgaggccaaggacaggaaggtgctggagatcctgcaggtgaaggatgccaagatccaggagtttgagcagcgggagagcgtgctgaagcaggagatcaatgacctggtgaagaggaagattgctgtggatgaggagaatgccttcctgaggaaggagttcagtgacctggagaagaagttcaaggacaagagccaggagatcaaggacaccaaggaatgtgtgcagaacaaggaggagcagaaccggctggtgatcaagaacctggaggaggagaacaagaagctgagcacccgctgcacagacctgctgaatgacctggagaagctgaggaagcaggaggcccacctgaggaaggagaagtacagcacagatgccaagatcaagacctttgaggacaacctgattgaggccaggaaggaggtggaggtgtcccagagcaagtacaatgccctgagcctgcagctgagcaacaagcagacagagctgatccagaaggacatggacatcaccctggtgaggaaggagctgcaggagctgcagaacctgtacaagcagaacagcacccacacagcccagcaggccgagctgatccagcagctgcaggtgctgaacatggacacccagaaggtgctgaggaaccaggaggatgtgcacacagctgagagcatctcctaccagaaggtgtgcttctacagcgtcatcaagatgtag

SEQ ID NO: 147012 - DNA, 4221 bp, synthetic construct
  misc_feature 1..4221: note = Description of Artificial Sequence: Synthetic coding sequence
  source 1..4221: mol_type = other DNA
atggccgcccggagcccccccagcccccaccccagccccccagcccggcagctgggccccaggagcccccgggtgggcagaggagctgaggtgcacgccatgaggtctgaggccagcggctttgctggggccgcccgggaggtggtggctgatgaaagtgacaagatctgggtgggggaggagggcagcggcggccggcggggccctggaggagctgccccagcccacgcccccctgctgagcgcccccatgggcagccggcggctggagggcatctctgtggaggaggccatggtgaccaggacccagctgctggaggaggagctgagcagcctgaaggaggagctggccctgtgccaggccgacaaggagtttgtgtggagcctgtggaagaggctgcaggtgaccaacccagacctgacccaggtggtgtccctggtggtggagcgggagaagcagaagtctgaggccaaggacaggaaggtgctggagatcctgcaggtgaaggatgccaagatccaggagtttgagcagcgggagagcgtgctgaagcaggagatcaatgacctggtgaagaggaagattgctgtggatgaggagaatgccttcctgaggaaggagttcagtgacctggagaagaagttcaaggacaagagccaggagatcaaggacaccaaggaatgtgtgcagaacaaggaggagcagaaccggctggtgatcaagaacctggaggaggagaacaagaagctgagcacccgctgcacagacctgctgaatgacctggagaagctgaggaagcaggaggcccacctgaggaaggagaagtacagcacagatgccaagatcaagacctttgaggacaacctgattgaggccaggaaggaggtggaggtgtcccagagcaagtacaatgccctgagcctgcagctgagcaacaagcagacagagctgatccagaaggacatggacatcaccctggtgaggaaggagctgcaggagctgcagaacctgtacaagcagaacagcacccacacagcccagcaggccgagctgatccagcagctgcaggtgctgaacatggacacccagaaggtgctgaggaaccaggaggatgtgcacacagctgagagcatctcctaccagaagctgtacaatgagctgcacatctgctttgagaccaccaagagcaatgaggccatgctgcggcagagcgtgaccaacctgcaggaccagctgctgcagaaggagcaggagaatgccaagctgaaggagaagctgcaggagagccagggcgcccccctgcccctgccccaggagagtgaccctgactacagcgcccaggtgccccaccggcccagcctgagcagcctggagaccctgatggtgtcccagaagtcagaaattgagtacctgcaggagaagctgaagatcgccaatgagaagctgtctgagaacatcagcgccaacaagggcttcagcaggaagagcatcatgaccagcgctgagggcaagcacaaggagccccctgtgaagaggagccgcagcctgagccccaagagcagcttcacagattctgaggagctgcagaagctgaggaaggccgagaggaagattgagaacctggagaaggccctgcagctgaagagccaggagaatgatgagctgagagatgcccacgagaagaggaaggagcggctgcagatgctgcagaccaactacagagctgtgaaggagcagctgaagcagtgggaggagggcagcggcatgacagagatcaggaagatcaagagagctgacccccagcagctgcggcaggaggacagtgatgctgtgtggaatgagctggcctacttcaagcgggagaaccaggagctgatgatccagaagatgaacctggaggaggagctggatgagctgaaggtgcacatcagcattgacaaggccgccatccaggagctgaacagatgtgtggccgagcggcgggaggagcagctgttccgcagcggggaggatgatgaggtgaagaggagcaccccagagaagaatggcaaggagatgctggagcagaccctgcagaaggtgacagagctggagaaccggctgaagagctttgagaagaggagcaggaagctgaaggagggcaacaagaagctgatgaaggaaaatgacttcctgaagagcctgctgaagcagcagcaggaggacacagagacccgggagaaggagctggagcagatcatcaagggcagcaaggatgtggagaaggagaacacagagctgcaggtgaagatcagcgagctggagacagaggtgaccagcctgcggcggcaggtggccgaggccaatgccctgagaaatgaaaatgaggagctgatcaaccccatggagaagagccaccagagcgctgaccgggccaagtctgagatggccaccatgaaggtgcgcagcggccgctatgactgcaagaccaccatgaccaaggtgaagttcaaggccgccaagaagaactgcagcgtgggccgccaccacacagtgctgaaccacagcatcaaggtgatgagcaatgtgtttgagaacctgagcaaggatggctgggaggatgtgtctgagagcagcagtgacagcgaggcccagaccagccagaccctgggcaccatcatcgtggagaccagccagaagatcagccccacagaagatggcaaggaccagaaggagagtgaccccacagaggacagccagacccagggcaaggagatcgtgcagacctacctgaacattgatggcaagacccccaaggactacttccatgacaagaatgccaagaagcccaccttccagaagaagaactgcaagatgcagaagagcagccacacagctgtgcccaccagggtgaaccgggagaagtacaagaacatcacagcccagaagagcagcagcaacatcatcctgctgcgggagcgcatcatcagcctgcagcagcagaacagcgtgctgcagaatgccaagaagacagctgagctgtctgtgaaggagtacaaggaggtgaatgagaagctgctgcaccagcagcaggtgtctgaccagcgcttccagaccagccggcagaccatcaagaagctgaacctggacctggccggcctgaggaaggagaaggaggacctgctgaagaagctggagagcagcagcgagatcaccagcctggccgaggagaacagccaggtgaccttcccccgcatccaggtgaccagcctgagccccagccgctccatggacctggagatgaagcagctgcagtacaagctgaagaatgccaccaatgagctgaccaagcagagcagcaatgtgaagaccctgaagtttgagctgctggccaaggaggagcacatcaaggagatgcatgagaagatcagcaggatggagcgggacatcaccatgaagaggcacctgattgaggacctgaagttccggcagaaggtgaacctggagagcaacaagagcttcagcgagatgctgcagaacctggacaagaaggtgaagaccctgacagaggagtgcagcaacaagaaggtgtccattgacagcctgaagcagaggctgaatgtggccgtgaaggagaagagccagtatgagcagatgtaccagaagagcaaggaggagctggagaagaaggacctgaagctgaccctgctggtgagccgcatcagcgagacagaaagtgccatggccgagattgaaacagctgccagcaagcagctgcaggagctggccctgcagagcgagcaggtgctggagggcgcccagaagaccctgctgctggccaatgagaaggtggaggagttcaccacctttgtgaaggccctggccaaggagctgcagaatgatgtgcacgtggtgcggcggcagatccgggagctgaagaagatgaagaagaacagagatgcctgcaagaccagcacccacaaggcccagaccctggccgccagcatcctgaacatcagcagaagtgacctggaggagatcctggacacagaggaccaggtggagattgagaagaccaagattgatgctgaaaatgacaaggagtggatgctgtacatccagaagctgctggagggccagctgccctttgccagctacctgctggaggccgtgctggagaagatcaatgagaagaagaagctggtggagggctacttcaccatcatgaaggacatcagatag

SEQ ID NO: 147013 - DNA, 4221 bp, synthetic construct
  misc_feature 1..4221: note = Description of Artificial Sequence: Synthetic coding sequence
  source 1..4221: mol_type = other DNA
atggccgcccggagcccccccagcccccaccccagccccccagcccggcagctgggccccaggagcccccgggtgggcagaggagctgaggtgcacgccatgaggtctgaggccagcggctttgctggggccgcccgggaggtggtggctgatgaaagtgacaagatctgggtgggggaggagggcagcggcggccggcggggccctggaggagctgccccagcccacgcccccctgctgagcgcccccatgggcagccggcggctggagggcatctctgtggaggaggccatggtgaccaggacccagctgctggaggaggagctgagcagcctgaaggaggagctggccctgtgccaggccgacaaggagtttgtgtggagcctgtggaagaggctgcaggtgaccaacccagacctgacccaggtggtgtccctggtggtggagcgggagaagcagaagtctgaggccaaggacaggaaggtgctggagatcctgcaggtgaaggatgccaagatccaggagtttgagcagcgggagagcgtgctgaagcaggagatcaatgacctggtgaagaggaagattgctgtggatgaggagaatgccttcctgaggaaggagttcagtgacctggagaagaagttcaaggacaagagccaggagatcaaggacaccaaggaatgtgtgcagaacaaggaggagcagaaccggctggtgatcaagaacctggaggaggagaacaagaagctgagcacccgctgcacagacctgctgaatgacctggagaagctgaggaagcaggaggcccacctgaggaaggagaagtacagcacagatgccaagatcaagacctttgaggacaacctgattgaggccaggaaggaggtggaggtgtcccagagcaagtacaatgccctgagcctgcagctgagcaacaagcagacagagctgatccagaaggacatggacatcaccctggtgcggcaggagctgcaggagctgcagaacctgtacaagcagaacagcacccacacagcccagcaggccgagctgatccagcagctgcaggtgctgaacatggacacccagaaggtgctgaggaaccaggaggatgtgcacacagctgagagcatctcctaccagaagctgtacaatgagctgcacatctgctttgagaccaccaagagcaatgaggccatgctgcggcagagcgtgaccaacctgcaggaccagctgctgcagaaggagcaggagaatgccaagctgaaggagaagctgcaggagagccagggcgcccccctgcccctgccccaggagagtgaccctgactacagcgcccaggtgccccaccggcccagcctgagcagcctggagaccctgatggtgtcccagaagtcagaaattgagtacctgcaggagaagctgaagatcgccaatgagaagctgtctgagaacatcagcgccaacaagggcttcagcaggaagagcatcatgaccagcgctgagggcaagcacaaggagccccctgtgaagaggagccgcagcctgagccccaagagcagcttcacagattctgaggagctgcagaagctgaggaaggccgagaggaagattgagaacctggagaaggccctgcagctgaagagccaggagaatgatgagctgagagatgcccacgagaagaggaaggagcggctgcagatgctgcagaccaactacagagctgtgaaggagcagctgaagcagtgggaggagggcagcggcatgacagagatcaggaagatcaagagagctgacccccagcagctgcggcaggaggacagtgatgctgtgtggaatgagctggcctacttcaagcgggagaaccaggagctgatgatccagaagatgaacctggaggaggagctggatgagctgaaggtgcacatcagcattgacaaggccgccatccaggagctgaacagatgtgtggccgagcggcgggaggagcagctgttccgcagcggggaggatgatgaggtgaagaggagcaccccagagaagaatggcaaggagatgctggagcagaccctgcagaaggtgacagagctggagaaccggctgaagagctttgagaagaggagcaggaagctgaaggagggcaacaagaagctgatgaaggaaaatgacttcctgaagagcctgctgaagcagcagcaggaggacacagagacccgggagaaggagctggagcagatcatcaagggcagcaaggatgtggagaaggagaacacagagctgcaggtgaagatcagcgagctggagacagaggtgaccagcctgcggcggcaggtggccgaggccaatgccctgagaaatgaaaatgaggagctgatcaaccccatggagaagagccaccagagcgctgaccgggccaagtctgagatggccaccatgaaggtgcgcagcggccgctatgactgcaagaccaccatgaccaaggtgaagttcaaggccgccaagaagaactgcagcgtgggccgccaccacacagtgctgaaccacagcatcaaggtgatgagcaatgtgtttgagaacctgagcaaggatggctgggaggatgtgtctgagagcagcagtgacagcgaggcccagaccagccagaccctgggcaccatcatcgtggagaccagccagaagatcagccccacagaagatggcaaggaccagaaggagagtgaccccacagaggacagccagacccagggcaaggagatcgtgcagacctacctgaacattgatggcaagacccccaaggactacttccatgacaagaatgccaagaagcccaccttccagaagaagaactgcaagatgcagaagagcagccacacagctgtgcccaccagggtgaaccgggagaagtacaagaacatcacagcccagaagagcagcagcaacatcatcctgctgcgggagcgcatcatcagcctgcagcagcagaacagcgtgctgcagaatgccaagaagacagctgagctgtctgtgaaggagtacaaggaggtgaatgagaagctgctgcaccagcagcaggtgtctgaccagcgcttccagaccagccggcagaccatcaagaagctgaacctggacctggccggcctgaggaaggagaaggaggacctgctgaagaagctggagagcagcagcgagatcaccagcctggccgaggagaacagccaggtgaccttcccccgcatccaggtgaccagcctgagccccagccgctccatggacctggagatgaagcagctgcagtacaagctgaagaatgccaccaatgagctgaccaagcagagcagcaatgtgaagaccctgaagtttgagctgctggccaaggaggagcacatcaaggagatgcatgagaagatcagcaggatggagcgggacatcaccatgaagaggcacctgattgaggacctgaagttccggcagaaggtgaacctggagagcaacaagagcttcagcgagatgctgcagaacctggacaagaaggtgaagaccctgacagaggagtgcagcaacaagaaggtgtccattgacagcctgaagcagaggctgaatgtggccgtgaaggagaagagccagtatgagcagatgtaccagaagagcaaggaggagctggagaagaaggacctgaagctgaccctgctggtgagccgcatcagcgagacagaaagtgccatggccgagattgaaacagctgccagcaagcagctgcaggagctggccctgcagagcgagcaggtgctggagggcgcccagaagaccctgctgctggccaatgagaaggtggaggagttcaccacctttgtgaaggccctggccaaggagctgcagaatgatgtgcacgtggtgcggcggcagatccgggagctgaagaagatgaagaagaacagagatgcctgcaagaccagcacccacaaggcccagaccctggccgccagcatcctgaacatcagcagaagtgacctggaggagatcctggacacagaggaccaggtggagattgagaagaccaagattgatgctgaaaatgacaaggagtggatgctgtacatccagaagctgctggagggccagctgccctttgccagctacctgctggaggccgtgctggagaagatcaatgagaagaagaagctggtggagggctacttcaccatcatgaaggacatcagatag

SEQ ID NO: 147014 - DNA, 519 bp, synthetic construct
  misc_feature 1..519: note = Description of Artificial Sequence: Synthetic coding sequence
  source 1..519: mol_type = other DNA
atggccagcggcttcaagaagcccagcgctgccagcacaggccagaagaggaaggtggcccccaagccagagctgacagaggaccagaagcaggaggtgcgggaggcctttgacctgtttgatgtggatggcagcggcaccattgatgccaaggagctgaaggtggccatgagggccctgggctttgagcccaggaaggaggagatgaagaagatgatcagcgaggtggaccgggagggcaccgggaagatctccttcaatgacttcctggccgtgatgacccagaagatgtctgagaaggacaccaaggaggagatcctgaaggccttccggctgtttgatgatgatgagaccgggaagatctccttcaagaacctgaagagggtggccaatgagctgggggagaacctgacagatgaggagctgcaggagatgattgatgaagctgacagagatggagatggagaggtgaatgaggaggagttcctgcgcatcatgaagaagaccagcctgtactag

SEQ ID NO: 147015 - DNA, 519 bp, synthetic construct
  misc_feature 1..519: note = Description of Artificial Sequence: Synthetic coding sequence
  source 1..519: mol_type = other DNA
atggccagcaacttcaagaaggccaacatggccagcagcagccagaggaagaggatgagccccaagccagagctgacagaggagcagaagcaggagatccgggaggcctttgacctgtttgatgctgatggcaccggcaccattgatgtgaaggagctgaaggtggccatgagggccctgggctttgagcccaagaaggaggagatcaagaagatgatcagcgagattgacaaggagggcaccgggaagatgaactttggagacttcctgactgtgatgacccagaagatgtctgagaaggacaccaaggaggagatcctgaaggccttcaagctgtttgatgatgatgagaccgggaagatctccttcaagaacctgaagagggtggccaaggagctgggggagaacctgacagatgaggagctgcaggagatgattgatgaagctgacagagatggagatggagaggtgtctgagcaggagttcctgcgcatcatgaagaagaccagcctgtactag

SEQ ID NO: 147016 - DNA, 378 bp, synthetic construct
  misc_feature 1..378: note = Description of Artificial Sequence: Synthetic coding sequence
  source 1..378: mol_type = other DNA
atggccatgcaggccgccaagagggccaacatccggctgcccccagaggtgaaccgcatcctgtacatccggaacctgccctacaagatcacagctgaggagatgtatgacatctttgggaagtatggccccatccggcagatccgggtgggcaacaccccagagacccggggcacagcctacgtggtgtatgaggacatctttgatgccaagaatgcctgtgaccacctgagcggcttcaacgtgtgcaaccgctacctggtggtgctgtactacaatgccaacagagccttccagaagatggacaccaagaagaaggaggagcagctgaagctgctgaaggagaagtatggcatcaacacagatcctcccaagtag

SEQ ID NO: 147017 - DNA, 423 bp, synthetic construct
  misc_feature 1..423: note = Description of Artificial Sequence: Synthetic coding sequence
  source 1..423: mol_type = other DNA
atgggccccaggagaagaagcaggaagccagaggcccccaggagaagaagccccagccccacccccaccccaggccccagccggcggggccccagcctgggcgccagcagccaccagcacagcagaagacggcagggctggctgaaggagatcaggaagctgcagaagagcacccacctgctgatcaggaagctgcccttcagccggctggcccgggagatctgtgtgaagttcacccggggcgtggacttcaactggcaggcccaggccctgctggccctgcaggaggccgctgaggccttcctggtgcacctgtttgaagatgcctacctgctgaccctgcacgccggccgggtgaccctcttccccaaggatgtgcagctggcccggcgcatccggggcctggaggagggcctgggctag

SEQ ID NO: 147018 - DNA, 1800 bp, synthetic construct
  misc_feature 1..1800: note = Description of Artificial Sequence: Synthetic coding sequence
  source 1..1800: mol_type = other DNA
atgggccccaagaggcggcagctgaccttccgggagaagagccgcatcatccaggaggtggaggagaacccagacctgaggaagggggagatcgcccggcgcttcaacatcccccccagcaccctgagcaccatcctgaagaacaagagggccatcctggccagcgagaggaaatatggagtggccagcacctgcaggaagaccaacaagctgagcccctatgacaagctggagggcctgctgattgcctggttccagcagatccgggctgctggcctgcctgtgaagggcatcatcctgaaggagaaggccctgagaattgctgaggagctgggcatggatgacttcaccgccagcaatggctggctggaccgcttcagaagaagacatggagtggtgtcctgcagcggcgtggcccgggcccgggccagaaatgctgcccccaggaccccagctgccccagccagccctgctgctgtgcccagcgagggcagcggcggcagcaccaccggctggagggcccgggaggagcagcccccatctgtggccgagggctacgccagccaggatgtgttttctgccacagagaccagcctgtggtatgacttcctgcctgaccaggccgccggcctgtgtggaggagatggccggccccggcaggccacccagaggctgtctgtgctgctgtgtgccaatgctgatggcagcgagaagctgccccccctggtggccggcaagagcgccaagccccgggccggccaggccggcctgccctgtgactacacagccaacagcaagggcggcgtgaccacccaggccctggccaagtacctgaaggccctggacaccaggatggctgctgagagccggcgggtgctgctgctggccggccgcctggccgcccagagcctggacaccagcggcctgcggcacgtgcagctggccttcttccccccaggcaccgtgcaccccctggagcggggcgtggtgcagcaggtgaagggccactaccggcaggccatgctgctgaaggccatggccgccctggagggccaggaccccagcggcctgcagctgggcctgacagaggccctgcactttgtggccgccgcctggcaggccgtggagcccagcgacattgctgcctgcttccgggaggccggctttggaggcggccccaatgccaccatcaccaccagcctgaagtctgagggggaggaggaggaggaggaggaggaggaggaggaggaggaggagggggagggggaggaggaggaggaggagggggaggaggaggaggaggagggcggggagggggaggagctgggggaggaggaggaggtggaggaggagggagatgtggacagtgatgaggaggaggaggaggatgaggagagcagcagcgagggcctggaggccgaggactgggcccagggcgtggtggaggccggcggcagctttggagcctacggggcccaggaggaggcccagtgccccaccctgcacttcctggagggcggggaggacagcgacagcgacagcgaggaggaggatgatgaggaggaggatgatgaagatgaagatgatgatgatgatgaggaggatggagatgaggtgcctgtgcccagctttggagaggccatggcctactttgccatggtgaagcgctacctgaccagcttccccattgatgacagagtgcagagccacatcctgcacctggagcatgacctggtgcacgtgaccaggaagaaccacgcccggcaggccggcgtgcggggcctgggccaccagagctag

SEQ ID NO: 147019 - DNA, 417 bp, synthetic construct
  misc_feature 1..417: note = Description of Artificial Sequence: Synthetic coding sequence
  source 1..417: mol_type = other DNA
gaagatgaggagagcagcagcgagggcctggaggccgaggactgggcccagggcgtggtggaggccggcggcagctttggagcctatggagcccaggaggaggcccagtgccccaccctgcacttcctggagggcggagaagattctgacagcgacagcgaggaggaggatgatgaggaggaggatgatgaagatgaagatgatgatgatgatgaagaagatggagatgaggtgcctgtgcccagctttggagaggccatggcctactttgccatggtgaagcgctacctgaccagcttccccattgatgacagagtgcagagccacatcctgcacctggagcatgacctggtgcacgtgaccaggaagaaccacgcccggcaggccggcgtgcggggcctgggccaccagagctag

SEQ ID NO: 147020 - DNA, 2832 bp, synthetic construct
  misc_feature 1..2832: note = Description of Artificial Sequence: Synthetic coding sequence
  source 1..2832: mol_type = other DNA
atggccgccagcggcctggaccacctgaagaatggctacagaagacgcttctgccggcccagccgggcccgggacatcaacacagagcagggccagaatgtgctggagatcctgcaggactgctttgaggagaagagcctggccaatgacttcagcaccaacagcaccaagtctgtgcccaacagcaccaggaagatcaaggacacctgcatccagagccccagcaaagaatgccagaagagccaccccaagtctgtgcctgtgagcagcaagaagaaggaggccagcctgcagtttgtggtggagcccagcgaggccaccaacagatctgtgcaggcccacgaggtgcaccagaagatcctggccacagatgtgagcagcaagaacaccccagacagcaagaagatcagcagcaggaacatcaatgaccaccacagcgaggctgatgaggagttctacctgtctgtgggcagccccagcgtgctgctggatgccaagacctctgtgtcccagaatgtcatccccagcagcgcccagaagcgggagacctacacctttgaaaattctgtgaacatgctgcccagcagcacagaggtgtctgtgaagaccaagaagaggctgaactttgatgacaaggtgatgctgaagaagattgaaattgacaacaaggtgtctgatgaggaggacaagaccagcgagggccaggagaggaagcccagcggcagcagccagaaccgcatccgggacagtgaatatgagatccagaggcaggccaagaagagcttcagcaccctcttcctggagaccgtgaagaggaagtctgagagcagccccatcgtgagacatgctgccacagccccaccccacagctgccccccagatgacaccaagctgattgaagatgagttcatcattgatgaaagtgaccagagctttgccagccgctcctggatcaccatccccaggaaggccggcagcctgaagcagaggaccatcagccctgctgagagcacagccctgctgcagggcaggaagagccgggagaagcaccacaacatcctgcccaagaccctggccaatgacaagcacagccacaagccccaccctgtggagaccagccagcccagcgacaagacagtgctggacaccagctatgccctgattggagaaacagtgaacaactaccgcagcaccaagtatgagatgtacagcaagaatgctgagaagcccagccgcagcaagaggaccatcaagcagaagcagaggaggaagttcatggccaagccagctgaggagcagctggatgtgggccagagcaaggatgagaacatccacaccagccacatcacccaggatgagttccagaggaacagcgacaggaacatggaggagcacgaggagatgggaaatgactgtgtgtccaagaagcagatgcctcctgtgggcagcaagaagagcagcaccaggaaggacaaggaggagagcaagaagaagcgcttcagcagcgagagcaagaacaagctggtgcctgaggaggtgaccagcacagtgaccaagagccgccgcatcagcagaagacccagcgactggtgggtggtgaagtctgaggagagccctgtgtacagcaacagctctgtgagaaatgagctgcccatgcaccacaacagcagcaggaagagcaccaagaagaccaaccagagcagcaagaacatcaggaagaagaccatccccctgaagaggcagaagacagccaccaagggcaaccagagggtgcagaagttcctgaatgctgagggcagcggcggcatcgtgggccatgatgagatcagccgctgcagcctgtctgagcccctggagagtgatgaagctgacctggccaagaagaagaacctggactgcagccgcagcaccaggagcagcaagaatgaagacaacatcatgacagcccagaatgtgcccctgaagccccagaccagcggctacacctgcaacatccccacagagagcaacctggacagcggggagcacaagacctctgtgctggaggagagcggccccagccggctgaacaacaactacctgatgtctgggaagaatgatgtggatgatgaggaggtgcacggcagcagtgatgacagcaagcagagcaaggtgatccccaagaaccgcatccaccacaagctggtgctgcccagcaacacccccaacgtgcggaggaccaagaggacccggctgaagcccctggagtactggagaggagagagaattgactaccagggccggcccagcggcggcttcgtcatctctggagtgctgagcccagacaccatcagcagcaagaggaaggccaaggaaaatattggcaaggtgaacaagaagagcaacaagaagaggatctgcctggacaatgatgagaggaagaccaacctgatggtgaacctgggcatccccctgggggaccccctgcagcccaccagggtgaaggaccctgagacccgggagatcatcctgatggacctggtgcggccccaggacacctaccagttctttgtgaagcatggagagctgaaggtgtacaagaccctggacacccccttcttcagcacaggcaagctgatcctgggcccccaggaggagaagggcaagcagcacgtgggccaggacatcctggtgttctacgtgaactttggagacctgctgtgcaccctgcacgagaccccctacatcctgagcactggagacagcttctacgtgcccagcggcaactactacaacatcaagaacctgagaaatgaggagagcgtgctgctcttcacccagatcaagaggtag

SEQ ID NO: 147021 - DNA, 8106 bp, synthetic construct
  misc_feature 1..8106: note = Description of Artificial Sequence: Synthetic coding sequence
  source 1..8106: mol_type = other DNA
atggccgaggagggcgctgtggccgtgtgtgtgcgggtgcggcccctgaacagccgggaggagagcctgggggagacagcccaggtgtactggaagacagacaacaacgtcatctaccaggtggatggcagcaagagcttcaactttgacagagtcttccacggcaatgagaccaccaagaatgtgtatgaggagattgctgcccccatcattgattctgccatccagggctacaacggcaccatctttgcctacggccagacagccagcggcaagacctacaccatgatgggcagcgaggaccacctgggcgtcatcccccgggccatccatgacatcttccagaagatcaagaagttcccagaccgggagttcctgctgcgggtgtcctacatggagatctacaatgagaccatcacagacctgctgtgtggcacccagaagatgaagcccctcatcatccgggaggatgtgaacagaaatgtgtatgtggccgacctgacagaggaggtggtgtacaccagcgagatggccctgaagtggatcaccaagggggagaagagccgccactatggagagaccaagatgaaccagaggagcagccgcagccacaccatcttcaggatgatcctggagagccgggagaagggggagcccagcaactgtgagggctctgtgaaggtgagccacctgaacctggtggacctggccggcagcgagcgggccgcccagacaggagctgctggggtgcggctgaaggagggctgcaacatcaacagaagcctcttcatcctgggccaggtgatcaagaagctgagtgatggccaggtgggcggcttcatcaactacagagacagcaagctgacccgcatcctgcagaacagcctgggcggcaatgccaagacccgcatcatctgcaccatcacccctgtgtcctttgatgagaccctgacagccctgcagtttgccagcacagccaagtacatgaagaacaccccctacgtgaatgaggtgtccacagatgaggccctgctgaagcgctacaggaaggagatcatggacctgaagaagcagctggaggaggtgtccctggagacccgggcccaggccatggagaaggaccagctggcccagctgctggaggagaaggacctgctgcagaaggtgcagaatgagaagattgagaacctgaccaggatgctggtgaccagcagcagcctgaccctgcagcaggagctgaaggccaagaggaagagaagagtgacctggtgcctgggcaagatcaacaagatgaagaacagcaactatgctgaccagttcaacatccccaccaacatcaccaccaagacccacaagctgagcatcaacctgctgcgggagattgatgagagcgtgtgcagcgagagtgatgtgttcagcaacaccctggacaccctgtctgaaattgagtggaacccagccaccaagctgctgaaccaggagaacatcgagagcgagctgaacagcctgcgggctgactatgacaacctggtgctggactatgagcagctgaggacagagaaggaggagatggagctgaagctgaaggagaagaatgacctggatgaatttgaggccctggagaggaagaccaagaaggaccaggagatgcagctgatccacgagatcagcaacctgaagaacctggtgaagcacgccgaggtgtacaaccaggacctggagaatgagctgagcagcaaggtggagctgctgcgggagaaggaggaccagatcaagaagctgcaggagtacatcgacagccagaagctggagaacatcaagatggacctgagctacagcctggagagcattgaggaccccaagcagatgaagcagaccctgtttgatgctgagaccgtggccctggatgccaagcgggagagcgccttcctgcggtctgagaacctggagctgaaggagaagatgaaggagctggccaccacctacaagcagatggagaatgacatccagctgtaccagagccagctggaggccaagaagaagatgcaggtggacctggagaaggagctgcagagcgccttcaatgagatcaccaagctgaccagcctgattgatggcaaggtgcccaaggacctgctgtgcaacctggagctggagggcaagatcacagacctgcagaaggagctgaacaaggaggtggaggagaatgaggccctgcgggaggaggtgatcctgctgtctgagctgaagagcctgcccagcgaggtggagcggctgaggaaggagatccaggacaagtctgaggagctgcacatcatcaccagcgagaaggacaagctgttcagcgaggtggtgcacaaggagagccgggtgcagggcctgctggaggagatcggcaagaccaaggatgacctggccaccacccagagcaactacaagagcacagaccaggagttccagaacttcaagaccctgcacatggactttgagcagaagtacaagatggtgctggaggagaatgaaagaatgaaccaggagatcgtgaacctgagcaaggaggcccagaagtttgacagcagcctgggcgccctgaagacagagctgagctacaagacccaggagctgcaggagaagacccgggaggtgcaggagcggctgaatgagatggagcagctgaaggagcagctggagaacagagacagcaccctgcagacagtggagcgggagaagaccctcatcacagagaagctgcagcagaccctggaggaggtgaagaccctgacccaggagaaggatgacctgaagcagctgcaggagagcctgcagatcgagcgggaccagctgaagagtgacatccatgacacagtgaacatgaacatcgacacccaggagcagctgagaaatgccctggagagcctgaagcagcaccaggagaccatcaacaccctgaagagcaagatcagcgaggaggtgtccaggaacctgcacatggaggagaacacaggagagaccaaggatgagttccagcagaagatggtgggcatcgacaagaagcaggacctggaggccaagaacacccagaccctgacagcagatgtgaaggacaatgagatcatcgagcagcagaggaagatcttcagcctcatccaggagaagaatgagctgcagcagatgctggagagcgtgattgctgagaaggagcagctgaagacagacctgaaggaaaatattgagatgaccatcgagaaccaggaggagctgcggctgctgggagatgagctgaagaagcagcaggagatcgtggcccaggagaagaaccacgccatcaagaaggagggggagctgagcaggacctgtgaccggctggccgaggtggaggagaagctgaaggagaagagccagcagctgcaggagaagcagcagcagctgctgaatgtgcaggaggagatgtctgagatgcagaagaagatcaatgaaattgagaacctgaagaatgagctgaagaacaaggagctgaccctggagcacatggagacagagcggctggagctggcccagaagctgaatgaaaattatgaggaggtgaagagcatcaccaaggagaggaaggtgctgaaggagctgcagaagagctttgaaacagagcgggaccacctgcggggctacatccgggagattgaggccaccggcctgcagaccaaggaggagctgaagatcgcccacatccacctgaaggagcaccaggagaccattgatgagctgcggcgctctgtgtctgagaagacagcccagatcatcaacacccaggacctggagaagagccacaccaagctgcaggaggagatccctgtgctgcacgaggagcaggagctgctgcccaacgtgaaggaggtgtctgagacccaggagaccatgaatgagctggagctgctgacagagcagagcaccaccaaggacagcaccaccctggcccgcatcgagatggagcggctgcggctgaatgagaagttccaggagagccaggaggagatcaagagcctgaccaaggagcgggacaacctgaagaccatcaaggaggccctggaggtgaagcatgaccagctgaaggagcacatccgggagaccctggccaagatccaggagagccagagcaagcaggagcagagcctgaacatgaaggagaaggacaatgagaccaccaagatcgtgtctgagatggagcagttcaagcccaaggacagcgccctgctgagaattgaaattgagatgctgggcctgagcaagaggctgcaggagagccatgatgagatgaagtctgtggccaaggagaaggatgacctgcagaggctgcaggaggtgctgcagagcgagagtgaccagctgaaggagaacatcaaggagatcgtggccaagcacctggagacagaggaggagctgaaggtggcccactgctgcctgaaggagcaggaggagaccatcaatgagctgcgggtgaacctgtctgagaaggagacagagatcagcaccatccagaagcagctggaggccatcaatgacaagctgcagaacaagatccaggagatctatgagaaggaggagcagttcaacatcaagcagatcagcgaggtgcaggagaaggtgaatgagctgaagcagttcaaggagcacaggaaggccaaggacagcgccctgcagagcattgagagcaagatgctggagctgaccaaccggctgcaggagagccaggaggagatccagatcatgatcaaggagaaggaggagatgaagagggtgcaggaggccctgcagatcgagcgggaccagctgaaggagaacaccaaggagatcgtggccaagatgaaggagagccaggagaaggagtaccagttcctgaagatgacagctgtgaatgagacccaggagaagatgtgtgaaattgagcacctgaaggagcagtttgagacccagaagctgaacctggagaacattgaaacagagaacatccggctgacccagatcctgcacgagaacctggaggagatgaggtctgtgaccaaggagagagatgacctgcggtctgtggaggagaccctgaaggtggagcgggaccagctgaaggagaacctgcgggagaccatcacccgggacctggagaagcaggaggagctgaagatcgtgcacatgcacctgaaggagcaccaggagaccatcgacaagctgcggggcatcgtgtctgagaagaccaatgagatcagcaacatgcagaaggacctggagcacagcaatgatgccctgaaggcccaggacctgaagatccaggaggagctgcgcatcgcccacatgcacctgaaggagcagcaggagaccatcgacaagctgcggggcatcgtgtctgagaagacagacaagctgagcaacatgcagaaggacctggagaacagcaatgccaagctgcaggagaagatccaggagctgaaggccaatgagcaccagctgatcaccctgaagaaggatgtgaatgagacccagaagaaggtgtctgagatggagcagctgaagaagcagatcaaggaccagagcctgaccctgagcaagctggagattgagaacctgaacctggcccagaagctgcacgagaacctggaggagatgaagtctgtgatgaaggagcgggacaacctgcggcgggtggaggagaccctgaagctggagcgggaccagctgaaggagagcctgcaggagaccaaggcccgggacctggagatccagcaggagctgaagacagccaggatgctgagcaaggagcacaaggagaccgtggacaagctgcgggagaagatcagcgagaagaccatccagatcagtgacatccagaaggacctggacaagagcaaggatgagctgcagaagaagatccaggagctgcagaagaaggagctgcagctgctgcgggtgaaggaggatgtgaacatgagccacaagaagatcaatgagatggagcagctgaagaagcagtttgaggcccagaacctgtccatgcagagcgtgaggatggacaacttccagctgaccaagaagctgcacgagagcctggaggagatccgcatcgtggccaaggagagagatgagctgcggcgcatcaaggagagcctgaagatggagcgggaccagttcatcgccaccctgcgggagatgattgcccgggaccggcagaaccaccaggtgaagccagagaagaggctgctgagtgatggccagcagcacctgacagagagcctgcgggagaagtgcagccgcatcaaggagctgctgaagcgctacagcgagatggatgaccactatgaatgtctgaaccggctgagcctggacctggagaaggagattgagttccagaaggagctgtccatgagggtgaaggccaacctgagcctgccctacctgcagaccaagcacatcgagaagctgttcaccgccaaccagcgctgcagcatggagttccaccgcatcatgaagaagctgaagtatgtgctgtcctatgtgaccaagatcaaggaggagcagcacgagagcatcaacaagtttgagatggacttcattgatgaggtggagaagcagaaggagctgctgatcaagatccagcacctgcagcaggactgtgatgtgcccagccgggagctgcgggacctgaagctgaaccagaacatggacctgcacatcgaggagatcctgaaggacttcagcgagagcgagttccccagcatcaagacagagttccagcaggtgctgagcaacaggaaggagatgacccagttcctggaggagtggctgaacaccaggtttgacatcgagaagctgaagaatggcatccagaaggaaaatgaccgcatctgccaggtgaacaacttcttcaacaaccgcatcatcgccatcatgaatgaaagcacagaatttgaggagaggtctgccaccatcagcaaggagtgggagcaggacctgaagagcctgaaggagaagaatgagaagctgttcaagaactaccagaccctgaagaccagcctggccagcggggcccaggtgaaccccaccacccaggacaacaagaacccccacgtgaccagccgggccacccagctgaccacagagaagatccgggagctggagaacagcctgcacgaggccaaggagagcgccatgcacaaggagagcaagatcatcaagatgcagaaggagctggaggtgaccaatgacatcatcgccaagctgcaggccaaggtgcatgagagcaacaagtgcctggagaagaccaaggagaccatccaggtgctgcaggacaaggtggccctgggcgccaagccctacaaggaggagattgaggacctgaagatgaagctggtgaagattgacctggagaagatgaagaatgccaaggagtttgagaaggagatcagcgccaccaaggccaccgtggagtaccagaaggaggtgatccggctgctgcgggagaacctgcggcgcagccagcaggcccaggacaccagcgtcatcagcgagcacacagacccccagcccagcaacaagcccctgacctgtggcggcggcagcggcatcgtgcagaacaccaaggccctgatcctgaagtctgagcacatccggctggagaaggagatcagcaagctgaagcagcagaatgagcagctgatcaagcagaagaatgagctgctgagcaacaaccagcacctgagcaatgaggtgaagacctggaaggagaggaccctgaagcgggaggcccacaagcaggtgacctgtgagaacagccccaagagccccaaggtgactggaacagccagcaagaagaagcagatcacccccagccagtgcaaggagaggaacctgcaggaccctgtgcccaaggagagccccaagagctgcttctttgacagccgcagcaagagcctgcccagcccccaccctgtgcgctactttgacaacagcagcctgggcctgtgcccagaggtgcagaatgctggagctgagagcgtggacagccagcccggcccctggcacgccagcagcggcaaggatgtgcctgagtgcaagacccagtag

SEQ ID NO: 147022 - DNA, 7743 bp, synthetic construct
  misc_feature 1..7743: note = Description of Artificial Sequence: Synthetic coding sequence
  source 1..7743: mol_type = other DNA
atggccgaggagggcgctgtggccgtgtgtgtgcgggtgcggcccctgaacagccgggaggagagcctgggggagacagcccaggtgtactggaagacagacaacaacgtcatctaccaggtggatggcagcaagagcttcaactttgacagagtcttccacggcaatgagaccaccaagaatgtgtatgaggagattgctgcccccatcattgattctgccatccagggctacaacggcaccatctttgcctacggccagacagccagcggcaagacctacaccatgatgggcagcgaggaccacctgggcgtcatcccccgggccatccatgacatcttccagaagatcaagaagttcccagaccgggagttcctgctgcgggtgtcctacatggagatctacaatgagaccatcacagacctgctgtgtggcacccagaagatgaagcccctcatcatccgggaggatgtgaacagaaatgtgtatgtggccgacctgacagaggaggtggtgtacaccagcgagatggccctgaagtggatcaccaagggggagaagagccgccactatggagagaccaagatgaaccagaggagcagccgcagccacaccatcttcaggatgatcctggagagccgggagaagggggagcccagcaactgtgagggctctgtgaaggtgagccacctgaacctggtggacctggccggcagcgagcgggccgcccagacaggagctgctggggtgcggctgaaggagggctgcaacatcaacagaagcctcttcatcctgggccaggtgatcaagaagctgagtgatggccaggtgggcggcttcatcaactacagagacagcaagctgacccgcatcctgcagaacagcctgggcggcaatgccaagacccgcatcatctgcaccatcacccctgtgtcctttgatgagaccctgacagccctgcagtttgccagcacagccaagtacatgaagaacaccccctacgtgaatgaggtgtccacagatgaggccctgctgaagcgctacaggaaggagatcatggacctgaagaagcagctggaggaggtgtccctggagacccgggcccaggccatggagaaggaccagctggcccagctgctggaggagaaggacctgctgcagaaggtgcagaatgagaagattgagaacctgaccaggatgctggtgaccagcagcagcctgaccctgcagcaggagctgaaggccaagaggaagagaagagtgacctggtgcctgggcaagatcaacaagatgaagaacagcaactatgctgaccagttcaacatccccaccaacatcaccaccaagacccacaagctgagcatcaacctgctgcgggagattgatgagagcgtgtgcagcgagagtgatgtgttcagcaacaccctggacaccctgtctgaaattgagtggaacccagccaccaagctgctgaaccaggagaacatcgagagcgagctgaacagcctgcgggctgactatgacaacctggtgctggactatgagcagctgaggacagagaaggaggagatggagctgaagctgaaggagaagaatgacctggatgaatttgaggccctggagaggaagaccaagaaggaccaggagaatgagctgagcagcaaggtggagctgctgcgggagaaggaggaccagatcaagaagctgcaggagtacatcgacagccagaagctggagaacatcaagatggacctgagctacagcctggagagcattgaggaccccaagcagatgaagcagaccctgtttgatgctgagaccgtggccctggatgccaagcgggagagcgccttcctgcggtctgagaacctggagctgaaggagaagatgaaggagctggccaccacctacaagcagatggagaatgacatccagctgtaccagagccagctggaggccaagaagaagatgcaggtggacctggagaaggagctgcagagcgccttcaatgagatcaccaagctgaccagcctgattgatggcaaggtgcccaaggacctgctgtgcaacctggagctggagggcaagatcacagacctgcagaaggagctgaacaaggaggtggaggagaatgaggccctgcgggaggaggtgatcctgctgtctgagctgaagagcctgcccagcgaggtggagcggctgaggaaggagatccaggacaagtctgaggagctgcacatcatcaccagcgagaaggacaagctgttcagcgaggtggtgcacaaggagagccgggtgcagggcctgctggaggagatcggcaagaccaaggatgacctggccaccacccagagcaactacaagagcacagaccaggagttccagaacttcaagaccctgcacatggactttgagcagaagtacaagatggtgctggaggagaatgaaagaatgaaccaggagatcgtgaacctgagcaaggaggcccagaagtttgacagcagcctgggcgccctgaagacagagctgagctacaagacccaggagctgcaggagaagacccgggaggtgcaggagcggctgaatgagatggagcagctgaaggagcagctggagaacagagacagcaccctgcagacagtggagcgggagaagaccctcatcacagagaagctgcagcagaccctggaggaggtgaagaccctgacccaggagaaggatgacctgaagcagctgcaggagagcctgcagatcgagcgggaccagctgaagagtgacatccatgacacagtgaacatgaacatcgacacccaggagcagctgagaaatgccctggagagcctgaagcagcaccaggagaccatcaacaccctgaagagcaagatcagcgaggaggtgtccaggaacctgcacatggaggagaacacaggagagaccaaggatgagttccagcagaagatggtgggcatcgacaagaagcaggacctggaggccaagaacacccagaccctgacagcagatgtgaaggacaatgagatcatcgagcagcagaggaagatcttcagcctcatccaggagaagaatgagctgcagcagatgctggagagcgtgattgctgagaaggagcagctgaagacagacctgaaggagaacatcgagatgaccatcgagaaccaggaggagctgcggctgctgggagatgagctgaagaagcagcaggagatcgtggcccaggagaagaaccacgccatcaagaaggagggggagctgagcaggacctgtgaccggctggccgaggtggaggagaagctgaaggagaagagccagcagctgcaggagaagcagcagcagctgctgaatgtgcaggaggagatgtctgagatgcagaagaagatcaatgaaattgagaacctgaagaatgagctgaagaacaaggagctgaccctggagcacatggagacagagcggctggagctggcccagaagctgaatgaaaattatgaggaggtgaagagcatcaccaaggagaggaaggtgctgaaggagctgcagaagagctttgaaacagagcgggaccacctgcggggctacatccgggagattgaggccaccggcctgcagaccaaggaggagctgaagatcgcccacatccacctgaaggagcaccaggagaccattgatgagctgcggcgctctgtgtctgagaagacagcccagatcatcaacacccaggacctggagaagagccacaccaagctgcaggaggagatccctgtgctgcacgaggagcaggagctgctgcccaacgtgaaggaggtgtctgagacccaggagaccatgaatgagctggagctgctgacagagcagagcaccaccaaggacagcaccaccctggccagaattgagatggagcggctgcggctgaatgagaagttccaggagagccaggaggagatcaagagcctgaccaaggagcgggacaacctgaagaccatcaaggaggccctggaggtgaagcatgaccagctgaaggagcacatccgggagaccctggccaagatccaggagagccagagcaagcaggagcagagcctgaacatgaaggagaaggacaatgagaccaccaagatcgtgtctgagatggagcagttcaagcccaaggacagcgccctgctgcgcatcgagattgagatgctgggcctgagcaagaggctgcaggagagccatgatgagatgaagtctgtggccaaggagaaggatgacctgcagaggctgcaggaggtgctgcagagcgagagtgaccagctgaaggagaacatcaaggagatcgtggccaagcacctggagacagaggaggagctgaaggtggcccactgctgcctgaaggagcaggaggagaccatcaatgagctgcgggtgaacctgtctgagaaggagacagagatcagcaccatccagaagcagctggaggccatcaatgacaagctgcagaacaagatccaggagatctatgagaaggaggagcagttcaacatcaagcagatcagcgaggtgcaggagaaggtgaatgagctgaagcagttcaaggagcacaggaaggccaaggacagcgccctgcagagcattgagagcaagatgctggagctgaccaaccggctgcaggagagccaggaggagatccagatcatgatcaaggagaaggaggagatgaagagggtgcaggaggccctgcagatcgagcgggaccagctgaaggagaacaccaaggagatcgtggccaagatgaaggagagccaggagaaggagtaccagttcctgaagatgacagctgtgaatgagacccaggagaagatgtgtgaaattgagcacctgaaggagcagtttgagacccagaagctgaacctggagaacatcgagacagagaacatccggctgacccagatcctgcacgagaacctggaggagatgaggtctgtgaccaaggagagagatgacctgcggtctgtggaggagaccctgaaggtggagcgggaccagctgaaggagaacctgcgggagaccatcacccgggacctggagaagcaggaggagctgaagatcgtgcacatgcacctgaaggagcaccaggagaccatcgacaagctgcggggcatcgtgtctgagaagaccaatgagatcagcaacatgcagaaggacctggagcacagcaatgatgccctgaaggcccaggacctgaagatccaggaggagctgagaattgcccacatgcacctgaaggagcagcaggagaccatcgacaagctgcggggcatcgtgtctgagaagacagacaagctgagcaacatgcagaaggacctggagaacagcaatgccaagctgcaggagaagatccaggagctgaaggccaatgagcaccagctgatcaccctgaagaaggatgtgaatgagacccagaagaaggtgtctgagatggagcagctgaagaagcagatcaaggaccagagcctgaccctgagcaagctggagattgagaacctgaacctggcccagaagctgcacgagaacctggaggagatgaagtctgtgatgaaggagcgggacaacctgcggcgggtggaggagaccctgaagctggagcgggaccagctgaaggagagcctgcaggagaccaaggcccgggacctggagatccagcaggagctgaagacagccaggatgctgagcaaggagcacaaggagaccgtggacaagctgcgggagaagatcagcgagaagaccatccagatcagtgacatccagaaggacctggacaagagcaaggatgagctgcagaagaagcaggaccggcagaaccaccaggtgaagccagagaagaggctgctgagtgatggccagcagcacctgacagagagcctgcgggagaagtgcagccgcatcaaggagctgctgaagcgctacagcgagatggatgaccactatgagtgcctgaaccggctgagcctggacctggagaaggagattgagttccagaaggagctgtccatgagggtgaaggccaacctgagcctgccctacctgcagaccaagcacatcgagaagctgttcaccgccaaccagcgctgcagcatggagttccaccgcatcatgaagaagctgaagtatgtgctgtcctatgtgaccaagatcaaggaggagcagcacgagagcatcaacaagtttgagatggacttcattgatgaggtggagaagcagaaggagctgctgatcaagatccagcacctgcagcaggactgtgatgtgcccagccgggagctgcgggacctgaagctgaaccagaacatggacctgcacatcgaggagatcctgaaggacttcagcgagagcgagttccccagcatcaagacagagttccagcaggtgctgagcaacaggaaggagatgacccagttcctggaggagtggctgaacaccaggtttgatattgagaagctgaagaatggcatccagaaggaaaatgaccgcatctgccaggtgaacaacttcttcaacaaccgcatcatcgccatcatgaatgaaagcacagaatttgaggagaggtctgccaccatcagcaaggagtgggagcaggacctgaagagcctgaaggagaagaatgagaagctgttcaagaactaccagaccctgaagaccagcctggccagcggggcccaggtgaaccccaccacccaggacaacaagaacccccacgtgaccagccgggccacccagctgaccacagagaagatccgggagctggagaacagcctgcacgaggccaaggagagcgccatgcacaaggagagcaagatcatcaagatgcagaaggagctggaggtgaccaatgacatcatcgccaagctgcaggccaaggtgcatgagagcaacaagtgcctggagaagaccaaggagaccatccaggtgctgcaggacaaggtggccctgggcgccaagccctacaaggaggagattgaggacctgaagatgaagctggtgaagattgacctggagaagatgaagaatgccaaggagtttgagaaggagatcagcgccaccaaggccaccgtggagtaccagaaggaggtgatccggctgctgcgggagaacctgcggcgcagccagcaggcccaggacaccagcgtcatcagcgagcacacagacccccagcccagcaacaagcccctgacctgtggcggcggcagcggcatcgtgcagaacaccaaggccctgatcctgaagtctgagcacatccggctggagaaggagatcagcaagctgaagcagcagaatgagcagctgatcaagcagaagaatgagctgctgagcaacaaccagcacctgagcaatgaggtgaagacctggaaggagaggaccctgaagcgggaggcccacaagcaggtgacctgtgagaacagccccaagagccccaaggtgactggaacagccagcaagaagaagcagatcacccccagccagtgcaaggagaggaacctgcaggaccctgtgcccaaggagagccccaagagctgcttctttgacagccgcagcaagagcctgcccagcccccaccctgtgcgctactttgacaacagcagcctgggcctgtgcccagaggtgcagaatgctggagctgagagcgtggacagccagcccggcccctggcacgccagcagcggcaaggatgtgcctgagtgcaagacccagtag

SEQ ID NO: 147023 - DNA, 7038 bp, synthetic construct
  misc_feature 1..7038: note = Description of Artificial Sequence: Synthetic coding sequence
  source 1..7038: mol_type = other DNA
atggccgaggagggcgctgtggccgtgtgtgtgcgggtgcggcccctgaacagccgggaggagagcctgggggagacagcccaggtgtactggaagacagacaacaacgtcatctaccaggtggatggcagcaagagcttcaactttgacagagtcttccacggcaatgagaccaccaagaatgtgtatgaggagattgctgcccccatcattgattctgccatccagggctacaacggcaccatctttgcctacggccagacagccagcggcaagacctacaccatgatgggcagcgaggaccacctgggcgtcatcccccgggccatccatgacatcttccagaagatcaagaagttcccagaccgggagttcctgctgcgggtgtcctacatggagatctacaatgagaccatcacagacctgctgtgtggcacccagaagatgaagcccctcatcatccgggaggatgtgaacagaaatgtgtatgtggccgacctgacagaggaggtggtgtacaccagcgagatggccctgaagtggatcaccaagggggagaagagccgccactatggagagaccaagatgaaccagaggagcagccgcagccacaccatcttcaggatgatcctggagagccgggagaagggggagcccagcaactgtgagggctctgtgaaggtgagccacctgaacctggtggacctggccggcagcgagcgggccgcccagacaggagctgctggggtgcggctgaaggagggctgcaacatcaacagaagcctcttcatcctgggccaggtgatcaagaagctgagtgatggccaggtgggcggcttcatcaactacagagacagcaagctgacccgcatcctgcagaacagcctgggcggcaatgccaagacccgcatcatctgcaccatcacccctgtgtcctttgatgagaccctgacagccctgcagtttgccagcacagccaagtacatgaagaacaccccctacgtgaatgaggtgtccacagatgaggccctgctgaagcgctacaggaaggagatcatggacctgaagaagcagctggaggaggtgtccctggagacccgggcccaggccatggagaaggaccagctggcccagctgctggaggagaaggacctgctgcagaaggtgcagaatgagaagattgagaacctgaccaggatgctggtgaccagcagcagcctgaccctgcagcaggagctgaaggccaagaggaagagaagagtgacctggtgcctgggcaagatcaacaagatgaagaacagcaactatgctgaccagttcaacatccccaccaacatcaccaccaagacccacaagctgagcatcaacctgctgcgggagattgatgagagcgtgtgcagcgagagtgatgtgttcagcaacaccctggacaccctgtctgaaattgagtggaacccagccaccaagctgctgaaccaggagaacatcgagagcgagctgaacagcctgcgggctgactatgacaacctggtgctggactatgagcagctgaggacagagaaggaggagatggagctgaagctgaaggagaagaatgacctggatgaatttgaggccctggagaggaagaccaagaaggaccaggagatgcagctgatccacgagatcagcaacctgaagaacctggtgaagcacgccgaggtgtacaaccaggacctggagaatgagctgagcagcaaggtggagctgctgcgggagaaggaggaccagatcaagaagctgcaggagtacatcgacagccagaagctggagaacatcaagatggacctgagctacagcctggagagcattgaggaccccaagcagatgaagcagaccctgtttgatgctgagaccgtggccctggatgccaagcgggagagcgccttcctgcggtctgagaacctggagctgaaggagaagatgaaggagctggccaccacctacaagcagatggagaatgacatccagctgtaccagagccagctggaggccaagaagaagatgcaggtggacctggagaaggagctgcagagcgccttcaatgagatcaccaagctgaccagcctgattgatggcaaggtgcccaaggacctgctgtgcaacctggagctggagggcaagatcacagacctgcagaaggagctgaacaaggaggtggaggagaatgaggccctgcgggaggaggtgatcctgctgtctgagctgaagagcctgcccagcgaggtggagcggctgaggaaggagatccaggacaagtctgaggagctgcacatcatcaccagcgagaaggacaagctgttcagcgaggtggtgcacaaggagagccgggtgcagggcctgctggaggagatcggcaagaccaaggatgacctggccaccacccagagcaactacaagagcacagaccaggagttccagaacttcaagaccctgcacatggactttgagcagaagtacaagatggtgctggaggagaatgaaagaatgaaccaggagatcgtgaacctgagcaaggaggcccagaagtttgacagcagcctgggcgccctgaagacagagctgagctacaagacccaggagctgcaggagaagacccgggaggtgcaggagcggctgaatgagatggagcagctgaaggagcagctggagaacagagacagcaccctgcagacagtggagcgggagaagaccctcatcacagagaagctgcagcagaccctggaggaggtgaagaccctgacccaggagaaggatgacctgaagcagctgcaggagagcctgcagatcgagcgggaccagctgaagagtgacatccatgacacagtgaacatgaacatcgacacccaggagcagctgagaaatgccctggagagcctgaagcagcaccaggagaccatcaacaccctgaagagcaagatcagcgaggaggtgtccaggaacctgcacatggaggagaacacaggagagaccaaggatgagttccagcagaagatggtgggcatcgacaagaagcaggacctggaggccaagaacacccagaccctgacagcagatgtgaaggacaatgagatcatcgagcagcagaggaagatcttcagcctcatccaggagaagaatgagctgcagcagatgctggagagcgtgattgctgagaaggagcagctgaagacagacctgaaggaaaatattgagatgaccatcgagaaccaggaggagctgcggctgctgggagatgagctgaagaagcagcaggagatcgtggcccaggagaagaaccacgccatcaagaaggagggggagctgagcaggacctgtgaccggctggccgaggtggaggagaagctgaaggagaagagccagcagctgcaggagaagcagcagcagctgctgaatgtgcaggaggagatgtctgagatgcagaagaagatcaatgaaattgagaacctgaagaatgagctgaagaacaaggagctgaccctggagcacatggagacagagcggctggagctggcccagaagctgaatgaaaattatgaggaggtgaagagcatcaccaaggagaggaaggtgctgaaggagctgcagaagagctttgaaacagagcgggaccacctgcggggctacatccgggagattgaggccaccggcctgcagaccaaggaggagctgaagatcgcccacatccacctgaaggagcaccaggagaccattgatgagctgcggcgctctgtgtctgagaagacagcccagatcatcaacacccaggacctggagaagagccacaccaagctgcaggaggagatccctgtgctgcacgaggagcaggagctgctgcccaacgtgaaggaggtgtctgagacccaggagaccatgaatgagctggagctgctgacagagcagagcaccaccaaggacagcaccaccctggcccgcatcgagatggagcggctgcggctgaatgagaagttccaggagagccaggaggagatcaagagcctgaccaaggagcgggacaacctgaagaccatcaaggaggccctggaggtgaagcatgaccagctgaaggagcacatccgggagaccctggccaagatccaggagagccagagcaagcaggagcagagcctgaacatgaaggagaaggacaatgagaccaccaagatcgtgtctgagatggagcagttcaagcccaaggacagcgccctgctgagaattgaaattgagatgctgggcctgagcaagaggctgcaggagagccatgatgagatgaagtctgtggccaaggagaaggatgacctgcagaggctgcaggaggtgctgcagagcgagagtgaccagctgaaggagaacatcaaggagatcgtggccaagcacctggagacagaggaggagctgaaggtggcccactgctgcctgaaggagcaggaggagaccatcaatgagctgcgggtgaacctgtctgagaaggagacagagatcagcaccatccagaagcagctggaggccatcaatgacaagctgcagaacaagatccaggagatctatgagaaggaggagcagttcaacatcaagcagatcagcgaggtgcaggagaaggtgaatgagctgaagcagttcaaggagcacaggaaggccaaggacagcgccctgcagagcattgagagcaagatgctggagctgaccaaccggctgcaggagagccaggaggagatccagatcatgatcaaggagaaggaggagatgaagagggtgcaggaggccctgcagatcgagcgggaccagctgaaggagaacaccaaggagatcgtggccaagatgaaggagagccaggagaaggagtaccagttcctgaagatgacagctgtgaatgagacccaggagaagatgtgtgaaattgagcacctgaaggagcagtttgagacccagaagctgaacctggagaacattgaaacagagaacatccggctgacccagatcctgcacgagaacctggaggagatgaggtctgtgaccaaggagagagatgacctgcggtctgtggaggagaccctgaaggtggagcgggaccagctgaaggagaacctgcgggagaccatcacccgggacctggagaagcaggaggagctgaagatcgtgcacatgcacctgaaggagcaccaggagaccatcgacaagctgcggggcatcgtgtctgagaagaccaatgagatcagcaacatgcagaaggacctggagcacagcaatgatgccctgaaggcccaggacctgaagatccaggaggagctgcgcatcgcccacatgcacctgaaggagcagcaggagaccatcgacaagctgcggggcatcgtgtctgagaagacagacaagctgagcaacatgcagaaggacctggagaacagcaatgccaagctgcaggagaagatccaggagctgaaggccaatgagcaccagctgatcaccctgaagaaggatgtgaatgagacccagaagaaggtgtctgagatggagcagctgaagaagcagatcaaggaccagagcctgaccctgagcaagctggagattgagaacctgaacctggcccagaagctgcacgagaacctggaggagatgaagtctgtgatgaaggagcgggacaacctgcggcgggtggaggagaccctgaagctggagcgggaccagctgaaggagagcctgcaggagaccaaggcccgggacctggagatccagcaggagctgaagacagccaggatgctgagcaaggagcacaaggagaccgtggacaagctgcgggagaagatcagcgagaagaccatccagatcagtgacatccagaaggacctggacaagagcaaggatgagctgcagaagaagatccaggagctgcagaagaaggagctgcagctgctgcgggtgaaggaggatgtgaacatgagccacaagaagatcaatgagatggagcagctgaagaagcagtttgaggcccagaacctgtccatgcagagcgtgaggatggacaacttccagctgaccaagaagctgcacgagagcctggaggagatccgcatcgtggccaaggagagagatgagctgcggcgcatcaaggagagcctgaagatggagcgggaccagttcatcgccaccctgcgggagatgattgcccgggaccggcagaaccaccaggtgaagccagagaagaggctgctgagtgatggccagcagcacctgacagagagcctgcgggagaagtgcagccgcatcaaggagctgctgaagcgctacagcgagatggatgaccactatgaatgtctgaaccggctgagcctggacctggagaaggagattgagttccaccgcatcatgaagaagctgaagtatgtgctgtcctatgtgaccaagatcaaggaggagcagcacgagagcatcaacaagtttgagatggacttcattgatgaggtggagaagcagaaggagctgctgatcaagatccagcacctgcagcaggactgtgatgtgcccagccgggagctgcgggacctgaagctgaaccagaacatggacctgcacatcgaggagatcctgaaggacttcagcgagagcgagttccccagcatcaagacagagttccagcaggtgctgagcaacaggaaggagatgacccagttcctggaggagtggctgaacaccaggtttgacatcgagaagctgaagaatggcatccagaaggaaaatgaccgcatctgccaggtgaacaacttcttcaacaaccgcatcatcgccatcatgaatgaaagcacagaatttgaggagaggtctgccaccatcagcaaggagtgggagcaggacctgaagagcctgaaggagaagaatgagaagctgttcaagaactaccagaccctgaagaccagcctggccagcggggcccaggtgaaccccaccacccaggacaacaagaacccccacgtgaccagccgggccacccagctgaccacagaatag

SEQ ID NO: 147024 - DNA, 9345 bp, synthetic construct
  misc_feature 1..9345: note = Description of Artificial Sequence: Synthetic coding sequence
  source 1..9345: mol_type = other DNA
atgtcctgggccctggaggagtggaaggagggcctgcccacccgggccctgcagaagatccaggagctggagggccagctggacaagctgaagaaggagaagcagcagaggcagttccagctggacagcctggaggccgccctgcagaagcagaagcagaaggtggagaatgagaagacagagggcaccaacctgaagcgggagaaccagaggctgatggagatctgtgagagcctggagaagaccaagcagaagatcagccatgagctgcaggtgaaggagagccaggtgaacttccaggagggccagctgaacagcggcaagaagcagatcgagaagctggagcaggagctgaagcgctgcaagtctgagctggagaggagccagcaggccgcccagagcgcagatgtgtccctgaacccctgcaacaccccccagaagatcttcaccacccccctgacccccagccagtactacagcggcagcaaatatgaggacctgaaggagaagtacaacaaggaggtggaggagaggaagaggctggaggccgaggtgaaggccctgcaggccaagaaggccagccagaccctgccccaggccaccatgaaccaccgggacatcgcccggcaccaggccagcagctctgtgttctcctggcagcaggagaagacccccagccacctgagcagcaacagccagaggacccccatccggcgggacttcagcgccagctacttctctggagagcaggaggtgacccccagccgcagcaccctgcagatcggcaagagagatgccaacagcagcttctttgacaacagcagcagcccccacctgctggaccagctgaaggcccagaaccaggagctgaggaacaagatcaatgagctggagctgcggctgcagggccacgagaaggagatgaagggccaggtgaacaagttccaggagctgcagctgcagctggagaaggccaaggtggagctgattgagaaggagaaggtgctgaacaagtgcagagatgagctggtgaggaccacagcccagtatgaccaggccagcaccaagtacacagccctggagcagaagctgaagaagctgacagaggacctgagctgccagaggcagaatgctgagagcgcccgctgcagcctggagcagaagatcaaggagaaggagaaggagttccaggaggagctgagccggcagcagaggagcttccagaccctggaccaggagtgcatccagatgaaggcccggctgacccaggagctgcagcaggccaagaacatgcacaacgtgctgcaggccgagctggacaagctgacctctgtgaagcagcagctggagaacaacctggaggagttcaagcagaagctgtgcagagctgagcaggccttccaggccagccagatcaaggaaaatgagctgcggcgctccatggaggagatgaagaaggagaacaacctgctgaagagccacagcgagcagaaggcccgggaggtgtgccacctggaggccgagctgaagaacatcaagcagtgcctgaaccagagccagaactttgctgaggagatgaaggccaagaacaccagccaggagaccatgctgcgggacctgcaggagaagatcaaccagcaggagaacagcctgaccctggagaagctgaagctggccgtggccgacctggagaagcagagggactgcagccaggacctgctgaagaagcgggagcaccacatcgagcagctgaatgacaagctgagcaagacagagaaggagagcaaggccctgctgagcgccctggagctgaagaagaaggagtatgaggagctgaaggaggagaagaccctcttcagctgctggaagtcagaaaatgagaagctgctgacccagatggagagcgagaaggagaacctgcagagcaagatcaaccacctggagacctgcctgaagacccagcagatcaagagccatgagtacaatgaaagagtgaggaccctggagatggaccgggagaacctgtctgtggagatccggaacctgcacaacgtgctggacagcaagtctgtggaggtggagacccagaagctggcctacatggagctgcagcagaaggccgagttcagtgaccagaagcaccagaaggagattgagaacatgtgcctgaagaccagccagctgaccggccaggtggaggacctggagcacaagctgcagctgctgagcaatgagatcatggacaaggaccgctgctaccaggacctgcacgccgagtatgagagcctgcgggacctgctgaagagcaaggatgccagcctggtgaccaatgaagaccaccagaggagcctgctggcctttgaccagcagcctgccatgcaccacagctttgccaacatcattggagagcagggctccatgcccagcgagaggagtgaatgtcggctggaggccgaccagagccccaagaacagcgccatcctgcagaacagagtggacagcctggagttcagcctggagagccagaagcagatgaacagcgacctgcagaagcagtgtgaggagctggtgcagatcaagggggagattgaggagaacctgatgaaggccgagcagatgcaccagagctttgtggccgagaccagccagaggatcagcaagctgcaggaggacaccagcgcccaccagaatgtggtggccgagaccctgagcgccctggagaacaaggagaaggagctgcagctgctgaatgacaaggtggagacagagcaggccgagatccaggagctgaagaagagcaaccacctgctggaggacagcctgaaggagctgcagctgctgtctgagaccctgagcctggagaagaaggagatgagcagcatcatcagcctgaacaagcgggagattgaggagctgacccaggagaatggcaccctgaaggagatcaatgccagcctgaaccaggagaagatgaacctgatccagaagtctgagagctttgccaactacattgatgagcgggagaagagcatcagcgagctgagtgaccagtacaagcaggagaagctgatcctgctgcagagatgtgaggagactggaaatgcctatgaggacctgagccagaagtacaaggccgcccaggagaagaacagcaagctggagtgcctgctgaatgaatgtaccagcctgtgtgaaaataggaagaatgagctggagcagctgaaggaggcctttgccaaggagcaccaggagttcctgaccaagctggcctttgctgaggagaggaaccagaacctgatgctggagctggagaccgtgcagcaggccctgcggtctgagatgacagacaaccagaacaacagcaagtctgaggccggcggcctgaagcaggagatcatgaccctgaaggaggagcagaacaagatgcagaaggaggtgaatgacctgctgcaggagaatgagcagctgatgaaggtgatgaagaccaagcatgagtgccagaacctggagagcgagcccatcagaaattctgtgaaggagcgggagagcgagaggaaccagtgcaacttcaagccccagatggacctggaggtgaaggagatcagcctggacagctacaatgcccagctggtgcagctggaggccatgctgaggaacaaggagctgaagctgcaggagagcgagaaggagaaggagtgcctgcagcacgagctgcagaccatccggggggacctggagaccagcaacctgcaggacatgcagagccaggagatcagcggcctgaaggactgtgaaattgatgctgaggagaagtacatcagcggcccccatgagctgagcaccagccagaatgacaatgcccacctgcagtgcagcctgcagaccaccatgaacaagctgaatgagctggagaagatctgtgagatcctgcaggccgagaagtatgagctggtgacagagctgaatgacagccgctctgagtgcatcacagccaccaggaagatggccgaggaggtgggcaagctgctgaatgaggtgaagatcctgaatgatgattctggcctgctgcatggagagctggtggaggacatccctggaggagaatttggagagcagcccaatgagcagcaccctgtgtccctggcccccctggatgagagcaacagctatgagcacctgaccctgagtgacaaggaggtgcagatgcactttgctgagctgcaggagaagttcctgagcctgcagagcgagcacaagatcctgcatgaccagcactgccagatgagcagcaagatgtctgagctgcagacctacgtggacagcctgaaggccgagaacctggtgctgagcaccaacctgaggaacttccagggcgacctggtgaaggagatgcagctgggcctggaggagggcctggtgcccagcctgagcagcagctgtgtgcctgacagcagcagcctgagcagcctgggggacagcagcttctaccgggccctgctggagcagacaggagacatgagcctgctgagcaacctggagggcgctgtgtctgccaaccagtgcagcgtggatgaggtgttctgcagcagcctgcaggaggagaacctgaccaggaaggagaccccatctgccccagccaagggcgtggaggagctggagagcctgtgtgaggtgtaccggcagagcctggagaagctggaggagaagatggagagccagggcatcatgaagaacaaggagatccaggagctggagcagctgctgagcagcgagcggcaggagctggactgcctgaggaagcagtacctgtctgaaaatgagcagtggcagcagaagctgacctctgtgaccctggagatggagagcaagctggccgctgagaagaagcagacagagcagctgagcctggagctggaggtggcccggctgcagctgcagggcctggacctgagcagccgcagcctgctgggcatcgacacagaagatgccatccagggcagaaatgaaagctgtgacatcagcaaggagcacaccagcgagaccacagagaggacccccaagcatgatgtgcaccagatctgtgacaaggatgcccagcaggacctgaacctggacatcgagaagatcacagagaccggggctgtgaagcccaccggggagtgcagcggggagcagagcccagacaccaactatgagcccccaggagaggacaagacccagggcagcagcgagtgcatcagcgagctgtccttcagcggccccaatgccctggtgcccatggacttcctgggcaaccaggaggacatccacaacctgcagctgcgggtgaaggagaccagcaatgaaaacctgcggctgctgcacgtgattgaagatcgggacaggaaggtggagagcctgctgaatgagatgaaggagctggacagcaagctgcacctgcaggaggtgcagctgatgaccaagattgaggcctgcatcgagctggagaagatcgtgggggagctgaagaaggagaacagcgacctgtctgagaagctggagtacttcagctgtgaccaccaggagctgctgcagagggtggagaccagcgagggcctgaacagcgacctggagatgcacgccgacaagagcagccgggaggacatcggggacaacgtggccaaggtgaatgacagctggaaggagcgcttcctggatgtggagaatgagctgagccgcatccgctctgagaaggccagcattgagcacgaggccctgtacctggaggccgacctggaggtggtgcagacagagaagctgtgcctggagaaggacaatgaaaacaagcagaaggtgattgtgtgcctggaggaggagctgtctgtggtgaccagcgagaggaaccagctgcggggggagctggacaccatgagcaagaagaccacagccctggaccagctgtctgagaagatgaaggagaagacccaggagctggagagccaccagagtgaatgtctgcactgcatccaggtggccgaggccgaggtgaaggagaagacagagctgctgcagaccctgagcagtgatgtgtctgagctgctgaaggacaagacccacctgcaggagaagctgcagagcctggagaaggacagccaggccctgagcctgaccaagtgtgagctggagaaccagatcgcccagctgaacaaggagaaggagctgctggtgaaggagagcgagagcctgcaggcccggctgtctgagagtgactatgagaagctgaatgtgtccaaggccctggaggccgccctggtggagaagggggagtttgccctgcggctgagcagcacccaggaggaggtgcaccagctgcggcggggcatcgagaagctgcgggtgcgcatcgaggctgatgagaagaagcagctgcacatcgccgagaagctgaaggagcgggagcgggagaatgacagcctgaaggacaaggtggagaacctggagcgggagctgcagatgtctgaggagaaccaggagctggtgatcctggatgctgagaacagcaaggccgaggtggagaccctgaagacccagatcgaggagatggcccggagcctgaaggtgtttgagctggacctggtgaccctgcggtctgagaaggagaacctgaccaagcagatccaggagaagcagggccagctgtctgagctggacaagctgctgagcagcttcaagagcctgctggaggagaaggagcaggccgagatccagatcaaggaggagagcaagacagctgtggagatgctgcagaaccagctgaaggagctgaatgaagctgtggccgccctgtgtggggaccaggagatcatgaaggccacagagcagagcctggacccccccatcgaggaggagcaccagctgaggaacagcattgagaagctgcgggcccggctggaggctgatgagaagaagcagctgtgtgtgctgcagcagctgaaggagagcgagcaccacgccgacctgctgaagggccgggtggagaacctggagcgggagctggagatcgcccggaccaaccaggagcacgccgccctggaggccgagaacagcaaaggagaggtggagaccctgaaggccaagattgagggcatgacccagagcctgcggggcctggagctggatgtggtgaccatccgctctgagaaggagaacctgaccaatgagctgcagaaggagcaggagcgcatcagcgagctggagatcatcaacagcagctttgagaacatcctgcaggagaaggagcaggagaaggtgcagatgaaggagaagagcagcacagccatggagatgctgcagacccagctgaaggagctgaatgaaagagtggccgccctgcacaatgaccaggaggcctgcaaggccaaggagcagaacctgagcagccaggtggagtgcctggagctggagaaggcccagctgctgcagggcctggatgaggccaagaacaactacatcgtgctgcagagctctgtgaatggcctcatccaggaggtggaggatggcaagcagaagctggagaagaaggatgaggagatcagccggctgaagaaccagatccaggaccaggagcagctggtgtccaagctgagccaggtggagggggagcaccagctgtggaaggagcagaacctggagctgaggaacctgactgtggagctggagcagaagatccaggtgctgcagagcaagaatgccagcctgcaggacaccctggaggtgctgcagagcagctacaagaacctggagaatgagctggagctgaccaagatggacaagatgagctttgtggagaaggtgaacaagatgacagccaaggagacagagctgcagcgggagatgcatgagatggcccagaagacagctgagctgcaggaggagctgagcggggagaagaaccggctggccggggagctgcagctgctgctggaggagatcaagagcagcaaggaccagctgaaggagctgaccctggagaacagcgagctgaagaagagcctggactgcatgcacaaggaccaggtggagaaggagggcaaggtgcgggaggagattgctgagtaccagctgcggctgcacgaggccgagaagaagcaccaggccctgctgctggacaccaacaagcagtatgaggtggagatccagacctaccgggagaagctgaccagcaaggaggagtgcctgagcagccagaagctggagattgacctgctgaagagcagcaaggaggagctgaacaacagcctgaaggccaccacccagatcctggaggagctgaagaagaccaagatggacaacctgaagtatgtgaaccagctgaagaaggaaaatgaaagagcccagggcaagatgaagctgctgatcaagagctgcaagcagctggaggaggagaaggagatcctgcagaaggagctgagccagctgcaggccgcccaggagaagcagaagacaggcaccgtgatggacaccaaggtggatgagctgaccacagagatcaaggagctgaaggagaccctggaggagaagaccaaggaggctgatgagtacctggacaagtactgcagcctgctgatcagccatgagaagctggagaaggccaaggagatgctggagacccaggtggcccacctgtgcagccagcagagcaagcaggacagccggggcagccccctgctgggccctgtggtgcccggccccagccccatccccagcgtgacagagaagaggctgagcagcggccagaacaaggccagcggcaagaggcagaggagcagcggcatctgggagaatggccggggccccaccccagccaccccagagagcttcagcaagaagagcaagaaggctgtgatgagcggcatccaccctgctgaggacacagagggcacagaatttgagcctgagggcctgcctgaggtggtgaagaagggctttgctgacatccccaccgggaagaccagcccctacatcctgcggaggaccaccatggccaccaggaccagcccccggctggccgcccagaagctggccctgagccccctgagcctgggcaaggagaacctggccgagagcagcaagcccacagctgggggcagccgcagccagaaggtgaaggtggcccagaggagccctgtggacagcggcaccatcctgcgggagcccaccaccaagtctgtgcctgtgaacaacctgcctgagaggagccccacagacagcccccgggagggcctgcgggtgaagaggggccgcctggtgcccagccccaaggccggcctggagagcaatggaagtgagaactgcaaggtgcagtag

SEQ ID NO: 147025 - DNA, 528 bp, synthetic construct
  misc_feature 1..528: note = Description of Artificial Sequence: Synthetic coding sequence
  source 1..528: mol_type = other DNA
ctgatgatcaagggcaggaagggcaaggtgaacaagatgacagccaaggagacagagctgcagcgggagatgcatgagatggcccagaagacagctgagctgcaggaggagctgtctggagagaagaaccggctggccggggagctgcagctgctgctggaggagatcaagagcagcaaggaccagctgaaggagctgaccctggagaacagcgagctgaagaagagcctggactgcatgcacaaggaccaggtggagaaggagggcaaggtgcgggaggagattgctgagtaccagctgcggctgcatgaagctgagaagaagcaccaggccctgctgctggacaccaacaagcagtatgaggtggagatccagacctaccgggagaagctgaccagcaaggaggagtgcctgagcagccagaagctggagattgacctgctgaagagcagcaaggaggagctgaacaacagcctgaaggccaccacccagatcctggaggagctgaagaagaccaaggagaactag

SEQ ID NO: 147026 - DNA, 4017 bp, synthetic construct
  misc_feature 1..4017: note = Description of Artificial Sequence: Synthetic coding sequence
  source 1..4017: mol_type = other DNA
atgttcctgatgcccaccagcagcgagctgaacagcggccagaacttcctgacccagtggatgaccaaccccagcagagctggggtcatcctgaacagaggcttccccatcctggaggccgacaaggagaagagagctgctgtggacatcagcaccagcttccccatcaagggcacccacttcagtgacagcttctccttcatcaatgaggaggacagcctgctggaggagcagaagctggagagcaacaacccctacaagccccagagcgacaagtctgagacccacacagccttcccctgcatcaagaagggcccccaggtggccgcctgccacagcgcccctggccaccaggaggagaacaagaatgacttcatcccagacctggccagcgagttcaaggagggcgcctacaaggaccccctcttcaagaagctggagcagctgaaggaggtgcagcagaagaagcaggagcagctgaagaggcagcagctggagcagctgcagaggctgatggaggagcaggagaagctgctgaccatggtgtctggccagtgcaccctgcccggcctgagcctgctgcctgatgaccagagccagaagcacaggagccctggcaacaccaccaccggggagcgggccacctgctgcttccccagctatgtgtacccagaccccacccaggaggagacctaccccagcaacatcctgagccatgagcagagcaacttctgcaggacagcccatggagactttgtgctgaccagcaagagggccagccccaacctcttcagcgaggcccagtaccaggaggcccctgtggagaagaacaacctgaaggaggagaacagaaaccaccccaccggggagagcatcctgtgctgggagaaggtgacagagcagatccaggaggccaatgacaagaacctgcagaagcatgatgacagcagcgaggtggccaacatcgaggagcggcccatcaaggccgccatcggggagaggaagcagacctttgaggactacctggaggagcagatccagctggaggagcaggagctgaagcagaagcagctgaaggaggccgagggccccctgcccatcaaggccaagcccaagcagcccttcctgaagagaggagagggcctggcccgcttcaccaatgccaagagcaagttccagaagggcaaggagagcaagctggtgaccaaccagagcaccagcgaggaccagcccctcttcaagatggaccggcagcagctgcagaggaagacagccctgaagaacaaggagctgtgtgccgacaaccccatcctgaagaaggacagcaaggcccggaccaagagcggctctgtgaccctgagccagaagcccaagatgctgaagtgcagcaacaggaagagcctgagccccagcggcctgaagatccagacaggcaagaagtgtgatggccagttccgggaccagatcaagtttgagaacaaggtgaccagcaacaacaaggaaaatgtgacagaatgtcccaagccctgtgacaccggctgcaccggctggaacaagacccagggcaaggaccggctgcccctgagcacaggccctgccagccggctggccgccaagagccccatccgggagaccatgaaggagagcgagagcagcctggatgtgtccctgcagaagaagctggagacctgggagcgggagaaggagaaggagaacctggagctggatgagttcctgttcctggagcaggccgcagatgagatctccttcagcagcaacagcagctttgtgctgaagatcctggagcgggaccagcagatctgcaagggccacaggatgagcagcacccctgtgaaggctgtgccccagaagaccaacccagctgaccccatcagccactgcaacagaagtgaggacctggaccacacagcccgggagaaggagagtgaatgtgaggtggcccccaagcagctgcacagcctgagcagcgcagatgagctgcgggagcagccctgcaagatcaggaaggctgtgcagaagagcaccagcgagaaccagacagagtggaatgccagagatgatgagggcgtgcccaacagcgacagcagcacagacagcgaggagcagctggatgtgaccatcaagcccagcacagaagatcgggagcggggcatcagcagccgggaggacagcccccaggtgtgtgatgacaagggccccttcaaggacaccaggacccaggaggacaagagaagagatgtggacctggacctgagtgacaaggactacagcagtgatgagagcatcatggagagcatcaagcacaaggtgtctgagcccagccgcagcagcagcctgagcctgagcaagatggactttgatgatgagaggacctggacagacctggaggagaacctgtgcaaccatgatgtggtgctgggcaatgaaagcacctacggcaccccccagacctgctaccccaacaatgaaattggcatcctggacaagaccatcaagaggaagatcgcccctgtgaagagaggagaggacctgagcaagagcagaagaagccgcagcccccccaccagcgagctgatgatgaagttcttccccagcctgaagcccaagcccaagagtgacagccacctgggcaatgagctgaagctgaacatcagccaggaccagcccccaggggacaatgcccggagccaggtgctgcgggagaagatcatcgagctggagacagaaattgagaagttcaaggcagaaaatgccagcctggccaagctgcgcatcgagcgggagagcgccctggagaagctgaggaaggagattgctgactttgagcagcagaaggccaaggagctggccagaattgaggagttcaagaaggaggagatgaggaagctgcagaaggagaggaaggtgtttgagaagtacaccacagctgcccggaccttcccagacaagaaggagcgggaggagatccagaccctgaagcagcagattgctgacctgcgggaggacctgaagaggaaggagaccaagtggagcagcacccacagccggctgcggagccagatccagatgctggtgcgggagaacacagacctgcgggaggagatcaaggtgatggagcgcttccggctggatgcctggaagagagctgaggccatcgagagcagcctggaggtggagaagaaggacaagctggccaacacctctgtgcgcttccagaacagccagatcagcagcggcacccaggtggagaagtacaagaagaactacctgcccatgcagggcaaccccccaagaagaagcaagagcgccccaccccgggacctgggcaacctggacaagggccaggccgccagcccccgggagcccctggagcccctgaacttcccagaccctgagtacaaggaggaggaggaggaccaggacatccagggcgagatcagccacccagatggcaaggtggagaaggtgtacaagaatggctgcagggtcatcctcttccccaacggcaccaggaaggaggtgtctgcagatggcaagaccatcaccgtgaccttcttcaatggagatgtgaagcaggtgatgccagaccagagggtcatctactactatgctgctgcccagaccacccacaccacctacccagagggcctggaggtgctgcacttcagcagcggccagatcgagaagcactacccagatggcaggaaggagatcaccttcccagaccagacagtgaagaacctcttcccagatggccaggaggagagcatcttcccagatggcaccatcgtgcgggtgcagagagatggcaacaagctgattgagttcaacaacggccagcgggagctgcacacagcccagttcaagagaagagagtacccagatggcaccgtgaagacagtgtatgccaacggccaccaggagaccaagtaccgcagcggccgcatccgggtgaaggacaaggagggcaatgtgctgatggacacagagctgtag

SEQ ID NO: 147027 - DNA, 3411 bp, synthetic construct
  misc_feature 1..3411: note = Description of Artificial Sequence: Synthetic coding sequence
  source 1..3411: mol_type = other DNA
atgttcctgatgcccaccagcagcgagctgaacagcggccagaacttcctgacccagtggatgaccaaccccagcagagctggggtcatcctgaacagaggcttccccatcctggaggccgacaaggagaagagagctgctgtggacatcagcaccagcttccccatcaagggcacccacttcagtgacagcttctccttcatcaatgaggaggacagcctgctggaggagcagaagctggagagcaacaacccctacaagccccagagcgacaagtctgagacccacacagccttcccctgcatcaagaagggcccccaggtggccgcctgccacagcgcccctggccaccaggaggagaacaagaatgacttcatcccagacctggccagcgagttcaaggagggcgcctacaaggaccccctcttcaagaagctggagcagctgaaggaggtgcagcagaagaagcaggagcagctgaagaggcagcagctggagcagctgcagaggctgatggaggagcaggagaagctgctgaccatggtgtctggccagtgcaccctgcccggcctgagcctgctgcctgatgaccagagccagaagcacaggagccctggcaacaccaccaccggggagcgggccacctgctgcttccccagctatgtgtacccagaccccacccaggaggagacctaccccagcaacatcctgagccatgagcagagcaacttctgcaggacagcccatggagactttgtgctgaccagcaagagggccagccccaacctcttcagcgaggcccagtaccaggaggcccctgtggagaagaacaacctgaaggaggagaacagaaaccaccccaccggggagagcatcctgtgctgggagaaggtgacagagcagatccaggaggccaatgacaagaacctgcagaagcatgatgacagcagcgaggtggccaacatcgaggagcggcccatcaaggccgccatcggggagaggaagcagacctttgaggactacctggaggagcagatccagctggaggagcaggagctgaagcagaagcagctgaaggaggccgagggccccctgcccatcaaggccaagcccaagcagcccttcctgaagagaggagagggcctggcccgcttcaccaatgccaagagcaagttccagaagggcaaggagagcaagctggtgaccaaccagagcaccagcgaggaccagcccctcttcaagatggaccggcagcagctgcagaggaagacagccctgaagaacaaggagctgtgtgccgacaaccccatcctgaagaaggacagcaaggcccggaccaagagcggctctgtgaccctgagccagaagcccaagatgctgaagtgcagcaacaggaagagcctgagccccagcggcctgaagatccagacaggcaagaagtgtgatggccagttccgggaccagatcaagtttgagaacaaggtgaccagcaacaacaaggaaaatgtgacagaatgtcccaagccctgtgacaccggctgcaccggctggaacaagacccagggcaaggaccggctgcccctgagcacaggccctgccagccggctggccgccaagagccccatccgggagaccatgaaggagagcgagagcagcctggatgtgtccctgcagaagaagctggagacctgggagcgggagaaggagaaggagaacctggagctggatgagttcctgttcctggagcaggccgcagatgagatctccttcagcagcaacagcagctttgtgctgaagatcctggagcgggaccagcagatctgcaagggccacaggatgagcagcacccctgtgaaggctgtgccccagaagaccaacccagctgaccccatcagccactgcaacagaagtgaggacctggaccacacagcccgggagaaggagagtgaatgtgaggtggcccccaagcagctgcacagcctgagcagcgcagatgagctgcgggagcagccctgcaagatcaggaaggctgtgcagaagagcaccagcgagaaccagacagagtggaatgccagagatgatgagggcgtgcccaacagcgacagcagcacagacagcgaggagcagctggatgtgaccatcaagcccagcacagaagatcgggagcggggcatcagcagccgggaggacagcccccaggtgtgtgatgacaagggccccttcaaggacaccaggacccaggaggacaagagaagagatgtggacctggacctgagtgacaaggactacagcagtgatgagagcatcatggagagcatcaagcacaaggtgtctgagcccagccgcagcagcagcctgagcctgagcaagatggactttgatgatgagaggacctggacagacctggaggagaacctgtgcaaccatgatgtggtgctgggcaatgaaagcacctacggcaccccccagacctgctaccccaacaatgaaattggcatcctggacaagaccatcaagaggaagatcgcccctgtgaagagaggagaggacctgagcaagagcagaagaagccgcagcccccccaccagcgagctgatgatgaagttcttccccagcctgaagcccaagcccaagagtgacagccacctgggcaatgagctgaagctgaacatcagccaggaccagcccccaggggacaatgcccggagccaggtgctgcgggagaagatcatcgagctggagacagaaattgagaagttcaaggcagaaaatgccagcctggccaagctgcgcatcgagcgggagagcgccctggagaagctgaggaaggagattgctgactttgagcagcagaaggccaaggagctggccagaattgaggagttcaagaaggaggagatgaggaagctgcagaaggagaggaaggtgtttgagaagtacaccacagctgcccggaccttcccagacaagaaggagcgggaggagatccagaccctgaagcagcagattgctgacctgcgggaggacctgaagaggaaggagaccaagtggagcagcacccacagccggctgcggagccagatccagatgctggtgcgggagaacacagacctgcgggaggagatcaaggtgatggagcgcttccggctggatgcctggaagagagctgaggccatcgagagcagcctggaggtggagaagaaggacaagctggccaacacctctgtgcgcttccagaacagccagatcagcagcggcacccaggtggagaagtacaagaagaactacctgcccatgcagggcacagcccagcccccccacacccccagcagcctgctggccgaccacctgccccccctgagcagcttccggcccttcagcaggaacatccagctgtgctacaccttctag

SEQ ID NO: 147028 - DNA, 3261 bp, synthetic construct
  misc_feature 1..3261: note = Description of Artificial Sequence: Synthetic coding sequence
  source 1..3261: mol_type = other DNA
atgttcctgatgcccaccagcagcgagctgaacagcggccagaacttcctgacccagtggatgaccaaccccagcagagctggggtcatcctgaacagaggcttccccatcctggaggccgacaaggagaagagagctgctgtggacatcagcaccagcttccccatcaagggcacccacttcagtgacagcttctccttcatcaatgaggaggacagcctgctggaggagcagaagctggagagcaacaacccctacaagccccagagcgacaagtctgagacccacacagccttcccctgcatcaagaagggcccccaggtggccgcctgccacagcgcccctggccaccaggaggagaacaagaatgacttcatcccagacctggccagcgagttcaaggagggcgcctacaaggaccccctcttcaagaagctggagcagctgaaggaggtgcagcagaagaagcaggagcagctgaagaggcagcagctggagcagctgcagaggctgatggaggagcaggagaagctgctgaccatggtgtctggccagtgcaccctgcccggcctgagcctgctgcctgatgaccagagccagaagcacaggagccctggcaacaccaccaccggggagcgggccacctgctgcttccccagctatgtgtacccagaccccacccaggaggagacctaccccagcaacatcctgagccatgagcagagcaacttctgcaggacagcccatggagactttgtgctgaccagcaagagggccagccccaacctcttcagcgaggcccagtaccaggaggcccctgtggagaagaacaacctgaaggaggagaacagaaaccaccccaccggggagagcatcctgtgctgggagaaggtgacagagcagatccaggaggccaatgacaagaacctgcagaagcatgatgacagcagcgaggtggccaacatcgaggagcggcccatcaaggccgccatcggggagaggaagcagacctttgaggactacctggaggagcagatccagctggaggagcaggagctgaagcagaagcagctgaaggaggccgagggccccctgcccatcaaggccaagcccaagcagcccttcctgaagagaggagagggcctggcccgcttcaccaatgccaagagcaagttccagaagggcaaggagagcaagctggtgaccaaccagagcaccagcgaggaccagcccctcttcaagatggaccggcagcagctgcagaggaagacagccctgaagaacaaggagctgtgtgccgacaaccccatcctgaagaaggacagcaaggcccggaccaagagcggctctgtgaccctgagccagaagcccaagatgctgaagtgcagcaacaggaagagcctgagccccagcggcctgaagatccagacaggcaagaagtgtgatggccagttccgggaccagatcaagtttgagaacaaggtgaccagcaacaacaaggaaaatgtgacagaatgtcccaagccctgtgacaccggctgcaccggctggaacaagacccagggcaaggaccggctgcccctgagcacaggccctgccagccggctggccgccaagagccccatccgggagaccatgaaggagagcgagagcagcctggatgtgtccctgcagaagaagctggagacctgggagcgggagaaggagaaggagaacctggagctggatgagttcctgttcctggagcaggccgcagatgagatctccttcagcagcaacagcagctttgtgctgaagatcctggagcgggaccagcagatctgcaagggccacaggatgagcagcacccctgtgaaggctgtgccccagaagaccaacccagctgaccccatcagccactgcaacagaagtgaggacctggaccacacagcccgggagaaggagagtgaatgtgaggtggcccccaagcagctgcacagcctgagcagcgcagatgagctgcgggagcagccctgcaagatcaggaaggctgtgcagaagagcaccagcgagaaccagacagagtggaatgccagagatgatgagggcgtgcccaacagcgacagcagcacagacagcgaggagcagctggatgtgaccatcaagcccagcacagaagatcgggagcggggcatcagcagccgggaggacagcccccaggtgtgtgatgacaagggccccttcaaggacaccaggacccaggaggacaagagaagagatgtggacctggacctgagtgacaaggactacagcagtgatgagagcatcatggagagcatcaagcacaaggtgtctgagcccagccgcagcagcagcctgagcctgagcaagatggactttgatgatgagaggacctggacagacctggaggagaacctgtgcaaccatgatgtggtgctgggcaatgaaagcacctacggcaccccccagacctgctaccccaacaatgaaattggcatcctggacaagaccatcaagaggaagatcgcccctgtgaagagaggagaggacctgagcaagagcagaagaagccgcagcccccccaccagcgagctgatgatgaagttcttccccagcctgaagcccaagcccaagagtgacagccacctgggcaatgagctgaagctgaacatcagccaggaccagcccccaggggacaatgcccggagccaggtgctgcgggagaagatcatcgagctggagacagaaattgagaagttcaaggcagaaaatgccagcctggccaagctgcgcatcgagcgggagagcgccctggagaagctgaggaaggagattgctgactttgagcagcagaaggccaaggagctggccagaattgaggagttcaagaaggaggagatgaggaagctgcagaaggagaggaaggtgtttgagaagtacaccacagctgcccggaccttcccagacaagaaggagcgggaggagatccagaccctgaagcagcagattgctgacctgcgggaggacctgaagaggaaggagaccaagtggagcagcacccacagccggctgcggagccagatccagatgctggtgcgggagaacacagacctgcgggaggagatcaaggtgatggagcgcttccggctggatgcctggaagagagctgaggccatcgagagcagcctggaggtggagaagaaggacaagctggccgccatccacctggaggaccccagcctgcacctgctggtgatctag

SEQ ID NO: 147029 - DNA, 1035 bp, synthetic construct
  misc_feature 1..1035: note = Description of Artificial Sequence: Synthetic coding sequence
  source 1..1035: mol_type = other DNA
atggacagctacagcgcccctgagagcacccccagcgccagcagcaggcctgaggactacttcatcggggccacccccctgcagaagaggctggagagcgtgaggaagcagagcagcttcatcctgaccccacccaggaggaagatcccccagtgcagccagctgcaggaggatgtggacccccagaaggtggccttcctgctgcacaagcagtggaccctgtacagcctgacccccctgtacaagttctcctacagcaacctgaaggagtacagccggctgctgaatgccttcatcgtggccgagaagcagaagggcctggccgtggaggtgggggaggacttcaacatcaaggtgatcttcagcaccctgctgggcatgaagggcacccagagggaccctgaggccttcctggtgcagatcgtgtccaagagccagctgcccagcgagaaccgggagggcaaggtgctgtggacaggctggttctgctgcgtgtttggagacagcctgctggagaccgtgtctgaggacttcacctgcctgcccctcttcctggccaatggagctgagagcaacacagccatcatcggcacctggttccagaagacctttgactgctacttcagccccctggccatcaatgccttcaacctgtcctggatggccgccatgtggacagcctgcaagatggaccactacgtggccaccacagagttcctgtggagcgtgccctgcagcccccagagcctggacatcagctttgccatccacccagaagatgccaaggccctgtgggacagcgtgcacaagaccccaggagaggtgacccaggaggaggtggacctcttcatggactgcctgtacagccacttccaccgccacttcaagatccacctgagcgccacccggctggtgcgggtgtccacctctgtggccagcgcccacacagatggcaagatcaagatcctgtgccacaagtacctgattggagtgctggcctacctgacagagctggccatcttccagattgaatag

SEQ ID NO: 147030 - DNA, 1173 bp, synthetic construct
  misc_feature 1..1173: note = Description of Artificial Sequence: Synthetic coding sequence
  source 1..1173: mol_type = other DNA
atggacagctacagcgcccctgagagcacccccagcgccagcagcaggcctgaggactacttcatcggggccacccccctgcagaagaggctggagagcgtgaggaagcagagcagcttcatcctgaccccacccaggaggaagatcccccagtgcagccagctgcaggaggatgtggacccccagaaggtggccttcctgctgcacaagcagtggaccctgtacagcctgacccccctgtacaagttctcctacagcaacctgaaggagtacagccggctgctgaatgccttcatcgtggccgagaagcagaagggcctggccgtggaggtgggggaggacttcaacatcaaggtgatcttcagcaccctgctgggcatgaagggcacccagagggaccctgaggccttcctggtgcagggcctcatcctgagcccccggctggagtacagcggcaccatcctggtggactgcaacctgtgcctgctgggcagcagtgaccccagcaccctggccttccaggtggccggcacagctggggcctgccaccacaccagaattgtgtccaagagccagctgcccagcgagaaccgggagggcaaggtgctgtggacaggctggttctgctgcgtgtttggagacagcctgctggagaccgtgtctgaggacttcacctgcctgcccctcttcctggccaatggagctgagagcaacacagccatcatcggcacctggttccagaagacctttgactgctacttcagccccctggccatcaatgccttcaacctgtcctggatggccgccatgtggacagcctgcaagatggaccactacgtggccaccacagagttcctgtggagcgtgccctgcagcccccagagcctggacatcagctttgccatccacccagaagatgccaaggccctgtgggacagcgtgcacaagaccccaggagaggtgacccaggaggaggtggacctcttcatggactgcctgtacagccacttccaccgccacttcaagatccacctgagcgccacccggctggtgcgggtgtccacctctgtggccagcgcccacacagatggcaagatcaagatcctgtgccacaagtacctgattggagtgctggcctacctgacagagctggccatcttccagattgaatag

SEQ ID NO: 147031 - DNA, 1035 bp, synthetic construct; identical to SEQ ID NO: 147029
  misc_feature 1..1035: note = Description of Artificial Sequence: Synthetic coding sequence
  source 1..1035: mol_type = other DNA

SEQ ID NO: 147032 - DNA, 615 bp, synthetic construct
  misc_feature 1..615: note = Description of Artificial Sequence: Synthetic coding sequence
  source 1..615: mol_type = other DNA
atggatgagaccgtggccgagttcatcaagaggaccatcctgaagatccccatgaatgagctgaccaccatcctgaaggcctgggacttcctgtctgagaaccagctgcagacagtgaacttccggcagaggaaggagagcgtggtgcagcacctgatccacctgtgtgaggagaagagggccagcatcagtgatgctgccctgctggacatcatctacatgcagttccaccagcaccagaaggtgtgggaggtgttccagatgagcaagggccctggagaagatgtggacctgtttgacatgaagcagttcaagaacagcttcaagaagatcctgcagagggccctgaagaatgtgacagtgtccttccgggagacagaggagaatgctgtgtggatcagaattgcctggggcacccagtacaccaagcccaaccagtacaagcccacctacgtggtgtactacagccagaccccctatgccttcaccagcagctccatgctgcggaggaacacccccctgctgggccaggagctggaggccaccgggaagatctacctgcggcaggaggagatcatcctggacatcacagagatgaagaaggcctgcaactag

SEQ ID NO: 147033 - DNA, 1020 bp, synthetic construct
  misc_feature 1..1020: note = Description of Artificial Sequence: Synthetic coding sequence
  source 1..1020: mol_type = other DNA
atggatgagaccgtggccgagttcatcaagaggaccatcctgaagatccccatgaatgagctgaccaccatcctgaaggcctgggacttcctgtctgagaaccagctgcagacagtgaacttccggcagaggaaggagagcgtggtgcagcacctgatccacctgtgtgaggagaagagggccagcatcagtgatgctgccctgctggacatcatctacatgcagttccaccagcaccagaaggtgtgggaggtgttccagatgagcaagggccctggagaagatgtggacctgtttgacatgaagcagttcaagaacagcttcaagaagatcctgcagagggccctgaagaatgtgacagtgtccttccgggagacagaggagaatgctgtgtggatcagaattgcctggggcacccagtacaccaagcccaaccagtacaagcccacctacgtggtgtactacagccagaccccctatgccttcaccagcagctccatgctgcggaggaacacccccctgctgggccaggccctgaccatcgccagcaagcaccaccagatcgtgaagatggacctgcggagccgctacctggacagcctgaaggccatcgtgttcaagcagtacaaccagacctttgagacccacaacagcaccacccccctgcaggagaggagcctgggcctggacatcaacatggacagccgcatcatccacgagaacatcgtggagaaggagcgggtgcagaggatcacccaggagaccttcggggactacccccagccccagctggagtttgcccagtacaagctggagaccaagttcaagagcggcctgaatggcagcatcctggccgagcgggaggagcccctgcgctgcctgatcaagttcagcagcccccacctgctggaggccctgaagagcctggccccagctggcattgctgatgcccccctgagccccctgctgacctgcatccccaacaagaggatgaactacttcaagatccgggacaagtag

SEQ ID NO: 147034 - DNA, 918 bp, synthetic construct
  misc_feature 1..918: note = Description of Artificial Sequence: Synthetic coding sequence
  source 1..918: mol_type = other DNA
atggatgagaccgtggccgagttcatcaagaggaccatcctgaagatccccatgaatgagctgaccaccatcctgaaggcctgggacttcctgtctgagaaccagctgcagacagtgaacttccggcagaggaaggagagcgtggtgcagcacctgatccacctgtgtgaggagaagagggccagcatcagtgatgctgccctgctggacatcatctacatgcagttccaccagcaccagaaggtgtgggaggtgttccagatgagcaagggccctggagaagatgtggacctgtttgacatgaagcagttcaagaacagcttcaagaagatcctgcagagggccctgaagaatgtgacagtgtccttccgggagacagaggagaatgctgtgtggatcagaattgcctggggcacccagtacaccaagcccaaccagtacaagcccacctacgtggtgtactacagccagaccccctatgccttcaccagcagctccatgctgcggaggaacacccccctgctgggccagacctttgagacccacaacagcaccacccccctgcaggagaggagcctgggcctggacatcaacatggacagccgcatcatccacgagaacatcgtggagaaggagcgggtgcagaggatcacccaggagaccttcggggactacccccagccccagctggagtttgcccagtacaagctggagaccaagttcaagagcggcctgaatggcagcatcctggccgagcgggaggagcccctgcgctgcctgatcaagttcagcagcccccacctgctggaggccctgaagagcctggccccagctggcattgctgatgcccccctgagccccctgctgacctgcatccccaacaagaggatgaactacttcaagatccgggacaagtag

SEQ ID NO: 147035 - DNA, 960 bp, synthetic construct
  misc_feature 1..960: note = Description of Artificial Sequence: Synthetic coding sequence
  source 1..960: mol_type = other DNA
atggatgagaccgtggccgagttcatcaagaggaccatcctgaagatccccatgaatgagctgaccaccatcctgaaggcctgggacttcctgtctgagaaccagctgcagacagtgaacttccggcagaggaaggagagcgtggtgcagcacctgatccacctgtgtgaggagaagagggccagcatcagtgatgctgccctgctggacatcatctgtgaagatgtggacctgtttgacatgaagcagttcaagaacagcttcaagaagatcctgcagagggccctgaagaatgtgacagtgtccttccgggagacagaggagaatgctgtgtggatcagaattgcctggggcacccagtacaccaagcccaaccagtacaagcccacctacgtggtgtactacagccagaccccctatgccttcaccagcagctccatgctgcggaggaacacccccctgctgggccaggccctgaccatcgccagcaagcaccaccagatcgtgaagatggacctgcggagccgctacctggacagcctgaaggccatcgtgttcaagcagtacaaccagacctttgagacccacaacagcaccacccccctgcaggagaggagcctgggcctggacatcaacatggacagccgcatcatccacgagaacatcgtggagaaggagcgggtgcagaggatcacccaggagaccttcggggactacccccagccccagctggagtttgcccagtacaagctggagaccaagttcaagagcggcctgaatggcagcatcctggccgagcgggaggagcccctgcgctgcctgatcaagttcagcagcccccacctgctggaggccctgaagagcctggccccagctggcattgctgatgcccccctgagccccctgctgacctgcatccccaacaagaggatgaactacttcaagatccgggacaagtag

SEQ ID NO: 147036 - DNA, 1062 bp, synthetic construct
  misc_feature 1..1062: note = Description of Artificial Sequence: Synthetic coding sequence
  source 1..1062: mol_type = other DNA
atggatgagaccgtggccgagttcatcaagaggaccatcctgaagatccccatgaatgagctgaccaccatcctgaaggcctgggacttcctgtctgagaaccagctgcagacagtgaacttccggcagaggaaggagagcgtggtgcagcacctgatccacctgtgtgaggagaagagggccagcatcagtgatgctgccctgctggacatcatctacatgcagttccaccagcaccagaaggtgtgggaggtgttccagatgagcaagggccctggagaagatgtggacctgtttgacatgaagcagttcaagaacagcttcaagaagatcctgcagagggccctgaagaatgtgacagtgtccttccgggagacagaggagaatgctgtgtggatcagaattgcctggggcacccagtacaccaagcccaaccagtacaagcccacctacgtggtgtactacagccagaccccctatgccttcaccagcagctccatgctgcggaggaacacccccctgctgggccaggccctgaccatcgccagcaagcaccaccagatcgtgaagatggacctgcggagccgctacctggacagcctgaaggccatcgtgttcaagcagtacaaccagacctttgagacccacaacagcaccacccccctgcaggagaggagcctgggcctggacatcaacatggacagccgcatcatccacgagaacatcgtggagaaggagcgggtgcagaggatcacccaggagaccttcggggactacccccagccccagctggagtttgcccagtacaagctggagaccaagttcaagagcggcctgaatggcagcatcctggccgagcgggaggagcccctgcgctgcctgatcaagttcagcagcccccacctgctggaggccctgaagagcctggccccagctgccctggtgtgccgcatccagaagctgctgtgctacagcggcagccacagccagggcacccaggaccccagctcctggcagaaggacctgtacctgctgtttgtgcccctgtacccccgctgctag

SEQ ID NO: 147037 - DNA, 903 bp, synthetic construct
  misc_feature 1..903: note = Description of Artificial Sequence: Synthetic coding sequence
  source 1..903: mol_type = other DNA
atggagcaggccaaccccctgcggccagatggagagagcaagggcggcgtgctggcccacctggagcggctggagacccaggtgagccgcagcaggaagcagagcgaggagctgcagagcgtgcaggcccaggagggcgccctgggcaccaagatccacaagctgcggcggctgagagatgagctgcgggctgtggtgcgccacagaagagcctctgtgaaggcctgcatcgccaacgtggagcccaaccagacagtggagatcaatgagcaggaggccctggaggagaagctggagaatgtgaaggccatcctgcaggcctaccacttcaccggcctgagcggcaagctgaccagcagaggagtgtgtgtgtgcatcagcacagcctttgagggcaacctgctggacagctactttgtggacctggtgatccagaagcccctgcgcatccaccaccacagcgtgcctgtgttcatccccctggaggagattgctgccaagtacctgcagaccaacatccagcacttcctgttcagcctgtgtgagtacctgaatgcctacagcggcaggaagtaccaggccgaccggctgcagagcgactttgctgccctgctgaccggccccctgcagaggaaccccctgtgcaacctgctgtccttcacctacaagctggaccccggcggccagagcttccccttctgtgcccggctgctgtacaaggacctgacagccaccctgcccacagatgtgacagtgacctgccagggcgtggaggtgctgagcacctcctgggaggagcagagggccagccatgagaccctcttctgcaccaagcccctgcaccaggtgtttgccagcttcaccaggaagggggagaagctggacatgagcctggtgtcctag

SEQ ID NO: 147038 - DNA, 903 bp, synthetic construct; identical to SEQ ID NO: 147037
  misc_feature 1..903: note = Description of Artificial Sequence: Synthetic coding sequence
  source 1..903: mol_type = other DNA

SEQ ID NO: 147039 - DNA, 885 bp, synthetic construct
  misc_feature 1..885: note = Description of Artificial Sequence: Synthetic coding sequence
  source 1..885: mol_type = other DNA
atggccggcatcctggccagcggcctgggcgtgctggcccacctggagcggctggagacccaggtgagccgcagcaggaagcagagcgaggagctgcagagcgtgcaggcccaggagggcgccctgggcaccaagatccacaagctgcggcggctgagagatgagctgcgggctgtggtgcgccacagaagagcctctgtgaaggcctgcatcgccaacgtggagcccaaccagacagtggagatcaatgagcaggaggccctggaggagaagctggagaatgtgaaggccatcctgcaggcctaccacttcaccggcctgagcggcaagctgaccagcagaggagtgtgtgtgtgcatcagcacagcctttgagggcaacctgctggacagctactttgtggacctggtgatccagaagcccctgcgcatccaccaccacagcgtgcctgtgttcatccccctggaggagattgctgccaagtacctgcagaccaacatccagcacttcctgttcagcctgtgtgagtacctgaatgcctacagcggcaggaagtaccaggccgaccggctgcagagcgactttgctgccctgctgaccggccccctgcagaggaaccccctgtgcaacctgctgtccttcacctacaagctggaccccggcggccagagcttccccttctgtgcccggctgctgtacaaggacctgacagccaccctgcccacagatgtgacagtgacctgccagggcgtggaggtgctgagcacctcctgggaggagcagagggccagccatgagaccctcttctgcaccaagcccctgcaccaggtgtttgccagcttcaccaggaagggggagaagctggacatgagcctggtgtcctag

SEQ ID NO: 147040 - DNA, 309 bp, synthetic construct
  misc_feature 1..309: note = Description of Artificial Sequence: Synthetic coding sequence
  source 1..309: mol_type = other DNA
atgcaggagaagtacccagatgctgtgtacctgtctgagggccccagcagctgcagcatgggcatccgcagcgccagccggcccggctttgagctggtgattgtgtggaggatccagattgatgaagatggcaaggtgttccccaagctggacctgctgaccaaggtgccccagagggccctggagctggacaagaacagagccattgaaacagcccccctgtccttccgcaccctggtgggcctgctgggcattgaagctgccctggagagcctcatcaagagcctgtgtgccgaggagaacaactag

SEQ ID NO: 147041 - DNA, 348 bp, synthetic construct
  misc_feature 1..348: note = Description of Artificial Sequence: Synthetic coding sequence
  source 1..348: mol_type = other DNA
atggaggcccccagctggagcgtgctgcagaggtctggagatgaggagaagtacccagatgctgtgtacctgtctgagggccccagcagctgcagcatgggcatccgcagcgccagcaggcctggctttgagctggtgattgtgtggaggatccagattgatgaagatggcaaggtgttccccaagctggacctgctgaccaaggtgccccagagggccctggagctggacaagaacagagccatcgagacagcccccctgtccttccgcaccctggtgggcctgctgggcatcgaggccgccctggagagcctcatcaagagcctgtgtgccgaggagaacaactag

SEQ ID NO: 147042 - DNA, 867 bp, synthetic construct
  misc_feature 1..867: note = Description of Artificial Sequence: Synthetic coding sequence
  source 1..867: mol_type = other DNA
atggatgctgagctggccgaggtgcgggccctgcaggccgagattgctgccctgcggcgggcctgtgaagatcctccagccccctgggaggagaagagccgggtgcagaagagcttccaggccatccaccagttcaacctggagggctggaagagcagcaaggacctgaagaaccagctgggccacctggagagcgagctgtccttcctgagcaccctgaccggcatcaacatccggaaccacagcaagcagacagaggacctgaccagcacagagatgacagagaagagcatcaggaaggtgctgcagaggcaccggctgagcggcaactgccacatggtgaccttccagctggagttccagatcctggagatccagaacaaggagcggctgagcagcgctgtgacagacctgaacatcatcatggagcccacagagtgcagcgagctgtctgaatttgtgtccagagctgaggagaggaaggacctcttcatgttcttccgcagcctgcacttctttgtggagtggtttgagtacaggaagaggaccttcaagcacctgaaggagaagtacccagatgctgtgtacctgtctgagggccccagcagctgcagcatgggcatccgcagcgccagccggcccggctttgagctggtgattgtgtggaggatccagattgatgaagatggcaaggtgttccccaagctggacctgctgaccaaggtgccccagagggccctggagctggacaagaacagagccattgaaacagcccccctgtccttccgcaccctggtgggcctgctgggcattgaagctgccctggagagcctcatcaagagcctgtgtgccgaggagaacaactag

SEQ ID NO: 147043 - DNA, 744 bp, synthetic construct
  misc_feature 1..744: note = Description of Artificial Sequence: Synthetic coding sequence
  source 1..744: mol_type = other DNA
aagagagctggccgcagtgacagctgtgccgccggccctgctgctgtgtccaatgccccctggacccagagctggcagagatgtgccccctgcaagctgcggagccggccctgtggggagcgggtgaggacccaccggcggcctgggaagaggagccctgagagcagcatcaggaaggtgctgcagaggcaccggctgagcggcaactgccacatggtgaccttccagctggagttccagatcctggagatccagaacaaggagcggctgagcagcgctgtgacagacctgaacatcatcatggagcccacagaatgttctgagctgtctgaatttgtgtccagagctgaggagaggaaggacctcttcatgttcttccgcagcctgcacttctttgtggagtggtttgagtacaggaagaggaccttcaagcacctgaaggagaagtacccagatgctgtgtacctgtctgagggccccagcagctgcagcatgggcatccgcagcgccagcaggcctggctttgagctggtgattgtgtggaggatccagattgatgaagatggcaaggtgttccccaagctggacctgctgaccaaggtgccccagagggccctggagctggacaagaacagagccatcgagacagcccccctgtccttccgcaccctggtgggcctgctgggcatcgaggccgccctggagagcctcatcaagagcctgtgtgccgaggagaacaactag

SEQ ID NO: 147044 - DNA, 807 bp, synthetic construct
  misc_feature 1..807: note = Description of Artificial Sequence: Synthetic coding sequence
  source 1..807: mol_type = other DNA
atgtctgggaaggccaatgccagcaagaagaatgcccagcagctgaagaggaaccccaagaggaagaaggacaatgaggaggtggtgctgtctgagaacaaggtgaggaacacagtgaagaagaacaagaaccacctgaaggacctgagcagcgagggccagaccaagcacaccaacctgaagcacggcaagacagctgccagcaagaggaagacctggcagcccctgagcaagagcacccgggaccacctgcagaccatgatggagagcgtcatcatgaccatcctgagcaacagcatcaaggagaaggaggagatccagtaccacctgaacttcctgaagaagaggctgctgcagcagtgtgagaccctgaaggtgccccccaagaagatggaggacctgaccaacgtgagcagcctgctgaacatggagcgggcccgggacaaggccaatgaggagggcctggccctgctgcaggaggagattgacaagatggtggagaccacagagctgatgactggaaacatccagagcctgaagaacaagatccagatcctggccagcgaggtggaggaggaggaggagcgggtgaagcagatgcaccagatcaacagcagcggcgtgctgagcctgcctgagctgagccagaagaccctgaaggcccccaccctgcagaaggagatcctggccctgatccccaaccagaatgccctgctgaaggacctggacatcctgcacaacagcagccagatgaagtccatgagcaccttcatcgaggaggcctacaagaagctggatgccagctag

SEQ ID NO: 147045 - DNA, 807 bp, synthetic construct; identical to SEQ ID NO: 147044
  misc_feature 1..807: note = Description of Artificial Sequence: Synthetic coding sequence
  source 1..807: mol_type = other DNA

SEQ ID NO: 147046 - DNA, 384 bp, synthetic construct
  misc_feature 1..384: note = Description of Artificial Sequence: Synthetic coding sequence
  source 1..384: mol_type = other DNA
atgggagacaagcccatctgggagcagatcggcagcagcttcatccagcactactaccagctgtttgacaatgacaggacccagctgggcgccatctacattgatgccagctgcctgacctgggagggccagcagttccagggcaaggccgccatcgtggagaagctgagcagcctgcccttccagaagatccagcacagcatcacagcccaggaccaccagcccaccccagacagctgcatcatctccatggtggtgggccagctgaaggcagatgaggaccccatcatgggcttccaccagatgttcctgctgaagaacatcaatgatgcctgggtgtgcaccaatgacatgttccggctggccctgcacaactttggatag

SEQ ID NO: 147047 - DNA, 786 bp, synthetic construct
  misc_feature 1..786: note = Description of Artificial Sequence: Synthetic coding sequence
  source 1..786: mol_type = other DNA
atgtcctggtgctgcctgtggctgtgcctgagctctgtgggccgcacaggcagcgctggccccagcctgcccttcagcgagctgtgcagcctgggcctgctgcggctgcggcctgtgttcagccccctgcacagcggccctgggaagccagcccagttcctggccggggaggccgaggaggtgaatgcctttgccctgggcttcctgagcaccagcagtggagtgtctggagaagatgaggtggagcccctgcatgatggagtggaggaggccgagaagaagatggaggaggagggcgtgtctgtgtctgagatggaggccaccggggcccagggccccagccgggtggaggaggccgagggccacacagaggtgacagaggccgagggcagccagggcacagctgaggctgatggccctggggccagcagtggagatgaagatgccagcggccgggccgccagccctgagagcgccagcagcaccccagagagcctgcaggcccggcggcaccaccagttcctggagcccgccccagcccctggagctgctgtgctgagcagcgagcctgctgagcccctgctggtgcgccaccccccccggcccaggaccaccggcccccggccccggcaggacccccacaaggccggcctgagccactacgtgaagctgttctccttctacgccaagatgcccatggagaggaaggccctggagatggtggagaagtgcatctttgtgatgatctggagatacctgctgctgatgctggccgcccggctgtag

SEQ ID NO: 147048 - DNA, 1686 bp, synthetic construct
  misc_feature 1..1686: note = Description of Artificial Sequence: Synthetic coding sequence
  source 1..1686: mol_type = other DNA
atggctgaccacaacccagacagcgacagcacccccaggaccctgctgcggcgggtgctggacacagctgaccccaggaccccaagaagacccaggtctgcccgggccggggcccggcgggccctgctggagacagccagccccaggaagctgagcggccagaccaggaccatcgcccggggccgcagccacggggcccggtctgtgggccgcagcgcccacatccaggccagcggccacctggaggagcagacccccaggaccctgctgaagaacatcctgctgacagcccctgagagcagcatcctgatgcctgagagcgtggtgaagcctgtgcctgccccccaggccgtgcagcccagccggcaggagagcagctgtggcagcctggagctgcagctgcctgagctggagccccccaccaccctggcccctggcctgctggcccctggccgcaggaagcagaggctgcggctgagcgtcttccagcagggcgtggaccagggcctgagcctgagccaggagccccagggcaatgctgatgccagcagcctgaccaggagcctgaacctgacctttgccacccccctgcagccccagagcgtgcagaggcctggcctggcccggcggcccccagcccggcgggctgtggatgtgggcgccttcctgcgggacctgcgggacaccagcctggccccacccaacatcgtgctggaggacacccagcccttcagccagcccatggtgggcagccccaacgtgtaccacagcctgccctgcaccccccacactggagcagaagatgctgagcaggccgccggcaggaagacccagagcagcggccctggcctgcagaagaacagccctgggaagccagcccagttcctggccggggaggccgaggaggtgaatgcctttgccctgggcttcctgagcaccagcagtggagtgtctggagaagatgaggtggagcccctgcatgatggagtggaggaggccgagaagaagatggaggaggagggcgtgtctgtgtctgagatggaggccaccggggcccagggccccagccgggtggaggaggccgagggccacacagaggtgacagaggccgagggcagccagggcacagctgaggctgatggccctggggccagcagtggagatgaagatgccagcggccgggccgccagccctgagagcgccagcagcaccccagagagcctgcaggcccggcggcaccaccagttcctggagcccgccccagcccctggagctgctgtgctgagcagcgagcctgctgagcccctgctggtgcgccaccccccccggcccaggaccaccggcccccggccccggcaggacccccacaaggccggcctgagccactacgtgaagctgttctccttctacgccaagatgcccatggagaggaaggccctggagatggtggagaagtgcctggacaagtacttccagcacctgtgtgatgacctggaggtgtttgctgcccatgctggcaggaagacagtgaagccagaggacctggagctgctgatgaggcggcagggcctggtgacagaccaggtgtccctgcacgtgctggtggagcggcacctgcccctggagtaccggcagctgctgatcccctgtgcctacagcggcaacagcgtcttccctgcccagtag

SEQ ID NO: 147049 - DNA, 447 bp, synthetic construct
  misc_feature 1..447: note = Description of Artificial Sequence: Synthetic coding sequence
  source 1..447: mol_type = other DNA
atgcctgagagcgtggtgaagcctgtgcctgccccccaggccgtgcagcccagccggcaggagagcagctgtggcagcctggagctgcagctgcctgagctggagccccccaccaccctggcccctggcctgctggcccctggaagaaggaagcagaggctgcggctgtctgtgttccagcagggcgtggaccagggcctgagcctgagccaggagccccagggcaatgctgatgccagcagcctgaccaggagcctgaacctgacctttgccacccccctgcagccccagagcgtgcagaggcctggcctggcccggcggcccccagccaggagagctgtggatgtgggcgccttcctgcgggacctgcgggacaccagcctggccccacccagcaaggtgggcttcagccctgctggcctgtggggcaagctgagccccctgtag

SEQ ID NO: 147050 - DNA, 1686 bp, synthetic construct; identical to SEQ ID NO: 147048
  misc_feature 1..1686: note = Description of Artificial Sequence: Synthetic coding sequence
  source 1..1686: mol_type = other DNA

SEQ ID NO: 147051 - DNA, 819 bp, synthetic construct
  misc_feature 1..819: note = Description of Artificial Sequence: Synthetic coding sequence
  source 1..819: mol_type = other DNA
atgaggaggagccgcagcagcgctgctgccaagctgcggggccagaagaggtctggggccagcgctgccccagctgccagcgctgctgctgccctggcccccagcgccaccaggacccggcgcagcgccagccaggccggcagcaagagccaggccgtggagaagccacccagcgagaagccccggctgcggcgcagcagcccccgggcccaggaggagggccctggagagcccccacctcctgagctggccctgctgcccccacctcctcctcctccacccaccccagccacccccaccagcagcgccagcaacctggacctgggggagcagcgggagcgctgggagaccttccagaagaggcagaagctgaccagcgagggcgccgccaagctgctgctggacacctttgagtaccagggcctggtgaagcacactggaggctgccactgtggggctgtgcgctttgaggtgtgggccagcgctgacctgcacatctttgactgcaactgcagcatctgcaagaagaagcagaacagacacttcatcgtgcctgccagccgcttcaagctgctgaagggagctgagcacatcaccacctacaccttcaacacccacaaggcccagcacaccttctgcaagagatgtggggtgcagagcttctacacccccaggagcaaccctgggggctttggaattgccccccactgcctggatgagggcaccgtgcgctccatggtgacagaggagttcaacggcagtgactgggagaaggccatgaaggagcacaagaccatcaagaacatgagcaaggagtag

SEQ ID NO: 147052 - DNA, 2961 bp, synthetic construct
  misc_feature 1..2961: note = Description of Artificial Sequence: Synthetic coding sequence
  source 1..2961: mol_type = other DNA
atggtgtccaagagtgaccagctgctgattgtggtgtccatcctggagggccgccacttccccaagaggcccaagcacatgctggtggtggaggccaagtttgatggagagcagctggccacagatcctgtggaccacacagaccagcctgagtttgccacagagctggcctgggagattgacaggaaggccctgcaccagcaccggctgcagaggacccccatcaagctgcagtgctttgccctggaccctgtgaccagcgccaaggagaccatcggctacatcgtgctggacctgaggacagcccaggagaccaagcaggcccccaagtggtaccagctgctgagcaacaagtacaccaagttcaagtctgagatccagatcagcatcgccctggagacagacaccaagccccctgtggacagcttcaaggccaagggggcccccccaagagatggcaaggtgcctgccatcctggccggcctggacccccgggacatcgtggccgtgctgaatgaggagggcggctaccaccagatcggccctgctgagtactgcacagacagcttcatcatgtctgtgaccatcgcctttgccacccagctggagcagctgatcccctgcaccatgaagctgcctgagcggcagcctgagttcttcttctactacagcctgctgggcaatgatgtgaccaatgagcccttcaatgacctgatcaaccccaactttgagcctgagcgggcctctgtgcgcatccgcagctctgtggagatcctgcgggtgtacctggccctgcagagcaagctgcagatccacctgtgctgcggggaccagagcctgggcagcacagagatccccctgaccggcctgctgaagaagggcagcacagagatcaaccagcaccctgtgacagtggagggcgccttcaccctggacccccccaacagagccaagcagaagctggcccccatccctgtggagctggcccccaccgtgggcgtgtctgtggccctgcagcgggagggcatcgacagccagagcctgattgagctgaagacccagaatgaacatgagcctgagcacagcaagaagaaggtgctgacccccatcaaggagaagaccctgaccggccccaagagccccaccgtgtcccctgtgcccagccacaaccagagcccccccaccaaggatgatgccacagagagcgaggtggagagcctgcagtatgacaaggacaccaagcccaaccccaaggccagcagctctgtgcctgccagcctggcccagctggtgaccaccagcaatgccagcgaggtggccagcggccagaagattgctgtgcctgccaccagccaccacttctgcttcagcattgacctgcggagcatccacgccctggagatcggcttccccatcaactgcatcctgcgctacagctaccccttctttggatctgctgcccccatcatgaccaacccccctgtggaggtgaggaagaacatggaggtgttcctgccccagagctactgtgcctttgattttgccaccatgccccaccagctgcaggacaccttcctgcgcatccccctgctggtggagctgtggcacaaggacaagatgagcaaggacctgctgctgggcatcgcccgcatccagctgagcaacatcctgagcagcgagaagacccgcttcctgggcagcaatggagagcagtgctggaggcagacctacagcgagagcgtgcctgtgattgctgcccagggcagcaacaacagaattgctgacctgagctacacagtgaccctggaggactatggcctggtgaagatgagggagatcttcatcagtgacagcagccagggcgtgtctgctgtgcagcagaagcccagcagcctgcccccagccccctgccccagcgagatccagacagagccccgggagaccctggagtacaaggccgccctggagctggagatgtggaaggagatgcaggaggacatctttgagaaccagctgaagcagaaggagctggcccacatgcaggccctggccgaggagtggaagaagagggaccgggagcgggagagcctggtgaagaagaaggtggccgagtacaccatcctggagggcaagctgcagaagaccctgattgacctggagaagcgggagcagcagctggcctctgtggagagcgagctgcagcgggagaagaaggagctgcagagcgagcggcagaggaacctgcaggagctgcaggacagcatccggcgggccaaggaggactgcatccaccaggtggagctggagcggctgaagatcaagcagctggaggaggacaagcaccggctgcagcagcagctgaatgatgctgagaacaagtacaagatcctggagaaggagttccagcagttcaaggaccagcagaacaacaagccagagatccggctgcagagcgagatcaacctgctgaccctggagaaggtggagctggagaggaagctggagagcgccaccaagagcaagctgcactacaagcagcagtggggccgggccctgaaggagctggcccggctgaagcagcgggagcaggagagccagatggcccggctgaagaagcagcaggaggagctggagcagatgaggctgcgctacctggccgctgaggagaaggacacagtgaagacagagcggcaggagctgctggacatcagaaatgagctgaaccggctgcggcagcaggagcagaagcagtaccaggacagcacagagatcgccagcggcaagaaggatggcccccacggctctgtgctggaggagggcctggatgactacctgacccggctgattgaggagcgggacaccctgatgaggactggagtgtacaaccacgaggaccgcatcatcagcgagctggaccggcagatccgggagatcctggccaagagcaatgccagcaactag

SEQ ID NO: 147053 - DNA, 2883 bp, synthetic construct
  misc_feature 1..2883: note = Description of Artificial Sequence: Synthetic coding sequence
  source 1..2883: mol_type = other DNA
atgctggtggtggaggccaagtttgatggagagcagctggccacagatcctgtggaccacacagaccagcctgagtttgccacagagctggcctgggagattgacaggaaggccctgcaccagcaccggctgcagaggacccccatcaagctgcagtgctttgccctggaccctgtgaccagcgccaaggagaccatcggctacatcgtgctggacctgaggacagcccaggagaccaagcaggcccccaagtggtaccagctgctgagcaacaagtacaccaagttcaagtctgagatccagatcagcatcgccctggagacagacaccaagccccctgtggacagcttcaaggccaagggggcccccccaagagatggcaaggtgcctgccatcctggccggcctggacccccgggacatcgtggccgtgctgaatgaggagggcggctaccaccagatcggccctgctgagtactgcacagacagcttcatcatgtctgtgaccatcgcctttgccacccagctggagcagctgatcccctgcaccatgaagctgcctgagcggcagcctgagttcttcttctactacagcctgctgggcaatgatgtgaccaatgagcccttcaatgacctgatcaaccccaactttgagcctgagcgggcctctgtgcgcatccgcagctctgtggagatcctgcgggtgtacctggccctgcagagcaagctgcagatccacctgtgctgcggggaccagagcctgggcagcacagagatccccctgaccggcctgctgaagaagggcagcacagagatcaaccagcaccctgtgacagtggagggcgccttcaccctggacccccccaacagagccaagcagaagctggcccccatccctgtggagctggcccccaccgtgggcgtgtctgtggccctgcagcgggagggcatcgacagccagagcctgattgagctgaagacccagaatgaacatgagcctgagcacagcaagaagaaggtgctgacccccatcaaggagaagaccctgaccggccccaagagccccaccgtgtcccctgtgcccagccacaaccagagcccccccaccaaggatgatgccacagagagcgaggtggagagcctgcagtatgacaaggacaccaagcccaaccccaaggccagcagctctgtgcctgccagcctggcccagctggtgaccaccagcaatgccagcgaggtggccagcggccagaagattgctgtgcctgccaccagccaccacttctgcttcagcattgacctgcggagcatccacgccctggagatcggcttccccatcaactgcatcctgcgctacagctaccccttctttggatctgctgcccccatcatgaccaacccccctgtggaggtgaggaagaacatggaggtgttcctgccccagagctactgtgcctttgattttgccaccatgccccaccagctgcaggacaccttcctgcgcatccccctgctggtggagctgtggcacaaggacaagatgagcaaggacctgctgctgggcatcgcccgcatccagctgagcaacatcctgagcagcgagaagacccgcttcctgggcagcaatggagagcagtgctggaggcagacctacagcgagagcgtgcctgtgattgctgcccagggcagcaacaacagaattgctgacctgagctacacagtgaccctggaggactatggcctggtgaagatgagggagatcttcatcagtgacagcagccagggcgtgtctgctgtgcagcagaagcccagcagcctgcccccagccccctgccccagcgagatccagacagagccccgggagaccctggagtacaaggccgccctggagctggagatgtggaaggagatgcaggaggacatctttgagaaccagctgaagcagaaggagctggcccacatgcaggccctggccgaggagtggaagaagagggaccgggagcgggagagcctggtgaagaagaaggtggccgagtacaccatcctggagggcaagctgcagaagaccctgattgacctggagaagcgggagcagcagctggcctctgtggagagcgagctgcagcgggagaagaaggagctgcagagcgagcggcagaggaacctgcaggagctgcaggacagcatccggcgggccaaggaggactgcatccaccaggtggagctggagcggctgaagatcaagcagctggaggaggacaagcaccggctgcagcagcagctgaatgatgctgagaacaagtacaagatcctggagaaggagttccagcagttcaaggaccagcagaacaacaagccagagatccggctgcagagcgagatcaacctgctgaccctggagaaggtggagctggagaggaagctggagagcgccaccaagagcaagctgcactacaagcagcagtggggccgggccctgaaggagctggcccggctgaagcagcgggagcaggagagccagatggcccggctgaagaagcagcaggaggagctggagcagatgaggctgcgctacctggccgctgaggagaaggacacagtgaagacagagcggcaggagctgctggacatcagaaatgagctgaaccggctgcggcagcaggagcagaagcagtaccaggacagcacagagatcgccagcggcaagaaggatggcccccacggctctgtgctggaggagggcctggatgactacctgacccggctgattgaggagcgggacaccctgatgaggactggagtgtacaaccacgaggaccgcatcatcagcgagctggaccggcagatccgggagatcctggccaagagcaatgccagcaactag

SEQ ID NO: 147054 - DNA, 2961 bp, synthetic construct; identical to SEQ ID NO: 147052
  misc_feature 1..2961: note = Description of Artificial Sequence: Synthetic coding sequence
  source 1..2961: mol_type = other DNA

SEQ ID NO: 147055 - DNA, 1143 bp, synthetic construct
  misc_feature 1..1143: note = Description of Artificial Sequence: Synthetic coding sequence
  source 1..1143: mol_type = other DNA
atggtgtccaagagtgaccagctgctgattgtggtgtccatcctggagggccgccacttccccaagaggcccaagcacatgctggtggtggaggccaagtttgatggagagcagctggccacagatcctgtggaccacacagaccagcctgagtttgccacagagctggcctgggagattgacaggaaggccctgcaccagcaccggctgcagaggacccccatcaagctgcagtgctttgccctggaccctgtgaccagcgccaaggagaccatcggctacatcgtgctggacctgaggacagcccaggagaccaagcaggcccccaagtggtaccagctgctgagcaacaagtacaccaagttcaagtctgagatccagatcagcatcgccctggagacagacaccaagccccctgtggacagcttcaaggccaagggggcccccccaagagatggcaaggtgcctgccatcctggccggcctggacccccgggacatcgtggccgtgctgaatgaggagggcggctaccaccagatcggccctgctgagtactgcacagacagcttcatcatgtctgtgaccatcgcctttgccacccagctggagcagctgatcccctgcaccatgaagctgcctgagcggcagcctgagttcttcttctactacagcctgctgggcaatgatgtgaccaatgagcccttcaatgacctgatcaaccccaactttgagcctgagcgggcctctgtgcgcatccgcagctctgtggagatcctgcgggtgtacctggccctgcagagcaagctgcagatccacctgtgctgcggggaccagagcctgggcagcacagagatccccctgaccggcctgctgaagaagggcagcacagagatcaaccagcaccctgtgacagtggagggcgccttcaccctggacccccccaacagagccaagcagaagctggcccccatccctgtggagctggcccccaccgtgggcgtgtctgtggccctgcagcgggagggcatcgacagccaggatgccttctggtacagcgccctggacatcatcttccccctcttcatcttcctgttcctggtgctggatgccatcaggaagtttgccaactatgaggagaagtag

SEQ ID NO: 147056 - DNA, 3828 bp, synthetic construct
  misc_feature 1..3828: note = Description of Artificial Sequence: Synthetic coding sequence
  source 1..3828: mol_type = other DNA
atgagcctggactttggatctgtggccctgcctgtgcagaatgaagatgaggagtatgatgaggaggactatgaaagagagaaggagctgcagcagctgctgacagacctgccccatgacatgctggatgatgacctgagcagccctgagctgcagtacagcgactgcagtgaagatggaacagatggccagccccaccaccctgagcagctggagatgtcctggaatgagcagatgctgcccaagagccagagcgtgaatggccccagctgccagggcctggagccctacaacaaggtgacctacaagccctaccagagcagcgcccagaacaacggcagccctgcccaggagatcaccggcagtgacacctttgagggcctgcagcagcagttcctgggcgccaatgaaaattctgctgagaacatgcagatcatccagctgcaggtgctgaacaaggccaaggagcggcagctggagaacctgattgagaagctgaatgaaagtgagcggcagatccgctacctgaaccaccagctggtgatcatcaaggatgagaaggatggcctgaccctgagcctgcgggagagccagaagctgttccagaatggcaaggagcgggagatccagctggaggcccagatcaaggccctggagacccagatccaggccctgaaggtgaatgaggagcagatgatcaagaagagcaggaccacagagatggccctggagagcctgaagcagcagctggtggacctgcaccacagcgagagcctgcagagggcccgggagcagcacgagagcatcgtgatgggcctgaccaagaagtatgaggagcaggtgctgagcctgcagaagaacctggatgccaccgtgacagccctgaaggagcaggaggacatctgcagccggctgaaggaccacgtgaagcagctggagaggaaccaggaggccatcaagctggagaagacagagatcatcaacaagctgaccaggagcctggaggagagccagaagcagtgtgcccacctgctgcagagcggctctgtgcaggaggtggcccagctgcagttccagctgcagcaggcccagaaggcccacgccatgtctgccaacatgaacaaggccctgcaggaggagctgacagagctgaaggatgagatcagcctgtatgaatctgctgccaagctgggcatccaccccagcgacagcgagggggagctgaacatcgagctgacagagagctatgtggacctgggcatcaagaaggtgaactggaagaagagcaaggtgaccagcatcgtgcaggaggaggaccccaatgaggagctgagcaaggatgagttcatcctgaagctgaaggccgaggtgcagaggctgctgggcagcaacagcatgaagaggcacctggtgtcccagctgcagaatgacctgaaggactgccacaagaagattgaggacctgcaccaggtgaagaaggatgagaagagcattgaggtggagaccaagacagacaccagcgagaagcccaagaaccagctgtggccagagagcagcaccagtgatgtggtgagagatgacatcctgctgctgaagaatgagatccaggtgctgcagcagcagaaccaggagctgaaggagacagagggcaagctgaggaacaccaaccaggacctgtgcaaccagatgaggcagatggtgcaggactttgaccatgacaagcaggaggccgtggacagatgtgagaggacctaccagcagcaccacgaggccatgaagacccagatccgggagagcctgctggccaagcacgccctggagaagcagcagctgtttgaggcctatgaaagaacccacctgcagctgcggtctgagctggacaagctgaacaaggaggtgacagctgtgcaggagtgctacctggaggtgtgccgggagaaggacaacctggagctgaccctgaggaagaccacagagaaggagcagcagacccaggagaagatcaaggagaagctgatccagcagctggagaaggagtggcagagcaagctggaccagaccatcaaggccatgaagaagaagaccctggactgtggcagccagacagaccaggtgaccaccagtgatgtgatcagcaagaaggagatggccatcatgattgaggagcagaagtgcaccatccagcagaacctggagcaggagaaggacatcgccatcaagggggccatgaagaagctggagattgagctggagctgaagcactgtgagaacatcaccaagcaggtggagattgctgtgcagaatgcccaccagcgctggctgggggagctgcctgagctggccgagtaccaggccctggtgaaggccgagcagaagaagtgggaggagcagcacgaggtgtctgtgaacaagaggatcagctttgctgtgtctgaggccaaggagaagtggaagtctgagctggagaacatgaggaagaacatcctgcccgggaaggagctggaggagaagatccacagcctgcagaaggagctggagctgaagaatgaggaggtgcctgtggtgatccgggcagagctggccaaggcccggtctgagtggaacaaggagaagcaggaggagatccaccgcatccaggagcagaatgagcaggactaccggcagttcctggatgaccacaggaacaagatcaatgaggtgctggccgccgccaaggaggacttcatgaagcagaagacagagctgctgctgcagaaggagacagagctgcagacctgcctggaccagagcagaagagagtggaccatgcaggaggccaagaggatccagctggagatctaccagtatgaggaggacatcctgactgtgctgggcgtgctgctgagtgacacccagaaggagcacatcagtgacagcgaggacaagcagctgctggagatcatgagcacctgcagcagcaagtggatgtctgtgcagtactttgagaagctgaagggctgcatccagaaggccttccaggacaccctgcccctgctggtggagaatgctgaccctgagtggaagaagaggaacatggccgagctgagcaaggacagcgccagccagggcaccggccagggcgaccccggccctgctgctggccaccacgcccagcccctggccctgcaggccacagaggccgaggccgacaagaagaaggtgctggagatcaaggacctgtgctgcggccactgcttccaggagctggagaaggccaagcaggagtgccaggacctgaagggcaagctggagaagtgctgccgccacctgcagcacctggagaggaagcacaaggctgtggtggagaagattggagaggagaacaacaaggtggtggaggagctgattgaagaaaataatgacatgaagaacaagctggaggagctgcagaccctgtgcaagaccccacccaggagcctgtctgctggggccattgaaaatgcctgcctgccctgcagcggcggggccctggaggagctgcggggccagtacatcaaggctgtgaagaagatcaagtgtgacatgctgcgctacatccaggagagcaaggagagagctgctgagatggtgaaggccgaggtgctgcgggagcggcaggagacagccaggaagatgaggaagtactacctgatctgcctgcagcagatcctgcaggatgatggcaaggagggcgctgagaagaagatcatgaatgctgccagcaagctggccaccatggccaagctgctggagacccccatcagcagcaagagccagagcaagaccacccagagcggcatgagcaagtag

SEQ ID NO: 147057 - DNA, 5133 bp, synthetic construct
  misc_feature 1..5133: note = Description of Artificial Sequence: Synthetic coding sequence
  source 1..5133: mol_type = other DNA
atgagcctggactttggatctgtggccctgcctgtgcagaatgaagatgaggagtatgatgaggaggactatgaaagagagaaggagctgcagcagctgctgacagacctgccccatgacatgctggatgatgacctgagcagccctgagctgcagtacagcgactgcagtgaagatggaacagatggccagccccaccaccctgagcagctggagatgtcctggaatgagcagatgctgcccaagagccagagcgtgaatggctacaatgagatccagagcctgtatgctggggagaagtgtggaaatgtgtgggaggagaacagaagcaagacagaagatagacaccctgtgtaccaccctgaggagggcggagatgagggcggcagcggctacagcccccccagcaaatgtgagcagacagacctgtaccacctgcctgagaacttccggccctacaccaacggccagaagcaggagttcaacaaccaggccaccaacgtcatcaagttcagtgacccccagtggaaccacttccagggccccagctgccagggcctggagccctacaacaaggtgacctacaagccctaccagagcagcgcccagaacaacggcagccctgcccaggagatcactggaagtgacacctttgagggcctgcagcagcagttcctgggcgccaatgaaaacagcgctgagaacatgcagatcatccagctgcaggtgctgaacaaggccaaggagcggcagctggagaacctgattgagaagctgaatgaaagtgagcggcagatccgctacctgaaccaccagctggtgatcatcaaggatgagaaggatggcctgaccctgagcctgcgggagagccagaagctgttccagaatggcaaggagcgggagatccagctggaggcccagatcaaggccctggagacccagatccaggccctgaaggtgaatgaggagcagatgatcaagaagagcaggaccacagagatggccctggagagcctgaagcagcagctggtggacctgcaccacagcgagagcctgcagagggcccgggagcagcacgagagcatcgtgatgggcctgaccaagaagtatgaggagcaggtgctgagcctgcagaagaacctggatgccaccgtgacagccctgaaggagcaggaggacatctgcagccggctgaaggaccacgtgaagcagctggagaggaaccaggaggccatcaagctggagaagacagagatcatcaacaagctgaccaggagcctggaggagagccagaagcagtgtgcccacctgctgcagagcggctctgtgcaggaggtggcccagctgcagttccagctgcagcaggcccagaaggcccacgccatgtctgccaacatgaacaaggccctgcaggaggagctgacagagctgaaggatgagatcagcctgtatgagagcgctgccaagctgggcatccaccccagcgacagcgagggggagctgaacatcgagctgacagagagctatgtggacctgggcatcaagaaggtgaactggaagaagagcaaggtgaccagcatcgtgcaggaggaggaccccaatgaggagctgagcaaggatgagttcatcctgaagctgaaggccgaggtgcagaggctgctgggcagcaacagcatgaagaggcacctggtgtcccagctgcagaatgacctgaaggactgccacaagaagattgaggacctgcaccaggtgaagaaggatgagaagagcattgaggtggagaccaagacagacaccagcgagaagcccaagaaccagctgtggccagagagcagcaccagtgatgtggtgagagatgacatcctgctgctgaagaatgagatccaggtgctgcagcagcagaaccaggagctgaaggagacagagggcaagctgaggaacaccaaccaggacctgtgcaaccagatgaggcagatggtgcaggactttgaccatgacaagcaggaggccgtggacagatgtgagaggacctaccagcagcaccacgaggccatgaagacccagatccgggagagcctgctggccaagcacgccctggagaagcagcagctgtttgaggcctatgaaagaacccacctgcagctgcggtctgagctggacaagctgaacaaggaggtgacagctgtgcaggagtgctacctggaggtgtgccgggagaaggacaacctggagctgaccctgaggaagaccacagagaaggagcagcagacccaggagaagatcaaggagaagctgatccagcagctggagaaggagtggcagagcaagctggaccagaccatcaaggccatgaagaagaagaccctggactgtggcagccagacagaccaggtgaccaccagtgatgtgatcagcaagaaggagatggccatcatgattgaggagcagaagtgcaccatccagcagaacctggagcaggagaaggacatcgccatcaagggggccatgaagaagctggagattgagctggagctgaagcactgtgagaacatcaccaagcaggtggagattgctgtgcagaatgcccaccagcgctggctgggggagctgcctgagctggccgagtaccaggccctggtgaaggccgagcagaagaagtgggaggagcagcacgaggtgtctgtgaacaagaggatcagctttgctgtgtctgaggccaaggagaagtggaagtctgagctggagaacatgaggaagaacatcctgcccgggaaggagctggaggagaagatccacagcctgcagaaggagctggagctgaagaatgaggaggtgcctgtggtgatccgggcagagctggccaaggcccggtctgagtggaacaaggagaagcaggaggagatccaccgcatccaggagcagaatgagcaggactaccggcagttcctggatgaccacaggaacaagatcaatgaggtgctggccgccgccaaggaggacttcatgaagcagaagacagagctgctgctgcagaaggagacagagctgcagacctgcctggaccagagccggcgggagtggaccatgcaggaggccaagaggatccagctggagatctaccagtatgaggaggacatcctgactgtgctgggcgtgctgctgagtgacacccagaaggagcacatcagtgacagcgaggacaagcagctgctggagatcatgagcacctgcagcagcaagtggatgtctgtgcagtactttgagaagctgaagggctgcatccagaaggccttccaggacaccctgcccctgctggtggagaatgctgaccctgagtggaagaagaggaacatggccgagctgagcaaggacagcgccagccagggcaccggccagggcgaccccggccctgctgctggccaccacgcccagcccctggccctgcaggccacagaagctgaggccgacaagaagaaggtgctggagatcaaggacctgtgctgcggccactgcttccaggagctggagaaggccaagcaggagtgccaggacctgaagggcaagctggagaagtgctgccgccacctgcagcacctggagaggaagcacaaggctgtggtggagaagatcggggaggagaacaacaaggtggtggaggagctgattgaggagaacaatgacatgaagaacaagctggaggagctgcagaccctgtgcaagaccccacccaggagcctgtctgctggggccattgaaaatgcctgcctgccctgcagcggcggggccctggaggagctgcggggccagtacatcaaggctgtgaagaagatcaagtgtgacatgctgcgctacatccaggagagcaaggagagagctgctgagatggtgaaggccgaggtgctgcgggagcggcaggagacagccaggaagatgaggaagtactacctgatctgcctgcagcagatcctgcaggatgatggcaaggagggcgctgagaagaagatcatgaatgctgccagcaagctggccaccatggccaagctgctggagacccccatcagcagcaagagccagagcaagaccacccagagcgccctgcccctgaccagcgagatgctgattgctgtgaagaagagcaagagaaatgatgtgaaccagaagatcccctgctgcatcgagagcaagagcaacagcgtgaacaccatcaccaggaccctgtgtgagcaggcccccaagagaagagctgcctgcaacctgcagaggctgctggagaacagcgagcaccagagcatcaagcacgtgggcagcaaggagacccacctggagttccagtttggagatggcagctgcaagcacctgaacagcctgcccagaaatgtgtccccagagtttgtgccctgtgagggggagggcggcttcggcctgcacaagaagaaggacctgctgagtgacaatggaagtgagagcctgccccacagcgctgcctaccccttcctgggcaccctgggcaacaagcccagcccccgctgcaccccaggccccagcgagagcggctgcatgcacatcaccttccgggacagcaatgaaaggctgggcctgaaggtgtacaagtgcaaccccctgatggagagtgaaaatgctgccagcgagaagagccagggcctggatgtgcaggagccccctgtgaaggatggaggagacctgagtgactgcctgggctggcccagcagcagcgccaccctgagctttgacagccgggaggccagctttgtgcacggccggccccagggcaccctggagatccccagcgagagcgtgaagagcaagcagttcagccccagcggctacctgagtgacacagaggagagcaacatgatctgccagaccatgaagtgccagcgctaccagaccccctacctgtctgaggagaccacctacctggagcccgggaagatctctgtgaactgtggccaccccagccgccacaaggctgaccggctgaagagtgacttcaagaagctgagcagcaccctgcccagctctgtgtgccagcagcccagcaggaagctgattgtgcccctgagcagccagcaggacagcggctttgacagcccctttgtgaacctggactag

SEQ ID NO: 147058 - DNA, 4965 bp, synthetic construct
  misc_feature 1..4965: note = Description of Artificial Sequence: Synthetic coding sequence
  source 1..4965: mol_type = other DNA
atgagcctggactttggatctgtggccctgcctgtgcagaatgaagatgaggagtatgatgaggaggactatgaaagagagaaggagctgcagcagctgctgacagacctgccccatgacatgctggatgatgacctgagcagccctgagctgcagtacagcgactgcagtgaagatggaacagatggccagccccaccaccctgagcagctggagatgtcctggaatgagcagatgctgcccaagagccagagcgtgaatggctacaatgagatccagagcctgtatgctggggagaagtgtggaaatgtgtgggaggagaacagaagcaagacagaagatagacaccctgtgtaccaccctgaggagggcggagatgagggcggcagcggctacagcccccccagcaaatgtgagcagacagacctgtaccacctgcctgagaacttccggccctacaccaacggccagaagcaggagttcaacaaccaggccaccaacgtcatcaagttcagtgacccccagtggaaccacttccagggccccagctgccagggcctggagccctacaacaaggtgacctacaagccctaccagagcagcgcccagaacaacggcagccctgcccaggagatcactggaagtgacacctttgagggcctgcagcagcagttcctgggcgccaatgaaaacagcgctgagaacatgcagatcatccagctgcaggtgctgaacaaggccaaggagcggcagctggagaacctgattgagaagctgaatgaaagtgagcggcagatccgctacctgaaccaccagctggtgatcatcaaggatgagaaggatggcctgaccctgagcctgcgggagagccagaagctgttccagaatggcaaggagcgggagatccagctggaggcccagatcaaggccctggagacccagatccaggccctgaaggtgaatgaggagcagatgatcaagaagagcaggaccacagagatggccctggagagcctgaagcagcagctggtggacctgcaccacagcgagagcctgcagagggcccgggagcagcacgagagcatcgtgatgggcctgaccaagaagtatgaggagcaggtgctgagcctgcagaagaacctggatgccaccgtgacagccctgaaggagcaggaggacatctgcagccggctgaaggaccacgtgaagcagctggagaggaaccaggaggccatcaagctggagaagacagagatcatcaacaagctgaccaggagcctggaggagagccagaagcagtgtgcccacctgctgcagagcggctctgtgcaggaggtggcccagctgcagttccagctgcagcaggcccagaaggcccacgccatgtctgccaacatgaacaaggccctgcaggaggagctgacagagctgaaggatgagatcagcctgtatgagagcgctgccaagctgggcatccaccccagcgacagcgagggggagctgaacatcgagctgacagagagctatgtggacctgggcatcaagaaggtgaactggaagaagagcaaggtgaccagcatcgtgcaggaggaggaccccaatgaggagctgagcaaggatgagttcatcctgaagctgaaggccgaggtgcagaggctgctgggcagcaacagcatgaagaggcacctggtgtcccagctgcagaatgacctgaaggactgccacaagaagattgaggacctgcaccaggtgaagaaggatgagaagagcattgaggtggagaccaagacagacaccagcgagaagcccaagaaccagctgtggccagagagcagcaccagtgatgtggtgagagatgacatcctgctgctgaagaatgagatccaggtgctgcagcagcagaaccaggagctgaaggagacagagggcaagctgaggaacaccaaccaggacctgtgcaaccagatgaggcagatggtgcaggactttgaccatgacaagcaggaggccgtggacagatgtgagaggacctaccagcagcaccacgaggccatgaagacccagatccgggagagcctgctggccaagcacgccctggagaagcagcagctgtttgaggcctatgaaagaacccacctgcagctgcggtctgagctggacaagctgaacaaggaggtgacagctgtgcaggagtgctacctggaggtgtgccgggagaaggacaacctggagctgaccctgaggaagaccacagagaaggagcagcagacccaggagaagatcaaggagaagctgatccagcagctggagaaggagtggcagagcaagctggaccagaccatcaaggccatgaagaagaagaccctggactgtggcagccagacagaccaggtgaccaccagtgatgtgatcagcaagaaggagatggccatcatgattgaggagcagaagtgcaccatccagcagaacctggagcaggagaaggacatcgccatcaagggggccatgaagaagctggagattgagctggagctgaagcactgtgagaacatcaccaagcaggtggagattgctgtgcagaatgcccaccagcgctggctgggggagctgcctgagctggccgagtaccaggccctggtgaaggccgagcagaagaagtgggaggagcagcacgaggtgtctgtgaacaagaggatcagctttgctgtgtctgaggccaaggagaagtggaagtctgagctggagaacatgaggaagaacatcctgcccgggaaggagctggaggagaagatccacagcctgcagaaggagctggagctgaagaatgaggaggtgcctgtggtgatccgggcagagctggccaaggcccggtctgagtggaacaaggagaagcaggaggagatccaccgcatccaggagcagaatgagcaggactaccggcagttcctggatgaccacaggaacaagatcaatgaggtgctggccgccgccaaggaggacttcatgaagcagaagacagagctgctgctgcagaaggagacagagctgcagacctgcctggaccagagccggcgggagtggaccatgcaggaggccaagaggatccagctggagatctaccagtatgaggaggacatcctgactgtgctgggcgtgctgctgagtgacacccagaaggagcacatcagtgacagcgaggacaagcagctgctggagatcatgagcacctgcagcagcaagtggatgtctgtgcagtactttgagaagctgaagggctgcatccagaaggccttccaggacaccctgcccctgctggtggagaatgctgaccctgagtggaagaagaggaacatggccgagctgagcaaggacagcgccagccagggcaccggccagggcgaccccggccctgctgctggccaccacgcccagcccctggccctgcaggccacagaagctgaggccgaggagaacaacaaggtggtggaggagctgattgaggagaacaatgacatgaagaacaagctggaggagctgcagaccctgtgcaagaccccacccaggagcctgtctgctggggccattgaaaatgcctgcctgccctgcagcggcggggccctggaggagctgcggggccagtacatcaaggctgtgaagaagatcaagtgtgacatgctgcgctacatccaggagagcaaggagagagctgctgagatggtgaaggccgaggtgctgcgggagcggcaggagacagccaggaagatgaggaagtactacctgatctgcctgcagcagatcctgcaggatgatggcaaggagggcgctgagaagaagatcatgaatgctgccagcaagctggccaccatggccaagctgctggagacccccatcagcagcaagagccagagcaagaccacccagagcgccctgcccctgaccagcgagatgctgattgctgtgaagaagagcaagagaaatgatgtgaaccagaagatcccctgctgcatcgagagcaagagcaacagcgtgaacaccatcaccaggaccctgtgtgagcaggcccccaagagaagagctgcctgcaacctgcagaggctgctggagaacagcgagcaccagagcatcaagcacgtgggcagcaaggagacccacctggagttccagtttggagatggcagctgcaagcacctgaacagcctgcccagaaatgtgtccccagagtttgtgccctgtgagggggagggcggcttcggcctgcacaagaagaaggacctgctgagtgacaatggaagtgagagcctgccccacagcgctgcctaccccttcctgggcaccctgggcaacaagcccagcccccgctgcaccccaggccccagcgagagcggctgcatgcacatcaccttccgggacagcaatgaaaggctgggcctgaaggtgtacaagtgcaaccccctgatggagagtgaaaatgctgccagcgagaagagccagggcctggatgtgcaggagccccctgtgaaggatggaggagacctgagtgactgcctgggctggcccagcagcagcgccaccctgagctttgacagccgggaggccagctttgtgcacggccggccccagggcaccctggagatccccagcgagagcgtgaagagcaagcagttcagccccagcggctacctgagtgacacagaggagagcaacatgatctgccagaccatgaagtgccagcgctaccagaccccctacctgtctgaggagaccacctacctggagcccgggaagatctctgtgaactgtggccaccccagccgccacaaggctgaccggctgaagagtgacttcaagaagctgagcagcaccctgcccagctctgtgtgccagcagcccagcaggaagctgattgtgcccctgagcagccagcaggacagcggctttgacagcccctttgtgaacctggactag

SEQ ID NO: 147059 - DNA, 1779 bp, synthetic construct
  misc_feature 1..1779: note = Description of Artificial Sequence: Synthetic coding sequence
  source 1..1779: mol_type = other DNA
atgagcctggactttggatctgtggccctgcctgtgcagaatgaagatgaggagtatgatgaggaggactatgaaagagagaaggagctgcagcagctgctgacagacctgccccatgacatgctggatgatgacctgagcagccctgagctgcagtacagcgactgcagtgaagatggaacagatggccagccccaccaccctgagcagctggagatgtcctggaatgagcagatgctgcccaagagccagagcgtgaatggctacaatgagatccagagcctgtatgctggggagaagtgtggaaatgtgtgggaggagaacagaagcaagacagaagatagacaccctgtgtaccaccctgaggagggcggagatgagggcggcagcggctacagcccccccagcaaatgtgagcagacagacctgtaccacctgcctgagaacttccggccctacaccaacggccagaagcaggagttcaacaaccaggccaccaacgtcatcaagttcagtgacccccagtggaaccacttccagggccccagctgccagggcctggagccctacaacaaggtgacctacaagccctaccagagcagcgcccagaacaacggcagccctgcccaggagatcactggaagtgacacctttgagggcctgcagcagcagttcctgggcgccaatgaaaacagcgctgagaacatgcagatcatccagctgcaggtgctgaacaaggccaaggagcggcagctggagaacctgattgagaagctgaatgaaagtgagcggcagatccgctacctgaaccaccagctggtgatcatcaaggatgagaaggatggcctgaccctgagcctgcgggagagccagaagctgttccagaatggcaaggagcgggagatccagctggaggcccagatcaaggccctggagacccagatccaggccctgaaggtgaatgaggagcagatgatcaagaagagcaggaccacagagatggccctggagagcctgaagcagcagctggtggacctgcaccacagcgagagcctgcagagggcccgggagcagcacgagagcatcgtgatgggcctgaccaagaagtatgaggagcaggtgctgagcctgcagaagaacctggatgccaccgtgacagccctgaaggagcaggaggacatctgcagccggctgaaggaccacgtgaagcagctggagaggaaccaggaggccatcaagctggagaagacagagatcatcaacaagctgaccaggagcctggaggagagccagaagcagtgtgcccacctgctgcagagcggctctgtgcaggaggtggcccagctgcagttccagctgcagcaggcccagaaggcccacgccatgtctgccaacatgaacaaggccctgcaggaggagctgacagagctgaaggatgagatcagcctgtatgagagcgctgccaagctgggcatccaccccagcgacagcgagggggagctgaacatcgagctgacagagagctatgtggacctgggcatcaagaaggtgaactggaagaagagcaaggtgaccagcatcgtgcaggaggaggaccccaatgaggagctgagcaaggatgagttcatcctgaagctgaaggccgaggtgcagaggctgctgggcagcaacagcatgaagaggcacctggtgtcccagctgcagaatgacctgaaggactgccacaagaagattgaggacctgcaccaggtgaagaagaagaagaagaagaagaagtag

SEQ ID NO: 147060 - DNA, 207 bp, synthetic construct
  misc_feature 1..207: note = Description of Artificial Sequence: Synthetic coding sequence
  source 1..207: mol_type = other DNA
atgagcctggactttggatctgtggccctgcctgtgcagaatgaagatgaggagtatgatgaggaggactatgaaagagagaaggagctgcagcagctgctgacagacctgccccatgacatgctggatgatgacctgagcagccctgagctgcagtacagcgactgcagtgaagatggaacagatggccagccccaccacccctag

SEQ ID NO: 147061 - DNA, 4755 bp, synthetic construct
  misc_feature 1..4755: note = Description of Artificial Sequence: Synthetic coding sequence
  source 1..4755: mol_type = other DNA
atgagcctgacctcctggttcctggtgtcctctgggggcaccaggcaccggctgccccgggagatgatctttgtgggcagagatgactgtgagctgatgctgcagagccgctctgtggacaagcagcacgccgtcatcaactatgatgccagcacagatgagcacctggtgaaggacctgggcagcctgaatggcacctttgtgaatgatgtgcgcatccctgagcagacctacatcaccctgaagctggaggacaagctgcgcttcggctatgacaccaacctcttcaccgtggtgcagggcgagatgagggtgcctgaggaggccctgaagcatgagaagttcaccatccagctgcagctgagccagaagagcagcgagagcgagctgagcaagagcgccagcgccaagagcattgacagcaaggtggctgatgctgccacagaggtgcagcacaagaccacagaggccctgaagtctgaggagaaggccatggacatcagcgccatgccccggggcacccccctgtatggccagcccagctggtggggagatgatgaggtggatgagaagagggccttcaagaccaacgggaagccagaggagaagaaccatgaagctggcaccagcggctgcggcattgatgccaagcaggtggaggagcagagcgctgctgccaatgaggaggtgctcttccccttctgccgggagcccagctactttgagatccccaccaaggagttccagcagcccagccagatcacagagagcaccatccacgagatccccaccaaggacacccccagcagccacatcactggagctggccacgccagcttcaccatcgagtttgatgacagcaccccaggcaaggtgaccatccgggaccacgtgaccaagttcaccagtgaccagaggcacaagagcaagaagagcagccctggcacccaggacctgctgggcatccagacaggcatgatggcccctgagaacaaggtggccgactggctggcccagaacaaccccccccagatgctgtgggagaggacagaggaggacagcaagagcatcaagagtgatgtgcctgtgtacctgaagaggctgaagggcaacaagcatgatgatggcacccagagcgacagtgaaaatgctggggcccaccggcgctgcagcaagagggccaccctggaggagcacctgcggcggcaccacagcgagcacaagaagctgcagaaggtgcaggccacagagaagcaccaggaccaggccgtgaccagcagcgcccaccaccggggcggccacggcgtgccccacggcaagctgctgaagcagaagtctgaggagcccagcgtgtccatccccttcctgcagacagccctgctgcggagcagcggcagcctgggccaccggcccagccaggagatggacaagatgctgaagaaccaggccaccagcgccaccagcgagaaggacaatgatgatgaccagagcgacaagggcacctacaccatcgagctggagaaccccaacagcgaggaggtggaggccaggaagatgattgacaaggtgtttggagtggatgacaaccaggactacaacagacctgtgatcaatgagaagcacaaggacctgatcaaggactgggccctgagcagcgctgctgctgtgatggaggagaggaagcccctgaccaccagcggcttccaccacagcgaggagggcaccagcagcagcggcagcaagcgctgggtgtcccagtgggccagcctggccgccaaccacaccaggcatgaccaggaggagcgcatcatggagttcagcgcccccctgcccctggagaatgaaacagagatcagcgagagcggcatgacagtgcgcagcacaggcagcgccaccagcctggccagccagggcgagaggagaagaaggaccctgccccagctgcccaatgaggagaagagcctggagagccaccgggccaaggtggtgacccagaggagtgaaattggagagaagcaggacacagagctgcaggagaaggagacccccacccaggtgtaccagaaggacaagcaggatgctgaccggcccctgagcaagatgaacagagctgtgaatggagagaccctgaagacaggaggagacaacaagaccctgctgcacctgggcagcagcgcccctgggaaggagaagtcagaaacagacaaggagaccagcctggtgaagcagaccctggccaagctgcagcagcaggagcagcgggaggaggcccagtggacccccaccaagctgagcagcaagaatgtgtctggccagacagacaagtgccgggaggagaccttcaagcaggagagccagcccccagagaagaacagcggccacagcaccagcaagggggacagagtggcccagagcgagagcaagaggaggaaggccgaggagatcctgaagagccagacccccaagggcggggacaagaaggagagcagcaagagcctggtgcggcagggcagcttcaccatcgagaagcccagccccaacatccccatcgagctgatcccccacatcaacaagcagaccagcagcacccccagcagcctggccctgaccagcgccagccgcatccgggagaggtctgagagcctggaccctgacagctccatggacaccaccctcatcctgaaggacacagaagctgtgatggccttcctggaggccaagctgcgggaggacaacaagacagatgagggccctgacacccccagctacaacagagacaacagcatcagccctgagagtgatgtggacacagccagcaccatcagcctggtgactggagaaacagagaggaagagcacccagaagaggaagagcttcaccagcctgtacaaggaccgctgcagcacaggcagccccagcaaggatgtgaccaagagcagcagcagcggggcccgggagaagatggagaagaagaccaagagccgcagcacagatgtgggcagcagagcagatggcaggaagtttgtgcagagcagcggccgcatccggcagcccagcgtggacctgacagatgatgaccagaccagctctgtgccccacagcgccatcagtgacatcatgagcagtgaccaggagacctacagctgcaagccccacggccgcacccccctgaccagcgcagatgaacatgtgcacagcaagctggagggcagcaaggtgaccaagagcaagaccagccctgtggtgtctggcagcagcagcaagagcaccaccctgccccggccccggcccaccaggaccagcctgctgcggcgggcccggctgggggaggccagtgacagcgagctggctgatgctgacaaggcctctgtggccagcgaggtgtccaccaccagcagcaccagcaagcccccaactggaagaagaaacatcagcagaattgacctgctggcccagcccaggaggacccggctgggcagcctgagcgcccggagtgacagcgaggccaccatcagccgcagcagcgccagcagcaggacagctgaggccatcatccgcagcggggcccggctggtgcccagcgacaagttcagcccccgcatccgggccaacagcatcagccggctgagtgacagcaaggtgaagtccatgaccagcgcccacggcagcgcctctgtgaacagccgctggaggcgcttccccacagattatgccagcaccagtgaagatgaatttggcagcaacagaaacagccccaagcacacccggctgcggaccagccctgccctgaagaccacccggctgcagagcgctggcagcgccatgcccaccagcagcagcttcaagcaccgcatcaaggagcaggaggactacatccgggactggacagcccaccgggaggagatcgcccgcatcagccaggacctggccctgattgcccgggagatcaatgatgtggccggggagattgattctgtgaccagcagcggcacagcccccagcaccaccgtgtccacagctgccaccaccccaggcagcgccatcgacacccgggaggagctggtggacagagtgtttgatgagagcctgaacttcaggaagatcccccccctggtgcacagcaagaccccagagggcaacaacggccgcagcggggacccccggccccaggccgctgagcccccagaccacctgaccatcaccaggaggaggacctggagcagagatgaggtgatgggagacaacctgctgctgagcagcgtcttccagttcagcaagaagatccggcagagcattgacaagacagctgggaagatccgcatcctcttcaaggacaaggacaggaactgggatgacatcgagagcaagctgcgggcagagagcgaggtgcccatcgtgaagaccagctccatggagatcagcagcatcctgcaggagctgaagagggtggagaagcagctgcaggccatcaatgccatgattgatcctgatggcaccctggaggccctgaacaacatgggcttccccagcgccatgctgcccagcccccccaagcagaagagcagccctgtgaacaaccaccacagccctggccagacccccaccctgggccagcctgaggcccgggccctgcaccctgctgctgtgtctgctgctgctgagtttgaaaatgctgagagcgaggccgacttcagcatccacttcaaccgcttcaacccagatggagaggaggaggatgtgacagtgcaggagtag

SEQ ID NO: 147062 - DNA, 4383 bp, synthetic construct
  misc_feature 1..4383: note = Description of Artificial Sequence: Synthetic coding sequence
  source 1..4383: mol_type = other DNA
atgagcctgacctcctggttcctggtgtcctctgggggcaccaggcaccggctgccccgggagatgatctttgtgggcagagatgactgtgagctgatgctgcagagccgctctgtggacaagcagcacgccgtcatcaactatgatgccagcacagatgagcacctggtgaaggacctgggcagcctgaatggcacctttgtgaatgatgtgcgcatccctgagcagacctacatcaccctgaagctggaggacaagctgcgcttcggctatgacaccaacctcttcaccgtggtgcagggcgagatgagggtgcctgaggaggccctgaagcatgagaagttcaccatccagctgcagctgagccagaagagcagcgagagcgagctgagcaagagcgccagcgccaagagcattgacagcaaggtggctgatgctgccacagaggtgcagcacaagaccacagaggccctgaagtctgaggagaaggccatggacatcagcgccatgccccggggcacccccctgtatggccagcccagctggtggggagatgatgaggtggatgagaagagggccttcaagaccaacgggaagccagaggagaagaaccatgaagctggcaccagcggctgcggcattgatgccaagcaggtggaggagcagagcgctgctgccaatgaggaggtgctcttccccttctgccgggagcccagctactttgagatccccaccaaggagttccagcagcccagccagatcacagagagcaccatccacgagatccccaccaaggacacccccagcagccacatcactggagctggccacgccagcttcaccatcgagtttgatgacagcaccccaggcaaggtgaccatccgggaccacgtgaccaagttcaccagtgaccagaggcacaagagcaagaagagcagccctggcacccaggacctgctgggcatccagacaggcatgatggcccctgagaacaaggtggccgactggctggcccagaacaaccccccccagatgctgtgggagaggacagaggaggacagcaagagcatcaagagtgatgtgcctgtgtacctgaagaggctgaagggcaacaagcatgatgatggcacccagagcgacagtgaaaatgctggggcccaccggcgctgcagcaagagggccaccctggaggagcacctgcggcggcaccacagcgagcacaagaagctgcagaaggtgcaggccacagagaagcaccaggaccaggccgtggtgtttggagtggatgacaaccaggactacaacagacctgtgatcaatgagaagcacaaggacctgatcaaggactgggccctgagcagcgctgctgctgtgatggaggagaggaagcccctgaccaccagcggcttccaccacagcgaggagggcaccagcagcagcggcagcaagcgctgggtgtcccagtgggccagcctggccgccaaccacaccaggcatgaccaggaggagcgcatcatggagttcagcgcccccctgcccctggagaatgaaacagagatcagcgagagcggcatgacagtgcgcagcacaggcagcgccaccagcctggccagccagggcgagaggagaagaaggaccctgccccagctgcccaatgaggagaagagcctggagagccaccgggccaaggtggtgacccagaggagtgaaattggagagaagcaggacacagagctgcaggagaaggagacccccacccaggtgtaccagaaggacaagcaggatgctgaccggcccctgagcaagatgaacagagctgtgaatggagagaccctgaagacaggaggagacaacaagaccctgctgcacctgggcagcagcgcccctgggaaggagaagtcagaaacagacaaggagaccagcctggtgaagcagaccctggccaagctgcagcagcaggagcagcgggaggaggcccagtggacccccaccaagctgagcagcaagaatgtgtctggccagacagacaagtgccgggaggagaccttcaagcaggagagccagcccccagagaagaacagcggccacagcaccagcaagggggacagagtggcccagagcgagagcaagaggaggaaggccgaggagatcctgaagagccagacccccaagggcggggacaagaaggagagcagcaagagcctggtgcggcagggcagcttcaccatcgagaagcccagccccaacatccccatcgagctgatcccccacatcaacaagcagaccagcagcacccccagcagcctggccctgaccagcgccagccgcatccgggagaggtctgagagcctggaccctgacagctccatggacaccaccctcatcctgaaggacacagaagctgtgatggccttcctggaggccaagctgcgggaggacaacaagacagatgagggccctgacacccccagctacaacagagacaacagcatcagccctgagagtgatgtggacacagccagcaccatcagcctggtgactggagaaacagagaggaagagcacccagaagaggaagagcttcaccagcctgtacaaggaccgctgcagcacaggcagccccagcaaggatgtgaccaagagcagcagcagcggggcccgggagaagatggagaagaagaccaagagccgcagcacagatgtgggcagcagagcagatggcaggaagtttgtgcagagcagcggccgcatccggcagcccagcgtggacctgacagatgatgaccagaccagctctgtgccccacagcgccatcagtgacatcatgagcagtgaccaggagacctacagctgcaagccccacggccgcacccccctgaccagcgcagatgaacatgtgcacagcaagctggagggcagcaaggtgaccaagagcaagaccagccctgtggtgtctggcagcagcagcaagagcaccaccctgccccggccccggcccaccaggaccagcctgctgcggcgggcccggctgggggaggccagtgacagcgagctggctgatgctgacaaggcctctgtggccagcgaggtgtccaccaccagcagcaccagcaagcccccaactggaagaagaaacatcagcagaattgacctgctggcccagcccaggaggacccggctgggcagcctgagcgcccggagtgacagcgaggccaccatcagccgcagcagcgccagcagcaggacagctgaggccatcatccgcagcggggcccggctggtgcccagcgacaagttcagcccccgcatccgggccaacagcatcagccggctgagtgacagcaaggtgaagtccatgaccagcgcccacggcagcgccagcgccctgaagaccacccggctgcagagcgctggcagcgccatgcccaccagcagcagcttcaagcaccgcatcaaggagcaggaggactacatccgggactggacagcccaccgggaggagatcgcccgcatcagccaggacctggccctgattgcccgggagatcaatgatgtggccggggagattgattctgtgaccagcagcggcacagcccccagcaccaccgtgtccacagctgccaccaccccaggcagcgccatcgacacccgggaggaggtgggggacctgcacggggagatgcacaagctggtggacagagtgtttgatgagagcctgaacttcaggaagatcccccccctggtgcacagcaagaccccagagggcaacaacggccgcagcggggacccccggccccaggccgctgagcccccagaccacctgaccatcaccaggaggaggacctggagcagagatgaggtgatgggagacaacctgctgctgagcagcgtcttccagttcagcaagaagatccggcagagcattgacaagacagctgggaagatccgcatcctcttcaaggacaaggacaggaactgggatgacatcgagagcaagctgcgggcagagagcgaggtgcccatcgtgaagaccagctccatggagatcagcagcatcctgcaggagctgaagagggtggagaagcagctgcaggccatcaatgccatgattgatcctgatggcaccctggaggccctgaacaacatgggcttccccagcgccatgctgcccagcccccccaagcagaagagcagccctgtgaacaaccaccacagccctggccagacccccaccctgggccagcctgaggcccgggccctgcaccctgctgctgtgtctgctgctgctgagtttgaaaatgctgagagcgaggccgacttcagcatccacttcaaccgcttcaacccagatggagaggaggaggatgtgacagtgcaggagtag

SEQ ID NO: 147063 - DNA, 4461 bp, synthetic construct
  misc_feature 1..4461: note = Description of Artificial Sequence: Synthetic coding sequence
  source 1..4461: mol_type = other DNA
atgagcctgacctcctggttcctggtgtcctctgggggcaccaggcaccggctgccccgggagatgatctttgtgggcagagatgactgtgagctgatgctgcagagccgctctgtggacaagcagcacgccgtcatcaactatgatgccagcacagatgagcacctggtgaaggacctgggcagcctgaatggcacctttgtgaatgatgtgcgcatccctgagcagacctacatcaccctgaagctggaggacaagctgcgcttcggctatgacaccaacctcttcaccgtggtgcagggcgagatgagggtgcctgaggaggccctgaagcatgagaagttcaccatccagctgcagctgagccagaagagcagcgagagcgagctgagcaagagcgccagcgccaagagcattgacagcaaggtggctgatgctgccacagaggtgcagcacaagaccacagaggccctgaagtctgaggagaaggccatggacatcagcgccatgccccggggcacccccctgtatggccagcccagctggtggggagatgatgaggtggatgagaagagggccttcaagaccaacgggaagccagaggagaagaaccatgaagctggcaccagcggctgcggcattgatgccaagcaggtggaggagcagagcgctgctgccaatgaggaggtgctcttccccttctgccgggagcccagctactttgagatccccaccaaggagttccagcagcccagccagatcacagagagcaccatccacgagatccccaccaaggacacccccagcagccacatcactggagctggccacgccagcttcaccatcgagtttgatgacagcaccccaggcaaggtgaccatccgggaccacgtgaccaagttcaccagtgaccagaggcacaagagcaagaagagcagccctggcacccaggacctgctgggcatccagacaggcatgatggcccctgagaacaaggtggccgactggctggcccagaacaaccccccccagatgctgtgggagaggacagaggaggacagcaagagcatcaagagtgatgtgcctgtgtacctgaagaggctgaagggcaacaagcatgatgatggcacccagagcgacagtgaaaatgctggggcccaccggcgctgcagcaagagggccaccctggaggagcacctgcggcggcaccacagcgagcacaagaagctgcagaaggtgcaggccacagagaagcaccaggaccaggccgtggtgtttggagtggatgacaaccaggactacaacagacctgtgatcaatgagaagcacaaggacctgatcaaggactgggccctgagcagcgctgctgctgtgatggaggagaggaagcccctgaccaccagcggcttccaccacagcgaggagggcaccagcagcagcggcagcaagcgctgggtgtcccagtgggccagcctggccgccaaccacaccaggcatgaccaggaggagcgcatcatggagttcagcgcccccctgcccctggagaatgaaacagagatcagcgagagcggcatgacagtgcgcagcacaggcagcgccaccagcctggccagccagggcgagaggagaagaaggaccctgccccagctgcccaatgaggagaagagcctggagagccaccgggccaaggtggtgacccagaggagtgaaattggagagaagcaggacacagagctgcaggagaaggagacccccacccaggtgtaccagaaggacaagcaggatgctgaccggcccctgagcaagatgaacagagctgtgaatggagagaccctgaagacaggaggagacaacaagaccctgctgcacctgggcagcagcgcccctgggaaggagaagtcagaaacagacaaggagaccagcctggtgaagcagaccctggccaagctgcagcagcaggagcagcgggaggaggcccagtggacccccaccaagctgagcagcaagaatgtgtctggccagacagacaagtgccgggaggagaccttcaagcaggagagccagcccccagagaagaacagcggccacagcaccagcaagggggacagagtggcccagagcgagagcaagaggaggaaggccgaggagatcctgaagagccagacccccaagggcggggacaagaaggagagcagcaagagcctggtgcggcagggcagcttcaccatcgagaagcccagccccaacatccccatcgagctgatcccccacatcaacaagcagaccagcagcacccccagcagcctggccctgaccagcgccagccgcatccgggagaggtctgagagcctggaccctgacagctccatggacaccaccctcatcctgaaggacacagaagctgtgatggccttcctggaggccaagctgcgggaggacaacaagacagatgagggccctgacacccccagctacaacagagacaacagcatcagccctgagagtgatgtggacacagccagcaccatcagcctggtgactggagaaacagagaggaagagcacccagaagaggaagagcttcaccagcctgtacaaggaccgctgcagcacaggcagccccagcaaggatgtgaccaagagcagcagcagcggggcccgggagaagatggagaagaagaccaagagccgcagcacagatgtgggcagcagagcagatggcaggaagtttgtgcagagcagcggccgcatccggcagcccagcgtggacctgacagatgatgaccagaccagctctgtgccccacagcgccatcagtgacatcatgagcagtgaccaggagacctacagctgcaagccccacggccgcacccccctgaccagcgcagatgaacatgtgcacagcaagctggagggcagcaaggtgaccaagagcaagaccagccctgtggtgtctggcagcagcagcaagagcaccaccctgccccggccccggcccaccaggaccagcctgctgcggcgggcccggctgggggaggccagtgacagcgagctggctgatgctgacaaggcctctgtggccagcgaggtgtccaccaccagcagcaccagcaagcccccaactggaagaagaaacatcagcagaattgacctgctggcccagcccaggaggacccggctgggcagcctgagcgcccggagtgacagcgaggccaccatcagccgcagcagcgccagcagcaggacagctgaggccatcatccgcagcggggcccggctggtgcccagcgacaagttcagcccccgcatccgggccaacagcatcagccggctgagtgacagcaaggtgaagtccatgaccagcgcccacggcagcgcctctgtgaacagccgctggaggcgcttccccacagattatgccagcaccagtgaagatgaatttggcagcaacagaaacagccccaagcacacccggctgcggaccagccctgccctgaagaccacccggctgcagagcgctggcagcgccatgcccaccagcagcagcttcaagcaccgcatcaaggagcaggaggactacatccgggactggacagcccaccgggaggagatcgcccgcatcagccaggacctggccctgattgcccgggagatcaatgatgtggccggggagattgattctgtgaccagcagcggcacagcccccagcaccaccgtgtccacagctgccaccaccccaggcagcgccatcgacacccgggaggagctggtggacagagtgtttgatgagagcctgaacttcaggaagatcccccccctggtgcacagcaagaccccagagggcaacaacggccgcagcggggacccccggccccaggccgctgagcccccagaccacctgaccatcaccaggaggaggacctggagcagagatgaggtgatgggagacaacctgctgctgagcagcgtcttccagttcagcaagaagatccggcagagcattgacaagacagctgggaagatccgcatcctcttcaaggacaaggacaggaactgggatgacatcgagagcaagctgcgggcagagagcgaggtgcccatcgtgaagaccagctccatggagatcagcagcatcctgcaggagctgaagagggtggagaagcagctgcaggccatcaatgccatgattgatcctgatggcaccctggaggccctgaacaacatgggcttccccagcgccatgctgcccagcccccccaagcagaagagcagccctgtgaacaaccaccacagccctggccagacccccaccctgggccagcctgaggcccgggccctgcaccctgctgctgtgtctgctgctgctgagtttgaaaatgctgagagcgaggccgacttcagcatccacttcaaccgcttcaacccagatggagaggaggaggatgtgacagtgcaggagtag

SEQ ID NO: 147064 - DNA, 1239 bp, synthetic construct
  misc_feature 1..1239: note = Description of Artificial Sequence: Synthetic coding sequence
  source 1..1239: mol_type = other DNA
atgagggtgcctgaggaggccctgaagcatgagaagttcaccatccagctgcagctgagccagaagagcagcgagagcgagctgagcaagagcgccagcgccaagagcattgacagcaaggtggctgatgctgccacagaggtgcagcacaagaccacagaggccctgaagtctgaggagaaggccatggacatcagcgccatgccccggggcacccccctgtatggccagcccagctggtggggagatgatgaggtggatgagaagagggccttcaagaccaacgggaagccagaggagaagaaccatgaagctggcaccagcggctgcggcattgatgccaagcaggtggaggagcagagcgctgctgccaatgaggaggtgctcttccccttctgccgggagcccagctactttgagatccccaccaaggagttccagcagcccagccagatcacagagagcaccatccacgagatccccaccaaggacacccccagcagccacatcactggagctggccacgccagcttcaccatcgagtttgatgacagcaccccaggcaaggtgaccatccgggaccacgtgaccaagttcaccagtgaccagaggcacaagagcaagaagagcagccctggcacccaggacctgctgggcatccagacaggcatgatggcccctgagaacaaggtggccgactggctggcccagaacaaccccccccagatgctgtgggagaggacagaggaggacagcaagagcatcaagagtgatgtgcctgtgtacctgaagaggctgaagggcaacaagcatgatgatggcacccagagcgacagtgaaaatgctggggcccaccggcgctgcagcaagagggccaccctggaggagcacctgcggcggcaccacagcgagcacaagaagctgcagaaggtgcaggccacagagaagcaccaggaccaggccgtgaccagcagcgcccaccaccggggcggccacggcgtgccccacggcaagctgctgaagcagaagtctgaggagcccagcgtgtccatccccttcctgcagacagccctgctgcggagcagcggcagcctgggccaccggcccagccaggagatggacaagatgctgaagaaccaggccgactgtggctctgtggccttctgtggcttcatgatcttcaagctgaacctgatgatcacccccttccccttcatcgacctcttctccttcttctag

SEQ ID NO: 147065 - DNA, 402 bp, synthetic construct
  misc_feature 1..402: note = Description of Artificial Sequence: Synthetic coding sequence
  source 1..402: mol_type = other DNA
atgagcctgacctcctggttcctggtgtcctctgggggcaccaggcaccggctgccccgggagatgatctttgtgggcagagatgactgtgagctgatgctgcagagccgctctgtggacaagcagcacgccgtcatcaactatgatgccagcacagatgagcacctggtgaaggacctgggcagcctgaatggcacctttgtgaatgatgtgcgcatccctgagcagacctacatcaccctgaagctggaggacaagctgcgcttcggctatgacaccaacctcttcaccgtggtgcagggcgagatgagggtgcctgaggaggccctgaagcatgagaagttcaccatccagctgcagctgagccagaagagcagcgagagcgagctgagcaagagctag

SEQ ID NO: 147066 - DNA, 267 bp, synthetic construct
  misc_feature 1..267: note = Description of Artificial Sequence: Synthetic coding sequence
  source 1..267: mol_type = other DNA
atgagcctgacctcctggttcctggtgtcctctgggggcaccaggcaccggctgccccgggagatgatctttgtgggcagagatgactgtgagctgatgctgcagagccgctctgtggacaagcagcacgccgtcatcaactatgatgccagcacagatgagcacctggtgaaggacctgggcagcctgaatggcacctttgtgaatgatgtgcgcatccctgagcagacctacatcaccctgaagctggaggacaagctgaggtag

SEQ ID NO: 147067 - DNA, 336 bp, synthetic construct
  misc_feature 1..336: note = Description of Artificial Sequence: Synthetic coding sequence
  source 1..336: mol_type = other DNA
atgagcctgacctcctggttcctggtgtcctctgggggcaccaggcaccggctgccccgggagatgatctttgtgggcagagatgactgtgagctgatgctgcagagccgctctgtggacaagcagcacgccgtcatcaactatgatgccagcacagatgagcacctggtgaaggacctgggcagcctgaatggcacctttgtgaatgatgtgcgcatccctgagcagacctacatcaccctgaagctggaggacaagctgcgcttcggctatgacaccaacctcttcaccgtggtgcagggcgagatgagggtgcctgaggaggccctgaagtag

SEQ ID NO: 147068 - DNA, 1407 bp, synthetic construct
  misc_feature 1..1407: note = Description of Artificial Sequence: Synthetic coding sequence
  source 1..1407: mol_type = other DNA
atgagcagtgaccaggagacctacagctgcaagccccacggccgcacccccctgaccagcgcagatgagcacgtgcacagcaagctggagggcagcaaggtgaccaagagcaagaccagccctgtggtgtctggcagcagcagcaagagcaccaccctgccccggccccggcccaccaggaccagcctgctgcggcgggcccggctgggggaggccagtgacagcgagctggctgatgctgacaaggcctctgtggccagcgaggtgtccaccaccagcagcaccagcaagccacccaccggcagaagaaacatcagcagaattgacctgctggcccagcccaggaggacccggctgggcagcctgagcgcccggagtgacagcgaggccaccatcagccgcagcagcgccagcagcaggacagctgaggccatcatccgcagcggggcccggctggtgcccagcgacaagttcagcccccgcatccgggccaacagcatcagccggctgagtgacagcaaggtgaagtccatgaccagcgcccacggcagcgccagcgccctgaagaccacccggctgcagagcgctggcagcgccatgcccaccagcagcagcttcaagcaccgcatcaaggagcaggaggactacatccgggactggacagcccaccgggaggagatcgcccgcatcagccaggacctggccctgattgcccgggagatcaatgatgtggccggggagattgacagcgtgaccagcagcggcacagcccccagcaccaccgtgtccacagctgccaccaccccaggcagcgccatcgacacccgggaggaggtgggggacctgcatggagagatgcacaagctggtggacagagtgtttgatgagagcctgaacttcaggaagatcccccccctggtgcacagcaagaccccagagggcaacaacggccgcagcggggacccccggccccaggccgctgagcccccagaccacctgaccatcaccaggaggaggacctggagcagagatgaggtgatgggagacaacctgctgctgagctctgtgttccagttcagcaagaagatccggcagagcattgacaagacagctgggaagatccgcatcctcttcaaggacaaggacaggaactgggatgacatcgagagcaagctgcgggcagagagcgaggtgcccatcgtgaagaccagctccatggagatcagcagcatcctgcaggagctgaagagggtggagaagcagctgcaggccatcaatgccatgattgatcctgatggcaccctggaggccctgaacaacatgggcttccccagcgccatgctgcccagcccccccaagcagaagagcagccctgtgaacaaccaccacagccctgccatgctgtag

SEQ ID NO: 147069 - DNA, 7161 bp, synthetic construct
  misc_feature 1..7161: note = Description of Artificial Sequence: Synthetic coding sequence
  source 1..7161: mol_type = other DNA
atggagaccaggagccctggcctgaacaacatgaagccccagagcctgcagctggtgctggaggagcaggtgctggccctgcagcagcagatggccgagaaccaggccgcctcctggaggaagctgaagaacagccaggaggcccagcagaggcaggccaccctggtgaggaagctgcaggccaaggtgctgcagtaccgctcctggtgccaggagctggagaagaggctggaggccaccggcggccccatcccccagcgctgggagaatgtggaggagcccaacctggatgagctgctggtgcggctggaggaggagcagcagagatgtgagagcctggccgaggtgaacacccagctgcggctgcacatggagaaggcagatgtggtgaacaaggccctgcgggaggatgtggagaagctgactgtggactggagccgggccagagatgagctgatgaggaaggagagccagtggcagatggagcaggagttcttcaagggctacctgaagggggagcacggccgcctgctgagcctgtggagggaggtggtgaccttccgccgccacttcctggagatgaagagcgccacagaccgggacctgatggagctgaaggccgagcacgtgcggctgagcggcagcctgctgacctgctgcctgcggctgactgtgggcgcccagagccgggagcccaatggaagtggccgcatggatggccgggagcccgcccagctgctgctgctgctggccaagacccaggagctggagaaggaggcccacgagaggagccaggagctgatccagctgaagagccagggcgacctggagaaggccgagctgcaggacagagtgacagagctgagcgccctgctgacccagagccagaagcagaatgaagattatgagaagatgatcaaggccctgcgggagaccgtggagatcctggagaccaaccacacagagctgatggagcacgaggccagcctgagcagaaatgcccaggaggagaagctgagcctgcagcaggtgatcaaggacatcacccaggtgatggtggaggagggggacaacatcgcccagggcagcggccacgagaacagcctggagctggacagcagcatcttcagccagtttgactaccaggatgctgacaaggccctgaccctggtgcgctctgtgctgacccggcggcggcaggccgtgcaggacctgcggcagcagctggccggctgccaggaggccgtgaacctgctgcagcagcagcacgaccagtgggaggaggagggcaaggccctgcggcagaggctgcagaagctgactggagagcgggacaccctggccggccagacagtggacctgcagggcgaggtggacagcctgagcaaggagcgggagctgctgcagaaggcccgggaggagctgcggcagcagctggaggtgctggagcaggaggcctggaggctgcggcgggtgaatgtggagctgcagctgcagggcgacagcgcccagggccagaaggaggagcagcaggaggagctgcacctggccgtgcgggagcgggagcggctgcaggagatgctgatgggcctggaggccaagcagagcgagagcctgtctgagctgatcaccctgcgggaggccctggagagcagccacctggagggggagctgctgcggcaggagcagacagaggtgacagctgccctggcccgggcagagcagagcattgctgagctgagcagcagcgagaacaccctgaagacagaggtggccgacctgcgggctgctgctgtgaagctgagcgccctgaatgaggccctggccctggacaaggtgggcctgaaccagcagctgctgcagctggaggaggagaaccagagcgtgtgcagcaggatggaggccgctgagcaggccagaaatgccctgcaggtggacctggccgaggccgagaagagaagagaggccctgtgggagaagaacacccacctggaggcccagctgcagaaggccgaggaggccggggctgagctgcaggccgacctgcgggacatccaggaggagaaggaggagatccagaagaagctgtctgagagccgccaccagcaggaggccgccaccacccagctggagcagctgcaccaggaggccaagaggcaggaggaggtgctggcccgggctgtgcaggagaaggaggccctggtgcgggagaaggccgccctggaggtgcggctgcaggccgtggagcgggaccggcaggacctggccgagcagctgcagggcctgagcagcgccaaggagctgctggagagcagcctgtttgaggcccagcagcagaacagcgtgattgaggtgaccaagggccagctggaggtgcagatccagacagtgacccaggccaaggaggtgatccagggcgaggtgcgctgcctgaagctggagctggacacagagaggagccaggccgagcaggagagagatgctgctgcccggcagctggcccaggccgagcaggagggcaagacagccctggagcagcagaaggccgcccacgagaaggaggtgaaccagctgcgggagaagtggatgcagctggagacagagaaggagcgggtgtccctgctggagaccctgctgcagacccagaaggagctggctgatgccagccagcagctggagcggctgcggcaggacatgaaggtgcagaagctgaaggagcaggagaccaccggcatcctgcagacccagctgcaggaggcccagcgggagctgaaggaggccgcccggcagcacagagatgacctggccgccctgcaggaggagagcagcagcctgctgcaggacaagatggacctgcagaagcaggtggaggacctgaagagccagctggtggcccaggatgacagccagaggctggtggagcaggaggtgcaggagaagctgcgggagacccaggagtacaaccgcatccagaaggagctggagcgggagaaggccagcctgaccctgagcctgatggagaaggagcagaggctgctggtgctgcaggaggccgacagcatccggcagcaggagctgagcgccctgcggcaggacatgcaggaggcccagggcgagcagaaggagctgagcgcccagatggagctgctgcggcaggaggtgaaggagaaggaggccgacttcctggcccaggaggcccagctgctggaggagctggaggccagccacatcacagagcagcagctgcgggccagcctgtgggcccaggaggccaaggccgcccagctgcagctgcggctgcggagcacagagagccagctggaggccctggccgctgagcagcagcccggcaaccaggcccaggcccaggcccagctggccagcctgtacagcgccctgcagcaggccctgggctctgtgtgtgagagcaggcctgagctgagcggcggcggggacagcgcccccagcgtgtggggcctggagccagaccagaatggagcccggagcctcttcaagaggggccccctgctgacagccctgtctgctgaggccgtggccagcgccctgcacaagctgcaccaggacctgtggaagacccagcagaccagagatgtgctgcgggaccaggtgcagaagctggaggagcggctgacagacacagaggccgagaagagccaggtgcacacagagctgcaggacctgcagaggcagctgagccagaaccaggaggagaagagcaagtgggagggcaagcagaacagcctggagagcgagctgatggagctgcacgagaccatggccagcctgcagagccggctgcggcgggcagagctgcagaggatggaggcccagggcgagcgggagctgctgcaggccgccaaggagaacctgacagcccaggtggagcacctgcaggccgctgtggtggaggcccgggcccaggccagcgctgctggcatcctggaggaggacctgaggacagcccggagcgccctgaagctgaagaatgaggaggtggagagcgagcgggagcgggcccaggccctgcaggagcagggcgagctgaaggtggcccagggcaaggccctgcaggagaacctggccctgctgacccagaccctggccgagcgggaggaggaggtggagaccctgcggggccagatccaggagctggagaagcagcgggagatgcagaaggccgccctggagctgctgagcctggacctgaagaagaggaaccaggaggtggacctgcagcaggagcagatccaggagctggagaagtgccgctctgtgctggagcacctgcccatggctgtgcaggagcgggagcagaagctgactgtgcagcgggagcagatccgggagctggagaaggaccgggagacccagagaaatgtgctggagcaccagctgctggagctggagaagaaggaccagatgattgagagccagaggggccaggtgcaggacctgaagaagcagctggtgaccctggagtgcctggccctggagctggaggagaaccaccacaagatggagtgccagcagaagctgatcaaggagctggagggccagcgggagacccagagggtggccctgacccacctgaccctggacctggaggagaggagccaggagctgcaggcccagagcagccagatccatgacctggagagccacagcacagtgctggcccgggagctgcaggagcgggaccaggaggtgaagagccagcgggagcagatcgaggagctgcagaggcagaaggagcacctgacccaggacctggagcggcgggaccaggagctgatgctgcagaaggagcgcatccaggtgctggaggaccagaggacccggcagaccaagatcctggaggaggacctggagcagatcaagctgagcctgcgggagcggggccgggagctgaccacccagaggcagctgatgcaggagcgggcagaggagggcaagggccccagcaaggcccagaggggcagcctggagcacatgaagctgatcctgcgggacaaggagaaggaggtggagtgccagcaggagcacatccacgagctgcaggagctgaaggaccagctggagcagcagctgcagggcctgcacaggaaggtgggggagaccagcctgctgctgagccagcgggagcaggagatcgtggtgctgcagcagcagctgcaggaggcccgggagcagggcgagctgaaggagcagagcctgcagagccagctggatgaggcccagagggccctggcccagagggaccaggagctggaggccctgcagcaggagcagcagcaggcccagggccaggaggagcgggtgaaggagaaggcagatgccctgcagggcgccctggagcaggcccacatgaccctgaaggagcggcacggggagctgcaggaccacaaggagcaggcccggcggctggaggaggagctggccgtggagggccggcgggtgcaggccctggaggaggtgctgggggacctgcgggcagagagccgggagcaggagaaggccctgctggccctgcagcagcagtgtgccgagcaggcccaggagcacgaggtggagacccgggccctgcaggacagctggctgcaggcccaggccgtgctgaaggagcgggaccaggagctggaggccctgcgggcagagagccagagcagccgccaccaggaggaggccgcccgggcccgggcagaggccctgcaggaggccctgggcaaggcccatgctgccctgcagggcaaggagcagcacctgctggagcaggccgagctgagccgcagcctggaggccagcacagccaccctgcaggccagcctggatgcctgccaggcccacagccggcagctggaggaggccctgcgcatccaggagggggagatccaggaccaggacctgcgctaccaggaggatgtgcagcagctgcagcaggccctggcccagagagatgaggagctgcggcaccagcaggagcgggagcagctgctggagaagagcctggcccagagggtgcaggagaacatgatccaggagaagcagaacctgggccaggagcgggaggaggaggagatccggggcctgcaccagagcgtgcgggagctgcagctgaccctggcccagaaggagcaggagatcctggagctgcgggagacccagcagaggaacaacctggaggccctgccccacagccacaagaccagccccatggaggagcagagcctgaagctggacagcctggagccccggctgcagcgggagctggagcggctgcaggccgccctgcggcagacagaggcccgggagattgagtggagggagaaggcccaggacctggccctgagcctggcccagaccaaggcctctgtgagcagcctgcaggaggtggccatgttcctgcaggcctctgtgctggagcgggacagcgagcagcagaggctgcaggatgagctggagctgacccggcgggccctggagaaggagcggctgcacagccctggggccaccagcacagctgagctgggcagcagaggagagcagggcgtgcagctgggggaggtgtctggagtggaggccgagcccagcccagatggcatggagaagcagagctggaggcagaggctggagcacctgcagcaggccgtggcccggctggagattgacaggagccggctgcagaggcacaacgtgcagctgcggagcaccctggagcaggtggagcgggagaggaggaagctgaagcgggaggccatgagagctgcccaggccggcagcctggagatcagcaaggccacagccagcagccccacccagcaggacggccggggccagaagaacagtgatgccaagtgtgtggccgagctgcagaaggaggtggtgctgctgcaggcccagctgaccctggagaggaagcagaagcaggactacatcaccaggtctgcccagaccagccgggagctggccggcctgcaccacagcctgagccacagcctgctggccgtggcccaggcccctgaggccaccgtgctggaggccgagacccggcggctggatgagagcctgacccagagcctgaccagccctggccctgtgctgctgcaccccagccccagcaccacccaggccgccagcaggtag

SEQ ID NO: 147070 - DNA, 1020 bp, synthetic construct
  misc_feature 1..1020: note = Description of Artificial Sequence: Synthetic coding sequence
  source 1..1020: mol_type = other DNA
atggagaccaggagccctggcctgaacaacatgaagccccagagcctgcagctggtgctggaggagcaggtgctggccctgcagcagcagatggccgagaaccaggccgcctcctggaggaagctgaagaacagccaggaggcccagcagaggcaggccaccctggtgaggaagctgcaggccaaggtgctgcagtaccgctcctggtgccaggagctggagaagaggctggaggccaccggcggccccatcccccagcgctgggagaatgtggaggagcccaacctggatgagctgctggtgcggctggaggaggagcagcagagatgtgagagcctggccgaggtgaacacccagctgcggctgcacatggagaaggcagatgtggtgaacaaggccctgcgggaggatgtggagaagctgactgtggactggagccgggccagagatgagctgatgaggaaggagagccagtggcagatggagcaggagttcttcaagggctacctgaagggggagcacggccgcctgctgagcctgtggagggaggtggtgaccttccgccgccacttcctggagatgaagagcgccacagaccgggacctgatggagctgaaggccgagcacgtgcggctgagcggcagcctgctgacctgctgcctgcggctgactgtgggcgcccagagccgggagcccaatggaagtggccgcatggatggccgggagcccgcccagctgctgctgctgctggccaagacccaggagctggagaaggaggcccacgagaggagccaggagctgatccagctgaagagccagggcgacctggagaaggccgagctgcaggacagagtgacagagctgagcgccctgctgacccagagccagaagcagaatgaagattatgagaagatgatcaaggccctgcgggagaccgtggagatcctggtgcatgaccccctgctgtggaagggcgtgggccggggcctggtgggcagcctgtgcttcatggacagatag

SEQ ID NO: 147071 - DNA, 7329 bp, synthetic construct
  misc_feature 1..7329: note = Description of Artificial Sequence: Synthetic coding sequence
  source 1..7329: mol_type = other DNA
atggagaccaggagccctggcctgaacaacatgaagccccagagcctgcagctggtgctggaggagcaggtgctggccctgcagcagcagatggccgagaaccaggccgcctcctggaggaagctgaagaacagccaggaggcccagcagaggcaggccaccctggtgaggaagctgcaggccaaggtgctgcagtaccgctcctggtgccaggagctggagaagaggctggaggccaccggcggccccatcccccagcgctgggagaatgtggaggagcccaacctggatgagctgctggtgcggctggaggaggagcagcagagatgtgagagcctggccgaggtgaacacccagctgcggctgcacatggagaaggcagatgtggtgaacaaggccctgcgggaggatgtggagaagctgactgtggactggagccgggccagagatgagctgatgaggaaggagagccagtggcagatggagcaggagttcttcaagggctacctgaagggggagcacggccgcctgctgagcctgtggagggaggtggtgaccttccgccgccacttcctggagatgaagagcgccacagaccgggacctgatggagctgaaggccgagcacgtgcggctgagcggcagcctgctgacctgctgcctgcggctgactgtgggcgcccagagccgggagcccaatggaagtggccgcatggatggccgggagcccgcccagctgctgctgctgctggccaagacccaggagctggagaaggaggcccacgagaggagccaggagctgatccagctgaagagccagggcgacctggagaaggccgagctgcaggacagagtgacagagctgagcgccctgctgacccagagccagaagcagaatgaagattatgagaagatgatcaaggccctgcgggagaccgtggagatcctggagaccaaccacacagagctgatggagcacgaggccagcctgagcagaaatgcccaggaggagaagctgagcctgcagcaggtgatcaaggacatcacccaggtgatggtggaggagggggacaacatcgcccagggcagcggccacgagaacagcctggagctggacagcagcatcttcagccagtttgactaccaggatgctgacaaggccctgaccctggtgcgctctgtgctgacccggcggcggcaggccgtgcaggacctgcggcagcagctggccggctgccaggaggccgtgaacctgctgcagcagcagcacgaccagtgggaggaggagggcaaggccctgcggcagaggctgcagaagctgactggagagcgggacaccctggccggccagacagtggacctgcagggcgaggtggacagcctgagcaaggagcgggagctgctgcagaaggcccgggaggagctgcggcagcagctggaggtgctggagcaggaggcctggaggctgcggcgggtgaatgtggagctgcagctgcagggcgacagcgcccagggccagaaggaggagcagcaggaggagctgcacctggccgtgcgggagcgggagcggctgcaggagatgctgatgggcctggaggccaagcagagcgagagcctgtctgagctgatcaccctgcgggaggccctggagagcagccacctggagggggagctgctgcggcaggagcagacagaggtgacagctgccctggcccgggcagagcagagcattgctgagctgagcagcagcgagaacaccctgaagacagaggtggccgacctgcgggctgctgctgtgaagctgagcgccctgaatgaggccctggccctggacaaggtgggcctgaaccagcagctgctgcagctggaggaggagaaccagagcgtgtgcagcaggatggaggccgctgagcaggccagaaatgccctgcaggtggacctggccgaggccgagaagagaagagaggccctgtgggagaagaacacccacctggaggcccagctgcagaaggccgaggaggccggggctgagctgcaggccgacctgcgggacatccaggaggagaaggaggagatccagaagaagctgtctgagagccgccaccagcaggaggccgccaccacccagctggagcagctgcaccaggaggccaagaggcaggaggaggtgctggcccgggctgtgcaggagaaggaggccctggtgcgggagaaggccgccctggaggtgcggctgcaggccgtggagcgggaccggcaggacctggccgagcagctgcagggcctgagcagcgccaaggagctgctggagagcagcctgtttgaggcccagcagcagaacagcgtgattgaggtgaccaagggccagctggaggtgcagatccagacagtgacccaggccaaggaggtgatccagggcgaggtgcgctgcctgaagctggagctggacacagagaggagccaggccgagcaggagagagatgctgctgcccggcagctggcccaggccgagcaggagggcaagacagccctggagcagcagaaggccgcccacgagaaggaggtgaaccagctgcgggagaagtgggagaaggagaggtcctggcaccagcaggagctggccaaggccctggagagcctggagcgggagaagatggagctggagatgaggctgaaggagcagcagacagagatggaggccatccaggcccagcgggaggaggagaggacccaggccgagagcgccctgtgccagatgcagctggagacagagaaggagcgggtgtccctgctggagaccctgctgcagacccagaaggagctggctgatgccagccagcagctggagcggctgcggcaggacatgaaggtgcagaagctgaaggagcaggagaccaccggcatcctgcagacccagctgcaggaggcccagcgggagctgaaggaggccgcccggcagcacagagatgacctggccgccctgcaggaggagagcagcagcctgctgcaggacaagatggacctgcagaagcaggtggaggacctgaagagccagctggtggcccaggatgacagccagaggctggtggagcaggaggtgcaggagaagctgcgggagacccaggagtacaaccgcatccagaaggagctggagcgggagaaggccagcctgaccctgagcctgatggagaaggagcagaggctgctggtgctgcaggaggccgacagcatccggcagcaggagctgagcgccctgcggcaggacatgcaggaggcccagggcgagcagaaggagctgagcgcccagatggagctgctgcggcaggaggtgaaggagaaggaggccgacttcctggcccaggaggcccagctgctggaggagctggaggccagccacatcacagagcagcagctgcgggccagcctgtgggcccaggaggccaaggccgcccagctgcagctgcggctgcggagcacagagagccagctggaggccctggccgctgagcagcagcccggcaaccaggcccaggcccaggcccagctggccagcctgtacagcgccctgcagcaggccctgggctctgtgtgtgagagcaggcctgagctgagcggcggcggggacagcgcccccagcgtgtggggcctggagccagaccagaatggagcccggagcctcttcaagaggggccccctgctgacagccctgtctgctgaggccgtggccagcgccctgcacaagctgcaccaggacctgtggaagacccagcagaccagagatgtgctgcgggaccaggtgcagaagctggaggagcggctgacagacacagaggccgagaagagccaggtgcacacagagctgcaggacctgcagaggcagctgagccagaaccaggaggagaagagcaagtgggagggcaagcagaacagcctggagagcgagctgatggagctgcacgagaccatggccagcctgcagagccggctgcggcgggcagagctgcagaggatggaggcccagggcgagcgggagctgctgcaggccgccaaggagaacctgacagcccaggtggagcacctgcaggccgctgtggtggaggcccgggcccaggccagcgctgctggcatcctggaggaggacctgaggacagcccggagcgccctgaagctgaagaatgaggaggtggagagcgagcgggagcgggcccaggccctgcaggagcagggcgagctgaaggtggcccagggcaaggccctgcaggagaacctggccctgctgacccagaccctggccgagcgggaggaggaggtggagaccctgcggggccagatccaggagctggagaagcagcgggagatgcagaaggccgccctggagctgctgagcctggacctgaagaagaggaaccaggaggtggacctgcagcaggagcagatccaggagctggagaagtgccgctctgtgctggagcacctgcccatggctgtgcaggagcgggagcagaagctgactgtgcagcgggagcagatccgggagctggagaaggaccgggagacccagagaaatgtgctggagcaccagctgctggagctggagaagaaggaccagatgattgagagccagaggggccaggtgcaggacctgaagaagcagctggtgaccctggagtgcctggccctggagctggaggagaaccaccacaagatggagtgccagcagaagctgatcaaggagctggagggccagcgggagacccagagggtggccctgacccacctgaccctggacctggaggagaggagccaggagctgcaggcccagagcagccagatccatgacctggagagccacagcacagtgctggcccgggagctgcaggagcgggaccaggaggtgaagagccagcgggagcagatcgaggagctgcagaggcagaaggagcacctgacccaggacctggagcggcgggaccaggagctgatgctgcagaaggagcgcatccaggtgctggaggaccagaggacccggcagaccaagatcctggaggaggacctggagcagatcaagctgagcctgcgggagcggggccgggagctgaccacccagaggcagctgatgcaggagcgggcagaggagggcaagggccccagcaaggcccagaggggcagcctggagcacatgaagctgatcctgcgggacaaggagaaggaggtggagtgccagcaggagcacatccacgagctgcaggagctgaaggaccagctggagcagcagctgcagggcctgcacaggaaggtgggggagaccagcctgctgctgagccagcgggagcaggagatcgtggtgctgcagcagcagctgcaggaggcccgggagcagggcgagctgaaggagcagagcctgcagagccagctggatgaggcccagagggccctggcccagagggaccaggagctggaggccctgcagcaggagcagcagcaggcccagggccaggaggagcgggtgaaggagaaggcagatgccctgcagggcgccctggagcaggcccacatgaccctgaaggagcggcacggggagctgcaggaccacaaggagcaggcccggcggctggaggaggagctggccgtggagggccggcgggtgcaggccctggaggaggtgctgggggacctgcgggcagagagccgggagcaggagaaggccctgctggccctgcagcagcagtgtgccgagcaggcccaggagcacgaggtggagacccgggccctgcaggacagctggctgcaggcccaggccgtgctgaaggagcgggaccaggagctggaggccctgcgggcagagagccagagcagccgccaccaggaggaggccgcccgggcccgggcagaggccctgcaggaggccctgggcaaggcccatgctgccctgcagggcaaggagcagcacctgctggagcaggccgagctgagccgcagcctggaggccagcacagccaccctgcaggccagcctggatgcctgccaggcccacagccggcagctggaggaggccctgcgcatccaggagggggagatccaggaccaggacctgcgctaccaggaggatgtgcagcagctgcagcaggccctggcccagagagatgaggagctgcggcaccagcaggagcgggagcagctgctggagaagagcctggcccagagggtgcaggagaacatgatccaggagaagcagaacctgggccaggagcgggaggaggaggagatccggggcctgcaccagagcgtgcgggagctgcagctgaccctggcccagaaggagcaggagatcctggagctgcgggagacccagcagaggaacaacctggaggccctgccccacagccacaagaccagccccatggaggagcagagcctgaagctggacagcctggagccccggctgcagcgggagctggagcggctgcaggccgccctgcggcagacagaggcccgggagattgagtggagggagaaggcccaggacctggccctgagcctggcccagaccaaggcctctgtgagcagcctgcaggaggtggccatgttcctgcaggcctctgtgctggagcgggacagcgagcagcagaggctgcaggatgagctggagctgacccggcgggccctggagaaggagcggctgcacagccctggggccaccagcacagctgagctgggcagcagaggagagcagggcgtgcagctgggggaggtgtctggagtggaggccgagcccagcccagatggcatggagaagcagagctggaggcagaggctggagcacctgcagcaggccgtggcccggctggagattgacaggagccggctgcagaggcacaacgtgcagctgcggagcaccctggagcaggtggagcgggagaggaggaagctgaagcgggaggccatgagagctgcccaggccggcagcctggagatcagcaaggccacagccagcagccccacccagcaggacggccggggccagaagaacagtgatgccaagtgtgtggccgagctgcagaaggaggtggtgctgctgcaggcccagctgaccctggagaggaagcagaagcaggactacatcaccaggtctgcccagaccagccgggagctggccggcctgcaccacagcctgagccacagcctgctggccgtggcccaggcccctgaggccaccgtgctggaggccgagacccggcggctggatgagagcctgacccagagcctgaccagccctggccctgtgctgctgcaccccagccccagcaccacccaggccgccagcaggtag

SEQ ID NO: 147072 - DNA, 345 bp, synthetic construct
  misc_feature 1..345: note = Description of Artificial Sequence: Synthetic coding sequence
  source 1..345: mol_type = other DNA
atggagaccaggagccctggcctgaacaacatgaagccccagagcctgcagctggtgctggaggagcaggtgctggccctgcagcagcagatggccgagaaccaggccgcctcctggaggaagctgaagaacagccaggaggcccagcagaggcaggccaccctggtgaggaagctgcaggccaaggtgctgcagtaccgctcctggtgccaggagctggagaagaggctggaggccaccggcggccccatcccccagcgctgggagaatgtggaggagcccaacctggatgagctgctggtgcggctggaggaggagcagcagagatgtgagagcctggcctag

SEQ ID NO: 147073 - DNA, 2055 bp, synthetic construct
  misc_feature 1..2055: note = Description of Artificial Sequence: Synthetic coding sequence
  source 1..2055: mol_type = other DNA
atggagaccaggagccctggcctgaacaacatgaagccccagagcctgcagctggtgctggaggagcaggtgctggccctgcagcagcagatggccgagaaccaggccgcctcctggaggaagctgaagaacagccaggaggcccagcagaggcaggccaccctggtgaggaagctgcaggccaaggtgctgcagtaccgctcctggtgccaggagctggagaagaggctggaggccaccggcggccccatcccccagcgctgggagaatgtggaggagcccaacctggatgagctgctggtgcggctggaggaggagcagcagagatgtgagagcctggccgaggtgaacacccagctgcggctgcacatggagaaggcagatgtggtgaacaaggccctgcgggaggatgtggagaagctgactgtggactggagccgggccagagatgagctgatgaggaaggagagccagtggcagatggagcaggagttcttcaagggctacctgaagggggagcacggccgcctgctgagcctgtggagggaggtggtgaccttccgccgccacttcctggagatgaagagcgccacagaccgggacctgatggagctgaaggccgagcacgtgcggctgagcggcagcctgctgacctgctgcctgcggctgactgtgggcgcccagagccgggagcccaatggaagtggccgcatggatggccgggagcccgcccagctgctgctgctgctggccaagacccaggagctggagaaggaggcccacgagaggagccaggagctgatccagctgaagagccagggcgacctggagaaggccgagctgcaggacagagtgacagagctgagcgccctgctgacccagagccagaagcagaatgaagattatgagaagatgatcaaggccctgcgggagaccgtggagatcctgaccaaccacacagagctgatggagcacgaggccagcctgagcagaaatgcccaggaggagaagctgagcctgcagcaggtgatcaaggacatcacccaggtgatggtggaggagggggacaacatcgcccagggcagcggccacgagaacagcctggagctggacagcagcatcttcagccagtttgactaccaggatgctgacaaggccctgaccctggtgcgctctgtgctgacccggcggcggcaggccgtgcaggacctgcggcagcagctggccggctgccaggaggccgtgaacctgctgcagcagcagcacgaccagtgggaggaggagggcaaggccctgcggcagaggctgcagaagctgaccggggagcgggacaccctggccggccagacagtggacctgcagggcgaggtggacagcctgagcaaggagcgggagctgctgcagaaggcccgggaggagctgcggcagcagctggaggtgctggagcaggaggcctggaggctgcggcgggtgaatgtggagctgcagctgcagggcgacagcgcccagggccagaaggaggagcagcaggaggagctgcacctggccgtgcgggagcgggagcggctgcaggagatgctgatgggcctggaggccaagcagagcgagagcctgtctgagctgatcaccctgcgggaggccctggagagcagccacctggagggggagctgctgcggcaggagcagacagaggtgacagctgccctggcccgggcagagcagagcattgctgagctgagcagcagcgagaacaccctgaagacagaggtggccgacctgcgggctgctgctgtgaagctgagcgccctgaatgaggccctggccctggacaaggtgggcctgaaccagcagctgctgcagctggaggaggagaaccagagcgtgtgcagcaggatggaggccgctgagcaggccagaaatgccctgcaggtggacctggccgaggccgagaagaggcgggaggccctgtgggagaagaacacccacctggaggcccagctgcagaaggccgaggaggccggggctgagctgcaggccgacctgcgggacatctag

SEQ ID NO: 147074 - DNA, 495 bp, synthetic construct
  misc_feature 1..495: note = Description of Artificial Sequence: Synthetic coding sequence
  source 1..495: mol_type = other DNA
atggagaccaggagccctggcctgaacaacatgaagccccagagcctgcagctggtgctggaggagcaggtgctggccctgcagcagcagatggccgagaaccaggccgcctcctggaggaagctgaagaacagccaggaggcccagcagaggcaggccaccctggtgaggaagctgcaggccaaggtgctgcagtaccgctcctggtgccaggagctggagaagaggctggaggccaccggcggccccatcccccagcgctgggagaatgtggaggagcccaacctggatgagctgctggtgcggctggaggaggagcagcagagatgtgagagcctggccgaggtgaacacccagctgcggctgcacatggagaaggcagatgtggtgaacaaggccctgcgggaggatgtggagaagctgactgtggactggagccgggccagagatgagctgatgaggaaggagagccagtggcagatggagcaggagtag

SEQ ID NO: 147075 - DNA, 1617 bp, synthetic construct
  misc_feature 1..1617: note = Description of Artificial Sequence: Synthetic coding sequence
  source 1..1617: mol_type = other DNA
atggagaccaggagccctggcctgaacaacatgaagccccagagcctgcagctggtgctggaggagcaggtgctggccctgcagcagcagatggccgagaaccaggccgcctcctggaggaagctgaagaacagccaggaggcccagcagaggcaggccaccctggtgaggaagctgcaggccaaggtgctgcagtaccgctcctggtgccaggagctggagaagaggctggaggccaccggcggccccatcccccagcgctgggagaatgtggaggagcccaacctggatgagctgctggtgcggctggaggaggagcagcagagatgtgagagcctggccgaggtgaacacccagctgcggctgcacatggagaaggcagatgtggtgaacaaggccctgcgggaggatgtggagaagctgactgtggactggagccgggccagagatgagctgatgaggaaggagagccagtggcagatggagcaggagttcttcaagggctacctgaagggggagcacggccgcctgctgagcctgtggagggaggtggtgaccttccgccgccacttcctggagatgaagagcgccacagaccgggacctgatggagctgaaggccgagcacgtgcggctgagcggcagcctgctgacctgctgcctgcggctgactgtgggcgcccagagccgggagcccaatggaagtggccgcatggatggccgggagcccgcccagctgctgctgctgctggccaagacccaggagctggagaaggaggcccacgagaggagccaggagctgatccagctgaagagccagggcgacctggagaaggccgagctgcaggacagagtgacagagctgagcgccctgctgacccagagccagaagcagaatgaagattatgagaagatgatcaaggccctgcgggagaccgtggagatcctggagaccaaccacacagagctgatggagcacgaggccagcctgagcagaaatgcccaggaggagaagctgagcctgcagcaggtgatcaaggacatcacccaggtgatggtggaggagggggacaacatcgcccagggcagcggccacgagaacagcctggagctggacagcagcatcttcagccagtttgactaccaggatgctgacaaggccctgaccctggtgcgctctgtgctgacccggcggcggcaggccgtgcaggacctgcggcagcagctggccggctgccaggaggccgtgaacctgctgcagcagcagcacgaccagtgggaggaggagggcaaggccctgcggcagaggctgcagaagctgactggagagcgggacaccctggccggccagacagtggacctgcagggcgaggtggacagcctgagcaaggagcgggagctgctgcagaaggcccgggaggagctgcggcagcagctggaggtgctggagcaggaggcctggaggctgcggcgggtgaatgtggagctgcagctgcagggcgacagcgcccagggccagaaggaggagcagcaggaggagctgcacctggccgtgcgggagcgggagcggctgcagagcagccagctgcagagctgccgggtgctgaagaccccctag

SEQ ID NO: 147076 - DNA, 7446 bp, synthetic construct
  misc_feature 1..7446: note = Description of Artificial Sequence: Synthetic coding sequence
  source 1..7446: mol_type = other DNA
atgccacccaacatcaactggaaggagatcatgaaggtggaccctgatgacctgccccggcaggaggagctggccgacaacctgctgatcagcctgagcaaggtggaggtgaatgagctgaagtctgagaagcaggagaatgtcatccacctgttccgcatcacccagagcctgatgaagatgaaggcccaggaggtggagctggccctggaggaggtggagaaggccggggaggagcaggccaagtttgagaaccagctgaagaccaaggtgatgaagctggagaatgagctggagatggcccagcagagcgctgggggccgggacacccgcttcctgagaaatgagatctgccagctggagaagcagctggagcagaaggaccgggagctggaggacatggagaaggagctggagaaggagaagaaggtgaatgagcagctggccctgagaaatgaggaggccgagaatgaaaacagcaagctgcggcgggagaacaagaggctgaagaagaagaatgagcagctgtgccaggacatcatcgactaccagaagcagattgacagccagaaggagaccctgctgagcagaagaggagaggacagcgactaccgcagccagctgagcaagaagaactatgagctgatccagtacctggatgagatccagaccctgacagaggccaatgagaagattgaggtgcagaaccaggagatgaggaagaacctggaggagagcgtgcaggagatggagaagatgacagatgagtacaacaggatgaaggccatcgtgcaccagacagacaacgtgattgaccagctgaagaaggaaaatgaccactaccagctgcaggtgcaggagctgacagacctgctgaagagcaagaatgaggaggatgaccccatcatggtggccgtgaatgccaaggtggaggagtggaagctgatcctgagcagcaaggatgatgagatcatcgagtaccagcagatgctgcacaacctgcgggagaagctgaagaatgcccagctggatgctgacaagagcaatgtgatggccctgcagcagggcatccaggagcgggacagccagatcaagatgctgacagagcaggtggagcagtacaccaaggagatggagaagaacacctgcatcatcgaggacctgaagaatgagctgcagaggaacaagggggccagcaccctgagccagcagacccacatgaagatccagagcaccctggacatcctgaaggagaagaccaaggaggccgagaggacagctgagctggccgaggctgatgcccgggagaaggacaaggagctggtggaggccctgaagaggctgaaggactatgaaagtggagtgtatggcctggaggatgctgtggtggagatcaagaactgcaagaaccagatcaagatccgggaccgggagattgagatcctgaccaaggagatcaacaagctggagctgaagatcagtgacttcctggatgaaaatgaggccctgcgggagcgggtgggcctggagcccaagaccatgattgacctgacagagttcaggaacagcaagcacctgaagcagcagcagtacagagctgagaaccagatcctgctgaaggaggccagcattgagagcctggaggaggagcggctggacctgaagaagaagatccggcagatggcccaggagcggggcaagaggtctgccaccagcggcctgaccacagaggacctgaacctgacagagaacatcagccagggcgaccgcatcagcgagaggaagctggacctgctgagcctgaagaacatgtctgaggcccagagcaagaatgagttcctgagccgggagctgattgagaaggagcgggacctggagaggagcaggacagtcatcgccaagttccagaacaagctgaaggagctggtggaggagaacaagcagctggaggagggcatgaaggagatcctgcaggccatcaaggagatgcagaaggaccctgatgtgaagggcggggagaccagcctcatcatccccagcctggagcggctggtgaatgccatcgagagcaagaatgctgagggcatctttgatgccagcctgcacctgaaggcccaggtggaccagctgactggaagaaatgaggagctgcggcaggagctgcgggagagcaggaaggaggccatcaactacagccagcagctggccaaggccaacctgaagattgaccacctggagaaggagaccagcctgctgcggcagagcgagggcagcaatgtggtgttcaagggcatcgacctgcctgatggcatcgcccccagcagcgccagcatcatcaacagccagaatgagtacctgatccacctgctgcaggagctggagaacaaggagaagaagctgaagaacctggaggacagcctggaggactacaacaggaagtttgctgtgatccgccaccagcagagcctgctgtacaaggagtacctgtctgagaaggagacctggaagacagagagcaagaccatcaaggaggagaagaggaagctggaggaccaggtgcagcaggatgccatcaaggtgaaggagtacaacaacctgctgaatgccctgcagatggacagtgatgagatgaagaagatcctggccgagaacagcaggaagatcaccgtgctgcaggtgaatgagaagagcctcatccggcagtacaccaccctggtggagctggagcggcagctgaggaaagaaaatgagaagcagaagaatgagctgctgtccatggaggccgaggtgtgtgagaagattggctgcctgcagcgcttcaaggagatggccatcttcaagattgctgccctgcagaaggtggtggacaacagcgtgtccctgtctgagctggagctggccaacaagcagtacaatgagctgacagccaagtacagagacatcctgcagaaggacaacatgctggtgcagaggaccagcaacctggagcacctggagtgtgagaacatcagcctgaaggagcaggtggagagcatcaacaaggagctggagatcaccaaggagaagctgcacaccatcgagcaggcctgggagcaggagaccaagctgggcaatgaaagctccatggacaaggccaagaagagcatcaccaacagcgacatcgtgtccatcagcaagaagatcaccatgctggagatgaaggagctgaatgaaaggcagagagctgagcactgccagaagatgtatgagcacctgcggaccagcctgaagcagatggaggagaggaactttgagctggagaccaagtttgctgagctgaccaagatcaacctggatgcccagaaggtggagcagatgctgagagatgagctggccgacagcgtgtccaaggctgtgtctgatgctgaccggcagaggatcctggagctggagaagaatgagatggagctgaaggtggaggtgtccaagctgcgggagatcagtgacatcgcccggcggcaggtggagatcctgaatgcccagcagcagagccgggacaaggaggtggagagcctgaggatgcagctgctggactaccaggcccagagtgatgagaagagcctcatcgccaagctgcaccagcacaacgtgtccctgcagctgtctgaggccacagccctgggcaagctggagagcatcaccagcaagctgcagaagatggaggcctacaacctgcggctggagcagaagctggatgagaaggagcaggccctgtactatgcccggctggagggcaggaacagagccaagcacctgcggcagaccatccagagcctgcggcggcagttcagcggggccctgcccctggcccagcaggagaagttcagcaagaccatgatccagctgcagaatgacaagctgaagatcatgcaggagatgaagaacagccagcaggagcacaggaacatggagaacaagaccctggagatggagctgaagctgaagggcctggaggagctgatcagcaccctgaaggacaccaagggggcccagaaggtgatcaactggcacatgaagattgaggagctgcggctgcaggagctgaagctgaaccgggagctggtgaaggacaaggaggagatcaagtacctgaacaacatcatcagtgaatatgaaagaaccatcagcagcctggaggaggagatcgtgcagcagaacaagttccacgaggagcggcagatggcctgggaccagcgggaggtggacctggagcggcagctggacatctttgaccggcagcagaatgagatcctgaatgctgcccagaagtttgaggaggccaccggcagcatcccagaccccagcctgcccctgcccaaccagctggagatcgccctgaggaagatcaaggagaacatccgcatcatcctggagacccgggccacctgcaagagcctggaggagaagctgaaggagaaggagagcgccctgcggctggccgagcagaacatcctgagccgggacaaggtgatcaatgagctgcggctgcggctgcctgccacagctgagcgggagaagctgattgctgagctgggcaggaaggagatggagcccaagagccaccacaccctgaagatcgcccaccagaccatcgccaacatgcaggcccggctgaaccagaaggaggaggtgctgaagaagtaccagaggctgctggagaaggcccgggaggagcagcgggagatcgtgaagaagcatgaggaggacctgcacatcctgcaccaccggctggagctgcaggccgacagcagcctgaacaagttcaagcagacagcctgggacctgatgaagcagagccccacccctgtgcccaccaacaagcacttcatccggctggccgagatggagcagacagtggccgagcaggatgacagcctgagcagcctgctggtgaagctgaagaaggtgtcccaggacctggagcggcagcgggagatcacagagctgaaggtgaaggagtttgagaacatcaagctgcagctgcaggagaaccatgaagatgaggtgaagaaggtgaaggccgaggtggaggacctgaagtacctgctggaccagagccagaaggagagccagtgcctgaagtctgagctgcaggcccagaaggaggccaacagccgggcccccaccaccaccatgaggaacctggtggagcggctgaagagccagctggccctgaaggagaagcagcagaaggccctgagccgggccctgctggagctgcgggcagagatgacagctgctgctgaggagcgcatcatcagcgccaccagccagaaggaggcccacctgaatgtgcagcagatcgtggacagacacacccgggagctgaagacccaggtggaggacctgaatgaaaacctgctgaagctgaaggaggccctgaagaccagcaagaaccgggagaacagcctgacagacaacctgaatgacctgaacaatgagctgcagaagaagcagaaggcctacaacaagatcctgcgggagaaggaggagattgaccaggagaatgatgagctgaagaggcagatcaagaggctgaccagcggcctgcagggcaagcccctgacagacaacaagcagagcctcatcgaggagctgcagaggaaggtgaagaagctggagaaccagctggagggcaaggtggaggaggtggacctgaagcccatgaaggagaagaatgccaaggaggagctgatccgctgggaggagggcaagaagtggcaggccaagattgagggcatccggaacaagctgaaggagaaggagggggaggtgttcaccctgaccaagcagctgaacaccctgaaggacctgtttgccaaggctgacaaggagaagctgaccctgcagaggaagctgaagaccaccggcatgacagtggaccaggtgctgggcatccgggccctggagagcgagaaggagctggaggagctgaagaagaggaacctggacctggagaatgacatcctgtacatgagggcccaccaggccctgccccgggacagcgtggtggaggacctgcacctgcagaaccgctacctgcaggagaagctgcacgccctggagaagcagttcagcaaggacacctacagcaagcccagcatctctggaattgaaagtgatgaccactgccagcgggagcaggagctgcagaaggagaacctgaagctgagcagtgaaaatattgagctgaagttccagctggagcaggccaacaaggacctgccccggctgaagaaccaggtgcgggacctgaaggagatgtgtgagttcctgaagaaggagaaggccgaggtgcagaggaagctgggccacgtgcggggcagcggccgcagcggcaagaccatccctgagctggagaagaccatcggcctgatgaagaaggtggtggagaaggtgcagagagaaaatgagcagctgaagaaggccagcggcatcctgaccagcgagaagatggccaacatcgagcaggagaatgagaagctgaaggccgagctggagaagctgaaggcccacctgggccaccagctgtccatgcactatgagagcaagaccaagggcacagagaagatcatcgcagaaaatgaaaggctgaggaaggagctgaagaaggagacagatgctgctgagaagctgagaattgccaagaacaacctggagatcctgaatgagaagatgacagtgcagctggaggagaccgggaagaggctgcagtttgctgagagccggggcccccagctggagggcgctgacagcaagtcctggaagagcatcgtggtgaccaggatgtatgagaccaagctgaaggagctggagacagacatcgccaagaagaaccagagcatcacagacctgaagcagctggtgaaggaggccacagagcgggagcagaaggtgaacaagtacaatgaagacctggagcagcagatcaagatcctgaagcacgtgcctgagggcgctgagacagagcagggcctgaagcgggagctgcaggtgctgcggctggccaaccaccagctggacaaggagaaggccgagctgatccaccagatcgaggccaacaaggaccagagcggggctgagagcaccatcccagatgctgaccagctgaaggagaagatcaaggacctggagacccagctgaagatgtctgacctggagaagcagcacctgaaggaggagatcaagaagctgaagaaggagctggagaactttgaccccagcttctttgaggagattgaggacctgaagtacaactacaaggaggaggtgaagaagaacatcctgctggaggagaaggtgaagaagctgtctgagcagctgggcgtggagctgaccagccctgtggccgccagcgaggagtttgaagatgaggaggagagccctgtgaacttccccatctactag

SEQ ID NO: 147077 - DNA, 4620 bp, synthetic construct
  misc_feature 1..4620: note = Description of Artificial Sequence: Synthetic coding sequence
  source 1..4620: mol_type = other DNA
atggccatcttcaagattgctgccctgcagaaggtggtggacaacagcgtgtccctgtctgagctggagctggccaacaagcagtacaatgagctgacagccaagtacagagacatcctgcagaaggacaacatgctggtgcagaggaccagcaacctggagcacctggagtgtgagaacatcagcctgaaggagcaggtggagagcatcaacaaggagctggagatcaccaaggagaagctgcacaccatcgagcaggcctgggagcaggagaccaagctgggcaatgaaagctccatggacaaggccaagaagagcatcaccaacagcgacatcgtgtccatcagcaagaagatcaccatgctggagatgaaggagctgaatgaaaggcagagagctgagcactgccagaagatgtatgagcacctgcggaccagcctgaagcagatggaggagaggaactttgagctggagaccaagtttgctgagctgaccaagatcaacctggatgcccagaaggtggagcagatgctgagagatgagctggccgacagcgtgtccaaggctgtgtctgatgctgaccggcagaggatcctggagctggagaagaatgagatggagctgaaggtggaggtgtccaagctgcgggagatcagtgacatcgcccggcggcaggtggagatcctgaatgcccagcagcagagccgggacaaggaggtggagagcctgaggatgcagctgctggactaccaggcccagagtgatgagaagagcctcatcgccaagctgcaccagcacaacgtgtccctgcagctgtctgaggccacagccctgggcaagctggagagcatcaccagcaagctgcagaagatggaggcctacaacctgcggctggagcagaagctggatgagaaggagcaggccctgtactatgcccggctggagggcaggaacagagccaagcacctgcggcagaccatccagagcctgcggcggcagttcagcggggccctgcccctggcccagcaggagaagttcagcaagaccatgatccagctgcagaatgacaagctgaagatcatgcaggagatgaagaacagccagcaggagcacaggaacatggagaacaagaccctggagatggagctgaagctgaagggcctggaggagctgatcagcaccctgaaggacaccaagggggcccagaaggtgatcaactggcacatgaagattgaggagctgcggctgcaggagctgaagctgaaccgggagctggtgaaggacaaggaggagatcaagtacctgaacaacatcatcagtgaatatgaaagaaccatcagcagcctggaggaggagatcgtgcagcagaacaagttccacgaggagcggcagatggcctgggaccagcgggaggtggacctggagcggcagctggacatctttgaccggcagcagaatgagatcctgaatgctgcccagaagtttgaggaggccaccggcagcatcccagaccccagcctgcccctgcccaaccagctggagatcgccctgaggaagatcaaggagaacatccgcatcatcctggagacccgggccacctgcaagagcctggaggagaagctgaaggagaaggagagcgccctgcggctggccgagcagaacatcctgagccgggacaaggtgatcaatgagctgcggctgcggctgcctgccacagctgagcgggagaagctgattgctgagctgggcaggaaggagatggagcccaagagccaccacaccctgaagatcgcccaccagaccatcgccaacatgcaggcccggctgaaccagaaggaggaggtgctgaagaagtaccagaggctgctggagaaggcccgggaggagcagcgggagatcgtgaagaagcatgaggaggacctgcacatcctgcaccaccggctggagctgcaggccgacagcagcctgaacaagttcaagcagacagcctgggacctgatgaagcagagccccacccctgtgcccaccaacaagcacttcatccggctggccgagatggagcagacagtggccgagcaggatgacagcctgagcagcctgctggtgaagctgaagaaggtgtcccaggacctggagcggcagcgggagatcacagagctgaaggtgaaggagtttgagaacatcaagctgcagctgcaggagaaccatgaagatgaggtgaagaaggtgaaggccgaggtggaggacctgaagtacctgctggaccagagccagaaggagagccagtgcctgaagtctgagctgcaggcccagaaggaggccaacagccgggcccccaccaccaccatgaggaacctggtggagcggctgaagagccagctggccctgaaggagaagcagcagaaggccctgagccgggccctgctggagctgcgggcagagatgacagctgctgctgaggagcgcatcatcagcgccaccagccagaaggaggcccacctgaatgtgcagcagatcgtggacagacacacccgggagctgaagacccaggtggaggacctgaatgaaaacctgctgaagctgaaggaggccctgaagaccagcaagaaccgggagaacagcctgacagacaacctgaatgacctgaacaatgagctgcagaagaagcagaaggcctacaacaagatcctgcgggagaaggaggagattgaccaggagaatgatgagctgaagaggcagatcaagaggctgaccagcggcctgcagggcaagcccctgacagacaacaagcagagcctcatcgaggagctgcagaggaaggtgaagaagctggagaaccagctggagggcaaggtggaggaggtggacctgaagcccatgaaggagaagaatgccaaggaggagctgatccgctgggaggagggcaagaagtggcaggccaagattgagggcatccggaacaagctgaaggagaaggagggggaggtgttcaccctgaccaagcagctgaacaccctgaaggacctgtttgccaaggctgacaaggagaagctgaccctgcagaggaagctgaagaccaccggcatgacagtggaccaggtgctgggcatccgggccctggagagcgagaaggagctggaggagctgaagaagaggaacctggacctggagaatgacatcctgtacatgagggcccaccaggccctgccccgggacagcgtggtggaggacctgcacctgcagaaccgctacctgcaggagaagctgcacgccctggagaagcagttcagcaaggacacctacagcaagcccagcatctctggaattgaaagtgatgaccactgccagcgggagcaggagctgcagaaggagaacctgaagctgagcagtgaaaatattgagctgaagttccagctggagcaggccaacaaggacctgccccggctgaagaaccaggtgcgggacctgaaggagatgtgtgagttcctgaagaaggagaaggccgaggtgcagaggaagctgggccacgtgcggggcagcggccgcagcggcaagaccatccctgagctggagaagaccatcggcctgatgaagaaggtggtggagaaggtgcagagagaaaatgagcagctgaagaaggccagcggcatcctgaccagcgagaagatggccaacatcgagcaggagaatgagaagctgaaggccgagctggagaagctgaaggcccacctgggccaccagctgtccatgcactatgagagcaagaccaagggcacagagaagatcatcgcagaaaatgaaaggctgaggaaggagctgaagaaggagacagatgctgctgagaagctgagaattgccaagaacaacctggagatcctgaatgagaagatgacagtgcagctggaggagaccgggaagaggctgcagtttgctgagagccggggcccccagctggagggcgctgacagcaagtcctggaagagcatcgtggtgaccaggatgtatgagaccaagctgaaggagctggagacagacatcgccaagaagaaccagagcatcacagacctgaagcagctggtgaaggaggccacagagcgggagcagaaggtgaacaagtacaatgaagacctggagcagcagatcaagatcctgaagcacgtgcctgagggcgctgagacagagcagggcctgaagcgggagctgcaggtgctgcggctggccaaccaccagctggacaaggagaaggccgagctgatccaccagatcgaggccaacaaggaccagagcggggctgagagcaccatcccagatgctgaccagctgaaggagaagatcaaggacctggagacccagctgaagatgtctgacctggagaagcagcacctgaaggaggagatcaagaagctgaagaaggagctggagaactttgaccccagcttctttgaggagattgaggacctgaagtacaactacaaggaggaggtgaagaagaacatcctgctggaggagaaggtgaagaagctgtctgagcagctgggcgtggagctgaccagccctgtggccgccagcgaggagtttgaagatgaggaggagagccctgtgaacttccccatctactag

SEQ ID NO: 147078 - DNA, 2415 bp, synthetic construct
  misc_feature 1..2415: note = Description of Artificial Sequence: Synthetic coding sequence
  source 1..2415: mol_type = other DNA
atgccacccaacatcaactggaaggagatcatgaaggtggaccctgatgacctgccccggcaggaggagctggccgacaacctgctgatcagcctgagcaaggtggaggtgaatgagctgaagtctgagaagcaggagaatgtcatccacctgttccgcatcacccagagcctgatgaagatgaaggcccaggaggtggagctggccctggaggaggtggagaaggccggggaggagcaggccaagtttgagaaccagctgaagaccaaggtgatgaagctggagaatgagctggagatggcccagcagagcgctgggggccgggacacccgcttcctgagaaatgagatctgccagctggagaagcagctggagcagaaggaccgggagctggaggacatggagaaggagctggagaaggagaagaaggtgaatgagcagctggccctgagaaatgaggaggccgagaatgaaaacagcaagctgcggcgggagaacaagaggctgaagaagaagaatgagcagctgtgccaggacatcatcgactaccagaagcagattgacagccagaaggagaccctgctgagcagaagaggagaggacagcgactaccgcagccagctgagcaagaagaactatgagctgatccagtacctggatgagatccagaccctgacagaggccaatgagaagattgaggtgcagaaccaggagatgaggaagaacctggaggagagcgtgcaggagatggagaagatgacagatgagtacaacaggatgaaggccatcgtgcaccagacagacaacgtgattgaccagctgaagaaggaaaatgaccactaccagctgcaggtgcaggagctgacagacctgctgaagagcaagaatgaggaggatgaccccatcatggtggccgtgaatgccaaggtggaggagtggaagctgatcctgagcagcaaggatgatgagatcatcgagtaccagcagatgctgcacaacctgcgggagaagctgaagaatgcccagctggatgctgacaagagcaatgtgatggccctgcagcagggcatccaggagcgggacagccagatcaagatgctgacagagcaggtggagcagtacaccaaggagatggagaagaacacctgcatcatcgaggacctgaagaatgagctgcagaggaacaagggggccagcaccctgagccagcagacccacatgaagatccagagcaccctggacatcctgaaggagaagaccaaggaggccgagaggacagctgagctggccgaggctgatgcccgggagaaggacaaggagctggtggaggccctgaagaggctgaaggactatgaaagtggagtgtatggcctggaggatgctgtggtggagatcaagaactgcaagaaccagatcaagatccgggaccgggagattgagatcctgaccaaggagatcaacaagctggagctgaagatcagtgacttcctggatgaaaatgaggccctgcgggagcgggtgggcctggagcccaagaccatgattgacctgacagagttcaggaacagcaagcacctgaagcagcagcagtacagagctgagaaccagatcctgctgaaggagattgagagcctggaggaggagcggctggacctgaagaagaagatccggcagatggcccaggagcggggcaagaggtctgccaccagcggcctgaccacagaggacctgaacctgacagagaacatcagccagggcgaccgcatcagcgagaggaagctggacctgctgagcctgaagaacatgtctgaggcccagagcaagaatgagttcctgagccgggagctgattgagaaggagcgggacctggagaggagcaggacagtcatcgccaagttccagaacaagctgaaggagctggtggaggagaacaagcagctggaggagggcatgaaggagatcctgcaggccatcaaggagatgcagaaggaccctgatgtgaagggcggggagaccagcctcatcatccccagcctggagcggctggtgaatgccatcgagagcaagaatgctgagggcatctttgatgccagcctgcacctgaaggcccaggtggaccagctgactggaagaaatgaggagctgcggcaggagctgcgggagagcaggaaggaggccatcaactacagccagcagctggccaaggccaacctgaagattgaccacctggagaaggagaccagcctgctgcggcagagcgagggcagcaatgtggtgttcaagggcatcgacctgcctgatggcatcgcccccagcagcgccagcatcatcaacagccagaatgagtacctgatccacctgctgcaggagctggagaacaaggagaaggtgaaggagttccgccgcttctcctag

SEQ ID NO: 147079 - DNA, 1650 bp, synthetic construct
  misc_feature 1..1650: note = Description of Artificial Sequence: Synthetic coding sequence
  source 1..1650: mol_type = other DNA
aagatggcccagcagagcgctgggggccgggacacccgcttcctgagaaatgagatctgccagctggagaagcagctggagcagaaggaccgggagctggaggacatggagaaggagctggagaaggagaagaaggtgaatgagcagctggccctgagaaatgaggaggccgagaatgaaaacagcaagctgcggcgggagaacaagaggctgaagaagaagaatgagcagctgtgccaggacatcatcgactaccagaagcagattgacagccagaaggagaccctgctgagcagaagaggagaggacagcgactaccgcagccagctgagcaagaagaactatgagctgatccagtacctggatgagatccagaccctgacagaggccaatgagaagattgaggtgcagaaccaggagatgaggaagaacctggaggagagcgtgcaggagatggagaagatgacagatgagtacaacaggatgaaggccatcgtgcaccagacagacaacgtgattgaccagctgaagaaggaaaatgaccactaccagctgcaggtgcaggagctgacagacctgctgaagagcaagaatgaggaggatgaccccatcatggtggccgtgaatgccaaggtggaggagtggaagctgatcctgagcagcaaggatgatgagatcatcgagtaccagcagatgctgcacaacctgcgggagaagctgaagaatgcccagctggatgctgacaagagcaatgtgatggccctgcagcagggcatccaggagcgggacagccagatcaagatgctgacagagcaggtggagcagtacaccaaggagatggagaagaacacctgcatcatcgaggacctgaagaatgagctgcagaggaacaagggggccagcaccctgagccagcagacccacatgaagatccagagcaccctggacatcctgaaggagaagaccaaggaggccgagaggacagctgagctggccgaggctgatgcccgggagaaggacaaggagctggtggaggccctgaagaggctgaaggactatgaaagtggagtgtatggcctggaggatgctgtggtggagatcaagaactgcaagaaccagatcaagatccgggaccgggagattgagatcctgaccaaggagatcaacaagctggagctgaagatcagtgacttcctggatgaaaatgaggccctgcgggagcgggtgggcctggagcccaagaccatgattgacctgacagagttcaggaacagcaagcacctgaagcagcagcagtacagagctgagaaccagatcctgctgaaggagattgagagcctggaggaggagcggctggacctgaagaagaagatccggcagatggcccaggagcggggcaagaggtctgccaccagcggcctgaccacagaggacctgaacctgacagagaacatcagccagggcgaccgcatcagcgagaggaagctggacctgctgagcctgaagaacatgtctgaggcccagagcaagaatgagttcctgagccgggagctgattgagaaggagcgggacctggagaggagcaggacagtcatcgccaagttccagaacaagtgctaccgcatcaaggagtgcagaagaaacctgtag

SEQ ID NO: 147080 - DNA, 4620 bp, synthetic construct; identical to SEQ ID NO: 147077
  misc_feature 1..4620: note = Description of Artificial Sequence: Synthetic coding sequence
  source 1..4620: mol_type = other DNA

SEQ ID NO: 147081 - DNA, 7440 bp, synthetic construct
  misc_feature 1..7440: note = Description of Artificial Sequence: Synthetic coding sequence
  source 1..7440: mol_type = other DNA
atgccacccaacatcaactggaaggagatcatgaaggtggaccctgatgacctgccccggcaggaggagctggccgacaacctgctgatcagcctgagcaaggtggaggtgaatgagctgaagtctgagaagcaggagaatgtcatccacctgttccgcatcacccagagcctgatgaagatgaaggcccaggaggtggagctggccctggaggaggtggagaaggccggggaggagcaggccaagtttgagaaccagctgaagaccaaggtgatgaagctggagaatgagctggagatggcccagcagagcgctgggggccgggacacccgcttcctgagaaatgagatctgccagctggagaagcagctggagcagaaggaccgggagctggaggacatggagaaggagctggagaaggagaagaaggtgaatgagcagctggccctgagaaatgaggaggccgagaatgaaaacagcaagctgcggcgggagaacaagaggctgaagaagaagaatgagcagctgtgccaggacatcatcgactaccagaagcagattgacagccagaaggagaccctgctgagcagaagaggagaggacagcgactaccgcagccagctgagcaagaagaactatgagctgatccagtacctggatgagatccagaccctgacagaggccaatgagaagattgaggtgcagaaccaggagatgaggaagaacctggaggagagcgtgcaggagatggagaagatgacagatgagtacaacaggatgaaggccatcgtgcaccagacagacaacgtgattgaccagctgaagaaggaaaatgaccactaccagctgcaggtgcaggagctgacagacctgctgaagagcaagaatgaggaggatgaccccatcatggtggccgtgaatgccaaggtggaggagtggaagctgatcctgagcagcaaggatgatgagatcatcgagtaccagcagatgctgcacaacctgcgggagaagctgaagaatgcccagctggatgctgacaagagcaatgtgatggccctgcagcagggcatccaggagcgggacagccagatcaagatgctgacagagcaggtggagcagtacaccaaggagatggagaagaacacctgcatcatcgaggacctgaagaatgagctgcagaggaacaagggggccagcaccctgagccagcagacccacatgaagatccagagcaccctggacatcctgaaggagaagaccaaggaggccgagaggacagctgagctggccgaggctgatgcccgggagaaggacaaggagctggtggaggccctgaagaggctgaaggactatgaaagtggagtgtatggcctggaggatgctgtggtggagatcaagaactgcaagaaccagatcaagatccgggaccgggagattgagatcctgaccaaggagatcaacaagctggagctgaagatcagtgacttcctggatgaaaatgaggccctgcgggagcgggtgggcctggagcccaagaccatgattgacctgacagagttcaggaacagcaagcacctgaagcagcagcagtacagagctgagaaccagatcctgctgaaggagattgagagcctggaggaggagcggctggacctgaagaagaagatccggcagatggcccaggagcggggcaagaggtctgccaccagcggcctgaccacagaggacctgaacctgacagagaacatcagccagggcgaccgcatcagcgagaggaagctggacctgctgagcctgaagaacatgtctgaggcccagagcaagaatgagttcctgagccgggagctgattgagaaggagcgggacctggagaggagcaggacagtcatcgccaagttccagaacaagctgaaggagctggtggaggagaacaagcagctggaggagggcatgaaggagatcctgcaggccatcaaggagatgcagaaggaccctgatgtgaagggcggggagaccagcctcatcatccccagcctggagcggctggtgaatgccatcgagagcaagaatgctgagggcatctttgatgccagcctgcacctgaaggcccaggtggaccagctgactggaagaaatgaggagctgcggcaggagctgcgggagagcaggaaggaggccatcaactacagccagcagctggccaaggccaacctgaagattgaccacctggagaaggagaccagcctgctgcggcagagcgagggcagcaatgtggtgttcaagggcatcgacctgcctgatggcatcgcccccagcagcgccagcatcatcaacagccagaatgagtacctgatccacctgctgcaggagctggagaacaaggagaagaagctgaagaacctggaggacagcctggaggactacaacaggaagtttgctgtgatccgccaccagcagagcctgctgtacaaggagtacctgtctgagaaggagacctggaagacagagagcaagaccatcaaggaggagaagaggaagctggaggaccaggtgcagcaggatgccatcaaggtgaaggagtacaacaacctgctgaatgccctgcagatggacagtgatgagatgaagaagatcctggccgagaacagcaggaagatcaccgtgctgcaggtgaatgagaagagcctcatccggcagtacaccaccctggtggagctggagcggcagctgaggaaagaaaatgagaagcagaagaatgagctgctgtccatggaggccgaggtgtgtgagaagattggctgcctgcagcgcttcaaggagatggccatcttcaagattgctgccctgcagaaggtggtggacaacagcgtgtccctgtctgagctggagctggccaacaagcagtacaatgagctgacagccaagtacagagacatcctgcagaaggacaacatgctggtgcagaggaccagcaacctggagcacctggagtgtgagaacatcagcctgaaggagcaggtggagagcatcaacaaggagctggagatcaccaaggagaagctgcacaccatcgagcaggcctgggagcaggagaccaagctgggcaatgaaagctccatggacaaggccaagaagagcatcaccaacagcgacatcgtgtccatcagcaagaagatcaccatgctggagatgaaggagctgaatgaaaggcagagagctgagcactgccagaagatgtatgagcacctgcggaccagcctgaagcagatggaggagaggaactttgagctggagaccaagtttgctgagctgaccaagatcaacctggatgcccagaaggtggagcagatgctgagagatgagctggccgacagcgtgtccaaggctgtgtctgatgctgaccggcagaggatcctggagctggagaagaatgagatggagctgaaggtggaggtgtccaagctgcgggagatcagtgacatcgcccggcggcaggtggagatcctgaatgcccagcagcagagccgggacaaggaggtggagagcctgaggatgcagctgctggactaccaggcccagagtgatgagaagagcctcatcgccaagctgcaccagcacaacgtgtccctgcagctgtctgaggccacagccctgggcaagctggagagcatcaccagcaagctgcagaagatggaggcctacaacctgcggctggagcagaagctggatgagaaggagcaggccctgtactatgcccggctggagggcaggaacagagccaagcacctgcggcagaccatccagagcctgcggcggcagttcagcggggccctgcccctggcccagcaggagaagttcagcaagaccatgatccagctgcagaatgacaagctgaagatcatgcaggagatgaagaacagccagcaggagcacaggaacatggagaacaagaccctggagatggagctgaagctgaagggcctggaggagctgatcagcaccctgaaggacaccaagggggcccagaaggtgatcaactggcacatgaagattgaggagctgcggctgcaggagctgaagctgaaccgggagctggtgaaggacaaggaggagatcaagtacctgaacaacatcatcagtgaatatgaaagaaccatcagcagcctggaggaggagatcgtgcagcagaacaagttccacgaggagcggcagatggcctgggaccagcgggaggtggacctggagcggcagctggacatctttgaccggcagcagaatgagatcctgaatgctgcccagaagtttgaggaggccaccggcagcatcccagaccccagcctgcccctgcccaaccagctggagatcgccctgaggaagatcaaggagaacatccgcatcatcctggagacccgggccacctgcaagagcctggaggagaagctgaaggagaaggagagcgccctgcggctggccgagcagaacatcctgagccgggacaaggtgatcaatgagctgcggctgcggctgcctgccacagctgagcgggagaagctgattgctgagctgggcaggaaggagatggagcccaagagccaccacaccctgaagatcgcccaccagaccatcgccaacatgcaggcccggctgaaccagaaggaggaggtgctgaagaagtaccagaggctgctggagaaggcccgggaggagcagcgggagatcgtgaagaagcatgaggaggacctgcacatcctgcaccaccggctggagctgcaggccgacagcagcctgaacaagttcaagcagacagcctgggacctgatgaagcagagccccacccctgtgcccaccaacaagcacttcatccggctggccgagatggagcagacagtggccgagcaggatgacagcctgagcagcctgctggtgaagctgaagaaggtgtcccaggacctggagcggcagcgggagatcacagagctgaaggtgaaggagtttgagaacatcaagctgcagctgcaggagaaccatgaagatgaggtgaagaaggtgaaggccgaggtggaggacctgaagtacctgctggaccagagccagaaggagagccagtgcctgaagtctgagctgcaggcccagaaggaggccaacagccgggcccccaccaccaccatgaggaacctggtggagcggctgaagagccagctggccctgaaggagaagcagcagaaggccctgagccgggccctgctggagctgcgggcagagatgacagctgctgctgaggagcgcatcatcagcgccaccagccagaaggaggcccacctgaatgtgcagcagatcgtggacagacacacccgggagctgaagacccaggtggaggacctgaatgaaaacctgctgaagctgaaggaggccctgaagaccagcaagaaccgggagaacagcctgacagacaacctgaatgacctgaacaatgagctgcagaagaagcagaaggcctacaacaagatcctgcgggagaaggaggagattgaccaggagaatgatgagctgaagaggcagatcaagaggctgaccagcggcctgcagggcaagcccctgacagacaacaagcagagcctcatcgaggagctgcagaggaaggtgaagaagctggagaaccagctggagggcaaggtggaggaggtggacctgaagcccatgaaggagaagaatgccaaggaggagctgatccgctgggaggagggcaagaagtggcaggccaagattgagggcatccggaacaagctgaaggagaaggagggggaggtgttcaccctgaccaagcagctgaacaccctgaaggacctgtttgccaaggctgacaaggagaagctgaccctgcagaggaagctgaagaccaccggcatgacagtggaccaggtgctgggcatccgggccctggagagcgagaaggagctggaggagctgaagaagaggaacctggacctggagaatgacatcctgtacatgagggcccaccaggccctgccccgggacagcgtggtggaggacctgcacctgcagaaccgctacctgcaggagaagctgcacgccctggagaagcagttcagcaaggacacctacagcaagcccagcatctctggaattgaaagtgatgaccactgccagcgggagcaggagctgcagaaggagaacctgaagctgagcagtgaaaatattgagctgaagttccagctggagcaggccaacaaggacctgccccggctgaagaaccaggtgcgggacctgaaggagatgtgtgagttcctgaagaaggagaaggccgaggtgcagaggaagctgggccacgtgcggggcagcggccgcagcggcaagaccatccctgagctggagaagaccatcggcctgatgaagaaggtggtggagaaggtgcagagagaaaatgagcagctgaagaaggccagcggcatcctgaccagcgagaagatggccaacatcgagcaggagaatgagaagctgaaggccgagctggagaagctgaaggcccacctgggccaccagctgtccatgcactatgagagcaagaccaagggcacagagaagatcatcgcagaaaatgaaaggctgaggaaggagctgaagaaggagacagatgctgctgagaagctgagaattgccaagaacaacctggagatcctgaatgagaagatgacagtgcagctggaggagaccgggaagaggctgcagtttgctgagagccggggcccccagctggagggcgctgacagcaagtcctggaagagcatcgtggtgaccaggatgtatgagaccaagctgaaggagctggagacagacatcgccaagaagaaccagagcatcacagacctgaagcagctggtgaaggaggccacagagcgggagcagaaggtgaacaagtacaatgaagacctggagcagcagatcaagatcctgaagcacgtgcctgagggcgctgagacagagcagggcctgaagcgggagctgcaggtgctgcggctggccaaccaccagctggacaaggagaaggccgagctgatccaccagatcgaggccaacaaggaccagagcggggctgagagcaccatcccagatgctgaccagctgaaggagaagatcaaggacctggagacccagctgaagatgtctgacctggagaagcagcacctgaaggaggagatcaagaagctgaagaaggagctggagaactttgaccccagcttctttgaggagattgaggacctgaagtacaactacaaggaggaggtgaagaagaacatcctgctggaggagaaggtgaagaagctgtctgagcagctgggcgtggagctgaccagccctgtggccgccagcgaggagtttgaagatgaggaggagagccctgtgaacttccccatctactag

SEQ ID NO: 147082 - DNA, 1512 bp, synthetic construct
  misc_feature 1..1512: note = Description of Artificial Sequence: Synthetic coding sequence
  source 1..1512: mol_type = other DNA
atggaggagcacggcgtgacccagacagagcacatggccaccatcgaggcccatgctgtggcccagcaggtgcagcaggtgcacgtggccacctacacagagcacagcatgctgtctgcagatgaggacagccccagcagccctgaggacaccagctatgatgacagcgacatcctgaacagcacagctgctgatgaggtgacagcccacctggccgccgccggccctgtgggcatggctgctgctgctgctgtggccaccgggaagaagaggaagaggcctcatgtgtttgagagcaaccccagcatcaggaagaggcagcagacccggctgctgaggaagctgcgggccaccctggatgagtacaccaccagggtgggccagcaggccatcgtgctgtgcatcagccccagcaagcccaaccctgtgttcaaggtgtttggagctgcccccctggagaatgtggtgaggaagtacaagtccatgatcctggaggacctggagagcgccctggccgagcacgccccagccccccaggaggtgaacagcgagctgccccccctgaccattgatggcatccctgtgtctgtggacaagatgacccaggcccagctgcgggccttcatccctgagatgctgaagtacagcacaggccggggcaagccaggctggggcaaggagagctgcaagcccatctggtggccagaggacatcccctgggccaacgtgcggagtgatgtgaggacagaggagcagaagcagagggtgtcctggacccaggccctgcggaccatcgtgaagaactgctacaagcagcacggccgggaggacctgctgtatgcctttgaggaccagcagacccagacccaggccacagccacccacagcatcgcccacctggtgcccagccagacagtggtgcagaccttcagcaacccagatggcaccgtgtccctcatccaggtgggcaccggggccaccgtggccaccctggctgatgccagcgagctgcccaccaccgtgacagtggcccaggtgaactacagcgctgtggctgatggagaggtggagcagaactgggccaccctgcagggcggggagatgaccatccagaccacccaggccagcgaggccacccaggccgtggccagcctggccgaggccgctgtggccgccagccaggagatgcagcagggcgccaccgtgaccatggccctgaacagcgaggccgccgcccatgctgtggccaccctggccgaggccaccctgcagggcggcggccagatcgtgctgagcggggagacagctgctgctgtgggcgccctgactggagtgcaggatgccaacggcctggtgcagatccctgtgtccatgtaccagacagtggtgaccagcctggcccagggcaatggacctgtgcaggtggccatggcccctgtgaccacccgcatcagtgacagcgctgtgaccatggatggccaggccgtggaggtggtgaccctggagcagtag

SEQ ID NO: 147083 - DNA, 906 bp, synthetic construct
  misc_feature 1..906: note = Description of Artificial Sequence: Synthetic coding sequence
  source 1..906: mol_type = other DNA
atgagcctgcggcggcacatcggcaaccctgagtacctgatgaagaggatcccccagaacccccgctaccagcacatcaagagccggctggacaccggcaacagcatgaccaagtacacagagaagctggaggagatcaagaagaactaccgctacaagaaggatgagctgttcaagaggctgaaggtgaccacctttgcccagctgatcatccaggtggccagcctgagtgaccagaccctggaggtgacagctgaggagatccagaggctggaggacaatgacagcgctgccagtgaccctgatgctgagaccacagcccggaccaacgggaagggcaaccctggagagcagagccccagccctgagcagttcatcaacaatgctggggccggggacagcagccgcagcaccctgcagagcgtcatcagcggcgtgggggagctggacctggacaagggccctgtgaagaaggccgagccccacaccaaggacaagccctacccagactgccccttcctgctgctggatgtgcgggaccgggacagctaccagcagtgccacatcgtgggcgcctacagctaccccatcgccaccctgagcaggaccatgaacccctacagcaatgacatcctggagtacaagaatgcccacggcaagatcatcatcctgtatgatgatgatgagcggctggccagccaggccgccaccaccatgtgtgagcggggctttgaaaatctcttcatgctgagcggcggccgcctgaaccaggccaacagcagcggccgggagagcaaggtgcctggggcccggagcgcccagaacctgcccggcggcggccctgccagccacagcaaccccaggagcctgagcagcggccacctgcagggcaagccctggaagtag

SEQ ID NO: 147084 - DNA, 165 bp, synthetic construct
  misc_feature 1..165: note = Description of Artificial Sequence: Synthetic coding sequence
  source 1..165: mol_type = other DNA
atgagcctgcggcggcacatcggcaaccctgagtacctgatgaagaggatcccccagaacccccgctaccagcacatcaagagccggctggacaccggggcctgtgtgtacctgaccagcagccctgccctgcctgactgtgccatgaatggcctgtgcttctag

SEQ ID NO: 147085 - DNA, 858 bp, synthetic construct
  misc_feature 1..858: note = Description of Artificial Sequence: Synthetic coding sequence
  source 1..858: mol_type = other DNA
atgagcctgcggcggcacatcggcaaccctgagtacctgatgaagaggatcccccagaacccccgctaccagcacatcaagagccggctggacacagactaccgctacaagaaggatgagctgttcaagaggctgaaggtgaccacctttgcccagctgatcatccaggtggccagcctgagtgaccagaccctggaggtgacagctgaggagatccagaggctggaggacaatgacagcgctgccagtgaccctgatgctgagaccacagcccggaccaacgggaagggcaaccctggagagcagagccccagccctgagcagttcatcaacaatgctggggccggggacagcagccgcagcaccctgcagagcgtcatcagcggcgtgggggagctggacctggacaagggccctgtgaagaaggccgagccccacaccaaggacaagccctacccagactgccccttcctgctgctggatgtgcgggaccgggacagctaccagcagtgccacatcgtgggcgcctacagctaccccatcgccaccctgagcaggaccatgaacccctacagcaatgacatcctggagtacaagaatgcccacggcaagatcatcatcctgtatgatgatgatgagcggctggccagccaggccgccaccaccatgtgtgagcggggctttgaaaatctcttcatgctgagcggcggccgcctgaaccaggccaacagcagcggccgggagagcaaggtgcctggggcccggagcgcccagaacctgcccggcggcggccctgccagccacagcaaccccaggagcctgagcagcggccacctgcagggcaagccctggaagtag

SEQ ID NO: 147086 - DNA, 1200 bp, synthetic construct
  misc_feature 1..1200: note = Description of Artificial Sequence: Synthetic coding sequence
  source 1..1200: mol_type = other DNA
atgagcagccgcagcaccaaggacctgatcaagagcaagtggggcagcaagcccagcaacagcaagtctgagaccaccctggagaagctgaagggggagatcgcccacctgaagacctctgtggatgagatcaccagcggcaagggcaagctgacagacaaggagcggcaccggctgctggagaagatccgggtgctggaggccgagaaggagaagaatgcctaccagctgacagagaaggacaaggagatccagaggctgcgggaccagctgaaggcccgctacagcaccaccaccctgctggagcagctggaggagaccacccgggagggggagcggcgggagcaggtgctgaaggccctgtctgaggagaaggatgtgctgaagcagcagctgtctgctgccaccagcagaattgctgagctggagagcaagaccaacaccctgcggctgagccagacagtggcccccaactgcttcaacagcagcatcaacaacatccacgagatggagatccagctgaaggatgccctggagaagaaccagcagtggctggtgtatgaccagcagcgggaggtgtatgtgaagggcctgctggccaagatctttgagctggagaagaagacagaaacagctgcccacagcctgccccagcagaccaagaagccagagagcgagggctacctgcaggaggagaagcagaagtgctacaatgacctgctggccagcgccaagaaggacctggaggtggagcggcagaccatcacccagctgagctttgagctgtctgagttccggaggaaatatgaggagacccagaaggaggtgcacaacctgaaccagctgctgtacagccagaggagagcagatgtgcagcacctggaggatgacagacacaagacagagaagatccagaagctgcgggaggagaatgacatcgcccggggcaagctggaggaggagaagaagaggtctgaggagctgctgagccaggtgcagttcctgtacaccagcctgctgaagcagcaggaggagcagaccagggtggccctgctggagcagcagatgcaggcctgcaccctggactttgaaaatgagaagctggaccggcagcacgtgcagcaccagctgcacgtgatcctgaaggagctgaggaaggccaggaacaacacagtgggcatcctggacaccaagagctag

SEQ ID NO: 147087 - DNA, 1395 bp, synthetic construct
  misc_feature 1..1395: note = Description of Artificial Sequence: Synthetic coding sequence
  source 1..1395: mol_type = other DNA
atgagcagccgcagcaccaaggacctgatcaagagcaagtggggcagcaagcccagcaacagcaagtctgagaccaccctggagaagctgaagggggagatcgcccacctgaagacctctgtggatgagatcaccagcggcaagggcaagctgacagacaaggagcggcaccggctgctggagaagatccgggtgctggaggccgagaaggagaagaatgcctaccagctgacagagaaggacaaggagatccagaggctgcgggaccagctgaaggcccgctacagcaccaccaccctgctggagcagctggaggagaccacccgggagggggagcggcgggagcaggtgctgaaggccctgtctgaggagaaggatgtgctgaagcagcagctgtctgctgccaccagcagaattgctgagctggagagcaagaccaacaccctgcggctgagccagacagtggcccccaactgcttcaacagcagcatcaacaacatccacgagatggagatccagctgaaggatgccctggagaagaaccagcagtggctggtgtatgaccagcagcgggaggtgtatgtgaagggcctgctggccaagatctttgagctggagaagaagacagaaacagctgcccacagcctgccccagcagaccaagaagccagagagcgagggctacctgcaggaggagaagcagaagtgctacaatgacctgctggccagcgccaagaaggacctggaggtggagcggcagaccatcacccagctgagctttgagctgtctgagttccggaggaaatatgaggagacccagaaggaggtgcacaacctgaaccagctgctgtacagccagaggagagcagatgtgcagcacctggaggatgacagacacaagacagagaagatccagaagctgcgggaggagaatgacatcgcccggggcaagctggaggaggagaagaagaggtctgaggagctgctgagccaggtgcagttcctgtacaccagcctgctgaagcagcaggaggagcagaccagggtggccctgctggagcagcagatgcaggcctgcaccctggactttgaaaatgagaagctggaccggcagcacgtgcagcaccagctgcacgtgatcctgaaggagctgaggaaggccaggaaccagatcacccagctggagagcctgaagcagctgcatgaatttgccatcacagagcccctggtgaccttccagggcgagacagaaaatcgggagaaggtggccgccagccccaagagccccacagctgccctgaatgaaagcctggtggagtgccccaagtgcaacatccagtacccagccacagagcaccgggacctgctggtgcacgtggagtactgcagcaagtag

SEQ ID NO: 147088 - DNA, 627 bp, synthetic construct
  misc_feature 1..627: note = Description of Artificial Sequence: Synthetic coding sequence
  source 1..627: mol_type = other DNA
tgaagcagcatcaacaacatccacgagatggagatccagctgaaggatgccctggagaagaaccagcagtggctggtgtatgaccagcagcgggaggtgtatgtgaagggcctgctggccaagatctttgagctggagaagaagacagaaacagctgcccacagcctgccccagcagaccaagaagccagagagcgagggctacctgcaggaggagaagcagaagtgctacaatgacctgctggccagcgccaagaaggacctggaggtggagcggcagaccatcacccagctgagctttgagctgtctgagttccggaggaaatatgaggagacccagaaggaggtgcacaacctgaaccagctgctgtacagccagaggagagcagatgtgcagcacctggaggatgacagacacaagacagagaagatccagaagctgcgggaggagaatgacatcgcccggggcaagctggaggaggagaagaagaggtctgaggagctgctgagccaggtgcagttcctgtacaccagcctgctgaagcagcaggaggagcagaccagggtggccctgctggagcagcaggtgctgatccgggtggccagcaagttcaacagcgcctgctag

SEQ ID NO: 147089 - DNA, 1425 bp, synthetic construct
  misc_feature 1..1425: note = Description of Artificial Sequence: Synthetic coding sequence
  source 1..1425: mol_type = other DNA
atggctgctgcctctgtgtctgctgccagcggcagccacctgagcaacagctttgctgagcccagccgcagcaatggctccatggtgcgccacagcagcagcccctacgtggtgtaccccagcgacaagcccttcctgaacagcgacctgcggcgcagccccagcaagcccaccctggcctacccagagagcaacagccgggccatcttcagcgccctgaagaacctgcaggacaagatccggcggctggagctggagcgcatccaggccgaggagagcgtgaagaccctgagccgggagaccatcgagtacaagaaggtgctggatgagcagatccaggagcgggagaacagcaagaatgaggagagcaagcacaaccaggagctgaccagccagctgctggccgctgagaacaagtgcaacctgctggagaagcagctggagtacatgaggaacatgatcaagcatgctgagatggagaggacctctgtgctggagaagcaggtgtccctggagcgggagcggcagcacgaccagacccacgtgcagagccagctggagaagctggacctgctggagcaggagtacaacaagctgaccaccatgcaggccctggccgagaagaagatgcaggagctggaggccaagctgcacgaggaggagcaggagaggaagaggatgcaggccaaggctgctgagctgcagacaggcctggagaccaacagactcatctttgaggacaaggccaccccctgtgtgcccaatgcccggcgcatcaagaagaagaagagcaagcccccagagaagagcaccagccccagccatgctgtggtggccaacgtgcagctggtgctgcacctgatgaagcagcacagcaaggccctgtgcaatgacagagtcatcaacagcatccccctggccaagcaggtgagcagccggggcggcaagagcaagaagctgtctgtgaccccacccagcagcaatggcatcaatgaggagctgtctgaggtgctgcagaccctgcaggatgaatttggccagatgagctttgaccaccagcagctggccaagctgatccaggagagccccaccgtggagctgaaggacaagctggagtgtgagctggaggccctggtgggccgcatggaggccaaggccaaccagatcaccaaggtgaggaagtaccaggcccagctggagaagcagaagctggagaagcagaagaaggagctgaaggccaccaagaagaccctggatgaggagaggaacagcagcagccgcagcggcatcaccggcaccaccaacaagaaggacttcatgaagctgcggcctggagagaagaggaggaagaacctgcagctgctgaaggacatgcagagcatccagaacagcctgcagagcagcagcctgtgctgggactactag

SEQ ID NO: 147090 - DNA, 1503 bp, synthetic construct
  misc_feature 1..1503: note = Description of Artificial Sequence: Synthetic coding sequence
  source 1..1503: mol_type = other DNA
atggctgctgcctctgtgtctgctgccagcggcagccacctgagcaacagctttgctgagcccagccgcagcaatggctccatggtgcgccacagcagcagcccctacgtggtgtaccccagcgacaagcccttcctgaacagcgacctgcggcgcagccccagcaagcccaccctggcctacccagagagcaacagccgggccatcttcagcgccctgaagaacctgcaggacaagatccggcggctggagctggagcgcatccaggccgaggagagcgtgaagaccctgagccgggagaccatcgagtacaagaaggtgctggatgagcagatccaggagcgggagaacagcaagaatgaggagagcaagcacaaccaggagctgaccagccagctgctggccgctgagaacaagtgcaacctgctggagaagcagctggagtacatgaggaacatgatcaagcatgctgagatggagaggacctctgtgctggagaagcaggtgtccctggagcgggagcggcagcacgaccagacccacgtgcagagccagctggagaagctggacctgctggagcaggagtacaacaagctgaccaccatgcaggccctggccgagaagaagatgcaggagctggaggccaagctgcacgaggaggagcaggagaggaagaggatgcaggccaaggctgctgagctgcagacaggcctggagaccaacagactcatctttgaggacaaggccaccccctgtgtgcccaatgcccggcgcatcaagaagaagaagagcaagcccccagagaagaagagcagcaggaactactttggagcccagccccactaccgcctgtgcctgggggacatgccctttgtggccggcaagagcaccagccccagccatgctgtggtggccaacgtgcagctggtgctgcacctgatgaagcagcacagcaaggccctgtgcaatgacagagtcatcaacagcatccccctggccaagcaggtgagcagccggggcggcaagagcaagaagctgtctgtgaccccacccagcagcaatggcatcaatgaggagctgtctgaggtgctgcagaccctgcaggatgaatttggccagatgagctttgaccaccagcagctggccaagctgatccaggagagccccaccgtggagctgaaggacaagctggagtgtgagctggaggccctggtgggccgcatggaggccaaggccaaccagatcaccaaggtgaggaagtaccaggcccagctggagaagcagaagctggagaagcagaagaaggagctgaaggccaccaagaagaccctggatgaggagaggaacagcagcagccgcagcggcatcaccggcaccaccaacaagaaggacttcatgaagctgcggcctggagagaagaggaggaagaacctgcagctgctgaaggacatgcagagcatccagaacagcctgcagagcagcagcctgtgctgggactactag

SEQ ID NO: 147091 - DNA, 813 bp, synthetic construct
  misc_feature 1..813: note = Description of Artificial Sequence: Synthetic coding sequence
  source 1..813: mol_type = other DNA
atggctgctgcctctgtgtctgctgccagcggcagccacctgagcaacagctttgctgagcccagccgcagcaatggctccatggtgcgccacagcagcagcccctacgtggtgtaccccagcgacaagcccttcctgaacagcgacctgcggcgcagccccagcaagcccaccctggcctacccagagagcaacagccgggccatcttcagcgccctgaagaacctgcaggacaagatccggcggctggagctggagcgcatccaggccgaggagagcgtgaagaccctgagccgggagaccatcgagtacaagaaggtgctggatgagcagatccaggagcgggagaacagcaagaatgaggagagcaagcacaaccaggagctgaccagccagctgctggccgctgagaacaagtgcaacctgctggagaagcagctggagtacatgaggaacatgatcaagcatgctgagatggagaggacctctgtgctggagaagcaggtgtccctggagcgggagcggcagcacgaccagacccacgtgcagagccagctggagaagctggacctgctggagcaggagtacaacaagctgaccaccatgcaggccctggccgagaagaagatgcaggagctggaggccaagctgcacgaggaggagcaggagaggaagaggatgcaggccaaggctgctgagctgcagacaggcctggagaccaacagactcatctttgaggacaaggccaccccctgtgtgcccaatgcccggcgcatcaagaagaagaagagcaagcccccagagaaggtgtag

SEQ ID NO: 147092 - DNA, 1476 bp, synthetic construct
  misc_feature 1..1476: note = Description of Artificial Sequence: Synthetic coding sequence
  source 1..1476: mol_type = other DNA
atgctgaccagaattgacaacagctttgctgagcccagccgcagcaatggctccatggtgcgccacagcagcagcccctacgtggtgtaccccagcgacaagcccttcctgaacagcgacctgcggcgcagccccagcaagcccaccctggcctacccagagagcaacagccgggccatcttcagcgccctgaagaacctgcaggacaagatccggcggctggagctggagcgcatccaggccgaggagagcgtgaagaccctgagccgggagaccatcgagtacaagaaggtgctggatgagcagatccaggagcgggagaacagcaagaatgaggagagcaagcacaaccaggagctgaccagccagctgctggccgctgagaacaagtgcaacctgctggagaagcagctggagtacatgaggaacatgatcaagcacgccgagatggagaggacctctgtgctggagaagcaggtgtccctggagcgggagcggcagcacgaccagacccacgtgcagagccagctggagaagctggacctgctggagcaggagtacaacaagctgaccaccatgcaggccctggccgagaagaagatgcaggagctggaggccaagctgcacgaggaggagcaggagaggaagaggatgcaggccaaggctgctgagctgcagacaggcctggagaccaacagactcatctttgaggacaaggccaccccctgtgtgcccaatgcccggcgcatcaagaagaagaagagcaagcccccagagaagaagagcagcaggaactactttggagcccagccccactaccgcctgtgcctgggggacatgccctttgtggccggcaagagcaccagccccagccatgctgtggtggccaacgtgcagctggtgctgcacctgatgaagcagcacagcaaggccctgtgcaatgacagagtcatcaacagcatccccctggccaagcaggtgagcagcagaggaggcaagagcaagaagctgtctgtgaccccacccagcagcaatggcatcaatgaggagctgtctgaggtgctgcagaccctgcaggatgaatttggccagatgagctttgaccaccagcagctggccaagctgatccaggagagccccaccgtggagctgaaggacaagctggagtgtgagctggaggccctggtgggccgcatggaggccaaggccaaccagatcaccaaggtgaggaagtaccaggcccagctggagaagcagaagctggagaagcagaagaaggagctgaaggccaccaagaagaccctggatgaggagaggaacagcagcagccgcagcggcatcaccggcaccaccaacaagaaggacttcatgaagctgcggcctggagagaagaggaggaagaacctgcagctgctgaaggacatgcagagcatccagaacagcctgcagagcagcagcctgtgctgggactactag

SEQ ID NO: 147093 - DNA, 1794 bp, synthetic construct
  misc_feature 1..1794: note = Description of Artificial Sequence: Synthetic coding sequence
  source 1..1794: mol_type = other DNA
atgtttcctgtggcccccaagccccaggacagcagccagcccagcgaccggctgatgacagagaagcagcaggaggaggccgagtgggagagcatcaacgtgctgctgatgatgcacggcctgaagcccctgagcctggtgaagaggacagacctgaaggacctgatcatctttgacaagcagagcagccagaggatgaggcagaacctgaagctgctggtggaggagaccagctgccagcagaacatgatccaggagctgattgagaccaaccagcagctgagaaatgagctgcagctggagcagagcagagctgccaaccaggagcagagggccaatgacctggagcagatcatggagagcgtgaagagcaagatcggggagctggaggatgagagcctgagccgggcctgccaccagcagaacaagatcaaggacctgcagaaggagcagaagaccctgcaggtgaagtgccagcactacaagaagaagaggacagagcaggaggagaccatcgccagcctgcagatggaggtgtgccgcctgaagaaggaggaggaggaccgcatcgtgacccagaacagagtgtttgcctacctgtgcaagagggtgccccacacagtgctggaccggcagctgctgtgcctgattgactactatgagagcaagatcaggaagatccacacccagaggcagtacaaggaggatgagagccagagcgaggaggagaatgactacagaaacctggatgccagccccacctacaagggcctgctgatgagcctgcagaaccagctgaaggagagcaagagcaagattgatgccctgagcagcgagaagctgaacctgcagaaggacctggagacccggcccacccagcacgagctgcggctgtacaagcagcaggtgaagaagctggagaaggccctgaagaagaatgtgaagctgcaggagctgatcaaccacaagaaggccgaggacacagagaagaaggatgagcccagcaagtacaaccagcagcaggccctgattgaccagcgctacttccaggtgctgtgcagcatcaacagcatcatccacaacccccgggcccctgtgatcatctacaagcagaccaagggcggcgtgcagaacttcaacaaggacctggtgcaggactgtggctttgagcacctggtgcctgtgattgagatgtgggccgaccagctgaccagcctgaaggacctgtacaagagcctgaagaccctgtctgctgagctggtgccctggctgaacctgaagaagcaggatgaaaatgaaggcatcaaggtggaggacctgctcttcatcgtggacaccatgctggaggaggtggagaacaaggagaaggacagcaacatgccccacttccagaccctgcaggccatcgtgagccacttccagaagctgtttgatgtgcccagcctgaatggagtgtaccccaggatgaatgaggtgtacacccggctgggggagatgaacaatgctgtgaggaacctgcaggagctgctggagctggacagcagcagcagcctgtgtgtgctggtgtccacagtgggcaagctgtgccgcctcatcaatgaagatgtgaatgagcaggtgatgcaggtgctgggccctgaggacctgcagagcatcatctacaagctggaggagcacgaggagttcttccctgccttccaggccttcaccaatgacctgctggagatcctggagattgatgacctggatgccatcgtgcctgctgtgaagaagctgaaggtgctgagctactag

SEQ ID NO: 147094 - DNA, 639 bp, synthetic construct
  misc_feature 1..639: note = Description of Artificial Sequence: Synthetic coding sequence
  source 1..639: mol_type = other DNA
atgtttcctgtggcccccaagccccaggacagcagccagcccagcgaccggctgatgacagagaagcagcaggaggaggccgagtgggagagcatcaacgtgctgctgatgatgcacggcctgaagcccctgagcctggtgaagaggacagacctgaaggacctgatcatctttgacaagcagagcagccagaggatgaggcagaacctgaagctgctggtggaggagaccagctgccagcagaacatgatccaggagctgattgagaccaaccagcagctgagaaatgagctgcagctggagcagagcagagctgccaaccaggagcagagggccaatgacctggagcagatcatggagagcgtgaagagcaagatcggggagctggaggatgagagcctgagccgggcctgccaccagcagaacaagatcaaggacctgcagaaggagcagaagaccctgcaggtgaagtgccagcactacaagaagaagaggacagagcaggaggagaccatcgccagcctgcagatggaggtgtgccgcctgaagaaggaggaggaggaccgcatcgtgacccagaacagagtgtttgcctacctgtgcaagagggtgccccacacagtgctggaccggcagtag

SEQ ID NO: 147095 - DNA, 351 bp, synthetic construct
  misc_feature 1..351: note = Description of Artificial Sequence: Synthetic coding sequence
  source 1..351: mol_type = other DNA
atgtttcctgtggcccccaagccccaggacagcagccagcccagcgaccggctgatgacagagaagcagcaggaggaggccgagtgggagagcatcaacgtgctgctgatgatgcacggcctgaagcccctgagcctggtgaagaggacagacctgaaggacctgatcatctttgacaagcagagcagccagaggatgaggcagaacctgaagctgctggtggaggagaccagctgccagcagaacatgatccaggagctgattgagaccaaccagcagctgagaaatgagctgcagctggagcagagcagagctgccaaccaggagcagagggccaatgacctggagtag

SEQ ID NO: 147096 - DNA, 1665 bp, synthetic construct
  misc_feature 1..1665: note = Description of Artificial Sequence: Synthetic coding sequence
  source 1..1665: mol_type = other DNA
atgtttcctgtggcccccaagccccaggacagcagccagcccagcgaccggctgatgacagagaagcagcaggaggaggccgagtgggagagcatcaacgtgctgctgatgatgcacggcctgaagcccctgagcctggtgaagaggacagacctgaaggacctgatcatctttgacaagcagagcagccagaggatgaggcagaacctgaagctgctggtggaggagaccagctgccagcagaacatgatccaggagctgattgagaccaaccagcagctgagaaatgagctgcagctggagcagagcagagctgccaaccaggagcagagggccaatgacctggagcagatcatggagagcgtgaagagcaagatcggggagctggaggatgagagcctgagccgggcctgccaccagcagaacaagatcaaggacctgcagaaggagcagaagaccctgcaggtgaagtgccagcactacaagaagaagaggacagagcaggaggagaccatcgccagcctgcagatggaggtgtgccgcctgaagaaggaggaggaggaccgcatcgtgacccagaacagagtgtttgcctacctgtgcaagagggtgccccacacagtgctggaccggcagctgctgtgcctgattgactactatgagagcaagatcaggaagatccacacccagaggcagtacaaggaggatgagagccagagcgaggaggagaatgactacagaaacctggatgccagccccacctacaagggcctgctgatgagcctgcagaaccagctgaaggagagcaagagcaagattgatgccctgagcagcgagaagctgaacctgcagaaggacctggagacccggcccacccagcacgagctgcggctgtacaagcagcaggtgaagaagctggagaaggccctgaagaagaatgtgaagctgcaggagctgatcaaccacaagaaggccgaggacacagagaagaaggatgagcccagcaagtacaaccagcagcaggccctgattgaccagcgctacttccaggtgctgtgcagcatcaacagcatcatccacaacccccgggcccctgtgatcatctacaagcagaccaagggcggcgtgcagaacttcaacaaggacctggtgcaggactgtggctttgagcacctggtgcctgtgattgagatgtgggccgaccagctgaccagcctgaaggacctgtacaagagcctgaagaccctgtctgctgagctggtgccctggctgaacctgaagaagcaggatgaaaatgaaggcatcaaggtggaggacctgctcttcatcgtggacaccatgctggaggaggtggagaacaaggagaaggacagcaacatgccccacttccagaccctgcaggccatcgtgagccacttccagaagctgtttgatgtgcccagcctgaatggagtgtaccccaggatgaatgaggtgtacacccggctgggggagatgaacaatgctgtgaggaacctgcaggagctgctggagctggacagcagcagcagcctgtgtgtgctggtgtccacagtgggcaagctgtgccgcctcatcaatgaagatgtgaatgagcaggtgatgcaggtgctgggccctgaggacctgcagcgctacctgttctag

SEQ ID NO: 147097 - DNA, 1794 bp, synthetic construct; identical to SEQ ID NO: 147093
  misc_feature 1..1794: note = Description of Artificial Sequence: Synthetic coding sequence
  source 1..1794: mol_type = other DNA

SEQ ID NO: 147098 - DNA, 72 bp, synthetic construct
  misc_feature 1..72: note = Description of Artificial Sequence: Synthetic coding sequence
  source 1..72: mol_type = other DNA
atgtttcctgtggcccccaagccccaggacagcagccagcccagcgaccggctgatgacagagaagcagtag

SEQ ID NO: 147099 - DNA, 1734 bp, synthetic construct
  misc_feature 1..1734: note = Description of Artificial Sequence: Synthetic coding sequence
  source 1..1734: mol_type = other DNA
atgacagagcaggaggaggccgagtgggagagcatcaacgtgctgctgatgatgcacggcctgaagcccctgagcctggtgaagaggacagacctgaaggacctgatcatctttgacaagcagagcagccagaggatgaggcagaacctgaagctgctggtggaggagaccagctgccagcagaacatgatccaggagctgattgagaccaaccagcagctgagaaatgagctgcagctggagcagagcagagctgccaaccaggagcagagggccaatgacctggagcagatcatggagagcgtgaagagcaagatcggggagctggaggatgagagcctgagccgggcctgccaccagcagaacaagatcaaggacctgcagaaggagcagaagaccctgcaggtgaagtgccagcactacaagaagaagaggacagagcaggaggagaccatcgccagcctgcagatggaggtgtgccgcctgaagaaggaggaggaggaccgcatcgtgacccagaacagagtgtttgcctacctgtgcaagagggtgccccacacagtgctggaccggcagctgctgtgcctgattgactactatgagagcaagatcaggaagatccacacccagaggcagtacaaggaggatgagagccagagcgaggaggagaatgactacagaaacctggatgccagccccacctacaagggcctgctgatgagcctgcagaaccagctgaaggagagcaagagcaagattgatgccctgagcagcgagaagctgaacctgcagaaggacctggagacccggcccacccagcacgagctgcggctgtacaagcagcaggtgaagaagctggagaaggccctgaagaagaatgtgaagctgcaggagctgatcaaccacaagaaggccgaggacacagagaagaaggatgagcccagcaagtacaaccagcagcaggccctgattgaccagcgctacttccaggtgctgtgcagcatcaacagcatcatccacaacccccgggcccctgtgatcatctacaagcagaccaagggcggcgtgcagaacttcaacaaggacctggtgcaggactgtggctttgagcacctggtgcctgtgattgagatgtgggccgaccagctgaccagcctgaaggacctgtacaagagcctgaagaccctgtctgctgagctggtgccctggctgaacctgaagaagcaggatgaaaatgaaggcatcaaggtggaggacctgctcttcatcgtggacaccatgctggaggaggtggagaacaaggagaaggacagcaacatgccccacttccagaccctgcaggccatcgtgagccacttccagaagctgtttgatgtgcccagcctgaatggagtgtaccccaggatgaatgaggtgtacacccggctgggggagatgaacaatgctgtgaggaacctgcaggagctgctggagctggacagcagcagcagcctgtgtgtgctggtgtccacagtgggcaagctgtgccgcctcatcaatgaagatgtgaatgagcaggtgatgcaggtgctgggccctgaggacctgcagagcatcatctacaagctggaggagcacgaggagttcttccctgccttccaggccttcaccaatgacctgctggagatcctggagattgatgacctggatgccatcgtgcctgctgtgaagaagctgaaggtgctgagctactag

SEQ ID NO: 147100 - DNA, 3666 bp, synthetic construct
  misc_feature 1..3666: note = Description of Artificial Sequence: Synthetic coding sequence
  source 1..3666: mol_type = other DNA
atgctgttccccctgcaggtggccgctgtgaccagctctgtgagagatgaccccctggagcactgtgtgagccccaggacccgggcccggagccctgagatctgcaagatggctgacaacctggatgagttcatcgaggagcagaaggcccggctggccgaggacaaggccgagctggagagtgaccccccctacatggagatgaagggcaagctgagcgccaagctgtctgagaacagcaagatcctgatctccatggccaaggagaacatcccccccaacagccagcagacccggggcagcctgggcatcgactatggcctgagcctgcccctgggggaggactatgaaaggaagaagcacaagctgaaggaggagctgcggcaggactaccgccgctacctgacccaggagcggctgaagctggagaggaacaaggagtacaaccagttcctgcggggcaaggaggagagcagcgagaagttccggcaggtggagaagagcacagagcccaagagccagaggaacaagaagcccatcggccaggtgaagccagacctgaccagccagatccagaccagctgtgagaacagcgagggccccaggaaggatgtgctgaccccatctgaggcctatgaggagctgctgaaccagaggcggctggaggaggaccgctaccggcagctggatgatgaaattgagctgaggaacagacgcatcatcaagaaggccaatgaggaggtgggcatcagcaacctgaagcaccagagatttgccagcaaggccggcatcccagaccggcgcttccaccgcttcaatgaagatagagtgtttgaccggcgctaccacaggccagaccaggaccctgaggtgtctgaggagatggatgagcgcttccgctatgaaagtgactttgaccggcggctgagccgggtgtacaccaatgacaggatgcacaggaacaagaggggcaacatgccacccatggagcatgatggagatgtgattgagcagagcaacatccgcatcagcagcgctgagaacaagagcgccccagacaatgagaccagcaagagcgccaaccaggacacctgcagcccctttgctggcatgctgtttggaggagaggaccgggagctgatccagaggaggaaggagaagtaccgcctggagctgctggagcagatggccgagcagcagaggaacaagaggcgggagaaggacctggagctgcgggtggccgccagcggggcccaggaccctgagaagagcccagaccggctgaagcagttctctgtggcccccaggcactttgaggagatgatccccccagagcggcccagaattgccttccagacccccctgccccccctgagcgcccccagcgtgccccccatccccagcgtgcaccctgtgcccagccagaatgaagacctgcggagcggcctgagcagcgccctgggggagatggtgagccccagaattgcccccctgcccccaccacccctgctgccccccctggccaccaactaccgcaccccctatgatgatgcctactacttctacggcagcaggaacacctttgaccccagcctggcctactacggcagcggcatgatgggcgtgcagcctgctgcctacgtgtctgcccctgtgacccaccagctggcccagcctgtggtgaacacagtgggccagaatgagctgaagatcaccagtgaccaggtgatcaacagcggcctcatctttgaggacaagcccaagcccagcaagcagagcctgcagagctaccaggaggccctgcagcagcagatccgggagcgggaggagaggaggaagaaggagcgggaggagaaggaggagtatgaggccaagctggaggccgagatgaggacctacaacccctggggcaagggcggcggcggggcccccctgagagatgccaagggcaacctgatcacagacctgaacaggatgcaccggcagaacattgatgcctaccacaacccagatgcccggacctatgaggacaagagagctgtggtgtccctggaccccaacctggccaccagcaatgctgagaacctggaggatgctgccaacaagagcagcggccacatgcagacccagagcagcccctttgcccggggaaatgtgtttggagagcccccaacagagctgcagatcaagcagcaggagctgtacaagaacttcctgcgcttccagatcgaggagaagaagcagcgggaggaggccgagcgggagcggctgagaattgctgaggagaaggaggagcggcggctggccgagcagagggcccgcatccagcaggagtatgaggaggagcaggagaagaagcgggagaaggaggaggagcagaggctgaagaatgaggagcacatccggctggccgaggagcggcagaaggaggccgagaggaagaagaaggaggaggaggagaagtacaacctgcagctgcagcactactgtgagcgggacaacctgattggagaggagaccaagcacatgaggcagcccagccccatcgtgcctgccctgcagaacaagatcgccagcaagctgcagaggcctcccagcgtggacagcatcatccgctccttcatccacgagagctccatgagccgggcccagagcccccctgtgcctgccaggaagaaccagctgcgggcagaggaggagaagaagaatgtcatcatggagctgtctgagatgaggaagcagctgcggtctgaggagcggcggctgcaggagcggctgctgcacatggacagtgatgatgagatccccatcaggaagaaggagaggaaccccatggacatctttgacatggcccggcaccggctgcaggcccctgtgcggcggcagagccccaagggcctggatgctgccaccttccagaatgtgcatgacttcaatgagctgaaggaccgggacagcgagaccagggtggacctgaagttcatgtacctggaccccccccgggaccaccacaccctggagatccagcagcaggccctgctgcgggagcagcagaagaggctgaaccgcatcaagatgcaggagggcgccaaggtggacctggatgccatccccagcgccaaggtgcgggagcagaggatgcccagagatgacaccagtgacttcctgaagaacagcctgctggagagtgacagcgccttcatcggggcctatggagagacctacccagccattgaagatgatgtgctgcccccacccagccagctgcccagcgcccgggagaggagaagaaacaagtggaagggcctggacatcgacagcagccggcccaacgtggccccagatggcctgagcctgaagagcatcagctctgtgaatgtggatgagctgcgggtgagaaatgaggagaggatgaggcggctgaatgagttccacaacaagcccatcaacacagatgatgagagcagcctggtggaccctgatgacatcatgaagcacatcggagatgatggcagcaacagcgtggccacagagccctggctgcggcccggcaccagcgagaccctgaagcgcttcatggccgagcagctgaaccaggagcagcagcagatccctgggaagccaggcaccttcacctggcagggcctgagcacagcccacggctag

SEQ ID NO: 147101 - DNA, 3771 bp, synthetic construct
  misc_feature 1..3771: note = Description of Artificial Sequence: Synthetic coding sequence
  source 1..3771: mol_type = other DNA
atgctgttccccctgcaggtggccgctgtgaccagctctgtgagagatgaccccctggagcactgtgtgagccccaggacccgggcccggagccctgagatctgcaagatggctgacaacctggatgagttcatcgaggagcagaaggcccggctggccgaggacaaggccgagctggagagtgaccccccctacatggagatgaagggcaagctgagcgccaagctgtctgagaacagcaagatcctgatctccatggccaaggagaacatcccccccaacagccagcagacccggggcagcctgggcatcgactatggcctgagcctgcccctgggggaggactatgaaaggaagaagcacaagctgaaggaggagctgcggcaggactaccgccgctacctgacccagaaggtgttttctggcaccagcaagaagaacttcctgagcaccagcgagacagaccccagcaccctgggcgtgtccctgcccatcggggagcggctgagcgccaaggagcggctgaagctggagaggaacaaggagtacaaccagttcctgcggggcaaggaggagagcagcgagaagttccggcaggtggagaagagcacagagcccaagagccagaggaacaagaagcccatcggccaggtgaagccagacctgaccagccagatccagaccagctgtgaaaattctgagggccccaggaaggatgtgctgacccccagcgaggcctatgaggagctgctgaaccagaggcggctggaggaggaccgctaccggcagctggatgatgaaattgagctgaggaacagacgcatcatcaagaaggccaatgaggaggtgggcatcagcaacctgaagcaccagagatttgccagcaaggccggcatcccagaccggcgcttccaccgcttcaatgaagatagagtgtttgaccggcgctaccacaggccagaccaggaccctgaggtgtctgaggagatggatgagcgcttccgctatgaaagtgactttgaccggcggctgagccgggtgtacaccaatgacaggatgcacaggaacaagaggggcaacatgccacccatggagcatgatggagatgtgattgagcagagcaacatccgcatcagcagcgctgagaacaagagcgccccagacaatgagaccagcaagagcgccaaccaggacacctgcagcccctttgctggcatgctgtttggaggagaagatcgggagctgatccagaggaggaaggagaagtaccgcctggagctgctggagcagatggccgagcagcagaggaacaagagaagagagaaggacctggagctgcgggtggccgccagcggggcccaggaccctgagaagagcccagaccggctgaagcagttctctgtggcccccaggcactttgaggagatgatccccccagagcggccccgcatcgccttccagacccccctgccccccctgagcgcccccagcgtgccccccatccccagcgtgcaccctgtgcccagccagaatgaagacctgcggagcggcctgagcagcgccctgggggagatggtgagcccccgcatcgcccccctgcccccaccacccctgctgccccccctggccaccaactaccgcaccccctatgatgatgcctactacttctacggcagcaggaacacctttgaccccagcctggcctactacggcagcggcatgatgggcgtgcagcctgctgcctacgtgtctgcccctgtgacccaccagctggcccagcctgtggtgaacacagtgggccagaatgagctgaagatcaccagtgaccaggtgatcaacagcggcctcatctttgaggacaagcccaagcccagcaagcagagcctgcagagctaccaggaggccctgcagcagcagatccgggagcgggaggagaggaggaagaaggagcgggaggagaaggaggagtatgaggccaagctggaggccgagatgaggacctacaacccctggggcaaaggaggcggcggggcccccctgagagatgccaagggcaacctgatcacagacctgaacaggatgcaccggcagaacattgatgcctaccacaacccagatgcccggacctatgaggacaagagagctgtggtgtccctggaccccaacctggccaccagcaatgctgagaacctggaggatgctgccaacaagagcagcggccacatgcagacccagagcagcccctttgcccggggaaatgtgtttggagagcccccaacagagctgcagatcaagcagcaggagctgtacaagaacttcctgcgcttccagatcgaggagaagaagcagcgggaggaggccgagcgggagcggctgagaattgctgaggagaaggaggagcggcggctggccgagcagagggcccgcatccagcaggagtatgaggaggagcaggagaagaagcgggagaaggaggaggagcagaggctgaagaatgaggagcacatccggctggccgaggagcggcagaaggaggccgagaggaagaagaaggaggaggaggagaagtacaacctgcagctgcagcactactgtgagcgggacaacctgattggagaggagaccaagcacatgaggcagcccagccccatcgtgcctgccctgcagaacaagatcgccagcaagctgcagaggcctccttctgtggacagcatcatccgctccttcatccacgagagctccatgagccgggcccagagcccccctgtgcctgccaggaagaaccagctgcgggcagaggaggagaagaagaatgtcatcatggagctgtctgagatgaggaagcagctgcggtctgaggagcggcggctgcaggagcggctgctgcacatggacagtgatgatgagatccccatcaggaagaaggagaggaaccccatggacatctttgacatggcccggcaccggctgcaggcccctgtgcggcggcagagccccaagggcctggatgctgccaccttccagaatgtgcatgacttcaatgagctgaaggaccgggacagcgagaccagggtggacctgaagttcatgtacctggaccccccccgggaccaccacaccctggagatccagcagcaggccctgctgcgggagcagcagaagaggctgaaccgcatcaagatgcaggagggcgccaaggtggacctggatgccatccccagcgccaaggtgcgggagcagaggatgcccagagatgacaccagtgacttcctgaagaacagcctgctggagagtgacagcgccttcatcggggcctacggggagacctacccagccattgaagatgatgtgctgcccccacccagccagctgcccagcgcccgggagaggagaagaaacaagtggaagggcctggacatcgacagcagccggcccaacgtggccccagatggcctgagcctgaagagcatcagctctgtgaatgtggatgagctgcgggtgagaaatgaggagaggatgaggcggctgaatgagttccacaacaagcccatcaacacagatgatgagagcagcctggtggaccctgatgacatcatgaagcacatcggagatgatggcagcaacagcgtggccacagagccctggctgcggcccggcaccagcgagaccctgaagcgcttcatggccgagcagctgaaccaggagcagcagcagatccctgggaagccaggcaccttcacctggcagggcctgagcacagcccatggatag

SEQ ID NO: 147102 - DNA, 2631 bp, synthetic construct
  misc_feature 1..2631: note = Description of Artificial Sequence: Synthetic coding sequence
  source 1..2631: mol_type = other DNA
atggatgagcgcttccgctatgaaagtgactttgaccggcggctgagccgggtgtacaccaatgacaggatgcacaggaacaagaggggcaacatgccacccatggagcatgatggagatgtgattgagcagagcaacatccgcatcagcagcgctgagaacaagagcgccccagacaatgagaccagcaagagcgccaaccaggacacctgcagcccctttgctggcatgctgtttggaggagaggaccgggagctgatccagaggaggaaggagaagtaccgcctggagctgctggagcagatggccgagcagcagaggaacaagaggcgggagaaggacctggagctgcgggtggccgccagcggggcccaggaccctgagaagagcccagaccggctgaagcagttctctgtggcccccaggcactttgaggagatgatccccccagagcggcccagaattgccttccagacccccctgccccccctgagcgcccccagcgtgccccccatccccagcgtgcaccctgtgcccagccagaatgaagacctgcggagcggcctgagcagcgccctgggggagatggtgagccccagaattgcccccctgcccccaccacccctgctgccccccctggccaccaactaccgcaccccctatgatgatgcctactacttctacggcagcaggaacacctttgaccccagcctggcctactacggcagcggcatgatgggcgtgcagcctgctgcctacgtgtctgcccctgtgacccaccagctggcccagcctgtggtgaacacagtgggccagaatgagctgaagatcaccagtgaccaggtgatcaacagcggcctcatctttgaggacaagcccaagcccagcaagcagagcctgcagagctaccaggaggccctgcagcagcagatccgggagcgggaggagaggaggaagaaggagcgggaggagaaggaggagtatgaggccaagctggaggccgagatgaggacctacaacccctggggcaagggcggcggcggggcccccctgagagatgccaagggcaacctgatcagccacatgcagacccagagcagcccctttgcccggggaaatgtgtttggagagcccccaacagagctgcagatcaagcagcaggagctgtacaagaacttcctgcgcttccagatcgaggagaagaagcagcgggaggaggccgagcgggagcggctgagaattgctgaggagaaggaggagcggcggctggccgagcagagggcccgcatccagcaggagtatgaggaggagcaggagaagaagcgggagaaggaggaggagcagaggctgaagaatgaggagcacatccggctggccgaggagcggcagaaggaggccgagaggaagaagaaggaggaggaggagaagtacaacctgcagctgcagcactactgtgagcgggacaacctgattggagaggagaccaagcacatgaggcagcccagccccatcgtgcctgccctgcagaacaagatcgccagcaagctgcagaggcctccttctgtggacagcatcatccgctccttcatccacgagagctccatgagccgggcccagagcccccctgtgcctgccaggaagaaccagctgcgggcagaggaggagaagaagaatgtcatcatggagctgtctgagatgaggaagcagctgcggtctgaggagcggcggctgcaggagcggctgctgcacatggacagtgatgatgagatccccatcaggaagaaggagaggaaccccatggacatctttgacatggcccggcaccggctgcaggcccctgtgcggcggcagagccccaagggcctggatgctgccaccttccagaatgtgcatgacttcaatgagctgaaggaccgggacagcgagaccagggtggacctgaagttcatgtacctggaccccccccgggaccaccacaccctggagatccagcagcaggccctgctgcgggagcagcagaagaggctgaaccgcatcaagatgcaggagggcgccaaggtggacctggatgccatccccagcgccaaggtgcgggagcagaggatgcccagagatgacaccagtgacttcctgaagaacagcctgctggagagtgacagcgccttcatcggggcctacggggagacctacccagccattgaagatgatgtgctgcccccacccagccagctgcccagcgcccgggagaggagaagaaacaagtggaagggcctggacatcgacagcagccggcccaacgtggccccagatggcctgagcctgaagagcatcagctctgtgaatgtggatgagctgcgggtgagaaatgaggagaggatgaggcggctgaatgagttccacaacaagcccatcaacacagatgatgagagcagcctggtggaccctgatgacatcatgaagcacatcggagatgatggcagcaacagcgtggccacagagccctggctgcggcccggcaccagcgagaccctgaagcgcttcatggccgagcagctgaaccaggagcagcagcagatccctgggaagccaggcaccttcacctggcagggcctgagcacagcccatggatag

SEQ ID NO: 147103 - DNA, 2631 bp, synthetic construct; identical to SEQ ID NO: 147102
  misc_feature 1..2631: note = Description of Artificial Sequence: Synthetic coding sequence
  source 1..2631: mol_type = other DNA

SEQ ID NO: 147104 - DNA, 1677 bp, synthetic construct
  misc_feature 1..1677: note = Description of Artificial Sequence: Synthetic coding sequence
  source 1..1677: mol_type = other DNA
atgccctggaggagaagaagaaacagagtgtctgccctggagggcggccgggaggaggaggcccctcctgaggccgctgctgtgcccccagccctgctgaccagcccccagcagacagaagctgctgctgagcgcatcctgctgcggggcatctttgagatcggccgggacagctgtgatgtggtgctgtctgagcgggccctgcgctggaggcccatccagcctgagaggcctgctggggacagcaaatatgacctgctgtgcaaggaggagttcatcgagctgaaggacatcttctctgtgaagctgaagaggcgctgcagcgtgaagcagcagaggagcggcaccctgctgggcatcaccctcttcatctgcctgaagaaggagcagaacaagctgaagaacagcaccctggacctgatcaacctgtctgaggaccactgtgacatctggttccggcagttcaagaagatcctggccggcttccccaaccggcccaagagcctgaagatcctgctgaacccccagagccacaagaaggaggccacccaggtgtactatgagaaggtggagcccctgctgaagctggccggcatcaagacagatgtgaccatcatggagtatgagggccacgccctgagcctgctgaaggaatgtgagctgcagggctttgatggcggccacaggaagcccctgtttgccatccactggagcgtgcagaggctcttcaccggcatgcagaccctggagcccagcgtggtgtgtgtgggcggagatggcagcgccagcgaggtggcccacgccctgctgctgcgggcccagaagaatgccggcatggagacagaccgcatcctgacccctgtgcgggcccagctgcccctgggcctcatcccagctggcagcaccaacgtgctggcccacagcctgcacggcgtgccccacgtgatcacagccaccctgcacatcatcatgggccacgtgcagctggtggatgtgtgcaccttcagcacagctgggaagctgctgcgcttcggcttcagcgccatgtttggatttggaggccgcaccctggccctggccgagaagtaccgctggatgagccccaaccagaggcgggactttgctgtggtgaaggccctggccaagctgaaggccgaggactgtgagatctccttcctgcccttcaacagcagtgatgatgtgcaggagcggcgggcccagggcagccccaagagtgactgcaatgaccagtggcagatgatccagggccagttcctgaatgtgtccatcatggccatcccctgcctgtgcagcgtggccccccggggcctggcccccaacacccggctgaacaacggctccatggccctgatcatcgccaggaacaccagcaggcctgagttcatcaagcacctgaagagatatgcctctgtgaagaaccagttcaacttcccctttgtggagacctacacagtggaggaggtgaaggtgcaccccaggaacaacacaggaggctacaaccctgaggaggaggaggatgaaacagccagcgagaactgcttcccctggaatgtggatggagacctgatggaggtggccagcgaggtgcacatccggctgcaccccaggctcatcagcctgtatggaggctccatggaggagatgatccccaagtag

SEQ ID NO: 147105 - DNA, 1260 bp, synthetic construct
  misc_feature 1..1260: note = Description of Artificial Sequence: Synthetic coding sequence
  source 1..1260: mol_type = other DNA
atgccctggaggagaagaagaaacagagtgtctgccctggagggcggccgggaggaggaggcccctcctgaggccgctgctgtgcccccagccctgctgaccagcccccagcagacagaagctgctgctgagcgcatcctgctgcggggcatctttgagatcggccgggacagctgtgatgtggtgctgtctgagcgggccctgcgctggaggcccatccagcctgagaggcctgctggggacagcaaatatgacctgctgtgcaaggaggagttcatcgagctgaaggacatcttctctgtgaagctgaagaggcgctgcagcgtgaagcagcagaggagcggcaccctgctgggcatcaccctcttcatctgcctgaagaaggagcagaacaagctgaagaacagcaccctggacctgatcaacctgtctgaggaccactgtgacatctggttccggcagttcaagaagatcctggccggcagcaccaacgtgctggcccacagcctgcatggagtgccccacgtgatcacagccaccctgcacatcatcatgggccacgtgcagctggtggatgtgtgcaccttcagcacagctgggaagctgctgcgcttcggcttcagcgccatgtttggatttggaggccgcaccctggccctggccgagaagtaccgctggatgagccccaaccagaggcgggactttgctgtggtgaaggccctggccaagctgaaggccgaggactgtgagatctccttcctgcccttcaacagcagtgatgatgtgcaggagcggcgggcccagggcagccccaagagtgactgcaatgaccagtggcagatgatccagggccagttcctgaatgtgtccatcatggccatcccctgcctgtgcagcgtggccccccggggcctggcccccaacacccggctgaacaacggctccatggccctgatcatcgccaggaacaccagcaggcctgagttcatcaagcacctgaagagatatgcctctgtgaagaaccagttcaacttcccctttgtggagacctacacagtggaggaggtgaaggtgcaccccaggaacaacacaggaggctacaaccctgaggaggaggaggatgaaacagccagcgagaactgcttcccctggaatgtggatggagacctgatggaggtggccagcgaggtgcacatccggctgcaccccaggctcatcagcctgtatggaggctccatggaggagatgatccccaagtag

SEQ ID NO: 147106 - DNA, 1392 bp, synthetic construct
  misc_feature 1..1392: note = Description of Artificial Sequence: Synthetic coding sequence
  source 1..1392: mol_type = other DNA
atgccctggaggagaagaagaaacagagtgtctgccctggagggcggccgggaggaggaggcccctcctgaggccgctgctgtgcccccagccctgctgaccagcccccagcagacagaagctgctgctgagcgcatcctgctgcggggcatctttgagatcggccgggacagctgtgatgtggtgctgtctgagcgggccctgcgctggaggcccatccagcctgagaggcctgctggggacagcaaatatgacctgctgtgcaaggaggagttcatcgagctgaaggacatcttctctgtgaagctgaagaggcgctgcagcgtgaagcagcagaggagcggcaccctgctgggcatcaccctcttcatctgcctgaagaaggagcagaacaagctgaagaacagcaccctggacctgatcaacctgtctgaggaccactgtgacatctggttccggcagttcaagaagatcctggccggcttccccaaccggcccaagagcctgaagatcctgctgaacccccagagccacaagaaggaggccacccaggtgtactatgagaaggtggagcccctgctgaagctggccggcatcaagacagatgtgaccaggagcaccaacgtgctggcccacagcctgcatggagtgccccacgtgatcacagccaccctgcacatcatcatgggccacgtgcagctggtggatgtgtgcaccttcagcacagctgggaagctgctgcgcttcggcttcagcgccatgtttggatttggaggccgcaccctggccctggccgagaagtaccgctggatgagccccaaccagaggcgggactttgctgtggtgaaggccctggccaagctgaaggccgaggactgtgagatctccttcctgcccttcaacagcagtgatgatgtgcaggagcggcgggcccagggcagccccaagagtgactgcaatgaccagtggcagatgatccagggccagttcctgaatgtgtccatcatggccatcccctgcctgtgcagcgtggccccccggggcctggcccccaacacccggctgaacaacggctccatggccctgatcatcgccaggaacaccagcaggcctgagttcatcaagcacctgaagagatatgcctctgtgaagaaccagttcaacttcccctttgtggagacctacacagtggaggaggtgaaggtgcaccccaggaacaacacaggaggctacaaccctgaggaggaggaggatgaaacagccagcgagaactgcttcccctggaatgtggatggagacctgatggaggtggccagcgaggtgcacatccggctgcaccccaggctcatcagcctgtatggaggctccatggaggagatgatccccaagtag

SEQ ID NO: 147107 - DNA, 1599 bp, synthetic construct
  misc_feature 1..1599: note = Description of Artificial Sequence: Synthetic coding sequence
  source 1..1599: mol_type = other DNA
atgccctggaggagaagaagaaacagagtgtctgccctggagggcggccgggaggaggaggcccctcctgaggccgctgctgtgcccccagccctgctgaccagcccccagcagacagaagctgctgctgagcgcatcctgctgcggggcatctttgagatcggccgggacagctgtgatgtggtgctgtctgagcgggccctgcgctggaggcccatccagcctgagaggcctgctggggacagcaaatatgacctgctgtgcaaggaggagttcatcgagctgaaggacatcttctctgtgaagctgaagaggcgctgcagcgtgaagcagcagaggagcggcaccctgctgggcatcaccctcttcatctgcctgaagaaggagcagaacaagctgaagaacagcaccctggacctgatcaacctgtctgaggaccactgtgacatctggttccggcagttcaagaagatcctggccggcttccccaaccggcccaagagcctgaagatcctgctgaacccccagagccacaagaaggaggccacccaggtgtactatgagaaggtggagcccctgctgaagctggccggcatcaagacagatgtgaccatcatggagtatgagggccacgccctgagcctgctgaaggaatgtgagctgcagggctttgatggagtggtgtgtgtgggcggagatggcagcgccagcgaggtggcccacgccctgctgctgcgggcccagaagaatgccggcatggagacagaccgcatcctgacccctgtgcgggcccagctgcccctgggcctcatcccagctggcagcaccaacgtgctggcccacagcctgcacggcgtgccccacgtgatcacagccaccctgcacatcatcatgggccacgtgcagctggtggatgtgtgcaccttcagcacagctgggaagctgctgcgcttcggcttcagcgccatgtttggatttggaggccgcaccctggccctggccgagaagtaccgctggatgagccccaaccagaggcgggactttgctgtggtgaaggccctggccaagctgaaggccgaggactgtgagatctccttcctgcccttcaacagcagtgatgatgtgcaggagcggcgggcccagggcagccccaagagtgactgcaatgaccagtggcagatgatccagggccagttcctgaatgtgtccatcatggccatcccctgcctgtgcagcgtggccccccggggcctggcccccaacacccggctgaacaacggctccatggccctgatcatcgccaggaacaccagcaggcctgagttcatcaagcacctgaagagatatgcctctgtgaagaaccagttcaacttcccctttgtggagacctacacagtggaggaggtgaaggtgcaccccaggaacaacacaggaggctacaaccctgaggaggaggaggatgaaacagccagcgagaactgcttcccctggaatgtggatggagacctgatggaggtggccagcgaggtgcacatccggctgcaccccaggctcatcagcctgtatggaggctccatggaggagatgatccccaagtag

SEQ ID NO: 147108 - DNA, 1545 bp, synthetic construct
  misc_feature 1..1545: note = Description of Artificial Sequence: Synthetic coding sequence
  source 1..1545: mol_type = other DNA
atgccctggaggagaagaagaaacagagtgtctgccctggagggcggccgggaggaggaggcccctcctgaggccgctgctgtgcccccagccctgctgaccagcccccagcagacagaagctgctgctgagcgcatcctgctgcggggcatctttgagatcggccgggacagctgtgatgtggtgctgtctgagcgggccctgcgctggaggcccatccagcctgagaggcctgctggggacagcaaatatgacctgctgtgcaaggaggagttcatcgagctgaaggacatcttctctgtgaagctgaagaggcgctgcagcgtgaagcagcagaggagcggcaccctgctgggcatcaccctcttcatctgcctgaagaaggagcagaacaagctgaagaacagcaccctggacctgatcaacctgtctgaggaccactgtgacatctggttccggcagttcaagaagatcctggccgtgatggagtatgagggccacgccctgagcctgctgaaggaatgtgagctgcagggctttgatggcggccacaggaagcccctgtttgccatccactggagcgtgcagaggctcttcaccggcatgcagaccctggagcccagcgtggtgtgtgtgggcggagatggcagcgccagcgaggtggcccacgccctgctgctgcgggcccagaagaatgccggcatggagacagaccgcatcctgacccctgtgcgggcccagctgcccctgggcctcatcccagctggcagcaccaacgtgctggcccacagcctgcacggcgtgccccacgtgatcacagccaccctgcacatcatcatgggccacgtgcagctggtggatgtgtgcaccttcagcacagctgggaagctgctgcgcttcggcttcagcgccatgtttggatttggaggccgcaccctggccctggccgagaagtaccgctggatgagccccaaccagaggcgggactttgctgtggtgaaggccctggccaagctgaaggccgaggactgtgagatctccttcctgcccttcaacagcagtgatgatgtgcaggagcggcgggcccagggcagccccaagagtgactgcaatgaccagtggcagatgatccagggccagttcctgaatgtgtccatcatggccatcccctgcctgtgcagcgtggccccccggggcctggcccccaacacccggctgaacaacggctccatggccctgatcatcgccaggaacaccagcaggcctgagttcatcaagcacctgaagagatatgcctctgtgaagaaccagttcaacttcccctttgtggagacctacacagtggaggaggtgaaggtgcaccccaggaacaacacaggaggctacaaccctgaggaggaggaggatgaaacagccagcgagaactgcttcccctggaatgtggatggagacctgatggaggtggccagcgaggtgcacatccggctgcaccccaggctcatcagcctgtatggaggctccatggaggagatgatccccaagtag

SEQ ID NO: 147109 - DNA, 804 bp, synthetic construct
  misc_feature 1..804: note = Description of Artificial Sequence: Synthetic coding sequence
  source 1..804: mol_type = other DNA
atgcacctgctgctcttccagctgctggtgctgctgcccctgggcaagaccaccaggcaccaggacggccggcagaaccagagcagcctgagccctgtgctgctgcccaggaaccagcgggagctgcccaccggcaaccacgaggaggccgaggagaagccagacctgtttgtggccgtgccccacctggtggccaccagccctgctggggagggccagaggcagcgggagaagatgctgagcagatttggccgcttctggaagaagccagagcgggagatgcaccccagccgggacagcgacagcgagcccttccccccaggcacccagagcctcatccagcccattgatggcatgaagatggagaagagccccctgcgggaggaggccaagaagttctggcaccacttcatgttcaggaagaccccagccagccagggcgtcatcctgcccatcaagagccatgaggtgcactgggagacctgcaggacagtgcccttcagccagaccatcacccatgagggctgtgagaaggtggtggtgcagaacaacctgtgctttggaaaatgtggctctgtgcacttccctggggccgcccagcacagccacaccagctgcagccactgcctgcctgccaagttcaccaccatgcacctgcccctgaactgcacagagctgagcagcgtcatcaaggtggtgatgctggtggaggagtgccagtgcaaggtgaagacagaacatgaagatggccacatcctgcatgctggcagccaggacagcttcatccctggggtgtctgcctag

SEQ ID NO: 147110 - DNA, 789 bp, synthetic construct
  misc_feature 1..789: note = Description of Artificial Sequence: Synthetic coding sequence
  source 1..789: mol_type = other DNA
atggcctggctggaggatgtggacttcctggaggatgtgcccctgctggaggacatccccctgctggaggatgtgcccctgctggaggatgtgcccctgctggaggacaccagccggctggaggacatcaacctgatggaggacatggccctgctggaggatgtggacctgctggaggacacagacttcctggaggacctggacttcagcgaggccatggacctgcgggaggacaaggacttcctggaggacatggacagcctggaggacatggccctgctggaggatgtggacctgctggaggacacagacttcctggaggaccctgacttcctggaggccatcgacctgcgggaggacaaggacttcctggaggacatggacagcctggaggacctggaggccatcggccgctgtggcttcagcggcagacatggcttcttcggcagaagacgcttcagcggccggcccaagctgagcggccgcctgggcctgctgggccggcggggcttcagcggccgcctgggcggctactggaagacctggatcttctggaagacctggatcttctggaagacctggatcttcaggaagacctacatcggctggaagacctggatcttcagcggccgctgtggcctgaccggccggcccggctttggaggaagaagacgcttcttctggaagaccctgacagactggaagacctggatctccttctggaagaccctgattgactggaagacctggatctccttctggaagaccctgattgactggaagatctag

SEQ ID NO: 147111 - DNA, 1365 bp, synthetic construct
  misc_feature 1..1365: note = Description of Artificial Sequence: Synthetic coding sequence
  source 1..1365: mol_type = other DNA
atgctggccgagaacctggtggaggagtttgagatgaaggaggatgagccctggtatgaccaccaggacctgcagcaggacctgcagctggccgctgagctgggcaagaccctgctggacaggaacacagagctggaggacagcgtgcagcagatgtacaccaccaaccaggagcagctgcaggagattgagtacctgaccaagcaggtggagctgctgcggcagatgaatgagcagcacgccaaggtgtatgagcagctggatgtgacagcccgggagctggaggagaccaaccagaagctggtggccgacagcaaggccagccagcagaagatcctgagcctgacagagaccatcgagtgcctgcagaccaacatcgaccacctgcagagccaggtggaggagctgaagagcagcggccagggcagaagaagccctggaaaatgtgaccaggagaagccagcccccagctttgcctgcctgaaggagctgtatgacctgcggcagcactttgtgtatgaccacgtgtttgctgagaagatcaccagcctgcagggccagcccagcccagatgaggaggagaatgagcacctgaagaagacagtgaccatgctgcaggcccagctgagcctggagcggcagaagagggtgaccatggaggaggagtatggcctggtgctgaaggaaaattctgagctggagcagcagctgggcgccaccggggcctaccgggcccgggccctggagctggaggccgaggtggccgagatgaggcagatgctgcagagcgagcacccctttgtgaatggagtggagaagctggtgcctgacagcctgtatgtgcccttcaaggagcccagccagagcctgctggaggagatgttcctgactgtgcctgagagccacaggaagcccctgaagaggagcagcagcgagaccatcctgagcagcctggccggcagtgacatcgtgaagggccacgaggagacctgcatcagaagagccaaggctgtgaagcagaggggcatcagcctgctgcacgaggtggacacccagtacagcgccctgaaggtgaagtatgaggagctgctgaagaagtgccaggaggagcaggacagcctgagccacaaggctgtgcagaccagcagagctgctgccaaggacctgactggagtgaatgcccagagcgagcctgtggccagcggctgggagctggcctctgtgaaccctgagcctgtgagcagccccaccaccccacctgagtacaaggccctcttcaaggagatcttcagctgcatcaagaagaccaagcaggagattgatgagcagaggaccaagtaccgcagcctgagcagccacagctag

SEQ ID NO: 147112 - DNA, 618 bp, synthetic construct
  misc_feature 1..618: note = Description of Artificial Sequence: Synthetic coding sequence
  source 1..618: mol_type = other DNA
atgctgggcgccaagccccactggctgcccggccccctgcacagccctggcctgcccctggtgctggtgctgctggccctgggcgccggctgggcccaggagggcagcgagcctgtgctgctggagggggagtgcctggtggtgtgtgagcccggccgggctgctgctgggggccctggaggagctgccctgggggaggcccctcctggccgggtggcctttgctgctgtgcgcagccaccaccacgagcctgctggggagactggaaatggcaccagcggggccatctactttgaccaggtgctggtgaatgaaggaggcggctttgaccgggccagcggcagctttgtggcccctgtgcggggcgtgtacagcttccgcttccacgtggtgaaggtgtacaaccggcagacagtgcaggtgtccctgatgctgaacacctggcctgtgatcagcgcctttgccaatgaccctgatgtgacccgggaggccgccaccagctctgtgctgctgcccctggaccccggggacagagtgtccctgcggctgcggcggggcaacctgctgggcggctggaagtacagcagcttcagcggcttcctgatcttccccctgtag

SEQ ID NO: 147113 - DNA, 990 bp, synthetic construct
  misc_feature 1..990: note = Description of Artificial Sequence: Synthetic coding sequence
  source 1..990: mol_type = other DNA
atgatcctgatgaagatgggcttctctggaattgtggtgcaccaggagagcgtgtgtgccacctacggcagcggcctgagcagcacctgcatcgtggatgtgggggaccagaagacctctgtgtgctgcgtggaggatggagtgagccacaggaacacccgcatcttctcctggaaccaggacatcagcggcctgcaggaccacgagttccagatccgccacccagacagccctgccctgctgtaccagttccggctgggagatgagaagctgcaggcccccatggccctcttctacccagccacctttggaattgtgggccagaagatgaccaccctgcagcacaggagccagggcgaccctgaggacccccatgatgagcactacctgctggccacccagagcaagcaggagcagagcgccaaggccacagctgacaggaagagcgccagcaagcccatcggctttgaaggagacctgcggggccagagcagtgacctgcctgagcggctgcacagccaggaggtggacctgggcagcgcccagggagatggcctgatggctggaaatgacagcgaggaggccctgacagccctgatgagcaggaagacagccatcagcctgtttgagggcaaggccctgggcctggacaaggccatcctgcacagcattgactgctgcagcagtgatgacaccaagaagaagatgtacagcagcatcctggtggtgggcggcggcctgatgttccacaaggcccaggagttcctgcagcaccgcatcctgaacaagatgcctccttccttccgccgcatcattgaaaatgtggatgtgatcacccggcccaaggacatggacccccggctgattgcctggaagggcggcgctgtgctggcctgcctggacaccacccaggagctgtggatctaccagcgggagtggcagcgcttcggcgtgaggatgctgcgggagagagctgcctttgtgtggtag

SEQ ID NO: 147114 - DNA, 1131 bp, synthetic construct
  misc_feature 1..1131: note = Description of Artificial Sequence: Synthetic coding sequence
  source 1..1131: mol_type = other DNA
atggaggagttccacggccgcaccctgcatgatgatgacagctgccaggtgattcctgtgctgccccaggtgatgatgatcctgatccctggccagaccctgcccctgcagctgttccacccccaggaggtgtccatggtgaggaacctgatccagaaggacaggacctttgctgtgctggcctacagcaatgtgcaggagcgggaggcccagtttggcaccacagctgagatctatgcctaccgggaggagcaggactttggaattgaaattgtgaaggtgaaggccatcggccggcagcgcttcaaggtgctggagctgcggacccagagtgatggcatccagcaggccaaggtgcagatcctgcctgaatgtgtgctgcccagcaccatgtctgctgtgcagctggagagcctgaacaagtgccagatcttccccagcaagcctgtgtcccgggaggaccagtgcagctacaagtggtggcagaagtaccagaagaggaagttccactgtgccaacctgacctcctggccccgctggctgtacagcctgtatgatgctgagaccctgatggaccgcatcaagaagcagctgcgggagtgggatgagaacctgaaggatgacagcctgcccagcaacttctcctacagagtggccgcctgcctgcccattgatgatgtgctgcgcatccagctgctgaagattggcagcgccatccagaggctgcgctgtgagctggacatcatgaacaagtgcaccagcctgtgctgcaagcagtgccaggagacagagatcaccaccaagaatgagatcttcagcctgagcctgtgtggccccatggccgcctacgtgaacccccacggctacgtgcatgagaccctgactgtgtacaaggcctgcaacctgaacctgattggccggcccagcacagagcacagctggttccctggctacgcctggacagtggcccagtgcaagatctgtgccagccacatcggctggaagttcaccgccaccaagaaggacatgagcccccagaagttctggggcctgaccaggtctgccctgctgcccaccatcccagacacagaagatgagatcagcccagacaaggtgatcctgtgcctgtag

SEQ ID NO: 147115 - DNA, 1326 bp, synthetic construct
  misc_feature 1..1326: note = Description of Artificial Sequence: Synthetic coding sequence
  source 1..1326: mol_type = other DNA
atggccggggagggggaccagcaggatgctgcccacaacatgggcaaccacctgcccctgctgcctgagagcgaggaggaggatgagatggaggtggaggaccaggacagcaaggaggccaagaagcccaacatcatcaactttgacaccagcctgcccaccagccacacctacctgggcgctgacatggaggagttccacggccgcaccctgcatgatgatgacagctgccaggtgattcctgtgctgccccaggtgatgatgatcctgatccctggccagaccctgcccctgcagctgttccacccccaggaggtgtccatggtgaggaacctgatccagaaggacaggacctttgctgtgctggcctacagcaatgtgcaggagcgggaggcccagtttggcaccacagctgagatctatgcctaccgggaggagcaggactttggaattgaaattgtgaaggtgaaggccatcggccggcagcgcttcaaggtgctggagctgcggacccagagtgatggcatccagcaggccaaggtgcagatcctgcctgaatgtgtgctgcccagcaccatgtctgctgtgcagctggagagcctgaacaagtgccagatcttccccagcaagcctgtgtcccgggaggaccagtgcagctacaagtggtggcagaagtaccagaagaggaagttccactgtgccaacctgacctcctggccccgctggctgtacagcctgtatgatgctgagaccctgatggaccgcatcaagaagcagctgcgggagtgggatgagaacctgaaggatgacagcctgcccagcaaccccatcgacttctcctacagagtggccgcctgcctgcccattgatgatgtgctgcgcatccagctgctgaagattggcagcgccatccagaggctgcgctgtgagctggacatcatgaacaagtgcaccagcctgtgctgcaagcagtgccaggagacagagatcaccaccaagaatgagatcttcagcctgagcctgtgtggccccatggccgcctacgtgaacccccacggctacgtgcatgagaccctgactgtgtacaaggcctgcaacctgaacctgattggccggcccagcacagagcacagctggttccctggctacgcctggacagtggcccagtgcaagatctgtgccagccacatcggctggaagttcaccgccaccaagaaggacatgagcccccagaagttctggggcctgaccaggtctgccctgctgcccaccatcccagacacagaagatgagatcagcccagacaaggtgatcctgtgcctgtag

SEQ ID NO: 147116 - DNA, 1335 bp, synthetic construct
  misc_feature 1..1335: note = Description of Artificial Sequence: Synthetic coding sequence
  source 1..1335: mol_type = other DNA
atggaggaggagggcaagaagggcaagaagccaggcatcgtgagccccttcaagagggtcttcctgaagggggagaagagccgggacaagaaggcccacgagaaggtgacagaaagaagacccctgcacacagtggtgctgagcctgcctgagcgggtggagccagaccggctgctgagtgactacatcgagaaggaggtgaagtacctgggccagctgaccagcatccctggctacctgaaccccagcagcaggacagagatcctgcacttcatcgacaatgccaagagggcccaccagctgcccggccacctgacccaggagcatgatgctgtgctgagcctgagcgcctacaacgtgaagctggcctggagagatggagaggacatcatcctgcgggtgcccatccatgacattgctgctgtgtcctatgtgagagatgatgctgcccacctggtggtgctgaagacagcccaggaccccggcatcagccccagccagagcctgtgtgccgagagcagccggggcctgtctgctggcagcctgtctgagagcgctgtgggccctgtggaggcctgctgcctggtgatcctggccgctgagagcaaggtggccgctgaggagctgtgctgcctgctgggccaggtgttccaggtggtgtacacagagagcaccatcgacttcctggaccgggccatctttgatggagccagcacccccacccaccacctgagcctgcacagtgatgacagcagcaccaaggtggacatcaaggagacctatgaggtggaggccagcaccttctgcttccctgagagcgtggatgtgggcggggccagcccccacagcaagaccatcagcgagagcgagctgagcgccagcgccacagagctgctgcaggactacatgctgaccctgcggaccaagctgagcagccaggagatccagcagtttgctgccctgctgcacgagtacagaaatggagccagcatccacgagttctgcatcaacctgcggcagctgtatggagacagcaggaagttcctgctgctgggcctgcggcccttcatccctgagaaggacagccagcactttgagaacttcctggagaccatcggcgtgaaggatggccggggcatcatcacagacagctttggccgccacagaagagccctgagcaccaccagcagcagcaccaccaatggaaacagagccaccggcagcagtgatgacagaagtgcccccagtgaaggagatgagtgggacaggatgatcagtgacatcagcagtgacatcgaggccctgggctgcagcatggaccaggacagcgcctag

SEQ ID NO: 147117 - DNA, 1398 bp, synthetic construct
  misc_feature 1..1398: note = Description of Artificial Sequence: Synthetic coding sequence
  source 1..1398: mol_type = other DNA
atgcacagcagctgccggcagaggaggaaccagaacctgagcaaggagatcccccagacagagttccacacaggctacagcatggagaatgagcccggcatcgtgagccccttcaagagggtcttcctgaagggggagaagagccgggacaagaaggcccacgagaaggtgacagagcggcggcccctgcacacagtggtgctgagcctgcctgagcgggtggagccagaccggctgctgagtgactacatcgagaaggaggtgaagtacctgggccagctgaccagcatccctggctacctgaaccccagcagcaggacagagatcctgcacttcatcgacaatgccaagagggcccaccagctgcccggccacctgacccaggagcatgatgctgtgctgagcctgagcgcctacaacgtgaagctggcctggagagatggagaggacatcatcctgcgggtgcccatccatgacattgctgctgtgtcctatgtgagagatgatgctgcccacctggtggtgctgaagacagcccaggaccccggcatcagccccagccagagcctgtgtgccgagagcagccggggcctgtctgctggcagcctgtctgagagcgctgtgggccctgtggaggcctgctgcctggtgatcctggccgctgagagcaaggtggccgctgaggagctgtgctgcctgctgggccaggtgttccaggtggtgtacacagagagcaccatcgacttcctggaccgggccatctttgatggagccagcacccccacccaccacctgagcctgcacagtgatgacagcagcaccaaggtggacatcaaggagacctatgaggtggaggccagcaccttctgcttccctgagagcgtggatgtgggcggggccagcccccacagcaagaccatcagcgagagcgagctgagcgccagcgccacagagctgctgcaggactacatgctgaccctgcggaccaagctgagcagccaggagatccagcagtttgctgccctgctgcacgagtacagaaatggagccagcatccacgagttctgcatcaacctgcggcagctgtatggagacagcaggaagttcctgctgctgggcctgcggcccttcatccctgagaaggacagccagcactttgagaacttcctggagaccatcggcgtgaaggatggccggggcatcatcacagacagctttggccgccaccggcgggccctgagcaccaccagcagcagcaccaccaacggcaacagagccaccggcagcagtgatgacagaagtgcccccagtgaaggagatgagtgggacaggatgatcagtgacatcagcagtgacatcgaggccctgggctgcagcatggaccaggacagcgcctag

SEQ ID NO: 147118 - DNA, 1317 bp, synthetic construct
  misc_feature 1..1317: note = Description of Artificial Sequence: Synthetic coding sequence
  source 1..1317: mol_type = other DNA
atggagaatgaacctggcatcgtgagccccttcaagagggtcttcctgaagggggagaagagccgggacaagaaggcccacgagaaggtgacagaaagaagacccctgcacacagtggtgctgagcctgcctgagcgggtggagccagaccggctgctgagtgactacatcgagaaggaggtgaagtacctgggccagctgaccagcatccctggctacctgaaccccagcagcaggacagagatcctgcacttcatcgacaatgccaagagggcccaccagctgcccggccacctgacccaggagcatgatgctgtgctgagcctgagcgcctacaacgtgaagctggcctggagagatggagaggacatcatcctgcgggtgcccatccatgacattgctgctgtgtcctatgtgagagatgatgctgcccacctggtggtgctgaagacagcccaggaccccggcatcagccccagccagagcctgtgtgccgagagcagccggggcctgtctgctggcagcctgtctgagagcgctgtgggccctgtggaggcctgctgcctggtgatcctggccgctgagagcaaggtggccgctgaggagctgtgctgcctgctgggccaggtgttccaggtggtgtacacagagagcaccatcgacttcctggaccgggccatctttgatggagccagcacccccacccaccacctgagcctgcacagtgatgacagcagcaccaaggtggacatcaaggagacctatgaggtggaggccagcaccttctgcttccctgagagcgtggatgtgggcggggccagcccccacagcaagaccatcagcgagagcgagctgagcgccagcgccacagagctgctgcaggactacatgctgaccctgcggaccaagctgagcagccaggagatccagcagtttgctgccctgctgcacgagtacagaaatggagccagcatccacgagttctgcatcaacctgcggcagctgtatggagacagcaggaagttcctgctgctgggcctgcggcccttcatccctgagaaggacagccagcactttgagaacttcctggagaccatcggcgtgaaggatggccggggcatcatcacagacagctttggccgccacagaagagccctgagcaccaccagcagcagcaccaccaatggaaacagagccaccggcagcagtgatgacagaagtgcccccagtgaaggagatgagtgggacaggatgatcagtgacatcagcagtgacatcgaggccctgggctgcagcatggaccaggacagcgcctag

SEQ ID NO: 147119 - DNA, 1161 bp, synthetic construct
  misc_feature 1..1161: note = Description of Artificial Sequence: Synthetic coding sequence
  source 1..1161: mol_type = other DNA
atggaggaggagggcaagaagggcaagaagtacctgggccagctgaccagcatccctggctacctgaaccccagcagcaggacagagatcctgcacttcatcgacaatgccaagagggcccaccagctgcccggccacctgacccaggagcatgatgctgtgctgagcctgagcgcctacaacgtgaagctggcctggagagatggagaggacatcatcctgcgggtgcccatccatgacattgctgctgtgtcctatgtgagagatgatgctgcccacctggtggtgctgaagacagcccaggaccccggcatcagccccagccagagcctgtgtgccgagagcagccggggcctgtctgctggcagcctgtctgagagcgctgtgggccctgtggaggcctgctgcctggtgatcctggccgctgagagcaaggtggccgctgaggagctgtgctgcctgctgggccaggtgttccaggtggtgtacacagagagcaccatcgacttcctggaccgggccatctttgatggagccagcacccccacccaccacctgagcctgcacagtgatgacagcagcaccaaggtggacatcaaggagacctatgaggtggaggccagcaccttctgcttccctgagagcgtggatgtgggcggggccagcccccacagcaagaccatcagcgagagcgagctgagcgccagcgccacagagctgctgcaggactacatgctgaccctgcggaccaagctgagcagccaggagatccagcagtttgctgccctgctgcacgagtacagaaatggagccagcatccacgagttctgcatcaacctgcggcagctgtatggagacagcaggaagttcctgctgctgggcctgcggcccttcatccctgagaaggacagccagcactttgagaacttcctggagaccatcggcgtgaaggatggccggggcatcatcacagacagctttggccgccacagaagagccctgagcaccaccagcagcagcaccaccaatggaaacagagccaccggcagcagtgatgacagaagtgcccccagtgaaggagatgagtgggacaggatgatcagtgacatcagcagtgacatcgaggccctgggctgcagcatggaccaggacagcgcctag

SEQ ID NO: 147120 - DNA, 216 bp, synthetic construct
  misc_feature 1..216: note = Description of Artificial Sequence: Synthetic coding sequence
  source 1..216: mol_type = other DNA
atggaggaggagggcaagaagggcaagaagccaggcatcgtgagccccttcaagagggtcttcctgaagggggagaagagccgggacaagaaggcccacgagaaggtgacagaaagaagacccctgcacacagtggtgctgagcctgcctgagcgggtggagccagaccggctgctgagtgactacatcgagaaggaggtgaagggcagccactag

SEQ ID NO: 147121 - DNA, 1062 bp, synthetic construct
  misc_feature 1..1062: note = Description of Artificial Sequence: Synthetic coding sequence
  source 1..1062: mol_type = other DNA
atggaggaggagggcaagaagggcaagaagccaggcatcgtgagccccttcaagagggtcttcctgaagggggagaagagccgggacaagaaggcccacgagaaggtgacagaaagaagacccctgcacacagtggtgctgagcctgcctgagcgggtggagccagaccggctgctgagtgactacatcgagaaggaggtgaagtacctgggccagctgaccagcatccctggctacctgaaccccagcagcaggacagagatcctgcacttcatcgacaatgccaagagggcccaccagctgcccggccacctgacccaggagcatgatgctgtgctgagcctgagcgcctacaacgtgaagctggcctggagagatggagaggacatcatcctgcgggtgcccatccatgacattgctgctgtgtcctatgtgagagatgatgctgcccacctggtggtgctgaagacagatgacagcagcaccaaggtggacatcaaggagacctatgaggtggaggccagcaccttctgcttccctgagagcgtggatgtgggcggggccagcccccacagcaagaccatcagcgagagcgagctgagcgccagcgccacagagctgctgcaggactacatgctgaccctgcggaccaagctgagcagccaggagatccagcagtttgctgccctgctgcacgagtacagaaatggagccagcatccacgagttctgcatcaacctgcggcagctgtatggagacagcaggaagttcctgctgctgggcctgcggcccttcatccctgagaaggacagccagcactttgagaacttcctggagaccatcggcgtgaaggatggccggggcatcatcacagacagctttggccgccaccggcgggccctgagcaccaccagcagcagcaccaccaacggcaacagagccaccggcagcagtgatgacagaagtgcccccagtgaaggagatgagtgggacaggatgatcagtgacatcagcagtgacatcgaggccctgggctgcagcatggaccaggacagcgcctag

SEQ ID NO: 147122 - DNA, 1224 bp, synthetic construct
  misc_feature 1..1224: note = Description of Artificial Sequence: Synthetic coding sequence
  source 1..1224: mol_type = other DNA
atgagaagaaacctgcggctgggccccagcagtggagcagatgcccagggccagggcgcccccaggcctggcctggccgcccccaggatgctgctgcccccagccagccaggccagccggggcagcggcagcacaggctgcagcctgatggcccaggaggtggacacagcccagggcgctgagatgagaagaggagctggggccgcccggggccgggcctcctggtgctgggccctggccctgctgtggctggccgtggtgcccggctggagccgggtgtctggcatccccagcagaagacactggcctgtgccctacaagagatttgacttccggcccaagccagacccctactgccaggccaagtacaccttctgccccaccggcagccccatccctgtgatggagggagatgatgacatcgaggtgttccggctgcaggcccctgtgtgggagttcaagtatggagacctgctgggccacctgaagatcatgcatgatgccatcggcttccgcagcaccctgaccgggaagaactacaccatggagtggtatgagctgttccagctgggcaactgcaccttcccccacctgcggcctgagatggatgcccccttctggtgcaaccagggcgccgcctgcttctttgagggcattgatgatgtgcactggaaggaaaatggcaccctggtgcaggtggccaccatcagcggcaacatgttcaaccagatggccaagtgggtgaagcaggacaatgagaccggcatctactatgagacctggaatgtgaaggccagccctgagaagggagctgagacctggtttgacagctatgactgcagcaagtttgtgctgcggaccttcaacaagctggccgagtttggagctgagttcaagaacatcgagaccaactacacccgcatcttcctgtacagcggggagcccacctacctgggcaatgagacctctgtgtttggccccaccggcaacaagaccctgggcctggccatcaagcgcttctactaccccttcaagccccacctgcccaccaaggagttcctgctgagcctgctgcagatctttgatgctgtgattgtgcacaagcagttctacctgttctacaactttgagtactggttcctgcccatgaagttccccttcatcaagatcacctatgaggagatccccctgcccatccggaacaagaccctgagcggcctgtag

SEQ ID NO: 147123 - DNA, 822 bp, synthetic construct
  misc_feature 1..822: note = Description of Artificial Sequence: Synthetic coding sequence
  source 1..822: mol_type = other DNA
atggagggagatgatgacatcgaggtgttccggctgcaggcccctgtgtgggagttcaagtatggagacctgctgggccacctgaagatcatgcatgatgccatcggcttccgcagcaccctgaccgggaagaactacaccatggagtggtatgagctgttccagctgggcaactgcaccttcccccacctgcggcctgagatggatgcccccttctggtgcaaccagggcgccgcctgcttctttgagggcattgatgatgtgcactggaaggaaaatggcaccctggtgcaggtggccaccatcagcggcaacatgttcaaccagatggccaagtgggtgaagcaggacaatgagaccggcatctactatgagacctggaatgtgaaggccagccctgagaagggagctgagacctggtttgacagctatgactgcagcaagtttgtgctgcggaccttcaacaagctggccgagtttggagctgagttcaagaacatcgagaccaactacacccgcatcttcctgtacagcggggagcccacctacctgggcaatgagacctctgtgtttggccccaccggcaacaagaccctgggcctggccatcaagcgcttctactaccccttcaagccccacctgcccaccaaggagttcctgctgagcctgctgcagatctttgatgctgtgattgtgcacaagcagttctacctgttctacaactttgagtactggttcctgcccatgaagttccccttcatcaagatcacctatgaggagatccccctgcccatccggaacaagaccctgagcggcctgtag

SEQ ID NO: 147124 - DNA, 1077 bp, synthetic construct
  misc_feature 1..1077: note = Description of Artificial Sequence: Synthetic coding sequence
  source 1..1077: mol_type = other DNA
atggcccaggaggtggacacagcccagggcgctgagatgagaagaggagctggagctgcccggggccgggcctcctggtgctgggccctggccctgctgtggctggccgtggtgcccggctggagccgggtgtctggcatccccagccgccgccactggcctgtgccctacaagagatttgacttccggcccaagccagacccctactgccaggccaagtacaccttctgccccaccggcagccccatccctgtgatggagggagatgatgacatcgaggtgttccggctgcaggcccctgtgtgggagttcaagtacggggacctgctgggccacctgaagatcatgcatgatgccatcggcttccgcagcaccctgaccgggaagaactacaccatggagtggtatgagctgttccagctgggcaactgcaccttcccccacctgcggcctgagatggatgcccccttctggtgcaaccagggcgccgcctgcttctttgagggcattgatgatgtgcactggaaggaaaatggcaccctggtgcaggtggccaccatcagcggcaacatgttcaaccagatggccaagtgggtgaagcaggacaatgaaacaggcatctactatgagacctggaatgtgaaggccagccctgagaagggagctgagacctggtttgacagctatgactgcagcaagtttgtgctgcggaccttcaacaagctggccgagtttggagctgagttcaagaacatcgagaccaactacacccgcatcttcctgtacagcggggagcccacctacctgggcaatgagacctctgtgtttggccccactggaaacaagaccctgggcctggccatcaagcgcttctactaccccttcaagccccacctgcccaccaaggagttcctgctgagcctgctgcagatctttgatgctgtgattgtgcacaagcagttctacctgttctacaactttgagtactggttcctgcccatgaagttccccttcatcaagatcacctatgaggagatccccctgcccatccggaacaagaccctgagcggcctgtag

SEQ ID NO: 147125 - DNA, 936 bp, synthetic construct
  misc_feature 1..936: note = Description of Artificial Sequence: Synthetic coding sequence
  source 1..936: mol_type = other DNA
atggaggccacccggcggcggcagcacctgggcgccactggaggccctggggcccagctgggcgccagcttcctgcaggcccggcacggctctgtgtctgcagatgaagctgccaggacagcccccttccacctggacctgtggttctacttcaccctgcagaactgggtgctggactttggccggcccatcgccatgctggtgttccccctggagtggttccccctgaacaagcccagcgtgggggactacttccacatggcctacaacgtcatcacccccttcctgctgctgaagctgattgaaagaagccccaggaccctgcccaggagcatcacctacgtgtccatcatcatcttcatcatgggcgccagcatccacctggtgggggacagcgtgaaccaccggctgctcttcagcggctaccagcaccacctgtctgtgcgggagaaccccatcatcaagaacctgaagccagagaccctgattgacagctttgagctgctgtactactatgatgagtacctgggccactgcatgtggtacatccccttcttcctgatcctcttcatgtacttcagcggctgcttcaccgccagcaaggccgagagcctcatccctggccctgccctgctgctggtggcccccagcggcctgtactactggtacctggtgacagagggccagatcttcatcctcttcatcttcaccttctttgccatgctggccctggtgctgcaccagaagaggaagaggctcttcctggacagcaatggcctcttcctgttcagcagctttgccctgaccctgctgctggtggccctgtgggtggcctggctgtggaatgaccctgtgctgaggaagaagtacccaggagtcatctacgtgcctgagccctgggccttctacaccctgcacgtgagcagccgccactag

SEQ ID NO: 147126 - DNA, 549 bp, synthetic construct
  misc_feature 1..549: note = Description of Artificial Sequence: Synthetic coding sequence
  source 1..549: mol_type = other DNA
atgaggctgcctgcccggctgcccagcaccagcaccagcggcagcaccagccactgcaggacaggcttctggaccctgggcgtgcccctgccctgctggtacagcctgagcagcggcttccacagcaccagccctgtgctgggcaccaccagcacctggcccaccaccagcagccggcccttcagctgcagcagcggctgcttcaccgccagcaaggccgagagcctcatccctggccctgccctgctgctggtggcccccagcggcctgtactactggtacctggtgacagagggccagatcttcatcctcttcatcttcaccttctttgccatgctggccctggtgctgcaccagaagaggaagaggctcttcctggacagcaatggcctcttcctgttcagcagctttgccctgaccctgctgctggtggccctgtgggtggcctggctgtggaatgaccctgtgctgaggaagaagtacccaggagtcatctacgtgcctgagccctgggccttctacaccctgcacgtgagcagccgccactag

SEQ ID NO: 147127 - DNA, 1032 bp, synthetic construct
  misc_feature 1..1032: note = Description of Artificial Sequence: Synthetic coding sequence
  source 1..1032: mol_type = other DNA
atggctgctgtggccggcaaggagcggcgggcccggggccggcccaggcctgagaccctgggcgccatcccccggcgggagggcggggaggccggcctgagccgggccttcaagcccctggcccaggcccccctgagctgtgagaccagcctgaggaagctgaagttcaagggcaagaagcacggctctgtgtctgcagatgaagctgccaggacagcccccttccacctggacctgtggttctacttcaccctgcagaactgggtgctggactttggccggcccatcgccatgctggtgttccccctggagtggttccccctgaacaagcccagcgtgggggactacttccacatggcctacaacgtcatcacccccttcctgctgctgaagctgattgaaagaagccccaggaccctgcccaggagcatcacctacgtgtccatcatcatcttcatcatgggcgccagcatccacctggtgggggacagcgtgaaccaccggctgctcttcagcggctaccagcaccacctgtctgtgcgggagaaccccatcatcaagaacctgaagccagagaccctgattgacagctttgagctgctgtactactatgatgagtacctgggccactgcatgtggtacatccccttcttcctgatcctcttcatgtacttcagcggctgcttcaccgccagcaaggccgagagcctcatccctggccctgccctgctgctggtggcccccagcggcctgtactactggtacctggtgacagagggccagatcttcatcctcttcatcttcaccttctttgccatgctggccctggtgctgcaccagaagaggaagaggctcttcctggacagcaatggcctcttcctgttcagcagctttgccctgaccctgctgctggtggccctgtgggtggcctggctgtggaatgaccctgtgctgaggaagaagtacccaggagtcatctacgtgcctgagccctgggccttctacaccctgcacgtgagcagccgccactag

SEQ ID NO: 147128 - DNA, 861 bp, synthetic construct
  misc_feature 1..861: note = Description of Artificial Sequence: Synthetic coding sequence
  source 1..861: mol_type = other DNA
atgaacccagccagtgatggcggcaccagcgagagcatctttgacctggactatgcctcctggggcatccgcagcaccctgatggtggccggctttgtgttctacctgggcgtgtttgtggtgtgccaccagctgagcagcagcctgaatgccacctaccgcagcctggtggcccgggagaaggtgttctgggacctggccgccaccagggctgtgtttggagtgcagagcacagctgctggcctgtgggccctgctgggggaccctgtgctgcatgctgacaaggcccggggccagcagaactggtgctggttccacatcaccacagccaccggcttcttctgctttgaaaatgtggccgtgcacctgagcaacctgatcttccgcacctttgacctcttcctggtgatccaccacctgtttgccttcctgggcttcctgggctgcctggtgaacctgcaggccggccactacctggccatgaccaccctgctgctggagatgagcacccccttcacctgtgtgtcctggatgctgctgaaggccggctggagcgagagcctcttctggaagctgaaccagtggctgatgatccacatgttccactgcaggatggtgctgacctaccacatgtggtgggtgtgcttctggcactgggatggcctggtgagcagcctgtacctgccccacctgaccctcttcctggtgggcctggccctgctgaccctcatcatcaacccctactggacccacaagaagacccagcagctgctgaaccctgtggactggaactttgcccagcctgaggccaagagcaggcctgagggcaatggccagctgctgaggaagaagaggccctag

SEQ ID NO: 147129 - DNA, 1065 bp, synthetic construct
  misc_feature 1..1065: note = Description of Artificial Sequence: Synthetic coding sequence
  source 1..1065: mol_type = other DNA
atgtaccgggagtgggtggtggtgaatgtgttcatgatgctgtatgtgcagctggtgcagggcagcagcaatgagcacggccctgtgaagaggagcagccagagcaccctggagaggtctgagcagcagatccgggccgccagcagcctggaggagctgctgcgcatcacccacagcgaggactggaagctgtggcgctgccgcctgcggctgaagagcttcacctccatggacagccgcagcgccagccacaggagcaccaggtttgctgccaccttctatgacatcgagaccctgaaggtgattgatgaggagtggcagaggacccagtgcagcccccgggagacctgtgtggaggtggccagcgagctgggcaagagcaccaacaccttcttcaagccaccctgtgtgaatgtgttccgctgtggcggctgctgcaatgaggagagcctcatctgcatgaacaccagcaccagctacatcagcaagcagctgtttgagatctctgtgcccctgacctctgtgcctgagctggtgcctgtgaaggtggccaaccacacaggctgcaagtgcctgcccacagcccccaggcacccctacagcatcatccgccgcagcatccagatccctgaggaggaccgctgcagccacagcaagaagctgtgccccatcgacatgctgtgggacagcaacaagtgcaagtgtgtgctgcaggaggagaaccccctggccggcacagaggaccacagccacctgcaggagcccgccctgtgtggcccccacatgatgtttgatgaggacagatgtgaatgtgtgtgcaagaccccctgccccaaggacctgatccagcaccccaagaactgcagctgctttgagtgcaaggagagcctggagacctgctgccagaagcacaagctgttccacccagacacctgcagctgtgaagatcgctgccccttccacacccggccctgtgccagcggcaagacagcctgtgccaagcactgccgcttccccaaggagaagagagctgcccagggcccccacagcaggaagaacccctag

SEQ ID NO: 147130 - DNA, 504 bp, synthetic construct
  misc_feature 1..504: note = Description of Artificial Sequence: Synthetic coding sequence
  source 1..504: mol_type = other DNA
atggagagatttgtggtgacagcccccccagccaggaacagaagcaagacagccctgtatgtgacccccctggacagagtgacagaatttggaggagagctgcatgaagatggcggcaagctgttctgcaccagctgcaatgtggtgctgaaccacgtgaggaagagcgccatcagtgaccacctgaagagcaagacccacaccaagaggaaggccgagtttgaggagcagaatgtgaggaagaagcagaggcccctgacagccagcctgcagtgcaacagcacagcccagacagagaaggtgtctgtcatccaggactttgtgaagatgtgcctggaggccaacatccccctggagaaggctgaccaccctgctgtgcgggccttcctgagcagacatgtgaagaatggaggcagcatccccaagagtgaccagctgcggcgggcctacctgcctgatggctatgaaaatgaaaaccagctgctgaacagccaggactgctag

SEQ ID NO: 147131 - DNA, 504 bp, synthetic construct; identical to SEQ ID NO: 147130
  misc_feature 1..504: note = Description of Artificial Sequence: Synthetic coding sequence
  source 1..504: mol_type = other DNA

SEQ ID NO: 147132 - DNA, 504 bp, synthetic construct; identical to SEQ ID NO: 147130
  misc_feature 1..504: note = Description of Artificial Sequence: Synthetic coding sequence
  source 1..504: mol_type = other DNA

SEQ ID NO: 147133 - DNA, 321 bp, synthetic construct
  misc_feature 1..321: note = Description of Artificial Sequence: Synthetic coding sequence
  source 1..321: mol_type = other DNA
atggagagatttgtggtgacagcccccccagccaggaacagaagcaagacagccctgtatgtgacccccctggacagagtgacagaatttggaggagagctgcatgaagatggcggcaagctgttctgcaccagctgcaatgtggtgctgaaccacgtgaggaagagcgccatcagtgaccacctgaagagcaagacccacaccaagaggaaggccgagtttgaggagcagaatgtgaggaagaagcagaggcccctgacagccagcctgcagtgcaacagcacagcccagacagagaaggtgtctgtcatccaggactag

SEQ ID NO: 147134 - DNA, 504 bp, synthetic construct; identical to SEQ ID NO: 147130
  misc_feature 1..504: note = Description of Artificial Sequence: Synthetic coding sequence
  source 1..504: mol_type = other DNA

SEQ ID NO: 147135 - DNA, 1608 bp, synthetic construct
  misc_feature 1..1608: note = Description of Artificial Sequence: Synthetic coding sequence
  source 1..1608: mol_type = other DNA
atggccagcctgagcctggcccctgtgaacatcttcaaggccggggctgatgaggagagagctgagacagcccggctgaccagcttcatcggggccatcgccatcggggacctggtgaagagcaccctgggccccaagggcatggacaagatcctgctgagcagcggcagagatgccagcctgatggtgaccaatgatggagccaccatcctgaagaacatcggcgtggacaacccagctgccaaggtgctggtggacatgagccgggtgcaggatgatgaggtgggagatggcaccacctctgtgacagtgctggccgctgagctgctgcgggaggccgagagcctgattgccaagaagatccacccccagaccatcatcgccggctggagggaggccaccaaggccgcccgggaggccctgctgagcagcgctgtggaccacggcagtgatgaggtgaagttccggcaggacctgatgaacattgctggcaccaccctgagcagcaagctgctgacccaccacaaggaccacttcaccaagctggccgtggaggccgtgctgcggctgaagggcagcggcaacctggaggccatccacatcatcaagaagctgggcggcagcctggccgacagctacctggatgagggcttcctgctggacaagaagattggagtgaaccagcccaagagaattgaaaatgccaagatcctgattgccaacacaggcatggacacagacaagatcaagatcttcggcagccgggtgcgggtggacagcacagccaaggtggccgagattgaacatgctgagaaggagaagatgaaggagaaggtggagcgcatcctgaagcacggcatcaactgcttcatcaaccggcagctgatctacaactacccagagcagctgtttggagctgctggggtgatggccatcgagcacgccgactttgctggggtggagcggctggccctggtgactggaggagaaattgccagcacctttgaccaccctgagctggtgaagctgggcagctgcaagctgattgaggaggtgatgattggagaggacaagctgatccacttctctggagtggccctgggggaggcctgcaccatcgtgctgcggggggccacccagcagatcctggatgaggccgagaggagcctgcatgatgccctgtgtgtgctggcccagacagtgaaggacagcaggacagtgtatggaggcggctgcagcgagatgctgatggcccatgctgtgacccagctggccaacagaacacctgggaaggaggccgtggccatggagagctatgccaaggccctgaggatgctgcccaccatcatcgctgacaatgccggctatgacagcgctgacctggtggcccagctgcgggccgcccacagcgagggcaacaccacagctggcctggacatgagggagggcaccatcggggacatggccatcctgggcatcacagagagcttccaggtgaagaggcaggtgctgctgtctgctgctgaggccgctgaggtgatcctgcgggtggacaacatcatcaaggccgcccccaggaagagggtgcctgaccaccacccctgctag

SEQ ID NO: 147136 - DNA, 1467 bp, synthetic construct
  misc_feature 1..1467: note = Description of Artificial Sequence: Synthetic coding sequence
  source 1..1467: mol_type = other DNA
atggacaagatcctgctgagcagcggcagagatgccagcctgatggtgaccaatgatggagccaccatcctgaagaacattggagtggacaacccagctgccaaggtgctggtggacatgagccgggtgcaggatgatgaggtgggagatggcaccacctctgtgacagtgctggccgctgagctgctgcgggaggccgagagcctcatcgccaagaagatccacccccagaccatcatcgccggctggagggaggccaccaaggccgcccgggaggccctgctgagcagcgctgtggaccacggcagtgatgaggtgaagttccggcaggacctgatgaacattgctggcaccaccctgagcagcaagctgctgacccaccacaaggaccacttcaccaagctggccgtggaggccgtgctgcggctgaagggcagcggcaacctggaggccatccacatcatcaagaagctgggcggcagcctggccgacagctacctggatgagggcttcctgctggacaagaagattggagtgaaccagcccaagagaattgaaaatgccaagatcctgattgccaacacaggcatggacacagacaagatcaagatcttcggcagccgggtgcgggtggacagcacagccaaggtggccgagattgagcacgccgagaaggagaagatgaaggagaaggtggagcgcatcctgaagcacggcatcaactgcttcatcaaccggcagctgatctacaactacccagagcagctgtttggagctgctggggtgatggccattgaacatgctgactttgctggggtggagcggctggccctggtgactggaggagagatcgccagcacctttgaccaccctgagctggtgaagctgggcagctgcaagctgattgaggaggtgatgattggagaggacaagctgatccacttcagcggcgtggccctgggggaggcctgcaccatcgtgctgcggggggccacccagcagatcctggatgaagctgagaggagcctgcatgatgccctgtgtgtgctggcccagacagtgaaggacagcaggacagtgtatggaggcggctgcagcgagatgctgatggcccatgctgtgacccagctggccaacagaacacctgggaaggaggccgtggccatggagagctatgccaaggccctgaggatgctgcccaccatcatcgctgacaatgccggctatgattctgctgacctggtggcccagctgcgggccgcccacagcgagggcaacaccacagctggcctggacatgagggagggcaccatcggggacatggccatcctgggcatcacagagagcttccaggtgaagaggcaggtgctgctgtctgctgctgaggccgctgaggtgatcctgcgggtggacaacatcatcaaggccgcccccaggaagagggtgcctgaccaccacccctgctag

SEQ ID NO: 147137 - DNA, 1638 bp, synthetic construct
  misc_feature 1..1638: note = Description of Artificial Sequence: Synthetic coding sequence
  source 1..1638: mol_type = other DNA
atgatgggccacaggcctgtgctggtgctgagccagaacaccaagcgggagagcggcaggaaggtgcagagcggcaacatcaatgctgccaagaccatcgctgacatcatccgcacctgcctgggccccaagtccatgatgaagatgctgctggaccccatgggcggcatcgtgatgaccaatgatggaaatgccatcctgcgggagatccaggtgcagcaccctgctgccaagtccatgattgagatcagcaggacccaggatgaggaggtgggagatggcaccaccagcgtcatcatcctggccggggagatgctgtctgtggccgagcacttcctggagcagcagatgcaccccaccgtggtgatcagcgcctacaggaaggccctggatgacatgatcagcaccctgaagaagatcagcatccctgtggacatcagtgacagcgacatgatgctgaacatcatcaacagcagcatcaccaccaaggccatcagccgctggagcagcctggcctgcaacatcgccctggatgctgtgaagatggtgcagtttgaagaaaatggaaggaaggagattgacatcaagaagtatgcccgggtggagaagatccctgggggcatcatcgaggacagctgtgtgctgcggggcgtgatgatcaacaaggatgtgacccaccccaggatgaggcgctacatcaagaacccccgcatcgtgctgctggacagcagcctggagtacaagaagggggagagccagacagacatcgagatcacccgggaggaggacttcacccgcatcctgcagatggaggaggagtacatccagcagctgtgtgaggacatcatccagctgaagccagatgtggtgatcacagagaagggcatcagtgacctggcccagcactacctgatgagggccaacatcacagccatcagaagagtgaggaagacagacaacaacagaattgcccgggcctgtggggccagaattgtgtccaggcctgaggagctgcgggaggatgatgtgggcactggagctggcctgctggagatcaagaagattggagatgagtacttcaccttcatcacagactgcaaggaccccaaggcctgcaccatcctgctgcggggggccagcaaggagatcctgtctgaggtggagaggaacctgcaggatgccatgcaggtgtgcagaaatgtgctgctggacccccagctggtgcctgggggcggggccagcgagatggctgtggcccacgccctgacagagaagagcaaggccatgactggagtggagcagtggccctacagagctgtggcccaggccctggaggtgatccccaggaccctcatccagaactgtggggccagcaccatccggctgctgaccagcctgcgggccaagcacacccaggagaactgtgagacctggggcgtgaatggagagaccggcaccctggtggacatgaaggagctgggcatctgggagcccctggccgtgaagctgcagacctacaagacagctgtggagacagctgtgctgctgctgagaattgatgacatcgtgtctggccacaagaagaagggagatgaccagagccggcagggcggggccccagatgctggccaggagtag

SEQ ID NO: 147138 - DNA, 1524 bp, synthetic construct
  misc_feature 1..1524: note = Description of Artificial Sequence: Synthetic coding sequence
  source 1..1524: mol_type = other DNA
atgatgggccacaggcctgtgctggtgctgagccagaacaccaagcgggagagcggcaggaaggtgcagagcggcaacatcaatgctgccaagatccaggtgcagcaccctgctgccaagtccatgattgagatcagcaggacccaggatgaggaggtgggagatggcaccaccagcgtcatcatcctggccggggagatgctgtctgtggccgagcacttcctggagcagcagatgcaccccaccgtggtgatcagcgcctacaggaaggccctggatgacatgatcagcaccctgaagaagatcagcatccctgtggacatcagtgacagcgacatgatgctgaacatcatcaacagcagcatcaccaccaaggccatcagccgctggagcagcctggcctgcaacatcgccctggatgctgtgaagatggtgcagtttgaagaaaatggaaggaaggagattgacatcaagaagtatgcccgggtggagaagatccctgggggcatcatcgaggacagctgtgtgctgcggggcgtgatgatcaacaaggatgtgacccaccccaggatgaggcgctacatcaagaacccccgcatcgtgctgctggacagcagcctggagtacaagaagggggagagccagacagacatcgagatcacccgggaggaggacttcacccgcatcctgcagatggaggaggagtacatccagcagctgtgtgaggacatcatccagctgaagccagatgtggtgatcacagagaagggcatcagtgacctggcccagcactacctgatgagggccaacatcacagccatcagaagagtgaggaagacagacaacaacagaattgcccgggcctgtggggccagaattgtgtccaggcctgaggagctgcgggaggatgatgtgggcactggagctggcctgctggagatcaagaagattggagatgagtacttcaccttcatcacagactgcaaggaccccaaggcctgcaccatcctgctgcggggggccagcaaggagatcctgtctgaggtggagaggaacctgcaggatgccatgcaggtgtgcagaaatgtgctgctggacccccagctggtgcctgggggcggggccagcgagatggctgtggcccacgccctgacagagaagagcaaggccatgactggagtggagcagtggccctacagagctgtggcccaggccctggaggtgatccccaggaccctcatccagaactgtggggccagcaccatccggctgctgaccagcctgcgggccaagcacacccaggagaactgtgagacctggggcgtgaatggagagaccggcaccctggtggacatgaaggagctgggcatctgggagcccctggccgtgaagctgcagacctacaagacagctgtggagacagctgtgctgctgctgagaattgatgacatcgtgtctggccacaagaagaagggagatgaccagagccggcagggcggggccccagatgctggccaggagtag

SEQ ID NO: 147139 - DNA, 1503 bp, synthetic construct
  misc_feature 1..1503: note = Description of Artificial Sequence: Synthetic coding sequence
  source 1..1503: mol_type = other DNA
atgatgaagatgctgctggaccccatgggcggcatcgtgatgaccaatgatggaaatgccatcctgcgggagatccaggtgcagcaccctgctgccaagtccatgattgagatcagcaggacccaggatgaggaggtgggagatggcaccaccagcgtcatcatcctggccggggagatgctgtctgtggccgagcacttcctggagcagcagatgcaccccaccgtggtgatcagcgcctacaggaaggccctggatgacatgatcagcaccctgaagaagatcagcatccctgtggacatcagtgacagcgacatgatgctgaacatcatcaacagcagcatcaccaccaaggccatcagccgctggagcagcctggcctgcaacatcgccctggatgctgtgaagatggtgcagtttgaggagaatggaaggaaggagattgacatcaagaagtatgcccgggtggagaagatccctgggggcatcatcgaggacagctgtgtgctgcggggcgtgatgatcaacaaggatgtgacccaccccaggatgaggcgctacatcaagaaccccagaattgtgctgctggacagcagcctggagtacaagaagggggagagccagacagacatcgagatcacccgggaggaggacttcacccgcatcctgcagatggaggaggagtacatccagcagctgtgtgaggacatcatccagctgaagccagatgtggtgatcacagagaagggcatcagtgacctggcccagcactacctgatgagggccaacatcacagccatccggcgggtgaggaagacagacaacaaccgcatcgcccgggcctgtggggcccgcatcgtgtccaggcctgaggagctgagagaagatgatgtgggcaccggggccggcctgctggagatcaagaagattggagatgagtacttcaccttcatcacagactgcaaggaccccaaggcctgcaccatcctgctgcggggggccagcaaggagatcctgtctgaggtggagaggaacctgcaggatgccatgcaggtgtgcagaaatgtgctgctggacccccagctggtgcctgggggcggggccagcgagatggctgtggcccacgccctgacagagaagagcaaggccatgactggagtggagcagtggccctacagagctgtggcccaggccctggaggtgatccccaggaccctcatccagaactgtggggccagcaccatccggctgctgaccagcctgcgggccaagcacacccaggagaactgtgagacctggggcgtgaatggagaaacaggcaccctggtggacatgaaggagctgggcatctgggagcccctggccgtgaagctgcagacctacaagacagctgtggagacagctgtgctgctgctgagaattgatgacatcgtgtctggccacaagaagaagggagatgaccagagccggcagggcggggccccagatgctggccaggagtag

SEQ ID NO: 147140 - DNA, 831 bp, synthetic construct
  misc_feature 1..831: note = Description of Artificial Sequence: Synthetic coding sequence
  source 1..831: mol_type = other DNA
atgtatgaaggagacctggagggccagagcatgaactggaccagcgaggagggccgcggggacatcatccgcagcggcaccaacatcgaccgggcctggcagtgccagaacaccaagcgggagagcggcaggaaggtgcagagcggcaacatcaatgctgccaagaccatcgctgacatcatccgcacctgcctgggccccaagtccatgatgaagatgctgctggaccccatgggcggcatcgtgatgaccaatgatggaaatgccatcctgcgggagatccaggtgcagcaccctgctgccaagtccatgattgagatcagcaggacccaggatgaggaggtgggagatggcaccaccagcgtcatcatcctggccggggagatgctgtctgtggccgagcacttcctggagcagcagatgcaccccaccgtggtgatcagcgcctacaggaaggccctggatgacatgatcagcaccctgaagaagatcagcatccctgtggacatcagtgacagcgacatgatgctgaacatcatcaacagcagcatcaccaccaaggccatcagccgctggagcagcctggcctgcaacatcgccctggatgctgtgaagatggtgcagtttgaagaaaatggaaggaaggagattgacatcaagaagtatgcccgggtggagaagatccctgggggcatcatcgaggacagctgtgtgctgcggggcgtgatgatcaacaaggatgtgacccaccccaggatgaggcgctacatcaagaacccccgcatcgtgctgctggacagcagcctggagtacaagaagggggagagctag

SEQ ID NO: 147141 - DNA, 486 bp, synthetic construct
  misc_feature 1..486: note = Description of Artificial Sequence: Synthetic coding sequence
  source 1..486: mol_type = other DNA
atgatgggccacaggcctgtgctggtgctgagccagaacaccaagcgggagagcggcaggaaggtgcagagcggcaacatcaatgctgccaagaccatcgctgacatcatccgcacctgcctgggccccaagtccatgatgaagatgctgctggaccccatgggcggcatcgtgatgaccaatgatggaaatgccatcctgcgggagatccaggtgcagcaccctgctgccaagtccatgattgagatcagcaggacccaggatgaggaggtgggagatggcaccaccagcgtcatcatcctggagagccacagcgtgaccatgctggagtgtggcggggccatcctggcccactgcaacctgtgcctgcctgctggggagatgctgtctgtggccgagcacttcctggagcagcagatgcaccccaccgtggtgatcagcgcctacaggaaggccctggatgacatgatcagcaccctgaagtag

SEQ ID NO: 147142 - DNA, 567 bp, synthetic construct
  misc_feature 1..567: note = Description of Artificial Sequence: Synthetic coding sequence
  source 1..567: mol_type = other DNA
atgtatgaaggagacctggagggccagagcatgaactggaccagcgaggagggccgcggggacatcatccgcagcggcaccaacatcgaccgggcctggcagtgccagaacaccaagcgggagagcggcaggaaggtgcagagcggcaacatcaatgctgccaagatccaggtgcagcaccctgctgccaagtccatgattgagatcagcaggacccaggatgaggaggtgggagatggcaccaccagcgtcatcatcctggccggggagatgctgtctgtggccgagcacttcctggagcagcagatgcaccccaccgtggtgatcagcgcctacaggaaggccctggatgacatgatcagcaccctgaagaagatcagcatccctgtggacatcagtgacagcgacatgatgctgaacatcatcaacagcagcatcaccaccaaggccatcagccgctggagcagcctggcctgcaacatcgccctggatgctgtgaagatggtgcagtttgaagaaaatggaaggaaggagattgacatcaagaagtatgcccgggtggagtag

SEQ ID NO: 147143 - DNA, 1503 bp, synthetic construct; identical to SEQ ID NO: 147139
  misc_feature 1..1503: note = Description of Artificial Sequence: Synthetic coding sequence
  source 1..1503: mol_type = other DNA

SEQ ID NO: 147144 - DNA, 1620 bp, synthetic construct
  misc_feature 1..1620: note = Description of Artificial Sequence: Synthetic coding sequence
  source 1..1620: mol_type = other DNA
atgccagaaaatgtggcccccaggtctggggccacagctggagctgctgggggccggggcaaaggagcctaccaggaccgggacaagccagcccagatccgcttcagcaacatctctgctgccaaggctgtggctgatgccatccgcaccagcctgggccccaagggcatggacaagatgatccaggatggaaaaggagatgtgaccatcaccaatgatggagccaccatcctgaagcagatgcaggtgctgcaccctgctgccaggatgctggtggagctgagcaaggcccaggacatcgaggccggagatggcaccacctctgtggtgatcatcgccggcagcctgctggacagctgcaccaagctgctgcagaagggcatccaccccaccatcatcagcgagagcttccagaaggccctggagaagggcatcgagatcctgacagacatgagcaggcctgtggagctgagtgaccgggagaccctgctgaacagcgccaccaccagcctgaacagcaaggtggtgtcccagtacagcagcctgctgagccccatgtctgtgaatgctgtgatgaaggtgattgatcctgccacagccacctctgtggacctgcgggacatcaagatcgtgaagaagctgggcggcaccattgatgactgtgagctggtggagggcctggtgctgacccagaaggtgagcaacagcggcatcaccagggtggagaaggccaagattggcctcatccagttctgcctgagcgcccccaagacagacatggacaaccagatcgtggtgtctgactatgcccagatggacagagtgctgcgggaggagcgggcctacatcctgaacctggtgaagcagatcaagaagacaggctgcaatgtgctgctgatccagaagagcatcctgagagatgccctgagtgacctggccctgcacttcctgaacaagatgaagatcatggtgatcaaggacatcgagagagaagatattgagttcatctgcaagaccatcggcaccaagcctgtggcccacatcgaccagttcaccgctgacatgctgggcagcgctgagctggccgaggaggtgaacctgaatggcagcggcaagctgctgaagatcaccggctgtgccagccctgggaagacagtgaccatcgtggtgcggggcagcaacaagctggtgattgaggaggccgagaggagcatccatgatgccctgtgtgtgatccgctgcctggtgaagaagagggccctgattgctgggggcggggcccctgagattgagctggccctgcggctgacagagtacagcaggaccctgagcggcatggagagctactgtgtgcgggcctttgctgatgccatggaggtgatccccagcaccctggctgaaaatgccggcctgaaccccatcagcacagtgacagagctgaggaacagacatgcccagggcgagaagacagctggcatcaacgtgaggaaaggaggcatcagcaacatcctggaggagctggtggtgcagcccctgctggtgtctgtgtctgccctgaccctggccacagaaacagtgcgcagcatcctgaagattgatgatgtggtgaacaccaggtag

SEQ ID NO: 147145 - DNA, 1452 bp, synthetic construct
  misc_feature 1..1452: note = Description of Artificial Sequence: Synthetic coding sequence
  source 1..1452: mol_type = other DNA
atggacaagatgatccaggatggaaaaggagatgtgaccatcaccaatgatggagccaccatcctgaagcagatgcaggtgctgcaccctgctgccaggatgctggtggagctgagcaaggcccaggacatcgaggccggagatggcaccacctctgtggtgatcatcgccggcagcctgctggacagctgcaccaagctgctgcagaagggcatccaccccaccatcatcagcgagagcttccagaaggccctggagaagggcatcgagatcctgacagacatgagcaggcctgtggagctgagtgaccgggagaccctgctgaacagcgccaccaccagcctgaacagcaaggtggtgtcccagtacagcagcctgctgagccccatgtctgtgaatgctgtgatgaaggtgattgatcctgccacagccacctctgtggacctgcgggacatcaagatcgtgaagaagctgggcggcaccattgatgactgtgagctggtggagggcctggtgctgacccagaaggtgagcaacagcggcatcaccagggtggagaaggccaagattggcctcatccagttctgcctgagcgcccccaagacagacatggacaaccagatcgtggtgtctgactatgcccagatggacagagtgctgcgggaggagcgggcctacatcctgaacctggtgaagcagatcaagaagacaggctgcaatgtgctgctgatccagaagagcatcctgagagatgccctgagtgacctggccctgcacttcctgaacaagatgaagatcatggtgatcaaggacatcgagagagaagatattgagttcatctgcaagaccatcggcaccaagcctgtggcccacatcgaccagttcaccgctgacatgctgggcagcgctgagctggccgaggaggtgaacctgaatggcagcggcaagctgctgaagatcaccggctgtgccagccctgggaagacagtgaccatcgtggtgcggggcagcaacaagctggtgattgaggaggccgagaggagcatccatgatgccctgtgtgtgatccgctgcctggtgaagaagagggccctgattgctgggggcggggcccctgagattgagctggccctgcggctgacagagtacagcaggaccctgagcggcatggagagctactgtgtgcgggcctttgctgatgccatggaggtgatccccagcaccctggctgaaaatgccggcctgaaccccatcagcacagtgacagagctgaggaacagacatgcccagggcgagaagacagctggcatcaacgtgaggaaaggaggcatcagcaacatcctggaggagctggtggtgcagcccctgctggtgtctgtgtctgccctgaccctggccacagaaacagtgcgcagcatcctgaagattgatgatgtggtgaacaccaggtag

SEQ ID NO: 147146 - DNA, 1530 bp, synthetic construct
  misc_feature 1..1530: note = Description of Artificial Sequence: Synthetic coding sequence
  source 1..1530: mol_type = other DNA
atgccagaaaatgtggcccccaggtctggggccacagctggagctgctgggggccggggcaaaggagcctaccaggaccgggacaagccagcccagatccgcttcagcaacatctctgctgccaaggctgtggctgatgccatccgcaccagcctgggccccaagggcatggacaagatgctggtggagctgagcaaggcccaggacatcgaggccggagatggcaccacctctgtggtgatcatcgccggcagcctgctggacagctgcaccaagctgctgcagaagggcatccaccccaccatcatcagcgagagcttccagaaggccctggagaagggcatcgagatcctgacagacatgagcaggcctgtggagctgagtgaccgggagaccctgctgaacagcgccaccaccagcctgaacagcaaggtggtgtcccagtacagcagcctgctgagccccatgtctgtgaatgctgtgatgaaggtgattgatcctgccacagccacctctgtggacctgcgggacatcaagatcgtgaagaagctgggcggcaccattgatgactgtgagctggtggagggcctggtgctgacccagaaggtgagcaacagcggcatcaccagggtggagaaggccaagattggcctcatccagttctgcctgagcgcccccaagacagacatggacaaccagatcgtggtgtctgactatgcccagatggacagagtgctgcgggaggagcgggcctacatcctgaacctggtgaagcagatcaagaagacaggctgcaatgtgctgctgatccagaagagcatcctgagagatgccctgagtgacctggccctgcacttcctgaacaagatgaagatcatggtgatcaaggacatcgagagagaagatattgagttcatctgcaagaccatcggcaccaagcctgtggcccacatcgaccagttcaccgctgacatgctgggcagcgctgagctggccgaggaggtgaacctgaatggcagcggcaagctgctgaagatcaccggctgtgccagccctgggaagacagtgaccatcgtggtgcggggcagcaacaagctggtgattgaggaggccgagaggagcatccatgatgccctgtgtgtgatccgctgcctggtgaagaagagggccctgattgctgggggcggggcccctgagattgagctggccctgcggctgacagagtacagcaggaccctgagcggcatggagagctactgtgtgcgggcctttgctgatgccatggaggtgatccccagcaccctggctgaaaatgccggcctgaaccccatcagcacagtgacagagctgaggaacagacatgcccagggcgagaagacagctggcatcaacgtgaggaaaggaggcatcagcaacatcctggaggagctggtggtgcagcccctgctggtgtctgtgtctgccctgaccctggccacagaaacagtgcgcagcatcctgaagattgatgatgtggtgaacaccaggtag

SEQ ID NO: 147147 - DNA, 1170 bp, synthetic construct
  misc_feature 1..1170: note = Description of Artificial Sequence: Synthetic coding sequence
  source 1..1170: mol_type = other DNA
atgagcaggcctgtggagctgagtgaccgggagaccctgctgaacagcgccaccaccagcctgaacagcaaggtggtgtcccagtacagcagcctgctgagccccatgtctgtgaatgctgtgatgaaggtgattgatcctgccacagccacctctgtggacctgcgggacatcaagatcgtgaagaagctgggcggcaccattgatgactgtgagctggtggagggcctggtgctgacccagaaggtgagcaacagcggcatcaccagggtggagaaggccaagattggcctcatccagttctgcctgagcgcccccaagacagacatggacaaccagatcgtggtgtctgactatgcccagatggacagagtgctgcgggaggagcgggcctacatcctgaacctggtgaagcagatcaagaagacaggctgcaatgtgctgctgatccagaagagcatcctgagagatgccctgagtgacctggccctgcacttcctgaacaagatgaagatcatggtgatcaaggacatcgagagagaagatattgagttcatctgcaagaccatcggcaccaagcctgtggcccacatcgaccagttcaccgctgacatgctgggcagcgctgagctggccgaggaggtgaacctgaatggcagcggcaagctgctgaagatcaccggctgtgccagccctgggaagacagtgaccatcgtggtgcggggcagcaacaagctggtgattgaggaggccgagaggagcatccatgatgccctgtgtgtgatccgctgcctggtgaagaagagggccctgattgctgggggcggggcccctgagattgagctggccctgcggctgacagagtacagcaggaccctgagcggcatggagagctactgtgtgcgggcctttgctgatgccatggaggtgatccccagcaccctggctgaaaatgccggcctgaaccccatcagcacagtgacagagctgaggaacagacatgcccagggcgagaagacagctggcatcaacgtgaggaaaggaggcatcagcaacatcctggaggagctggtggtgcagcccctgctggtgtctgtgtctgccctgaccctggccacagaaacagtgcgcagcatcctgaagattgatgatgtggtgaacaccaggtag

SEQ ID NO: 147148 - DNA, 1626 bp, synthetic construct
  misc_feature 1..1626: note = Description of Artificial Sequence: Synthetic coding sequence
  source 1..1626: mol_type = other DNA
atggcctccatgggcaccctggcctttgatgaatatggccggcccttcctgatcatcaaggaccaggacaggaagagccggctgatgggcctggaggccctgaagagccacatcatggccgccaaggctgtggccaacaccatgaggaccagcctgggccccaacggcctggacaagatgatggtggacaaggatggagatgtgacagtgaccaatgatggagccaccatcctgtccatgatggatgtggaccaccagatcgccaagctgatggtggagctgagcaagagccaggatgatgaaattggagatggcaccactggagtggtggtgctggccggggccctgctggaggaggccgagcagctgctggaccggggcatccaccccatcagaattgctgatggctatgagcaggccgcccgggtggccatcgagcacctggacaagatcagtgacagcgtgctggtggacatcaaggacacagagcccctcatccagacagccaagaccaccctgggcagcaaggtggtgaacagctgccaccggcagatggccgagattgctgtgaatgctgtgctgactgtggccgacatggagaggagagatgtggactttgagctgatcaaggtggagggcaaggtgggcggccgcctggaggacaccaagctgatcaagggcgtgattgtggacaaggacttcagccacccccagatgcccaagaaggtggaggatgccaagatcgccatcctgacctgcccctttgagccccccaagcccaagaccaagcacaagctggatgtgacctctgtggaggactacaaggccctgcagaagtatgagaaggagaagtttgaggagatgatccagcagatcaaggagactggagccaacctggccatctgccagtggggctttgatgatgaggccaaccacctgctgctgcagaacaacctgcctgctgtgcgctgggtgggcggccctgagattgagctgattgccatcgccactggaggaagaattgtgccccgcttcagcgagctgacagctgagaagctgggctttgctggcctggtgcaggagatcagctttggcaccaccaaggacaagatgctggtgattgagcagtgcaagaacagcagagctgtgaccatcttcatccggggcggcaacaagatgatcatcgaggaggccaagaggagcctgcatgatgccctgtgtgtgatccggaacctgatccgggacaacagagtggtgtatggaggaggagctgctgagatcagctgtgccctggccgtgtcccaggaggccgacaagtgccccaccctggagcagtatgccatgagggcctttgctgatgccctggaggtgatccccatggccctgtctgagaacagcggcatgaaccccatccagaccatgacagaggtgcgggcccggcaggtgaaggagatgaacccagccctgggcatcgactgcctgcacaagggcaccaatgacatgaagcagcagcacgtgattgagaccctgattggcaagaagcagcagatcagcctggccacccagatggtgaggatgatcctgaagattgatgacatcaggaagccaggagagagcgaggagtag

SEQ ID NO: 147149 - DNA, 1545 bp, synthetic construct
  misc_feature 1..1545: note = Description of Artificial Sequence: Synthetic coding sequence
  source 1..1545: mol_type = other DNA
atggcctccatgggcaccctggcctttgatgaatatggccggcccttcctgatcatcaaggaccaggacaggaagagccggctgatgggcctggaggccctgaagagccacatcatggccgccaaggctgtggccaacaccatgaggaccagcctgggccccaacggcctggacaagatgatggtggacaaggatggagatgtgacagtgaccaatgatgaaattggagatggcaccaccggggtggtggtgctggccggggccctgctggaggaggccgagcagctgctggaccggggcatccaccccatcagaattgctgatggctatgagcaggccgcccgggtggccatcgagcacctggacaagatcagtgacagcgtgctggtggacatcaaggacacagagcccctcatccagacagccaagaccaccctgggcagcaaggtggtgaacagctgccaccggcagatggccgagattgctgtgaatgctgtgctgactgtggccgacatggagaggagagatgtggactttgagctgatcaaggtggagggcaaggtgggcggccgcctggaggacaccaagctgatcaagggcgtcatcgtggacaaggacttcagccacccccagatgcccaagaaggtggaggatgccaagatcgccatcctgacctgcccctttgagccccccaagcccaagaccaagcacaagctggatgtgacctctgtggaggactacaaggccctgcagaagtatgagaaggagaagtttgaggagatgatccagcagatcaaggagaccggggccaacctggccatctgccagtggggctttgatgatgaggccaaccacctgctgctgcagaacaacctgcctgctgtgcgctgggtgggcggccctgagattgagctgattgccatcgccaccggcggccgcatcgtgccccgcttcagcgagctgacagctgagaagctgggctttgctggcctggtgcaggagatcagctttggcaccaccaaggacaagatgctggtgattgagcagtgcaagaacagcagagctgtgaccatcttcatccggggcggcaacaagatgatcatcgaggaggccaagaggagcctgcatgatgccctgtgtgtgatccggaacctgatccgggacaacagagtggtgtatggaggaggagctgctgagatcagctgtgccctggccgtgtcccaggaggccgacaagtgccccaccctggagcagtatgccatgagggcctttgctgatgccctggaggtgatccccatggccctgtctgaaaattctggcatgaaccccatccagaccatgacagaggtgcgggcccggcaggtgaaggagatgaacccagccctgggcatcgactgcctgcacaagggcaccaatgacatgaagcagcagcacgtgattgagaccctcatcggcaagaagcagcagatcagcctggccacccagatggtgaggatgatcctgaagattgatgacatcaggaagccaggagagagcgaggagtag

SEQ ID NO: 147150 - DNA, 1563 bp, synthetic construct
  misc_feature 1..1563: note = Description of Artificial Sequence: Synthetic coding sequence
  source 1..1563: mol_type = other DNA
atgaacagcagcctgggccccaccatcgagaagctgtctgtgagccacatcatggccgccaaggctgtggccaacaccatgaggaccagcctgggccccaacggcctggacaagatgatggtggacaaggatggagatgtgacagtgaccaatgatggagccaccatcctgtccatgatggatgtggaccaccagatcgccaagctgatggtggagctgagcaagagccaggatgatgaaattggagatggcaccaccggggtggtggtgctggccggggccctgctggaggaggccgagcagctgctggaccggggcatccaccccatcagaattgctgatggctatgagcaggccgcccgggtggccatcgagcacctggacaagatcagtgacagcgtgctggtggacatcaaggacacagagcccctcatccagacagccaagaccaccctgggcagcaaggtggtgaacagctgccaccggcagatggccgagattgctgtgaatgctgtgctgactgtggccgacatggagaggagagatgtggactttgagctgatcaaggtggagggcaaggtgggcggccgcctggaggacaccaagctgatcaagggcgtcatcgtggacaaggacttcagccacccccagatgcccaagaaggtggaggatgccaagatcgccatcctgacctgcccctttgagccccccaagcccaagaccaagcacaagctggatgtgacctctgtggaggactacaaggccctgcagaagtatgagaaggagaagtttgaggagatgatccagcagatcaaggagaccggggccaacctggccatctgccagtggggctttgatgatgaggccaaccacctgctgctgcagaacaacctgcctgctgtgcgctgggtgggcggccctgagattgagctgattgccatcgccaccggcggccgcatcgtgccccgcttcagcgagctgacagctgagaagctgggctttgctggcctggtgcaggagatcagctttggcaccaccaaggacaagatgctggtgattgagcagtgcaagaacagcagagctgtgaccatcttcatccggggcggcaacaagatgatcatcgaggaggccaagaggagcctgcatgatgccctgtgtgtgatccggaacctgatccgggacaacagagtggtgtatggaggaggagctgctgagatcagctgtgccctggccgtgtcccaggaggccgacaagtgccccaccctggagcagtatgccatgagggcctttgctgatgccctggaggtgatccccatggccctgtctgaaaattctggcatgaaccccatccagaccatgacagaggtgcgggcccggcaggtgaaggagatgaacccagccctgggcatcgactgcctgcacaagggcaccaatgacatgaagcagcagcacgtgattgagaccctcatcggcaagaagcagcagatcagcctggccacccagatggtgaggatgatcctgaagattgatgacatcaggaagccaggagagagcgaggagtag

SEQ ID NO: 147151 - DNA, 1347 bp, synthetic construct
  misc_feature 1..1347: note = Description of Artificial Sequence: Synthetic coding sequence
  source 1..1347: mol_type = other DNA
atggccgccaaggctgtggccaacaccatgaggaccagcctgggccccaacgtgctggccggggccctgctggaggaggccgagcagctgctggaccggggcatccaccccatcagaattgctgatggctatgagcaggccgcccgggtggccatcgagcacctggacaagatcagtgacagcgtgctggtggacatcaaggacacagagcccctcatccagacagccaagaccaccctgggcagcaaggtggtgaacagctgccaccggcagatggccgagattgctgtgaatgctgtgctgactgtggccgacatggagaggagagatgtggactttgagctgatcaaggtggagggcaaggtgggcggccgcctggaggacaccaagctgatcaagggcgtcatcgtggacaaggacttcagccacccccagatgcccaagaaggtggaggatgccaagatcgccatcctgacctgcccctttgagccccccaagcccaagaccaagcacaagctggatgtgacctctgtggaggactacaaggccctgcagaagtatgagaaggagaagtttgaggagatgatccagcagatcaaggagaccggggccaacctggccatctgccagtggggctttgatgatgaggccaaccacctgctgctgcagaacaacctgcctgctgtgcgctgggtgggcggccctgagattgagctgattgccatcgccaccggcggccgcatcgtgccccgcttcagcgagctgacagctgagaagctgggctttgctggcctggtgcaggagatcagctttggcaccaccaaggacaagatgctggtgattgagcagtgcaagaacagcagagctgtgaccatcttcatccggggcggcaacaagatgatcatcgaggaggccaagaggagcctgcatgatgccctgtgtgtgatccggaacctgatccgggacaacagagtggtgtatggaggaggagctgctgagatcagctgtgccctggccgtgtcccaggaggccgacaagtgccccaccctggagcagtatgccatgagggcctttgctgatgccctggaggtgatccccatggccctgtctgaaaattctggcatgaaccccatccagaccatgacagaggtgcgggcccggcaggtgaaggagatgaacccagccctgggcatcgactgcctgcacaagggcaccaatgacatgaagcagcagcacgtgattgagaccctcatcggcaagaagcagcagatcagcctggccacccagatggtgaggatgatcctgaagattgatgacatcaggaagccaggagagagcgaggagtag

SEQ ID NO: 147152 - DNA, 1461 bp, synthetic construct
  misc_feature 1..1461: note = Description of Artificial Sequence: Synthetic coding sequence
  source 1..1461: mol_type = other DNA
atggcctccatgggcaccctggcctttgatgaatatggccggcccttcctgatcatcaaggaccaggacaggaagagccggctgatgggcctggaggccctgaagagccacatcatggccgccaaggctgtggccaacaccatgaggaccagcctgggccccaacgtgctggccggggccctgctggaggaggccgagcagctgctggaccggggcatccaccccatcagaattgctgatggctatgagcaggccgcccgggtggccatcgagcacctggacaagatcagtgacagcgtgctggtggacatcaaggacacagagcccctcatccagacagccaagaccaccctgggcagcaaggtggtgaacagctgccaccggcagatggccgagattgctgtgaatgctgtgctgactgtggccgacatggagaggagagatgtggactttgagctgatcaaggtggagggcaaggtgggcggccgcctggaggacaccaagctgatcaagggcgtcatcgtggacaaggacttcagccacccccagatgcccaagaaggtggaggatgccaagatcgccatcctgacctgcccctttgagccccccaagcccaagaccaagcacaagctggatgtgacctctgtggaggactacaaggccctgcagaagtatgagaaggagaagtttgaggagatgatccagcagatcaaggagaccggggccaacctggccatctgccagtggggctttgatgatgaggccaaccacctgctgctgcagaacaacctgcctgctgtgcgctgggtgggcggccctgagattgagctgattgccatcgccaccggcggccgcatcgtgccccgcttcagcgagctgacagctgagaagctgggctttgctggcctggtgcaggagatcagctttggcaccaccaaggacaagatgctggtgattgagcagtgcaagaacagcagagctgtgaccatcttcatccggggcggcaacaagatgatcatcgaggaggccaagaggagcctgcatgatgccctgtgtgtgatccggaacctgatccgggacaacagagtggtgtatggaggaggagctgctgagatcagctgtgccctggccgtgtcccaggaggccgacaagtgccccaccctggagcagtatgccatgagggcctttgctgatgccctggaggtgatccccatggccctgtctgaaaattctggcatgaaccccatccagaccatgacagaggtgcgggcccggcaggtgaaggagatgaacccagccctgggcatcgactgcctgcacaagggcaccaatgacatgaagcagcagcacgtgattgagaccctcatcggcaagaagcagcagatcagcctggccacccagatggtgaggatgatcctgaagattgatgacatcaggaagccaggagagagcgaggagtag

SEQ ID NO: 147153 - DNA, 1512 bp, synthetic construct
  misc_feature 1..1512: note = Description of Artificial Sequence: Synthetic coding sequence
  source 1..1512: mol_type = other DNA
atggccgccaaggctgtggccaacaccatgaggaccagcctgggccccaacggcctggacaagatgatggtggacaaggatggagatgtgacagtgaccaatgatggagccaccatcctgtccatgatggatgtggaccaccagatcgccaagctgatggtggagctgagcaagagccaggatgatgaaattggagatggcaccactggagtggtggtgctggccggggccctgctggaggaggccgagcagctgctggaccggggcatccaccccatcagaattgctgatggctatgagcaggccgcccgggtggccatcgagcacctggacaagatcagtgacagcgtgctggtggacatcaaggacacagagcccctcatccagacagccaagaccaccctgggcagcaaggtggtgaacagctgccaccggcagatggccgagattgctgtgaatgctgtgctgactgtggccgacatggagaggagagatgtggactttgagctgatcaaggtggagggcaaggtgggcggccgcctggaggacaccaagctgatcaagggcgtgattgtggacaaggacttcagccacccccagatgcccaagaaggtggaggatgccaagatcgccatcctgacctgcccctttgagccccccaagcccaagaccaagcacaagctggatgtgacctctgtggaggactacaaggccctgcagaagtatgagaaggagaagtttgaggagatgatccagcagatcaaggagactggagccaacctggccatctgccagtggggctttgatgatgaggccaaccacctgctgctgcagaacaacctgcctgctgtgcgctgggtgggcggccctgagattgagctgattgccatcgccactggaggaagaattgtgccccgcttcagcgagctgacagctgagaagctgggctttgctggcctggtgcaggagatcagctttggcaccaccaaggacaagatgctggtgattgagcagtgcaagaacagcagagctgtgaccatcttcatccggggcggcaacaagatgatcatcgaggaggccaagaggagcctgcatgatgccctgtgtgtgatccggaacctgatccgggacaacagagtggtgtatggaggaggagctgctgagatcagctgtgccctggccgtgtcccaggaggccgacaagtgccccaccctggagcagtatgccatgagggcctttgctgatgccctggaggtgatccccatggccctgtctgagaacagcggcatgaaccccatccagaccatgacagaggtgcgggcccggcaggtgaaggagatgaacccagccctgggcatcgactgcctgcacaagggcaccaatgacatgaagcagcagcacgtgattgagaccctgattggcaagaagcagcagatcagcctggccacccagatggtgaggatgatcctgaagattgatgacatcaggaagccaggagagagcgaggagtag

SEQ ID NO: 147154 - DNA, 1593 bp, synthetic construct
  misc_feature 1..1593: note = Description of Artificial Sequence: Synthetic coding sequence
  source 1..1593: mol_type = other DNA
atggccgccatcaaggctgtgaacagcaaggccgaggtggcccgggcccgggccgccctggccgtgaacatctgtgccgcccggggcctgcaggatgtgctgcggaccaacctgggccccaagggcaccatgaagatgctggtgtctggagctggggacatcaagctgaccaaggatggaaatgtgctgctggatgagatgcagatccagcaccccacagccagcctgattgccaaggtggccacagcccaggatgatgtgactggagatggcaccaccagcaatgtgctgatcattggagagctgctgaagcaggccgacctgtacatcagcgagggcctgcacccccgcatcatcgccgagggctttgaagctgccaagatcaaggccctggaggtgctggaggaggtgaaggtgaccaaggagatgaagaggaagatcctgctggatgtggcccggaccagcctgcagaccaaggtgcacgccgagctggctgatgtgctgacagaggtggtggtggacagcgtgctggccgtgcggcggcccggctaccccatcgacctcttcatggtggagatcatggagatgaagcacaagctgggcacagacaccaagctgatccagggcctggtgctggaccacggggcccggcacccagacatgaagaagagggtggaggatgccttcatcctgatctgcaatgtgtccctggagtatgagaagacagaggtgaacagcggcttcttctacaagacagctgaggagaaggagaagctggtgaaggccgagaggaagttcatcgaggacagagtgcagaagatcatcgacctgaaggacaaggtgtgtgcccagagcaacaagggctttgtggtgatcaaccagaagggcatcgaccccttcagcctggacagcctggccaagcacggcatcgtggccctgcggcgggccaagagaagaaacatggagcggctgagcctggcctgtggcggcatggctgtgaacagctttgaggacctgactgtggactgcctgggccatgctggcctggtgtatgagtacaccctgggggaggagaagttcaccttcattgaagaatgtgtgaacccctgcagcgtgaccctgctggtgaagggccccaacaagcacaccctgacccaggtgaaggatgccatcagagatggcctgcgggccatcaagaatgccattgaagatggctgcatggtgcctggagctggggccatcgaggtggccatggccgaggccctggtgacctacaagaacagcatcaagggccgggcccggctgggcgtgcaggcctttgctgatgccctgctgatcatccccaaggtgctggcccagaatgccggctatgacccccaggagaccctggtgaaggtgcaggccgagcacgtggagagcaagcagctggtgggcgtggacctgaacacaggagagcccatggtggccgcagatgctggggtgtgggacaactactgtgtgaagaagcagctgctgcacagctgcaccgtgattgccaccaacatcctgctggtggatgagatcatgagagctggcatgagcagcctgaagtag

SEQ ID NO: 147155 - DNA, 1482 bp, synthetic construct
  misc_feature 1..1482: note = Description of Artificial Sequence: Synthetic coding sequence
  source 1..1482: mol_type = other DNA
atggccgccatcaaggctgtgaacagcaaggccgaggtggcccgggcccgggccgccctggccgtgaacatctgtgccgcccggggcctgcaggatgtgctgcggaccaacctgggccccaagggcaccatgaagatgctggtgtctggagctggggacatcaagctgaccaaggatggaaatgtgctgctggatgagatgcagatccagcaccccacagccagcctgattgccaaggtggccacagcccaggatgatgtgactggagatggcaccaccagcaatgtgctgatcattggagagctgctgaagcaggccgacctgtacatcagcgagggcctgcacccccgcatcatcgccgagggctttgaagctgccaagatcaaggccctggaggtgctggaggaggtgaaggtgaccaaggagatgaagaggaagatcctgctggatgtggcccggaccagcctgcagaccaaggtgcacgccgagctggctgatgtgctgacagaggtggtggtggacagcgtgctggccgtgcggcggcccggctaccccatcgacctcttcatggtggagatcatggagatgaagcacaagctgggcacagacaccaaggaggtgaacagcggcttcttctacaagacagctgaggagaaggagaagctggtgaaggccgagaggaagttcattgaagatagagtgcagaagatcatcgacctgaaggacaaggtgtgtgcccagagcaacaagggctttgtggtgatcaaccagaagggcatcgaccccttcagcctggacagcctggccaagcatggaattgtggccctgcggcgggccaagagaagaaacatggagcggctgagcctggcctgtggcggcatggctgtgaacagctttgaggacctgactgtggactgcctgggccacgccggcctggtgtatgagtacaccctgggggaggagaagttcaccttcatcgaggagtgtgtgaacccctgcagcgtgaccctgctggtgaagggccccaacaagcacaccctgacccaggtgaaggatgccatcagagatggcctgcgggccatcaagaatgccattgaagatggctgcatggtgcctggggccggggccatcgaggtggccatggccgaggccctggtgacctacaagaacagcatcaagggccgggcccggctgggcgtgcaggcctttgctgatgccctgctgatcatccccaaggtgctggcccagaatgccggctatgacccccaggagaccctggtgaaggtgcaggccgagcacgtggagagcaagcagctggtgggcgtggacctgaacacaggagagcccatggtggccgcagatgctggggtgtgggacaactactgtgtgaagaagcagctgctgcacagctgcaccgtcatcgccaccaacatcctgctggtggatgagatcatgagagctggcatgagcagcctgaagtag

SEQ ID NO: 147156 - DNA, 1458 bp, synthetic construct
  misc_feature 1..1458: note = Description of Artificial Sequence: Synthetic coding sequence
  source 1..1458: mol_type = other DNA
atggccgccatcaaggctgtgaacagcaaggccgaggtggcccgggcccgggccgccctggccgtgaacatctgtgccgcccggggcctgcaggatgtgctgcggaccaacctgggccccaagggcaccatgaagatgctggtgtctggagctggggacatcaagctgaccaaggatggaaatgtgctgctggatgagatgggcctgcacccccgcatcatcgccgagggctttgaggccgccaagatcaaggccctggaggtgctggaggaggtgaaggtgaccaaggagatgaagaggaagatcctgctggatgtggcccggaccagcctgcagaccaaggtgcatgctgagctggctgatgtgctgacagaggtggtggtggacagcgtgctggccgtgagaagacctggctaccccatcgacctcttcatggtggagatcatggagatgaagcacaagctgggcacagacaccaagctgatccagggcctggtgctggaccatggagcccggcacccagacatgaagaagagggtggaggatgccttcatcctgatctgcaatgtgtccctggagtatgagaagacagaggtgaacagcggcttcttctacaagacagctgaggagaaggagaagctggtgaaggccgagaggaagttcattgaagatagagtgcagaagatcatcgacctgaaggacaaggtgtgtgcccagagcaacaagggctttgtggtgatcaaccagaagggcatcgaccccttcagcctggacagcctggccaagcatggaattgtggccctgcggcgggccaagagaagaaacatggagcggctgagcctggcctgtggcggcatggctgtgaacagctttgaggacctgactgtggactgcctgggccacgccggcctggtgtatgagtacaccctgggggaggagaagttcaccttcatcgaggagtgtgtgaacccctgcagcgtgaccctgctggtgaagggccccaacaagcacaccctgacccaggtgaaggatgccatcagagatggcctgcgggccatcaagaatgccattgaagatggctgcatggtgcctggggccggggccatcgaggtggccatggccgaggccctggtgacctacaagaacagcatcaagggccgggcccggctgggcgtgcaggcctttgctgatgccctgctgatcatccccaaggtgctggcccagaatgccggctatgacccccaggagaccctggtgaaggtgcaggccgagcacgtggagagcaagcagctggtgggcgtggacctgaacacaggagagcccatggtggccgcagatgctggggtgtgggacaactactgtgtgaagaagcagctgctgcacagctgcaccgtcatcgccaccaacatcctgctggtggatgagatcatgagagctggcatgagcagcctgaagtag

SEQ ID NO: 147157 - DNA, 966 bp, synthetic construct
  misc_feature 1..966: note = Description of Artificial Sequence: Synthetic coding sequence
  source 1..966: mol_type = other DNA
atgaagccaggcttcagcccccggggcggcggctttggaggccggggcggctttggagaccggggcggccggggcggccggggcggctttggaggcggccggggccggggcggcggcttccggggccggggccggggcggcggcggcggcggcggcggcggcggcggcggcggccggggcggcggcggcttccacagcggcggcaacagaggccggggccggggcggcaagaggggcaaccagagcggcaagaatgtgatggtggagccccacagacatgaaggagtcttcatctgccggggcaaggaggatgccctggtgaccaagaacctggtgcctggagagagcgtgtatggagagaagagggtgtccatcagtgaaggagatgacaagattgagtaccgggcctggaaccccttccgcagcaagctggccgccgccatcctgggcggcgtggaccagatccacatcaagccaggggccaaggtgctgtacctgggcgccgccagcggcaccaccgtgagccacgtgtctgacatcgtgggcccagatggcctggtgtatgctgtggagttcagccacaggagcggccgggacctgatcaacctggccaagaagaggaccaacatcatccctgtgattgaagatgcccggcacccccacaagtacaggatgctgattgccatggtggatgtgatctttgctgatgtggcccagcctgaccagaccagaattgtggccctgaatgcccacaccttcctgagaaatggaggccacttcgtcatcagcatcaaggccaactgcatcgacagcacagccagcgctgaggccgtgtttgccagcgaggtgaagaagatgcagcaggagaacatgaagccccaggagcagctgaccctggagccctatgaaagagaccatgctgtggtggtgggcgtgtacagacctccacccaaggtgaagaactag

SEQ ID NO: 147158 - DNA, 723 bp, synthetic construct
  misc_feature 1..723: note = Description of Artificial Sequence: Synthetic coding sequence
  source 1..723: mol_type = other DNA
atggatgtgcacggggaggccgccggggaggccggccaggagggcggggagggcctgcagggcggggccggccagagcgaggagggccccagcgctgagaagtgccgggtgtgcccctgtgtgtgccgggagcggcacccccaggaggagcggcgctgtgagctggccagtgatggagtgcccaggagaagaagtggcctgcagggcgctgacagctgtgactatgaaggaggagaccaggagtatggccctggggaccagagccctggccagggccctgagcaccacggccctgctgagggcctgctgagtgatggccaggtgcgggctgctggagctgagcccggccggccctacatcggagatggcggcctgcacgagctgggccaccacccagaccatgctgctggggccggcggccagccccaccacgccgacagaagaggagagtggccaggaggagctggccctgcccagcctgctgcccggggccgcctgtgccggggccgggagctgtgtgcccagcccggcggccctgctgtgacagaggtgggccgcctggaggagctggccgtgccccggcgctgtgccccacccctgcccagagatgtgctggagggcagctgccccctgcccacagccagctgcctgtgtgccgaccctgctggcctgcggcctgctgccaccctgcggctgagccctgcccggcctgcctggccctag

SEQ ID NO: 147159 - DNA, 591 bp, synthetic construct
  misc_feature 1..591: note = Description of Artificial Sequence: Synthetic coding sequence
  source 1..591: mol_type = other DNA
atggatgacaccctcttccagctgaagttcaccgccaagcagctggagaagctggccaagaaggccgagaaggacagcaaggccgagcaggccaaggtgaagaaggccctgctgcagaagaatgtggagtgtgcccgggtgtatgcagaaaatgccatcaggaagaagaatgaaggagtgaactggctgaggatggccagccgggtggatgctgtggccagcaaggtgcagacagctgtgaccatgaagggcgtgaccaagaacatggcccaggtgaccaaggccctggacaaggccctgagcaccatggacctgcagaaggtgtcctctgtgatggacagatttgagcagcaggtgcagaacctggatgtgcacacctctgtgatggaggacagcatgagcagcgccaccaccctgaccaccccccaggagcaggtggacagcctcatcatgcagattgctgaggagaatggcctggaggtgctggaccagctgagccagctgcctgagggcgccagcgctgtgggggagagctctgtgcgcagccaggaggaccagctgagccggcggctggccgccctgagaaattag

SEQ ID NO: 147160 - DNA, 600 bp, synthetic construct
  misc_feature 1..600: note = Description of Artificial Sequence: Synthetic coding sequence
  source 1..600: mol_type = other DNA
atgagcaacatggagaagcacctgttcaacctgaagtttgctgccaaggagctgagccgcagcgccaagaagtgtgacaaggaggagaaggccgagaaggccaagatcaagaaggccatccagaagggcaacatggaggtggcccgcatccacgcagaaaatgccatccggcagaagaaccaggccgtgaacttcctgaggatgtctgcccgggtggatgctgtggccgcccgggtgcagacagctgtgaccatgggcaaggtgaccaagtccatggccggcgtggtgaagtccatggatgccaccctgaagaccatgaacctggagaagatcagcgccctgatggacaagtttgagcaccagtttgagaccctggatgtgcagacccagcagatggaggacaccatgagcagcaccaccaccctgaccaccccccagaaccaggtggacatgctgctgcaggagatggctgatgaggccggcctggacctgaacatggagctgccccagggccagacaggctctgtgggcacctctgtggccagcgctgagcaggatgagctgagccagaggctggcccggctgcgggaccaggtgtag

SEQ ID NO: 147161 - DNA, 669 bp, synthetic construct
  misc_feature 1..669: note = Description of Artificial Sequence: Synthetic coding sequence
  source 1..669: mol_type = other DNA
atggacctgctgtttggaagaaggaagaccccagaggagctgctgcggcagaaccagagggccctgaacagagccatgagggagctggaccgggagcggcagaagctggagacccaggagaagaagatcatcgctgacatcaagaagatggccaagcagggccagatggatgctgtgcgcatcatggccaaggacctggtgaggacccggcgctacgtgaggaagtttgtgctgatgagggccaacatccaggccgtgtccctgaagatccagaccctgaagagcaacaacagcatggcccaggccatgaagggcgtgaccaaggccatgggcaccatgaaccggcagctgaagctgccccagatccagaagatcatgatggagtttgagcggcaggccgagatcatggacatgaaggaggagatgatgaatgatgccattgatgatgccatgggagatgaagaagatgaggaggagagtgatgctgtggtgtcccaggtgctggatgagctgggcctgagcctgacagatgagctgagcaacctgcccagcactggaggcagcctgtctgtggccgccggcggcaagaaggccgaggccgccgccagcgccctggctgatgctgatgctgacctggaggagcggctgaagaacctgcggcgggactag

SEQ ID NO: 147162 - DNA, 669 bp, synthetic construct; identical to SEQ ID NO: 147161
  misc_feature 1..669: note = Description of Artificial Sequence: Synthetic coding sequence
  source 1..669: mol_type = other DNA

SEQ ID NO: 147163 - DNA, 642 bp, synthetic construct
  misc_feature 1..642: note = Description of Artificial Sequence: Synthetic coding sequence
  source 1..642: mol_type = other DNA
atggccagcctcttcaagaagaagacagtggatgatgtgatcaaggagcagaaccgggagctgcggggcacccagagggccatcatccgggacagagctgccctggagaagcaggagaagcagctggagctggagatcaagaagatggccaagattggcaacaaggaggcctgcaaggtgctggccaagcagctggtgcacctgaggaagcagaagaccaggacctttgctgtgagcagcaaggtgacctccatgagcacccagaccaaggtgatgaacagccagatgaagatggccggggccatgagcaccacagccaagaccatgcaggccgtgaacaagaagatggacccccagaagaccctgcagaccatgcagaacttccagaaggagaacatgaagatggagatgacagaggagatgatcaatgacaccctggatgacatctttgatggcagtgatgatgaggaggagagccaggacatcgtgaaccaggtgctggatgagatcggcatcgagatcagcggcaagatggccaaggcccccagcgctgcccggagcctgcccagcgccagcaccagcaaggccaccatcagtgatgaggagattgagcggcagctgaaggccctgggcgtggactag

SEQ ID NO: 147164 - DNA, 519 bp, synthetic construct
  misc_feature 1..519: note = Description of Artificial Sequence: Synthetic coding sequence
  source 1..519: mol_type = other DNA
atggagctggagatcaagaagatggccaagattggcaacaaggaggcctgcaaggtgctggccaagcagctggtgcacctgaggaagcagaagaccaggacctttgctgtgagcagcaaggtgacctccatgagcacccagaccaaggtgatgaacagccagatgaagatggccggggccatgagcaccacagccaagaccatgcaggccgtgaacaagaagatggacccccagaagaccctgcagaccatgcagaacttccagaaggagaacatgaagatggagatgacagaggagatgatcaatgacaccctggatgacatctttgatggcagtgatgatgaggaggagagccaggacatcgtgaaccaggtgctggatgaaattggaattgagatcagcggcaagatggccaaggcccccagcgctgcccggagcctgcccagcgccagcaccagcaaggccaccatcagtgatgaggagattgaaaggcagctgaaggccctgggcgtggactag

SEQ ID NO: 147165 - DNA, 669 bp, synthetic construct
  misc_feature 1..669: note = Description of Artificial Sequence: Synthetic coding sequence
  source 1..669: mol_type = other DNA
atgggcctgtttgggaagacccaggagaagccacccaaggagctggtgaatgagtggagcctgaagatcaggaaggagatgagggtggtggaccggcagatccgggacatccagcgggaggaggagaaggtgaagaggtctgtgaaggatgctgccaagaagggccagaaggatgtgtgcatcgtgctggccaaggagatgatccgcagcaggaaggctgtgtccaagctgtatgccagcaaggcccacatgaacagcgtgctgatgggcatgaagaaccagctggccgtgctgcgggtggccggcagcctgcagaagagcacagaggtgatgaaggccatgcagagcctggtgaagatccctgagatccaggccaccatgagggagctgagcaaggagatgatgaaggccggcatcatcgaggagatgctggaggacacctttgagagcatggatgaccaggaggagatggaggaggaggccgagatggagattgaccgcatcctgtttgagatcacagctggggccctgggcaaggcccccagcaaggtgacagatgccctgcctgagcctgagcccccaggggccatggccgcctctgaagatgaggaggaggaggaggaggccctggaggccatgcagagccggctggccaccctgcggagctag

SEQ ID NO: 147166 - DNA, 471 bp, synthetic construct
  misc_feature 1..471: note = Description of Artificial Sequence: Synthetic coding sequence
  source 1..471: mol_type = other DNA
atgatccgcagcaggaaggctgtgtccaagctgtatgccagcaaggcccacatgaacagcgtgctgatgggcatgaagaaccagctggccgtgctgcgggtggccggcagcctgcagaagagcacagaggtgatgaaggccatgcagagcctggtgaagatccctgagatccaggccaccatgagggagctgagcaaggagatgatgaaggccggcatcatcgaggagatgctggaggacacctttgagagcatggatgaccaggaggagatggaggaggaggccgagatggagattgaccgcatcctgtttgagatcacagctggggccctgggcaaggcccccagcaaggtgacagatgccctgcctgagcctgagcccccaggggccatggccgcctctgaagatgaggaggaggaggaggaggccctggaggccatgcagagccggctggccaccctgcggagctag

SEQ ID NO: 147167 - DNA, 756 bp, synthetic construct
  misc_feature 1..756: note = Description of Artificial Sequence: Synthetic coding sequence
  source 1..756: mol_type = other DNA
atggagggggagctgtacagcgccctgaaggaggaggaggccagcgagagcgtgagcagcaccaacttcagcggggagatgcacttctatgagctggtggaggacaccaaggatggcatctggctggtgcaggtgaatgagtggagcctgaagatcaggaaggagatgagggtggtggaccggcagatccgggacatccagcgggaggaggagaaggtgaagaggtctgtgaaggatgctgccaagaagggccagaaggatgtgtgcatcgtgctggccaaggagatgatccgcagcaggaaggctgtgtccaagctgtatgccagcaaggcccacatgaacagcgtgctgatgggcatgaagaaccagctggccgtgctgcgggtggccggcagcctgcagaagagcacagaggtgatgaaggccatgcagagcctggtgaagatccctgagatccaggccaccatgagggagctgagcaaggagatgatgaaggccggcatcatcgaggagatgctggaggacacctttgagagcatggatgaccaggaggagatggaggaggaggccgagatggagattgaccgcatcctgtttgagatcacagctggggccctgggcaaggcccccagcaaggtgacagatgccctgcctgagcctgagcccccaggggccatggccgcctctgaagatgaggaggaggaggaggaggccctggaggccatgcagagccggctggccaccctgcggagctag

SEQ ID NO: 147168 - DNA, 549 bp, synthetic construct
  misc_feature 1..549: note = Description of Artificial Sequence: Synthetic coding sequence
  source 1..549: mol_type = other DNA
atgggcctgtttgggaagacccaggagaagccacccaaggagctggtgaatgagtggagcctgaagatcaggaaggagatgagggtggtggaccggcagatccgggacatccagcgggaggaggagaaggtgaagaggtctgtgaaggatgctgccaagaagggccagaaggatgtgtgcatcgtgctggccaaggagatgatccgcagcaggaaggccatgcagagcctggtgaagatccctgagatccaggccaccatgagggagctgagcaaggagatgatgaaggccggcatcatcgaggagatgctggaggacacctttgagagcatggatgaccaggaggagatggaggaggaggccgagatggagattgaccgcatcctgtttgagatcacagctggggccctgggcaaggcccccagcaaggtgacagatgccctgcctgagcctgagcccccaggggccatggccgcctctgaagatgaggaggaggaggaggaggccctggaggccatgcagagccggctggccaccctgcggagctag

SEQ ID NO: 147169 - DNA, 798 bp, synthetic construct
  misc_feature 1..798: note = Description of Artificial Sequence: Synthetic coding sequence
  source 1..798: mol_type = other DNA
atgagcagaagaagaccagaagatggcctgggcaaggccggcccctgtgtgatgaggcaccacccccccaggagcaaggccgaggtgtggaggaccctgcggggcggcggcggccgcggggagctggccatgagcggcctgggccgcctgtttgggaagggcaagaaggagaagggccccaccccagaggaggccatccagaagctgaaggagacagagaagatcctgatcaagaagcaggagttcctggagcagaagatccagcaggagctgcagacagccaagaagtatggcaccaagaacaagagagctgccctgcaggccctgcggaggaagaagagatttgagcagcagctggcccagacagatggcaccctgagcaccctggagttccagcgggaggccattgaaaatgccaccaccaatgctgaggtgctgcggaccatggagctggccgcccagagcatgaagaaggcctaccaggacatggacatcgacaaggtggatgagctgatgacagacatcacagagcagcaggaggtggcccagcagatcagtgatgccatcagccggcccatgggctttggagatgatgtggatgaagatgagctgctggaggagctggaggagctggagcaggaggagctggcccaggagctgctgaatgtgggggacaaggaggaggagcccagcgtgaagctgcccagcgtgcccagcacccacctgcctgctggccctgcccccaaggtggatgaagatgaggaggccctgaagcagctggccgagtgggtgtcctag

SEQ ID NO: 147170 - DNA, 378 bp, synthetic construct
  misc_feature 1..378: note = Description of Artificial Sequence: Synthetic coding sequence
  source 1..378: mol_type = other DNA
atggccggccccagcctggcctgctgcctgctgggcctgctggccctgaccagcgcctgctacatccagaactgccccctgggcggcaagagagctgccccagacctggatgtgaggaagtgcctgccctgtggccctgggggcaagggccgctgcttcggccccaacatctgctgtgccgaggagctgggctgctttgtgggcacagctgaggccctgcgctgccaggaggagaactacctgcccagcccctgccagagcggccagaaggcctgtggcagcggcggccgctgtgctgtgctgggcctgtgctgcagcccagatggctgccacgccgaccctgcctgtgatgctgaggccaccttcagccagaggtag

SEQ ID NO: 147171 - DNA, 831 bp, synthetic construct
  misc_feature 1..831: note = Description of Artificial Sequence: Synthetic coding sequence
  source 1..831: mol_type = other DNA
atggcccctcctccagcccccctgctggcccccaggcctggagagacccggcccggctgcaggaagccaggcaccgtgtcctttgctgatgtggccgtgtacttcagccctgaggagtggggctgcctgcggcctgcccagagggccctgtacagagatgtgatgcaggagacctacggccacctgggcgccctgggcttccctggccccaagccagccctgatctcctggatggagcaggagagcgaggcctggagccctgctgcccaggaccctgagaagggggagcggctgggcggggccaggagaggagatgtgcccaacaggaaggaggaggagcctgaggaggtgccccgggccaagggccccaggaaggcccctgtgaaggagagccctgaggtgctggtggagaggaacccagaccctgccatctctgtggccccagcccgggcccagccccccaagaatgctgcctgggaccccaccactggagcccagcccccagcccccatccccagcatggatgcccaggccggccagaggagacatgtgtgcacagactgtggccgccgcttcacctaccccagcctgctggtgagccacaggaggatgcacagcggggagcggcccttcccctgcccagaatgtggcatgaggttcaagaggaagtttgctgtggaggcccaccagtggatccacaggagctgcagcggcggccggcggggcagaagacctggcatccgggctgtgccccgggcccctgtgcggggggaccgggacccccctgtgctcttccgccactacccagacatctttgaggagtgtggctag

SEQ ID NO: 147172 - DNA, 516 bp, synthetic construct
  misc_feature 1..516: note = Description of Artificial Sequence: Synthetic coding sequence
  source 1..516: mol_type = other DNA
atgaaccggctgtttgggaaggccaagcccaaggcccccccacccagcctgacagactgcattggaacagtggacagcagagctgagagcattgacaagaagatcagccggctggatgctgagctggtgaagtacaaggaccagatcaagaagatgagggagggccctgccaagaacatggtgaagcagaaggccctgcgggtgctgaagcagaagaggatgtatgagcagcagagggacaacctggcccagcagagcttcaacatggagcaggccaactacaccatccagagcctgaaggacaccaagaccaccgtggatgccatgaagctgggcgtgaaggagatgaagaaggcctacaagcaggtgaagattgaccagatcgaggacctgcaggaccagctggaggacatgatggaggatgccaatgagatccaggaggccctgagccgctcctatggcaccccagagctggatgaagatgacctggaggccggctggagcagcggcggctag

SEQ ID NO: 147173 - DNA, 606 bp, synthetic construct
  misc_feature 1..606: note = Description of Artificial Sequence: Synthetic coding sequence
  source 1..606: mol_type = other DNA
atgggcaacctgtttggaaggaagaagcagagccgggtgacagagcaggacaaggccatcctgcagctgaagcagcagagggacaagctgcggcagtaccagaagagaattgcccagcagctggagcgggagcgggccctggcccggcagctgctgagagatggcaggaaggagcgggccaagctgctgctgaagaagaagcgctaccaggagcagctgctggacagaacagagaaccagatcagcagcctggaggccatggtgcagagcattgagttcacccagatcgagatgaaggtgatggagggcctgcagtttggaaatgaatgtctgaacaagatgcaccaggtgatgagcattgaggaggtggagcgcatcctggatgagacccaggaggccgtggagtaccagaggcagattgatgagctgctggccggcagcttcacccaggaggatgaagatgccatcctggaggagctgagcgccatcacccaggagcagatcgagctgcctgaggtgcccagcgagcccctgcctgagaagatcccagaaaatgtgcctgtgaaggcccggccccggcaggccgagctggtggccgccagctag

SEQ ID NO: 147174 - DNA, 1362 bp, synthetic construct
  misc_feature 1..1362: note = Description of Artificial Sequence: Synthetic coding sequence
  source 1..1362: mol_type = other DNA
atgtggagccctgagcgggaggccgaggccccagctggaggagaccctgctggcctgctgcccccagagtgggaggaggatgaggagaggatgtccttcctgttcagcgccttcaagaggagccgggaggtgaacagcacagactgggacagcaagatgggcttctgggcccccctggtgctgagccacagccggcggcagggcgtggtgcggctgcggctgcgggacctgcaggaggccttccagaggaagggctctgtgcccctgggcctggccaccgtgctgcaggacctgctgcggcggggggagctgcagcgggagagtgacttcatggcctctgtggacagctcctggatctcctggggcgtgggcgtcttcctgctgaagcccctgaagtggaccctgagcaacatgctgggggacaacaaggtgcctgctgaggaggtgctggtggccgtggagctgctgaaggagaaggccgaggaggtgtaccgcctgtaccagaacagccccctgagcagccaccctgtggtggccctgtctgagctgagcaccctgtgtgccaacagctgcccagatgagaggaccttctacctggtgctgctgcagctgcagaaggagaagagggtgacagtgctggagcagaatggagagaagatcgtgaagtttgcccggggcccccgggccaaggtgtcccctgtgaatgatgtggatgtgggcgtgtaccagctgatgcagagcgagcagctgctgagcaggaaggtggagagcctgagccaggaggccgagcgctgcaaggaggaggcccggcgggcctgcagagctgggaagaagcagctggccctgcggagcctgaaggccaagcagaggacagagaagagaattgaggccctgcacgccaagctggacacagtgcagggcatcctggaccgcatctatgccagccagacagaccagatggtgttcaatgcctaccaggccggcgtgggcgccctgaagctgtccatgaaggatgtgacagtggagaaggccgagagcctggtggaccagatccaggagctgtgtgacacccaggatgaggtgtcccagaccctggccggcggcgtgaccaacggcctggactttgattctgaggagctggagaaggagctggacatcctgctgcaggacaccaccaaggagcccctggacctgcctgacaaccccaggaacagacacttcaccaacagcgtgcccaacccccgcatcagtgatgctgagctggaggccgagctggagaagctgagcctgtctgagggcggcctggtgcccagcagcaagagccccaagaggcagctggagcccaccctgaagcccctgtag

SEQ ID NO: 147175 - DNA, 1362 bp, synthetic construct; identical to SEQ ID NO: 147174
  misc_feature 1..1362: note = Description of Artificial Sequence: Synthetic coding sequence
  source 1..1362: mol_type = other DNA

SEQ ID NO: 147176 - DNA, 1992 bp, synthetic construct
  misc_feature 1..1992: note = Description of Artificial Sequence: Synthetic coding sequence
  source 1..1992: mol_type = other DNA
atggagaggcctgaggagggcaagcagagccccccaccccagccctggggccgcctgctgcggctgggcgctgaggagggggagccccacgtgctgctgaggaagcgggagtggaccatcggcagaagaagaggctgtgacctgtccttccccagcaacaagctggtgtctggggaccactgcagaattgtggtggatgagaagagcggccaggtgaccctggaggacaccagcaccagcggcaccgtcatcaacaagctgaaggtggtgaagaagcagacctgccccctgcagacaggagatgtgatctacctggtgtacaggaagaatgaacctgagcacaacgtggcctacctgtatgagagcctgtctgagaagcagggcatgacccaggagagctttgaggccaacaaggaaaatgtgttccacggcaccaaggacaccagcggggccggggccggcagaggagctgacccccgggtgccccccagcagccctgccacccaggtgtgctttgaggagccccagcccagcaccagcaccagtgacctcttccccacagccagcgccagcagcacagagcccagccctgctggccgggagaggagcagcagctgtggcagcggcggcggcggcatcagccccaagggcagcggccccagcgtggccagtgatgaggtgtcctcctttgccagcgccctgcctgacaggaagacagccagcttcagcagcctggagccccaggaccaggaggacctggagcctgtgaagaagaagatgagaggagatggagacctggacctgaatggccagctgctggtggcccagcccaggagaaatgcccagacagtgcatgaagatgtgcgggctgctgctgggaagccagacaagatggaggagaccctgacctgcatcatctgccaggacctgctgcatgactgtgtgtccctgcagccctgcatgcacaccttctgtgccgcctgctacagcggctggatggagaggagcagcctgtgccccacctgccgctgccctgtggagcgcatctgcaagaaccacatcctgaacaacctggtggaggcctacctgatccagcaccctggcaacagccgctctgaggaggatgtgcagagcatggatgccaggaacaagatcacccaggacatgctgcagcccaaggtgagaagaagcttcagtgatgaggagggcagcagcgaggacctgctggagctgagtgatgtggacagcgagagcagtgacatcagccagccctacgtggtgtgccggcagtgcccagagtaccgccggcaggccgcccagcccccccactgcccagcccctgagggggagcccggggccccccaggccctgggagatgcccccagcacctctgtgtccctgaccaccgtgcaggactatgtgtgccccctgcagggcagccacgccctgtgcacctgctgcttccagcccatgccagaccggcgggcagagcgggagcaggacccccgggtggccccccagcagtgtgctgtgtgcctgcagcccttctgccacctgtactggggctgcaccaggacaggctgctacggctgcctggcccccttctgtgagctgaacctgggggacaagtgcctggatggagtgctgaacaacaacagctatgaaagtgacatcctgaagaactacctggccacccggggcctgacctggaagaacatgctgacagagagcctggtggccctgcagaggggcgtcttcctgctgagtgactacagagtgactggagacacagtgctgtgctactgctgcggcctgcgctccttccgggagctgacctaccagtaccggcagaacatcccagccagcgagctgcctgtggccgtgaccagcaggccagactgctactggggcaggaactgcaggacccaggtgaaggcccaccacgccatgaagttcaaccacatctgtgagcagacccgcttcaagaactag

SEQ ID NO: 147177 - DNA, 1872 bp, synthetic construct
  misc_feature 1..1872: note = Description of Artificial Sequence: Synthetic coding sequence
  source 1..1872: mol_type = other DNA
atggagaggcctgaggagggcaagcagagccccccaccccagccctggggccgcctgctgcggctgggcgctgaggagggggagccccacgtgctgctgaggaagcgggagtggaccatcggcagaagaagaggctgtgacctgtccttccccagcaacaagctggtgtctggggaccactgcagaattgtggtggatgagaagagcggccaggtgaccctggaggacaccagcaccagcggcaccgtcatcaacaagctgaaggtggtgaagaagcagacctgccccctgcagacaggagatgtgatctacctggtgtacaggaagaatgaacctgagcacaacgtggcctacctgtatgagagcctgtctgagaagcagggcatgacccaggagagctttgagatggtgccctgctgcgtggcccaggccggcctgaagctgctgggcagcagtgacccccccaccctggccagccagagcatcgtcatcactggaagtggcggcggcggcatcagccccaagggcagcggccccagcgtggccagtgatgaggtgagcagctttgccagcgccctgcctgacaggaagacagccagcttcagcagcctggagccccaggaccaggaggacctggagcctgtgaagaagaagatgagaggagatggagacctggacctgaatggccagctgctggtggcccagcccaggagaaatgcccagacagtgcatgaagatgtgcgggctgctgctgggaagccagacaagatggaggagaccctgacctgcatcatctgccaggacctgctgcatgactgtgtgtccctgcagccctgcatgcacaccttctgtgccgcctgctacagcggctggatggagaggagcagcctgtgccccacctgccgctgccctgtggagcgcatctgcaagaaccacatcctgaacaacctggtggaggcctacctgatccagcacccagacaagagccgctcagaagaagatgtgcagagcatggatgccaggaacaagatcacccaggacatgctgcagcccaaggtgcggcgctccttcagtgatgaggagggcagcagcgaggacctgctggagctgagtgatgtggacagcgagagcagtgacatcagccagccctacgtggtgtgccggcagtgcccagagtaccgccggcaggccgcccagcccccccactgcccagcccctgagggggagcccggggccccccaggccctgggagatgcccccagcacctctgtgtccctgaccacagctgtgcaggactatgtgtgccccctgcagggcagccacgccctgtgcacctgctgcttccagcccatgccagaccggcgggcagagcgggagcaggacccccgggtggccccccagcagtgtgctgtgtgcctgcagcccttctgccacctgtactggggctgcaccaggacaggctgctacggctgcctggcccccttctgtgagctgaacctgggggacaagtgcctggatggagtgctgaacaacaacagctatgaaagtgacatcctgaagaactacctggccacccggggcctgacctggaagaacatgctgacagagagcctggtggccctgcagaggggcgtcttcctgctgagtgactacagagtgactggagacacagtgctgtgctactgctgcggcctgcgctccttccgggagctgacctaccagtaccggcagaacatcccagccagcgagctgcctgtggccgtgaccagcaggccagactgctactggggcaggaactgcaggacccaggtgaaggcccaccacgccatgaagttcaaccacatctgtgagcagacccgcttcaagaactag

SEQ ID NO: 147178 - DNA, 1995 bp, synthetic construct
  misc_feature 1..1995: note = Description of Artificial Sequence: Synthetic coding sequence
  source 1..1995: mol_type = other DNA
atggagaggcctgaggagggcaagcagagccccccaccccagccctggggccgcctgctgcggctgggcgctgaggagggggagccccacgtgctgctgaggaagcgggagtggaccatcggcagaagaagaggctgtgacctgtccttccccagcaacaagctggtgtctggggaccactgcagaattgtggtggatgagaagagcggccaggtgaccctggaggacaccagcaccagcggcaccgtcatcaacaagctgaaggtggtgaagaagcagacctgccccctgcagacaggagatgtgatctacctggtgtacaggaagaatgaacctgagcacaacgtggcctacctgtatgagagcctgtctgagaagcagggcatgacccaggagagctttgaggccaacaaggaaaatgtgttccacggcaccaaggacaccagcggggccggggccggcagaggagctgacccccgggtgccccccagcagccctgccacccaggtgtgctttgaggagccccagcccagcaccagcaccagtgacctcttccccacagccagcgccagcagcacagagcccagccctgctggccgggagaggagcagcagctgtggcagcggcggcggcggcatcagccccaagggcagcggccccagcgtggccagtgatgaggtgtcctcctttgccagcgccctgcctgacaggaagacagccagcttcagcagcctggagccccaggaccaggaggacctggagcctgtgaagaagaagatgagaggagatggagacctggacctgaatggccagctgctggtggcccagcccaggagaaatgcccagacagtgcatgaagatgtgcgggctgctgctgggaagccagacaagatggaggagaccctgacctgcatcatctgccaggacctgctgcatgactgtgtgtccctgcagccctgcatgcacaccttctgtgccgcctgctacagcggctggatggagaggagcagcctgtgccccacctgccgctgccctgtggagcgcatctgcaagaaccacatcctgaacaacctggtggaggcctacctgatccagcacccagacaagagccgctctgaggaggatgtgcagagcatggatgccaggaacaagatcacccaggacatgctgcagcccaaggtgagaagaagcttcagtgatgaggagggcagcagcgaggacctgctggagctgagtgatgtggacagcgagagcagtgacatcagccagccctacgtggtgtgccggcagtgcccagagtaccgccggcaggccgcccagcccccccactgcccagcccctgagggggagcccggggccccccaggccctgggagatgcccccagcacctctgtgtccctgaccacagctgtgcaggactatgtgtgccccctgcagggcagccacgccctgtgcacctgctgcttccagcccatgccagacagaagagctgagcgggagcaggacccccgggtggccccccagcagtgtgctgtgtgcctgcagcccttctgccacctgtactggggctgcaccaggacaggctgctacggctgcctggcccccttctgtgagctgaacctgggggacaagtgcctggatggagtgctgaacaacaacagctatgaaagtgacatcctgaagaactacctggccacccggggcctgacctggaagaacatgctgacagagagcctggtggccctgcagaggggcgtcttcctgctgagtgactacagagtgactggagacacagtgctgtgctactgctgcggcctgcggagcttccgggagctgacctaccagtaccggcagaacatcccagccagcgagctgcctgtggccgtgaccagcaggccagactgctactggggcaggaactgcaggacccaggtgaaggcccaccacgccatgaagttcaaccacatctgtgagcagacccgcttcaagaactag

SEQ ID NO: 147179 - DNA, 1959 bp, synthetic construct
  misc_feature 1..1959: note = Description of Artificial Sequence: Synthetic coding sequence
  source 1..1959: mol_type = other DNA
atggagaggcctgaggagggcaagcagagccccccaccccagccctggggccgcctgctgcggctgggcgctgaggagggggagccccacgtgctgctgaggaagcgggagtggaccatcggcagaagaagaggctgtgacctgtccttccccagcaacaagctggtgtctggggaccactgcagaattgtggtggatgagaagagcggccaggtgaccctggaggacaccagcaccagcggcaccgtcatcaacaagctgaaggtggtgaagaagcagacctgccccctgcagacaggagatgtgatctacctggtgtacaggaagaatgaacctgagcacaacgtggcctacctgtatgagagcctgtctgagaagcagggcatgacccaggagagctttgacaccagcggggccggggccggcagaggagctgacccccgggtgccccccagcagccctgccacccaggtgtgctttgaggagccccagcccagcaccagcaccagtgacctcttccccacagccagcgccagcagcacagagcccagccctgctggccgggagaggagcagcagctgtggcagcggcggcggcggcatcagccccaagggcagcggccccagcgtggccagtgatgaggtgtcctcctttgccagcgccctgcctgacaggaagacagccagcttcagcagcctggagccccaggaccaggaggacctggagcctgtgaagaagaagatgagaggagatggagacctggacctgaatggccagctgctggtggcccagcccaggagaaatgcccagacagtgcatgaagatgtgcgggctgctgctgggaagccagacaagatggaggagaccctgacctgcatcatctgccaggacctgctgcatgactgtgtgtccctgcagccctgcatgcacaccttctgtgccgcctgctacagcggctggatggagaggagcagcctgtgccccacctgccgctgccctgtggagcgcatctgcaagaaccacatcctgaacaacctggtggaggcctacctgatccagcacccagacaagagccgctctgaggaggatgtgcagagcatggatgccaggaacaagatcacccaggacatgctgcagcccaaggtgagaagaagcttcagtgatgaggagggcagcagcgaggacctgctggagctgagtgatgtggacagcgagagcagtgacatcagccagccctacgtggtgtgccggcagtgcccagagtaccgccggcaggccgcccagcccccccactgcccagcccctgagggggagcccggggccccccaggccctgggagatgcccccagcacctctgtgtccctgaccacagctgtgcaggactatgtgtgccccctgcagggcagccacgccctgtgcacctgctgcttccagcccatgccagacagaagagctgagcgggagcaggacccccgggtggccccccagcagtgtgctgtgtgcctgcagcccttctgccacctgtactggggctgcaccaggacaggctgctacggctgcctggcccccttctgtgagctgaacctgggggacaagtgcctggatggagtgctgaacaacaacagctatgaaagtgacatcctgaagaactacctggccacccggggcctgacctggaagaacatgctgacagagagcctggtggccctgcagaggggcgtcttcctgctgagtgactacagagtgactggagacacagtgctgtgctactgctgcggcctgcggagcttccgggagctgacctaccagtaccggcagaacatcccagccagcgagctgcctgtggccgtgaccagcaggccagactgctactggggcaggaactgcaggacccaggtgaaggcccaccacgccatgaagttcaaccacatctgtgagcagacccgcttcaagaactag

SEQ ID NO: 147180 - DNA, 672 bp, synthetic construct
  misc_feature 1..672: note = Description of Artificial Sequence: Synthetic coding sequence
  source 1..672: mol_type = other DNA
atggagaggcctgaggagggcaagcagagccccccaccccagccctggggccgcctgctgcggctgggcgctgaggagggggagccccacgtgctgctgaggaagcgggagtggaccatcggcagaagaagaggctgtgacctgtccttccccagcaacaagctggtgtctggggaccactgcagaattgtggtggatgagaagagcggccaggtgaccctggaggacaccagcaccagcggcaccgtcatcaacaagctgaaggtggtgaagaagcagacctgccccctgcagacaggagatgtgatctacctggtgtacaggaagaatgaacctgagcacaacgtggcctacctgtatgagagcctgtctgagaagcagggcatgacccaggagagctttgacaccagcggggccggggccggcagaggagctgacccccgggtgccccccagcagccctgccacccaggtgtgctttgaggagccccagcccagcaccagcaccagtgacctcttccccacagccagcgccagcagcacagagcccagccctgctggccgggagaggagcagcagctgtggcagcggcggcggcggcatcagccccaagggcagcggccccagcgtggccagtgatgaggtgtcctcctttgccagcgccctgccctag

SEQ ID NO: 147181 - DNA, 1050 bp, synthetic construct
  misc_feature 1..1050: note = Description of Artificial Sequence: Synthetic coding sequence
  source 1..1050: mol_type = other DNA
atgacccaggagagctttggcagcggcggcggcggcatcagccccaagggcagcggccccagcgtggccagtgatgaggtgtcctcctttgccagcgccctgcctgacaggaagacagccagcttcagcagcctggagccccaggaccaggaggacctggagcctgtgaagaagaagatgagaggagatggagacctggacctgaatggccagctgctggtggcccagcccaggagaaatgcccagacagtgcatgaagatgtgcgggctgctgctgggaagccagacaagatggaggagaccctgacctgcatcatctgccaggacctgctgcatgactgtgtgtccctgcagccctgcatgcacaccttctgtgccgcctgctacagcggctggatggagaggagcagcctgtgccccacctgccgctgccctgtggagcgcatctgcaagaaccacatcctgaacaacctggtggaggcctacctgatccagcacccagacaagagccgctctgaggaggatgtgcagagcatggatgccaggaacaagatcacccaggacatgctgcagcccaaggtgagaagaagcttcagtgatgaggagggcagcagcgaggacctgctggagctgagtgatgtggacagcgagagcagtgacatcagccagccctacgtggtgtgccggcagtgcccagagtaccgccggcaggccgcccagcccccccactgcccagcccctgagggggagcccggggccccccaggccctgggagatgcccccagcacctctgtgtccctgaccacagctgtgcaggactatgtgtgccccctgcagggcagccacgccctgtgcacctgctgcttccagcccatgccagacagaagagctgagcgggagcaggacccccgggtggccccccagcagtgtgctgtgtgcctgcagcccttctgccacctgtactggggctgcaccaggacaggctgctacggctgcctggcccccttctgtgtgtctggccggcagtgcttccctgccaccagcctgtag

SEQ ID NO: 147182 - DNA, 1719 bp, synthetic construct
  misc_feature 1..1719: note = Description of Artificial Sequence: Synthetic coding sequence
  source 1..1719: mol_type = other DNA
atggagaggcctgaggagggcaagcagagccccccaccccagccctggggccgcctgctgcggctgggcgctgaggagggggagccccacgtgctgctgaggaagcgggagtggaccatcggcagaagaagaggctgtgacctgtccttccccagcaacaagctggtgtctggggaccactgcagaattgtggtggatgagaagagcggccaggtgaccctggaggacaccagcaccagcggcaccgtcatcaacaagctgaaggtggtgaagaagcagacctgccccctgcagacaggagatgtgatctacctggtgtacaggaagaatgaacctgagcacaggtctgggggcggcggcatcagccccaagggcagcggccccagcgtggccagtgatgaggtgtcctcctttgccagcgccctgcctgacaggaagacagccagcttcagcagcctggagccccaggaccaggaggacctggagcctgtgaagaagaagatgagaggagatggagacctggacctgaatggccagctgctggtggcccagcccaggagaaatgcccagacagtgcatgaagatgtgcgggctgctgctgggaagccagacaagatggaggagaccctgacctgcatcatctgccaggacctgctgcatgactgtgtgtccctgcagccctgcatgcacaccttctgtgccgcctgctacagcggctggatggagaggagcagcctgtgccccacctgccgctgccctgtggagcgcatctgcaagaaccacatcctgaacaacctggtggaggcctacctgatccagcacccagacaagagccgctctgaggaggatgtgcagagcatggatgccaggaacaagatcacccaggacatgctgcagcccaaggtgagaagaagcttcagtgatgaggagggcagcagcgaggacctgctggagctgagtgatgtggacagcgagagcagtgacatcagccagccctacgtggtgtgccggcagtgcccagagtaccgccggcaggccgcccagcccccccactgcccagcccctgagggggagcccggggccccccaggccctgggagatgcccccagcacctctgtgtccctgaccacagctgtgcaggactatgtgtgccccctgcagggcagccacgccctgtgcacctgctgcttccagcccatgccagacagaagagctgagcgggagcaggacccccgggtggccccccagcagtgtgctgtgtgcctgcagcccttctgccacctgtactggggctgcaccaggacaggctgctacggctgcctggcccccttctgtgagctgaacctgggggacaagtgcctggatggagtgctgaacaacaacagctatgaaagtgacatcctgaagaactacctggccacccggggcctgacctggaagaacatgctgacagagagcctggtggccctgcagaggggcgtcttcctgctgagtgactacagagtgactggagacacagtgctgtgctactgctgcggcctgcggagcttccgggagctgacctaccagtaccggcagaacatcccagccagcgagctgcctgtggccgtgaccagcaggccagactgctactggggcaggaactgcaggacccaggtgaaggcccaccacgccatgaagttcaaccacatctgtgagcagacccgcttcaagaactag

SEQ ID NO: 147183 - DNA, 345 bp, synthetic construct
  misc_feature 1..345: note = Description of Artificial Sequence: Synthetic coding sequence
  source 1..345: mol_type = other DNA
atgaggctgctgatcctggccctgctgggcatctgcagcctgacagcctacatcgtggagggcgtgggcagcgaggtgtctgacaagaggacctgtgtgtccctgaccacccagaggctgcctgtgagccgcatcaagacctacaccatcacagagggcagcctgcgggctgtgatcttcatcaccaagaggggcctgaaggtgtgtgccgacccccaggccacctgggtgagagatgtggtgcgctccatggacaggaagagcaacaccaggaacaacatgatccagaccaagcccaccggcacccagcagagcaccaacacagctgtgaccctgactggatag

SEQ ID NO: 147184 - DNA, 345 bp, synthetic construct
  misc_feature 1..345: note = Description of Artificial Sequence: Synthetic coding sequence
  source 1..345: mol_type = other DNA
atgaggctgctgatcctggccctgctgggcatctgcagcctgacagcctacatcgtggagggcgtgggcagcgaggtgagccacaggaggacctgtgtgtccctgaccacccagaggctgcctgtgagccgcatcaagacctacaccatcacagagggcagcctgcgggctgtgatcttcatcaccaagaggggcctgaaggtgtgtgccgacccccaggccacctgggtgagagatgtggtgcgctccatggacaggaagagcaacaccaggaacaacatgatccagaccaagcccaccggcacccagcagagcaccaacacagctgtgaccctgactggatag

SEQ ID NO: 147185 - DNA, 1002 bp, synthetic construct
  misc_feature 1..1002: note = Description of Artificial Sequence: Synthetic coding sequence
  source 1..1002: mol_type = other DNA
atggagagcagcggcaaccctgagagcaccaccttcttctactatgacctgcagagccagccctgtgagaaccaggcctgggtgtttgccaccctggccaccaccgtgctgtactgcctggtgttcctgctgagcctggtgggcaacagcctggtgctgtgggtgctggtgaagtatgagagcctggagagcctgaccaacatcttcatcctgaacctgtgcctgagtgacctggtgtttgcctgcctgctgcctgtgtggatcagcccctaccactggggctgggtgctgggggacttcctgtgcaagctgctgaacatgatcttcagcatcagcctgtacagcagcatcttcttcctgaccatcatgaccatccaccgctacctgtctgtggtgagccccctgagcaccctgcgggtgcccaccctgcgctgccgggtgctggtgaccatggctgtgtgggtggccagcatcctgagcagcatcctggacaccatcttccacaaggtgctgagcagcggctgtgactacagcgagctgacctggtacctgacctctgtgtaccagcacaacctcttcttcctgctgagcctgggcatcatcctcttctgctacgtggagatcctgcggaccctcttccgcagccgcagcaagagaagacacaggacagtgaagctgatctttgccatcgtggtggcctacttcctgtcctggggcccctacaacttcaccctcttcctgcagaccctcttccgcacccagatcatccgcagctgtgaggccaagcagcagctggagtatgccctgctgatctgcaggaacctggccttcagccactgctgcttcaaccctgtgctgtatgtgtttgtgggcgtgaagttccgcacccacctgaagcacgtgctgcggcagttctggttctgccgcctgcaggcccccagccctgccagcatcccccacagccctggggcctttgcctatgaaggagccagcttctactag

SEQ ID NO: 147186 - DNA, 111 bp, synthetic construct
  misc_feature 1..111: note = Description of Artificial Sequence: Synthetic coding sequence
  source 1..111: mol_type = other DNA
atggagagcagcggcaaccctgagagcaccaccttcttctactatgacctgcagagccagccctgtgagaaccaggcctgggtgtttgccaccctggccaccaccgtgtag

SEQ ID NO: 147187 - DNA, 1002 bp, synthetic construct; identical to SEQ ID NO: 147185
  misc_feature 1..1002: note = Description of Artificial Sequence: Synthetic coding sequence
  source 1..1002: mol_type = other DNA

SEQ ID NO: 147188 - DNA, 300 bp, synthetic construct
  misc_feature 1..300: note = Description of Artificial Sequence: Synthetic coding sequence
  source 1..300: mol_type = other DNA
atgaaggtgtctgctgccctgctgtgcctgctgctgatggccgccaccttcagcccccagggcctggcccagccagattctgtgtccatccccatcacctgctgcttcaacgtcatcaacaggaagatccccatccagaggctggagagctacacccgcatcaccaacatccagtgccccaaggaggccgtcatcttcaagaccaagaggggcaaggaggtgtgtgccgaccccaaggagcgctgggtgcgggacagcatgaagcacctggaccagatcttccagaacctgaagccctag

SEQ ID NO: 147189 - DNA, 291 bp, synthetic construct
  misc_feature 1..291: note = Description of Artificial Sequence: Synthetic coding sequence
  source 1..291: mol_type = other DNA
atgcagatcatcaccacagccctggtgtgcctgctgctggccggcatgtggccagaagatgtggacagcaagtccatgcaggtgcccttcagccgctgctgcttctcctttgctgagcaggagatccccctgcgggccatcctgtgctacagaaacaccagcagcatctgcagcaatgaaggcctcatcttcaagctgaagaggggcaaggaggcctgtgccctggacacagtgggctgggtgcagaggcacaggaagatgctgcggcactgccccagcaagaggaagtag

SEQ ID NO: 147190 - DNA, 282 bp, synthetic construct
  misc_feature 1..282: note = Description of Artificial Sequence: Synthetic coding sequence
  source 1..282: mol_type = other DNA
atgaagatctctgtggccgccatccccttcttcctgctgatcaccatcgccctgggcaccaagacagagagcagcagccggggcccctaccaccccagcgagtgctgcttcacctacaccacctacaagatcccccggcagaggatcatggactactatgagaccaacagccagtgcagcaagccaggcatcgtgttcatcaccaagaggggccacagcgtgtgcaccaaccccagcgacaagtgggtgcaggactacatcaaggacatgaaggagaactag

SEQ ID NO: 147191 - DNA, 330 bp, synthetic construct
  misc_feature 1..330: note = Description of Artificial Sequence: Synthetic coding sequence
  source 1..330: mol_type = other DNA
atgaagatctctgtggccgccatccccttcttcctgctgatcaccatcgccctgggcaccaagacagagagcagcagccagacaggaggcaagcccaaggtggtgaagatccagctgaagctggtgggcggcccctaccaccccagcgagtgctgcttcacctacaccacctacaagatcccccggcagaggatcatggactactatgagaccaacagccagtgcagcaagccaggcatcgtgttcatcaccaagaggggccacagcgtgtgcaccaaccccagcgacaagtgggtgcaggactacatcaaggacatgaaggagaactag

SEQ ID NO: 147192 - DNA, 330 bp, synthetic construct; identical to SEQ ID NO: 147191
  misc_feature 1..330: note = Description of Artificial Sequence: Synthetic coding sequence
  source 1..330: mol_type = other DNA

SEQ ID NO: 147193 - DNA, 342 bp, synthetic construct
  misc_feature 1..342: note = Description of Artificial Sequence: Synthetic coding sequence
  source 1..342: mol_type = other DNA
atgaaggtgtctgtggccgccctgagctgcctgatgctggtggccgtgctgggcagccaggcccagttcatcaatgatgctgagacagagctgatgatgagcaagctgcccctggagaaccctgtggtgctgaacagcttccactttgctgctgactgctgcaccagctacatcagccagagcatcccctgcagcctgatgaagagctactttgagaccagcagcgagtgcagcaagccaggagtcatcttcctgaccaagaagggccggcaggtgtgtgccaagcccagcggccctggggtgcaggactgcatgaagaagctgaagccctacagcatctag

SEQ ID NO: 147194 - DNA, 186 bp, synthetic construct
  misc_feature 1..186: note = Description of Artificial Sequence: Synthetic coding sequence
  source 1..186: mol_type = other DNA
tgatgcaccagctacatcagccagagcatcccctgcagcctgatgaagagctactttgagaccagcagcgagtgcagcaagccaggagtcatcttcctgaccaagaagggccggcaggtgtgtgccaagcccagcggccctggggtgcaggactgcatgaagaagctgaagccctacagcatctag

SEQ ID NO: 147195 - DNA, 342 bp, synthetic construct; identical to SEQ ID NO: 147193
  misc_feature 1..342: note = Description of Artificial Sequence: Synthetic coding sequence
  source 1..342: mol_type = other DNA

SEQ ID NO: 147196 - DNA, 342 bp, synthetic construct; identical to SEQ ID NO: 147193
  misc_feature 1..342: note = Description of Artificial Sequence: Synthetic coding sequence
  source 1..342: mol_type = other DNA

SEQ ID NO: 147197 - DNA, 363 bp, synthetic construct
  misc_feature 1..363: note = Description of Artificial Sequence: Synthetic coding sequence
  source 1..363: mol_type = other DNA
atgaaggtgtctgaggccgccctgagcctgctggtgctgatcctgatcatcaccagcgccagccgcagccagcccaaggtgcctgagtgggtgaacacccccagcacctgctgcctgaagtactatgagaaggtgctgccccggcggctggtggtgggctacaggaaggccctgaactgccacctgcctgccatcatctttgtgaccaagaggaaccgggaggtgtgcaccaaccccaatgatgactgggtgcaggagtacatcaaggaccccaacctgcccctgctgcccaccaggaacctgagcacagtgaagatcatcacagccaagaatggccagccccagctgctgaacagccagtag

SEQ ID NO: 147198 - DNA, 1188 bp, synthetic construct
  misc_feature 1..1188: note = Description of Artificial Sequence: Synthetic coding sequence
  source 1..1188: mol_type = other DNA
atggcctggaggcacctgaagaagagggcccaggatgctgtgatcatcctgggcggcggcggcctgctgtttgccagctacctgatggccactggagatgagcgcttctacgccgagcacctgatgcccaccctgcagggcctgctggaccctgagagcgcccaccggctggccgtgcgcttcaccagcctgggcctgctgccccgggcccgcttccaggacagcgacatgctggaggtgcgggtgctgggccacaagttcaggaaccctgtgggcattgctgctggctttgacaagcacggggaggccgtggatggcctgtacaagatgggcttcggctttgtggagatcggctctgtgacccccaagccccaggagggcaacccccggcccagggtcttccggctgcctgaggaccaggccgtcatcaacagatatggcttcaacagccacggcctgtctgtggtggagcaccggctgcgggcccggcagcagaagcaggccaagctgacagaagatggcctgcccctgggcgtgaacctgggcaagaacaagacctctgtggatgctgctgaggactatgcagagggcgtgcgggtgctgggccccctggccgactacctggtggtgaatgtgagcagccccaacacagctggcctgcggagcctgcagggcaaggccgagctgcggcggctgctgaccaaggtgctgcaggagagagatggcctgcggcgggtgcacaggcctgctgtgctggtgaagatcgccccagacctgaccagccaggacaaggaggacatcgcctctgtggtgaaggagctgggcattgatggcctcatcgtgaccaacaccaccgtgtccaggcctgctggcctgcagggcgccctgcggtctgagaccggcggcctgagcggcaagcccctgcgggacctgagcacccagaccatccgggagatgtatgccctgacccagggccgggtgcccatcatcggcgtgggcggcgtgagcagcggccaggatgccctggagaagatccgggccggggccagcctggtgcagctgtacacagccctgaccttctggggcccccctgtggtgggcaaggtgaagcgggagctggaggccctgctgaaggagcagggctttggaggagtgacagatgccatcggggctgaccacagaagatag

SEQ ID NO: 147199 - DNA, 270 bp, synthetic construct
  misc_feature 1..270: note = Description of Artificial Sequence: Synthetic coding sequence
  source 1..270: mol_type = other DNA
atgaagggcctggccgccgccctgctggtgctggtgtgcaccatggccctgtgcagctgtgcccaggtgggcaccaacaaggagctgtgctgcctggtgtacacctcctggcagatcccccagaagttcatcgtggactacagcgagaccagcccccagtgccccaagccaggagtcatcctgctgaccaagaggggccggcagatctgtgccgaccccaacaagaagtgggtgcagaagtacatcagtgacctgaagctgaatgcctag

SEQ ID NO: 147200 - DNA, 297 bp, synthetic construct
  misc_feature 1..297: note = Description of Artificial Sequence: Synthetic coding sequence
  source 1..297: mol_type = other DNA
atggccctgctgctggccctgagcctgctggtgctgtggaccagccctgcccccaccctgagcggcaccaatgatgctgaggactgctgcctgtctgtgacccagaagcccatccctggctacatcgtgaggaacttccactacctgctgatcaaggatggctgccgggtgcctgctgtggtgttcaccaccctgcggggccggcagctgtgtgcccccccagaccagccctgggtggagcgcatcatccagaggctgcagaggaccagcgccaagatgaagagaagaagcagctag

SEQ ID NO: 147201 - DNA, 315 bp, synthetic construct
  misc_feature 1..315: note = Description of Artificial Sequence: Synthetic coding sequence
  source 1..315: mol_type = other DNA
atggccctgctgctggccctgagcctgctggtgctgtggaccagccctgcccccaccctgagcggcaccaatgatgctgaggactgctgcctgtctgtgacccagaagcccatccctggctacatcgtgaggaacttccactacctgctgatcaaggatggctgccgggtgcctgctgtggtgttcaccaccctgcggggccggcagctgtgtgcccccccagaccagccctgggtggagcgcatcatccagaggctgcagaggaccagcgccaaggccagcctggccctgcccggccctgtgagcagcctgtag

SEQ ID NO: 147202 - DNA, 291 bp, synthetic construct
  misc_feature 1..291: note = Description of Artificial Sequence: Synthetic coding sequence
  source 1..291: mol_type = other DNA
atgtgctgcaccaagagcctgctgctggccgccctgatgtctgtgctgctgctgcacctgtgtggggagagcgaggccgccagcaactttgactgctgcctgggctacacagaccgcatcctgcaccccaagttcatcgtgggcttcacccggcagctggccaatgaaggctgtgacatcaatgccatcatcttccacaccaagaagaagctgtctgtgtgtgccaaccccaagcagacctgggtgaagtacatcgtgcggctgctgagcaagaaggtgaagaacatgtag

SEQ ID NO: 147203 - DNA, 288 bp, synthetic construct
  misc_feature 1..288: note = Description of Artificial Sequence: Synthetic coding sequence
  source 1..288: mol_type = other DNA
atgtgctgcaccaagagcctgctgctggccgccctgatgtctgtgctgctgctgcacctgtgtggggagagcgaggccagcaactttgactgctgcctgggctacacagaccgcatcctgcaccccaagttcatcgtgggcttcacccggcagctggccaatgaaggctgtgacatcaatgccatcatcttccacaccaagaagaagctgtctgtgtgtgccaaccccaagcagacctgggtgaagtacatcgtgcggctgctgagcaagaaggtgaagaacatgtag

SEQ ID NO: 147204 - DNA, 405 bp, synthetic construct
  misc_feature 1..405: note = Description of Artificial Sequence: Synthetic coding sequence
  source 1..405: mol_type = other DNA
atggcccagagcctggccctgagcctgctgatcctggtgctggccttcggcatccccaggacccagggcagtgatggaggagcccaggactgctgcctgaagtacagccagaggaagatcccagccaaggtggtgcgcagctacaggaagcaggagcccagcctgggctgcagcatcccagccatcctcttcctgcccaggaagaggagccaggccgagctgtgtgccgaccccaaggagctgtgggtgcagcagctgatgcagcacctggacaagacccccagcccccagaagccagcccagggctgcaggaaggacagaggagccagcaagacaggcaagaagggcaagggcagcaagggctgcaagaggacagagaggagccagacccccaagggcccctag

SEQ ID NO: 147205 - DNA, 375 bp, synthetic construct
  misc_feature 1..375: note = Description of Artificial Sequence: Synthetic coding sequence
  source 1..375: mol_type = other DNA
atggcccagagcctggccctgagcctgctgatcctggtgctggccttcggcatccccaggacccagggcagtgatggaggagcccaggactgctgcctgaagtacagccagaggaagatcccagccaaggtggtgcgcagctacaggaagcaggagcccagcctgggctgcagcatcccagccatcctcttcctgcccaggaagaggagccaggccgagctgtgtgccgaccccaaggagctgtgggtgcagcagctgatgcagcacctggacaagacccccagcccccagaagccagcccagggctgcaggaaggacagaggagccagcaagacaggcaagaagggcaagggcagcaagggctgcaagaggtag

SEQ ID NO: 147206 - DNA, 549 bp, synthetic construct
  misc_feature 1..549: note = Description of Artificial Sequence: Synthetic coding sequence
  source 1..549: mol_type = other DNA
atggccgagttccccagcaaggtgtccaccaggaccagcagccctgcccagggcgctgaggcctctgtgtctgccctgcggccagacctgggctttgtgcgcagccggctgggcgccctgatgctgctgcagctggtgctgggcctgctggtgtgggccctgattgctgacaccccctaccacctgtacccagcctacggctgggtgatgtttgtggccgtgttcctgtggctggtgaccatcgtgctcttcaacctgtacctgttccagctgcacatgaagctgtacatggtgccctggcccctggtgctgatgatcttcaacatcagcgccaccgtgctgtacatcacagccttcatcgcctgcagcgctgctgtggacctgaccagcctgcggggcacccggccctacaaccagagagctgctgccagcttctttgcctgcctggtgatgattgcctacggcgtgtctgccttcttctcctaccaggcctggaggggcgtgggcagcaatgctgccaccagccagatggccggcggctacgcctag

SEQ ID NO: 147207 - DNA, 414 bp, synthetic construct
  misc_feature 1..414: note = Description of Artificial Sequence: Synthetic coding sequence
  source 1..414: mol_type = other DNA
atgaaggtgtctgtggccgccctgagctgcctgatgctggtgacagccctgggcagccaggcccgggtgaccaaggatgctgagacagagttcatgatgagcaagctgcccctggagaaccctgtgctgctggacatgctgtggaggaggaagattggcccccagatgaccctgagccatgctgctggcttccacgccaccagcgctgactgctgcatctcctacacccccaggagcatcccctgcagcctgctggagagctactttgagaccaacagcgagtgcagcaagccaggagtcatcttcctgaccaagaagggccgccgcttctgtgccaaccccagcgacaagcaggtgcaggtgtgtgtgaggatgctgaagctggacacccgcatcaagaccaggaagaactag

SEQ ID NO: 147208 - DNA, 363 bp, synthetic construct
  misc_feature 1..363: note = Description of Artificial Sequence: Synthetic coding sequence
  source 1..363: mol_type = other DNA
atgaaggtgtctgtggccgccctgagctgcctgatgctggtgacagccctgggcagccaggcccgggtgaccaaggatgctgagacagagttcatgatgagcaagctgcccctggagaaccctgtgctgctggaccgcttccacgccaccagcgctgactgctgcatctcctacacccccaggagcatcccctgcagcctgctggagagctactttgagaccaacagtgaatgttccaagccaggagtcatcttcctgaccaagaagggccgccgcttctgtgccaaccccagcgacaagcaggtgcaggtgtgtgtgaggatgctgaagctggacacccgcatcaagaccaggaagaactag

SEQ ID NO: 147209 - DNA, 2862 bp, synthetic construct
  misc_feature 1..2862: note = Description of Artificial Sequence: Synthetic coding sequence
  source 1..2862: mol_type = other DNA
atggaggagcagggccacagcgagatggagatcatccccagcgagagccacccccacatccagctgctgaagagcaaccgggagctgctggtgacccacatccggaacacccagtgcctggtggacaacctgctgaagaatgactacttcagcgcagaagatgctgagatcgtgtgtgcctgccccacccagcctgacaaggtgaggaagatcctggacctggtgcagagcaagggggaggaggtgtctgagttcttcctgtacctgctgcagcagctggctgatgcctacgtggacctgcggccctggctgctggagatcggcttcagccccagcctgctgacccagagcaaggtggtggtgaacacagatcctgtgagccgctacacccagcagctgcggcaccacctgggccgggacagcaagtttgtgctgtgctacgcccagaaggaggagctgctgctggaggagatctacatggacaccatcatggagctggtgggcttcagcaatgaaagcctgggcagcctgaacagcctggcctgcctgctggaccacaccaccggcatcctgaatgagcagggcgagaccatcttcatcctgggagatgctggggtgggcaagtccatgctgctgcagaggctgcagagcctgtgggccaccggccgcctggatgctggggtgaagttcttcttccacttccgctgcaggatgttcagctgcttcaaggagagtgaccggctgtgcctgcaggacctgctcttcaagcactactgctacccagagcgggaccctgaggaggtgtttgccttcctgctgcgcttcccccacgtggccctcttcacctttgatggcctggatgagctgcacagcgacctggacctgagccgggtgcctgacagcagctgcccctgggagcccgcccaccccctggtgctgctggccaacctgctgagcggcaagctgctgaagggggccagcaagctgctgacagccaggacaggcatcgaggtgccccggcagttcctgaggaagaaggtgctgctgcggggcttcagccccagccacctgcgggcctatgcccggaggatgtttcctgagcgggccctgcaggaccggctgctgagccagctggaggccaaccccaacctgtgcagcctgtgcagcgtgcccctcttctgctggatcatcttccgctgcttccagcacttccgggccgcctttgagggcagcccccagctgcctgactgcaccatgaccctgacagatgtgttcctgctggtgacagaggtgcacctgaacaggatgcagcccagcagcctggtgcagaggaacaccaggagccctgtggagaccctgcatgctggccgggacaccctgtgcagcctgggccaggtggcccaccggggcatggagaagagcctgtttgtgttcacccaggaggaggtgcaggccagcggcctgcaggagcgggacatgcagctgggcttcctgcgggccctgcctgagctgggccctggaggagaccagcagagctatgagttcttccacctgaccctgcaggccttcttcaccgccttcttcctggtgctggatgacagagtgggcacccaggagctgctgcgcttcttccaggagtggatgcctcctgctggagctgccaccaccagctgctacccacccttcctgcccttccagtgcctgcagggcagcggccctgcccgggaggacctcttcaagaacaaggaccacttccagttcaccaacctcttcctgtgtggcctgctgagcaaggccaagcagaagctgctgcggcacctggtgcctgctgctgccctgcggaggaagaggaaggccctgtgggcccacctgttcagcagcctgcggggctacctgaagagcctgccccgggtgcaggtggagagcttcaaccaggtgcaggccatgcccaccttcatctggatgctgcgctgcatctatgagacccagagccagaaggtgggccagctggccgcccggggcatctgtgccaactacctgaagctgacctactgcaatgcctgcagcgctgactgcagcgccctgagctttgtgctgcaccacttccccaagaggctggccctggacctggacaacaacaacctgaatgactatggagtgcgggagctgcagccctgcttcagccggctgactgtgctgcggctgtctgtgaaccagatcacagatggcggcgtgaaggtgctgtctgaggagctgaccaagtacaagatcgtgacctacctgggcctgtacaacaaccagatcacagatgtgggcgcccgctacgtgaccaagatcctggatgagtgcaagggcctgacccacctgaagctgggcaagaacaagatcaccagcgagggcggcaagtacctggccctggccgtgaagaacagcaagagcatcagcgaggtgggcatgtggggcaaccaggtgggagatgagggcgccaaggcctttgctgaggccctgaggaaccaccccagcctgaccaccctgagcctggccagcaatggcatcagcacagagggcggcaagagcctggcccgggccctgcagcagaacaccagcctggagatcctgtggctgacccagaatgagctgaatgatgaggtggccgagagcctggccgagatgctgaaggtgaaccagaccctgaagcacctgtggctgatccagaaccagatcacagccaagggcacagcccagctggctgatgccctgcagagcaacacaggcatcacagagatctgcctgaatggaaacctgatcaagccagaggaggccaaggtgtatgaagatgagaagaggatcatctgcttctag

SEQ ID NO: 147210 - DNA, 360 bp, synthetic construct
  misc_feature 1..360: note = Description of Artificial Sequence: Synthetic coding sequence
  source 1..360: mol_type = other DNA
atggccggcctgatgaccatcgtgaccagcctgctcttcctgggcgtgtgtgcccaccacatcatccccaccggctctgtggtgatccccagcccctgctgcatgttctttgtgtccaagagaattcctgagaacagagtggtgtcctaccagctgagcagccgcagcacctgcctgaaggccggggtcatcttcaccaccaagaagggccagcagttctgtggggaccccaagcaggagtgggtgcagcgctacatgaagaacctggatgccaagcagaagaaggccagcccccgggcccgggctgtggccgtgaagggccctgtgcagcgctacccaggcaaccagaccacctgctag

SEQ ID NO: 147211 - DNA, 450 bp, synthetic construct
  misc_feature 1..450: note = Description of Artificial Sequence: Synthetic coding sequence
  source 1..450: mol_type = other DNA
atgaacctgtggctgctggcctgcctggtggccggcttcctgggcgcctgggccccagctgtgcacacccagggcgtgtttgaggactgctgcctggcctaccactaccccatcggctgggccgtgctgcggcgggcctggacctaccgcatccaggaggtgtctggcagctgcaacctgcctgctgccatcttctacctgcccaagaggcacaggaaggtgtgtggcaaccccaagagccgggaggtgcagagggccatgaagctgctggatgccaggaacaaggtgtttgccaagctgcaccacaacacccagaccttccagggcccccatgctgtgaagaagctgagcagcggcaacagcaagctgagcagcagcaagttcagcaaccccatcagcagcagcaagagaaatgtgtccctgctgatcagcgccaacagcggcctgtag

SEQ ID NO: 147212 - DNA, 255 bp, synthetic construct
  misc_feature 1..255: note = Description of Artificial Sequence: Synthetic coding sequence
  source 1..255: mol_type = other DNA
atgaacctgtggctgctggcctgcctggtggccggcttcctgggcgcctgggccccagctgtgcacacccagggcgtgtttgaggactgctgcctggcctaccactaccccatcggctgggccgtgctgcggcgggcctggacctaccgcatccaggaggtgtctggcagctgcaacctgcctgctgccatccggcccagctgctgcaaggaggtggagttctggaagctgcaggtgatcatcgtgcaggtgtag

SEQ ID NO: 147213 - DNA, 453 bp, synthetic construct
  misc_feature 1..453: note = Description of Artificial Sequence: Synthetic coding sequence
  source 1..453: mol_type = other DNA
atgaacctgtggctgctggcctgcctggtggccggcttcctgggcgcctgggccccagctgtgcacacccagggcgtgtttgaggactgctgcctggcctaccactaccccatcggctgggccgtgctgcggcgggcctggacctaccgcatccaggaggtgtctggcagctgcaacctgcctgctgccatcttctacctgcccaagaggcacaggaaggtgtgtggcaaccccaagagccgggaggtgcagagggccatgaagctgctggatgccaggaacaaggtgtttgccaagctgcaccacaacacccagaccttccaggccggcccccatgctgtgaagaagctgagcagcggcaacagcaagctgagcagcagcaagttcagcaaccccatcagcagcagcaagagaaatgtgtccctgctgatcagcgccaacagcggcctgtag

SEQ ID NO: 147214 - DNA, 285 bp, synthetic construct
  misc_feature 1..285: note = Description of Artificial Sequence: Synthetic coding sequence
  source 1..285: mol_type = other DNA
atgatgggcctgagcctggccagcgctgtgctgctggccagcctgctgagcctgcacctgggcacagccacccggggcagtgacatcagcaagacctgctgcttccagtacagccacaagcccctgccctggacctgggtgcgctcctatgagttcaccagcaacagctgcagccagagagctgtgatcttcaccaccaagaggggcaagaaggtgtgcacccaccccaggaagaagtgggtgcagaagtacatcagcctgctgaagacccccaagcagctgtag

SEQ ID NO: 147215 - DNA, 285 bp, synthetic construct; identical to SEQ ID NO: 147214
  misc_feature 1..285: note = Description of Artificial Sequence: Synthetic coding sequence
  source 1..285: mol_type = other DNA

SEQ ID NO: 147216 - DNA, 339 bp, synthetic construct
  misc_feature 1..339: note = Description of Artificial Sequence: Synthetic coding sequence
  source 1..339: mol_type = other DNA
atgaagggcccccccaccttctgcagcctgctgctgctgagcctgctgctgagcccagaccccacagctgccttcctgctgccccccagcacagcctgctgcacccagctgtacaggaagcccctgagtgacaagctgctgaggaaggtgatccaggtggagctgcaggaggctgatggagactgccacctgcaggcctttgtgctgcacctggcccagaggagcatctgcatccacccccagaaccccagcctgagccagtggtttgagcaccaggagaggaagctgcacggcaccctgcccaagctgaactttggcatgctgaggaagatgggctag

SEQ ID NO: 147217 - DNA, 384 bp, synthetic construct
  misc_feature 1..384: note = Description of Artificial Sequence: Synthetic coding sequence
  source 1..384: mol_type = other DNA
atgcagcagaggggcctggccatcgtggccctggccgtgtgtgccgccctgcacgccagcgaggccatcctgcccatcgccagcagctgctgcacagaggtgagccaccacatcagccggcggctgctggagcgggtgaacatgtgccgcatccagagagcagatggagactgtgacctggccgccgtcatcctgcacgtgaagagaagacgcatctgtgtgagcccccacaaccacacagtgaagcagtggatgaaggtgcaggccgccaagaagaatggaaaaggaaatgtgtgccacaggaagaagcaccacggcaagaggaacagcaacagagcccaccagggcaagcatgagacctacggccacaagaccccctactag

SEQ ID NO: 147218 - DNA, 384 bp, synthetic construct; identical to SEQ ID NO: 147217
  misc_feature 1..384: note = Description of Artificial Sequence: Synthetic coding sequence
  source 1..384: mol_type = other DNA

SEQ ID NO: 147219 - DNA, 243 bp, synthetic construct
  misc_feature 1..243: note = Description of Artificial Sequence: Synthetic coding sequence
  source 1..243: mol_type = other DNA
atgtgccgcatccagagagcagatggagactgtgacctggccgctgtgatcctgcacgtgaagagaagacgcatctgtgtgagcccccacaaccacacagtgaagcagtggatgaaggtgcaggccgccaagaagaatggaaaaggaaatgtgtgccacaggaagaagcaccacggcaagaggaacagcaacagagcccaccagggcaagcatgagacctacggccacaagaccccctactag

SEQ ID NO: 147220 - DNA, 354 bp, synthetic construct
  misc_feature 1..354: note = Description of Artificial Sequence: Synthetic coding sequence
  source 1..354: mol_type = other DNA
atgcagcagaggggcctggccatcgtggccctggccgtgtgtgccgccctgcacgccagcgaggccatcctgcccatcgccagcagctgctgcacagaggtgagccaccacatcagccggcggctgctggagcgggtgaacatgtgccgcatccagagagcagatggagactgtgacctggccgctgtgatgctggagtgcagcgacatgatcagcgcccactacaacctgcacctgcccggcagcaatgacagccccaccagcgccttccaggtggccggcatcacagccttcatgagcagcgctgaggagagcgtgtctgcccggaccaccatcctgctgagcagcggctag

SEQ ID NO: 147221 - DNA, 282 bp, synthetic construct
  misc_feature 1..282: note = Description of Artificial Sequence: Synthetic coding sequence
  source 1..282: mol_type = other DNA
atgcaggtgtccacagctgccctggccgtgctgctgtgcaccatggccctgtgcaaccaggtgctgagcgcccccctggccgctgacacccccacagcctgctgcttctcctacaccagccggcagatcccccagaacttcatcgctgactactttgagaccagcagccagtgcagcaagcccagcgtcatcttcctgaccaagaggggccggcaggtgtgtgccgaccccagcgaggagtgggtgcagaagtatgtgtctgacctggagctgagcgcctag

SEQ ID NO: 147222 - DNA, 159 bp, synthetic construct
  misc_feature 1..159: note = Description of Artificial Sequence: Synthetic coding sequence
  source 1..159: mol_type = other DNA
atgcaggtgtccacagctgccctggccgtgctgctgtgcaccatggccctgtgcaaccaggtgctgagcgcccccctgagccggccccgggaggccggccgctctgtgctgacccctgtgcgcagcggcagcaggaacacctctgtgacctggagctag

SEQ ID NO: 147223 - DNA, 144 bp, synthetic construct
  misc_feature 1..144: note = Description of Artificial Sequence: Synthetic coding sequence
  source 1..144: mol_type = other DNA
atgcaggtgtccacagctgccctggccgtgctgctgtgcaccatggccctgtgcaaccaggtgctgagcgccccccaggccggccgctctgtgctgacccctgtgcgcagcggcagcaggaacacctctgtgacctggagctag

SEQ ID NO: 147224 - DNA, 279 bp, synthetic construct
  misc_feature 1..279: note = Description of Artificial Sequence: Synthetic coding sequence
  source 1..279: mol_type = other DNA
atgaagctgtgtgtgacagtgctgagcctgctgatgctggtggccgccttctgcagccctgccctgagcgcccccatgggcagtgaccccccaacagcctgctgcttctcctacacagccaggaagctgcccaggaactttgtggtggactactatgagaccagcagcctgtgcagccagcctgctgtggtgttccagaccaagaggagcaagcaggtgtgtgccgaccccagcgagagctgggtgcaggagtatgtgtatgacctggagctgaactag

SEQ ID NO: 147225 - DNA, 159 bp, synthetic construct
  misc_feature 1..159: note = Description of Artificial Sequence: Synthetic coding sequence
  source 1..159: mol_type = other DNA
atgaagctgtgtgtgacagtgctgagcctgctgatgctggtggccgccttctgcagccctgccctgagcgcccccaacagcaagcccaaggaggccagcaagtctgtgctgatccctgtgaaccctggcagccgcagcacctgcatgacctggaactag

SEQ ID NO: 147226 - DNA, 159 bp, synthetic construct
  misc_feature 1..159: note = Description of Artificial Sequence: Synthetic coding sequence
  source 1..159: mol_type = other DNA
atgaagctgtgtgtgacagtgctgagcctgctggtgctggtggccgccttctgcagcctggccctgagcgcccccaacagcaagcccaaggaggccagcaagagcgccctgacccctgtgtccccaggcagccgcagcacctgcatgacctggaactag

SEQ ID NO: 147227 - DNA, 207 bp, synthetic construct
  misc_feature 1..207: note = Description of Artificial Sequence: Synthetic coding sequence
  source 1..207: mol_type = other DNA
atgaagctgtgtgtgacagtgctgagcctgctggtgctggtggccgccttctgcagcctggccctgagcgcccccaccaagagcagcgagtggaagctgcagggcgtgtgcttccagtgctgcagcaggaaggaccccatccaccagagctgccccacctggaccatggtgcggcagaggaagatgcccaccactggaaaaggatag

SEQ ID NO: 147228 - DNA, 261 bp, synthetic construct
  misc_feature 1..261: note = Description of Artificial Sequence: Synthetic coding sequence
  source 1..261: mol_type = other DNA
atgaagctgtgtgtgacagtgctgagcctgctggtgctggtggccgccttctgcagcctggccctgagcgcccccatgggcagtgaccccccaacagcctgctgcttctcctacacagccaggaagctgcccaggaactttgtggtggactactatgagaccagcagcctgtgcagccagcctgctgtggtggccgccccccacggcccctggagcggccggggccgctgcctgccccaggcccgggacaaggccaggtag

SEQ ID NO: 147229 - DNA, 279 bp, synthetic construct
  misc_feature 1..279: note = Description of Artificial Sequence: Synthetic coding sequence
  source 1..279: mol_type = other DNA
atgaagctgtgtgtgacagtgctgagcctgctggtgctggtggccgccttctgcagcctggccctgagcgcccccatgggcagtgaccccccaacagcctgctgcttctcctacacagccaggaagctgcccaggaactttgtggtggactactatgagaccagcagcctgtgcagccagcctgctgtggtgttccagaccaagaggggcaagcaggtgtgtgccgaccccagcgagagctgggtgcaggagtatgtgtatgacctggagctgaactag

SEQ ID NO: 147230 - DNA, 300 bp, synthetic construct
  misc_feature 1..300: note = Description of Artificial Sequence: Synthetic coding sequence
  source 1..300: mol_type = other DNA
atgaaggtgtctgctgccctgctgtgcctgctgctgattgctgccaccttcatcccccagggcctggcccagccagatgccatcaatgcccctgtgacctgctgctacaacttcaccaacaggaagatctctgtgcagaggctggccagctaccgccgcatcaccagcagcaagtgccccaaggaggccgtcatcttcaagaccatcgtggccaaggagatctgtgccgaccccaagcagaagtgggtgcaggacagcatggaccacctggacaagcagacccagacccccaagacctag

SEQ ID NO: 147231 - DNA, 330 bp, synthetic construct
  misc_feature 1..330: note = Description of Artificial Sequence: Synthetic coding sequence
  source 1..330: mol_type = other DNA
atgctgaagctgacccccctgcccagcaagatgaaggtgtctgctgccctgctgtgcctgctgctgatggccgccaccttcagcccccagggcctggcccagccagattctgtgtccatccccatcacctgctgcttcaacgtcatcaacaggaagatccccatccagaggctggagagctacacccgcatcaccaacatccagtgccccaaggaggccgtcatcttcaagaccaagaggggcaaggaggtgtgtgccgaccccaaggagcgctgggtgcgggacagcatgaagcacctggaccagatcttccagaacctgaagccctag

SEQ ID NO: 147232 - DNA, 1068 bp, synthetic construct
  misc_feature 1..1068: note = Description of Artificial Sequence: Synthetic coding sequence
  source 1..1068: mol_type = other DNA
atggagacccccaacaccacagaggactatgacaccaccacagaatttgattatggagatgccaccccctgccagaaggtgaatgaaagagccttcggggcccagctgctgccccccctgtacagcctggtgtttgtgattggcctggtgggcaacatcctggtggtgctggtgctggtgcagtacaagaggctgaagaacatgaccagcatctacctgctgaacctggccatcagtgacctgctcttcctgttcaccctgcccttctggattgactacaagctgaaggatgactgggtgtttggagatgccatgtgcaagatcctgagcggcttctactacacaggcctgtacagcgagatcttcttcatcatcctgctgaccatcgaccgctacctggccatcgtgcatgctgtgtttgccctgcgggccaggacagtgacctttggagtcatcaccagcatcatcatctgggccctggccatcctggcctccatgcctggcctgtacttcagcaagacccagtgggagttcacccaccacacctgcagcctgcacttcccccatgagagcctgcgggagtggaagctgttccaggccctgaagctgaacctgtttggcctggtgctgcccctgctggtgatgatcatctgctacacaggcatcatcaagatcctgctgcggcggcccaatgagaagaagagcaaggctgtgcggctcatcttcgtcatcatgatcatcttcttcctgttctggaccccctacaacctgaccatcctgatcagcgtcttccaggacttcctgttcacccatgaatgtgagcagagccgccacctggacctggccgtgcaggtgacagaggtgattgcctacacccactgctgcgtgaaccctgtgatctatgcctttgtgggggagcgcttcaggaagtacctgcggcagctgttccaccggcgggtggccgtgcacctggtgaagtggctgcccttcctgtctgtggaccggctggagcgggtgagcagcaccagccccagcactggagaacatgagctgtctgctggcttctag

SEQ ID NO: 147233 - DNA, 1089 bp, synthetic construct
  misc_feature 1..1089: note = Description of Artificial Sequence: Synthetic coding sequence
  source 1..1089: mol_type = other DNA
atgggcacagaggccacagagcaggtgtcctggggccactacagcggagatgaagaagatgcctacagcgctgagcccctgcctgagctgtgctacaaggcagatgtgcaggccttcagccgggccttccagcccagcgtgtccctgactgtggccgccctgggcctggccggaaatggcctggtgctggccacccacctggccgcccggcgggccgcccggagccccaccagcgcccacctgctgcagctggccctggccgacctgctgctggccctgaccctgccctttgctgctgctggggccctgcagggctggagcctgggcagcgccacctgcaggaccatcagcggcctgtacagcgccagcttccacgccggcttcctgttcctggcctgcatctctgctgacagatatgtggccatcgcccgggccctgcctgctggcccccggcccagcaccccaggccgggcccacctggtgtctgtcatcgtgtggctgctgagcctgctgctggccctgcctgccctgctcttcagccaggacggccagcgggagggccagaggcgctgccgcctcatcttccctgagggcctgacccagacagtgaagggggccagcgctgtggcccaggtggccctgggctttgccctgcccctgggcgtgatggtggcctgctacgccctgctgggccgcaccctgctggccgcccggggccctgagaggagaagagccctgcgggtggtggtggccctggtggccgcctttgtggtgctgcagctgccctacagcctggccctgctgctggacacagctgacctgctggccgcccgggagaggagctgcccagccagcaagaggaaggatgtggccctgctggtgaccagcggcctggccctggcccgctgtggcctgaaccctgtgctgtatgccttcctgggcctgcgcttccggcaggacctgcggcggctgctgcggggcggcagctgccccagcggcccccagccccggcggggctgcccccggcggccccggctgagcagctgcagcgcccccacagagacccacagcctgtcctgggacaactag

SEQ ID NO: 147234 - DNA, 1125 bp, synthetic construct
  misc_feature 1..1125: note = Description of Artificial Sequence: Synthetic coding sequence
  source 1..1125: mol_type = other DNA
atgctgagcaccagccgcagccgcttcatccggaacaccaatgaaagtggagaggaggtgaccaccttctttgattatgactatggagccccctgccacaagtttgatgtgaagcagatcggggcccagctgctgccccccctgtacagcctggtgttcatctttggatttgtgggcaacatgctggtggtgctgatcctgatcaactgcaagaagctgaagtgcctgacagacatctacctgctgaacctggccatcagtgacctgctcttcctgatcaccctgcccctgtgggcccacagcgctgccaatgagtgggtgtttggaaatgccatgtgcaagctgttcaccggcctgtaccacatcggctactttggaggcatcttcttcatcatcctgctgaccatcgaccgctacctggccatcgtgcatgctgtgtttgccctgaaggccaggacagtgaccttcggcgtggtgaccagcgtcatcacctggctggtggccgtgtttgcctctgtgcccggcatcatcttcaccaagtgccagaaggaggacagcgtgtatgtgtgtggcccctacttcccccggggctggaacaacttccacaccatcatgaggaacatcctgggcctggtgctgcccctgctgatcatggtgatctgctacagcggcatcctgaagaccctgctgcgctgcagaaatgagaagaagaggcacagagctgtgcgggtcatcttcaccatcatgattgtgtacttcctgttctggaccccctacaacatcgtcatcctgctgaacaccttccaggagttcttcggcctgagcaactgtgagagcaccagccagctggaccaggccacccaggtgacagagaccctgggcatgacccactgctgcatcaaccccatcatctatgcctttgtgggggagaagttccgcagcctcttccacatcgccctgggctgccgcatcgcccccctgcagaagcctgtgtgtggcggccctggggtgcggcctgggaagaatgtgaaggtgaccacccagggcctgctggatggccggggcaagggcaagagcatcggccgggcccctgaggccagcctgcaggacaaggagggcgcctag

SEQ ID NO: 147235 - DNA, 1125 bp, synthetic construct; identical to SEQ ID NO: 147234
  misc_feature 1..1125: note = Description of Artificial Sequence: Synthetic coding sequence
  source 1..1125: mol_type = other DNA

SEQ ID NO: 147236 - DNA, 366 bp, synthetic construct
  misc_feature 1..366: note = Description of Artificial Sequence: Synthetic coding sequence
  source 1..366: mol_type = other DNA
atgctgagcaccagccgcagccgcttcatccggaacaccaatgaaagtggagaggaggtgaccaccttctttgattatgactatggagccccctgccacaagtttgatgtgaagcagatcggggcccagctgctgccccccctgtacagcctggtgttcatctttggatttgtgggcaacatgctggtggtgctgatcctgatcaactgcaagaagctgaagtgcctgacagacatctacctgctgaacctggccatcagtgacctgctcttcctgatcaccctgcccctgtgggcccacagcgctgccaatgagtgggtgtttggaaatgccatgtgcaagctgttcaccggcctgtaccactag

SEQ ID NO: 147237 - DNA, 1083 bp, synthetic construct
  misc_feature 1..1083: note = Description of Artificial Sequence: Synthetic coding sequence
  source 1..1083: mol_type = other DNA
atgctgagcaccagccgcagccgcttcatccggaacaccaatgaaagtggagaggaggtgaccaccttctttgattatgactatggagccccctgccacaagtttgatgtgaagcagatcggggcccagctgctgccccccctgtacagcctggtgttcatctttggatttgtgggcaacatgctggtggtgctgatcctgatcaactgcaagaagctgaagtgcctgacagacatctacctgctgaacctggccatcagtgacctgctcttcctgatcaccctgcccctgtgggcccacagcgctgccaatgagtgggtgtttggaaatgccatgtgcaagctgttcaccggcctgtaccacatcggctactttggaggcatcttcttcatcatcctgctgaccatcgaccgctacctggccatcgtgcatgctgtgtttgccctgaaggccaggacagtgaccttcggcgtggtgaccagcgtcatcacctggctggtggccgtgtttgcctctgtgcccggcatcatcttcaccaagtgccagaaggaggacagcgtgtatgtgtgtggcccctacttcccccggggctggaacaacttccacaccatcatgaggaacatcctgggcctggtgctgcccctgctgatcatggtgatctgctacagcggcatcctgaagaccctgctgcgctgcagaaatgagaagaagaggcacagagctgtgcgggtcatcttcaccatcatgattgtgtacttcctgttctggaccccctacaacatcgtcatcctgctgaacaccttccaggagttcttcggcctgagcaactgtgagagcaccagccagctggaccaggccacccaggtgacagagaccctgggcatgacccactgctgcatcaaccccatcatctatgcctttgtgggggagaagttccgccgctacctgtctgtgttcttcaggaagcacatcaccaagcgcttctgcaagcagtgccctgtgttctaccgggagaccgtggatggagtgaccagcaccaacacccccagcactggagagcaggaggtgtctgctggcctgtag

SEQ ID NO: 147238 - DNA, 1068 bp, synthetic construct
  misc_feature 1..1068: note = Description of Artificial Sequence: Synthetic coding sequence
  source 1..1068: mol_type = other DNA
atgaccaccagcctggacacagtggagaccttcggcaccaccagctactatgatgatgtgggcctgctgtgtgagaaggctgacacccgggccctgatggcccagtttgtgccccccctgtacagcctggtgttcaccgtgggcctgctgggcaatgtggtggtggtgatgatcctgatcaagtacagaaggctgcgcatcatgaccaacatctacctgctgaacctggccatcagtgacctgctcttcctggtgaccctgcccttctggatccactacgtgcggggccacaactgggtgtttggacatggcatgtgcaagctgctgagcggcttctaccacacaggcctgtacagcgagatcttcttcatcatcctgctgaccatcgaccgctacctggccatcgtgcatgctgtgtttgccctgcgggccaggacagtgacctttggagtcatcaccagcatcgtgacctggggcctggccgtgctggccgccctgcctgagttcatcttctatgaaacagaggagctgtttgaggagaccctgtgcagcgccctgtacccagaagatactgtgtacagctggaggcacttccacaccctgaggatgaccatcttctgcctggtgctgcccctgctggtgatggccatctgctacacaggcatcatcaagaccctgctgcgctgccccagcaagaagaagtacaaggccatccgcctcatcttcgtcatcatggctgtgttcttcatcttctggaccccctacaacgtggccatcctgctgagcagctaccagagcatcctgtttggaaatgactgtgagaggagcaagcacctggacctggtgatgctggtgacagaggtgattgcctacagccactgctgcatgaaccctgtgatctatgcctttgtgggggagcgcttcaggaagtacctgcggcacttcttccaccgccacctgctgatgcacctgggccgctacatccccttcctgcccagcgagaagctggagaggaccagctctgtgagccccagcacagctgagcctgagctgagcatcgtgttctag

SEQ ID NO: 147239 - DNA, 1068 bp, synthetic construct; identical to SEQ ID NO: 147238
  misc_feature 1..1068: note = Description of Artificial Sequence: Synthetic coding sequence
  source 1..1068: mol_type = other DNA

SEQ ID NO: 147240 - DNA, 1068 bp, synthetic construct; identical to SEQ ID NO: 147238
  misc_feature 1..1068: note = Description of Artificial Sequence: Synthetic coding sequence
  source 1..1068: mol_type = other DNA

SEQ ID NO: 147241 - DNA, 243 bp, synthetic construct
  misc_feature 1..243: note = Description of Artificial Sequence: Synthetic coding sequence
  source 1..243: mol_type = other DNA
atgaccaccagcctggacacagtggagaccttcggcaccaccagctactatgatgatgtgggcctgctgtgtgagaaggctgacacccgggccctgatggcccagtttgtgccccccctgtacagcctggtgttcaccgtgggcctgctgggcaatgtggtggtggtgatgatcctgatcaagtacagaaggctgcgcatcatgaccaacatctacctgctgaacctggccatcagtgactag

SEQ ID NO: 147242 - DNA, 66 bp, synthetic construct
  misc_feature 1..66: note = Description of Artificial Sequence: Synthetic coding sequence
  source 1..66: mol_type = other DNA
atgaccaccagcctggacacagtggagaccttcggcaccaccagctactatgatgatgtgggctag

SEQ ID NO: 147243 - DNA, 1068 bp, synthetic construct; identical to SEQ ID NO: 147238
  misc_feature 1..1068: note = Description of Artificial Sequence: Synthetic coding sequence
  source 1..1068: mol_type = other DNA

SEQ ID NO: 147244 - DNA, 1131 bp, synthetic construct
  misc_feature 1..1131: note = Description of Artificial Sequence: Synthetic coding sequence
  source 1..1131: mol_type = other DNA
atgcccttcggcatccgcatgctgctgcgggcccacaagccaggcagcagccgccgctctgagatgaccaccagcctggacacagtggagaccttcggcaccaccagctactatgatgatgtgggcctgctgtgtgagaaggctgacacccgggccctgatggcccagtttgtgccccccctgtacagcctggtgttcaccgtgggcctgctgggcaatgtggtggtggtgatgatcctgatcaagtaccgccgcctgcgcatcatgaccaacatctacctgctgaacctggccatcagtgacctgctcttcctggtgaccctgcccttctggatccactacgtgcggggccacaactgggtgtttggccacggcatgtgcaagctgctgagcggcttctaccacacaggcctgtacagcgagatcttcttcatcatcctgctgaccatcgaccgctacctggccatcgtgcatgctgtgtttgccctgcgggccaggacagtgaccttcggggtcatcaccagcatcgtgacctggggcctggccgtgctggccgccctgcctgagttcatcttctatgaaacagaggagctgtttgaggagaccctgtgcagcgccctgtacccagaggacacagtgtacagctggaggcacttccacaccctgaggatgaccatcttctgcctggtgctgcccctgctggtgatggccatctgctacacaggcatcatcaagaccctgctgcgctgccccagcaagaagaagtacaaggccatccgcctcatctttgtgatcatggctgtgttcttcatcttctggaccccctacaacgtggccatcctgctgagcagctaccagagcatcctgtttggaaatgactgtgagaggagcaagcacctggacctggtgatgctggtgacagaggtgattgcctacagccactgctgcatgaaccctgtgatctatgcctttgtgggggagcgcttcaggaagtacctgcggcacttcttccaccgccacctgctgatgcacctgggccgctacatccccttcctgcccagcgagaagctggagaggaccagctctgtgagccccagcacagctgagcctgagctgagcatcgtgttctag

SEQ ID NO: 147245 - DNA, 1083 bp, synthetic construct
  misc_feature 1..1083: note = Description of Artificial Sequence: Synthetic coding sequence
  source 1..1083: mol_type = other DNA
atgaaccccacagacattgctgacaccaccctggatgagagcatctacagcaactactacctgtatgagagcatccccaagccctgcaccaaggagggcatcaaggcctttggagagctgttcctgccccccctgtacagcctggtgtttgtgtttggcctgctgggcaacagcgtggtggtgctggtgctcttcaagtacaagaggctgcgctccatgacagatgtgtacctgctgaacctggccatcagtgacctgctgtttgtgttcagcctgcccttctggggctactatgctgctgaccagtgggtgtttggcctgggcctgtgcaagatgatctcctggatgtacctggtgggcttctacagcggcatcttctttgtgatgctgatgagcattgaccgctacctggccatcgtgcatgctgtgttcagcctgcgggcccggaccctgacctatggagtcatcaccagcctggccacctggagcgtggccgtgtttgccagcctgcccggcttcctgttcagcacctgctacacagagaggaaccacacctactgcaagaccaagtacagcctgaacagcaccacctggaaggtgctgagcagcctggagatcaacatcctgggcctggtgatccccctgggcatcatgctgttctgctacagcatgatcatccgcaccctgcagcactgcaagaatgagaagaagaacaaggctgtgaagatgatctttgctgtggtggtgctcttcctgggcttctggaccccctacaacatcgtgctcttcctggagaccctggtggagctggaggtgctgcaggactgcacctttgagcgctacctggactatgccatccaggccacagagaccctggcctttgtgcactgctgcctgaaccccatcatctacttcttcctgggggagaagttcaggaagtacatcctgcagctgttcaagacctgccggggcctgtttgtgctgtgccagtactgcggcctgctgcagatctacagcgctgacacccccagcagcagctacacccagagcaccatggaccatgacctgcatgatgccctgtag

SEQ ID NO: 147246 - DNA, 1059 bp, synthetic construct
  misc_feature 1..1059: note = Description of Artificial Sequence: Synthetic coding sequence
  source 1..1059: mol_type = other DNA
atggactaccaggtgagcagccccatctatgacatcaactactacaccagcgagccctgccagaagatcaacgtgaagcagattgctgcccggctgctgccccccctgtacagcctggtgttcatctttggatttgtgggcaacatgctggtgatcctgatcctgatcaactgcaagaggctgaagtccatgacagacatctacctgctgaacctggccatcagtgacctcttcttcctgctgactgtgcccttctgggcccactacgccgccgcccagtgggactttggaaacaccatgtgccagctgctgaccggcctgtacttcatcggcttcttcagcggcatcttcttcatcatcctgctgaccatcgaccgctacctggccgtggtgcatgctgtgtttgccctgaaggccaggacagtgaccttcggcgtggtgaccagcgtcatcacctgggtggtggccgtgtttgccagcctgcccggcatcatcttcaccaggagccagaaggagggcctgcactacacctgcagcagccacttcccctacagccagtaccagttctggaagaacttccagaccctgaagatcgtcatcctgggcctggtgctgcccctgctggtgatggtgatctgctacagcggcatcctgaagaccctgctgcgctgcagaaatgagaagaagaggcacagagctgtgcggctcatcttcaccatcatgattgtgtacttcctgttctgggccccctacaacatcgtgctgctgctgaacaccttccaggagttcttcggcctgaacaactgcagcagcagcaaccggctggaccaggccatgcaggtgacagagaccctgggcatgacccactgctgcatcaaccccatcatctatgcctttgtgggggagaagttcaggaactacctgctggtgttcttccagaagcacatcgccaagcgcttctgcaagtgctgcagcatcttccagcaggaggcccctgagcgggccagctctgtgtacaccaggagcactggagagcaggagatctctgtgggcctgtag

SEQ ID NO: 147247 - DNA, 1059 bp, synthetic construct; identical to SEQ ID NO: 147246
  misc_feature 1..1059: note = Description of Artificial Sequence: Synthetic coding sequence
  source 1..1059: mol_type = other DNA

SEQ ID NO: 147248 - DNA, 999 bp, synthetic construct
  misc_feature 1..999: note = Description of Artificial Sequence: Synthetic coding sequence
  source 1..999: mol_type = other DNA
ctgcccaagaaccagtgtgaggccaacagaagccccccaccagccagcgccctgctgactggagtgcacctgtggttctgcaacatgctggtgatcctgatcctgatcaactgcaagaggctgaagtccatgacagacatctacctgctgaacctggccatcagtgacctcttcttcctgctgactgtgcccttctgggcccactacgccgccgcccagtgggactttggaaacaccatgtgccagctgctgaccggcctgtacttcatcggcttcttcagcggcatcttcttcatcatcctgctgaccatcgaccgctacctggccgtggtgcatgctgtgtttgccctgaaggccaggacagtgaccttcggcgtggtgaccagcgtcatcacctgggtggtggccgtgtttgccagcctgcccggcatcatcttcaccaggagccagaaggagggcctgcactacacctgcagcagccacttcccctacagccagtaccagttctggaagaacttccagaccctgaagatcgtcatcctgggcctggtgctgcccctgctggtgatggtgatctgctacagcggcatcctgaagaccctgctgcgctgcagaaatgagaagaagaggcacagagctgtgcggctcatcttcaccatcatgattgtgtacttcctgttctgggccccctacaacatcgtgctgctgctgaacaccttccaggagttcttcggcctgaacaactgcagcagcagcaaccggctggaccaggccatgcaggtgacagagaccctgggcatgacccactgctgcatcaaccccatcatctatgcctttgtgggggagaagttcaggaactacctgctggtgttcttccagaagcacatcgccaagcgcttctgcaagtgctgcagcatcttccagcaggaggcccctgagcgggccagctctgtgtacaccaggagcactggagagcaggagatctctgtgggcctgtag

SEQ ID NO: 147249 - DNA, 1059 bp, synthetic construct; identical to SEQ ID NO: 147246
  misc_feature 1..1059: note = Description of Artificial Sequence: Synthetic coding sequence
  source 1..1059: mol_type = other DNA

SEQ ID NO: 147250 - DNA, 1125 bp, synthetic construct
  misc_feature 1..1125: note = Description of Artificial Sequence: Synthetic coding sequence
  source 1..1125: mol_type = other DNA
atgtctggagagagcatgaacttcagtgatgtgtttgacagcagcgaggactactttgtgtctgtgaacaccagctactacagcgtggacagcgagatgctgctgtgcagcctgcaggaggtgcggcagttcagccggctgtttgtgcccatcgcctacagcctcatctgtgtgtttggcctgctgggcaacatcctggtggtgatcacctttgccttctacaagaaggcccgctccatgacagatgtgtacctgctgaacatggccatcgctgacatcctgtttgtgctgaccctgcccttctgggccgtgagccacgccaccggggcctgggtgttcagcaatgccacctgcaagctgctgaagggcatctatgccatcaacttcaactgtggcatgctgctgctgacctgcatctccatggaccgctacatcgccatcgtgcaggccaccaagagcttccggctgcggagcaggaccctgcccaggagcaagatcatctgcctggtggtgtggggcctgagcgtcatcatcagcagcagcacctttgtgttcaaccagaagtacaacacccagggcagtgatgtgtgtgagcccaagtaccagacagtgtctgagcccatccgctggaagctgctgatgctgggcctggagctgctgtttggcttcttcatccccctgatgttcatgatcttctgctacaccttcatcgtgaagaccctggtgcaggcccagaacagcaagaggcacaaggccatccgggtcatcatcgctgtggtgctggtgttcctggcctgccagatcccccacaacatggtgctgctggtgacagctgccaacctgggcaagatgaacagaagctgccagagcgagaagctgattggctacaccaagacagtgacagaggtgctggccttcctgcactgctgcctgaaccctgtgctgtatgccttcatcggccagaagttcaggaactacttcctgaagatcctgaaggacctgtggtgtgtgcggaggaagtacaagagcagcggcttcagctgtgccggccgctacagcgagaacatcagccggcagaccagcgagacagctgacaatgacaatgccagcagcttcaccatgtag

SEQ ID NO: 147251 - DNA, 1125 bp, synthetic construct; identical to SEQ ID NO: 147250
  misc_feature 1..1125: note = Description of Artificial Sequence: Synthetic coding sequence
  source 1..1125: mol_type = other DNA

SEQ ID NO: 147252 - DNA, 1125 bp, synthetic construct; identical to SEQ ID NO: 147250
  misc_feature 1..1125: note = Description of Artificial Sequence: Synthetic coding sequence
  source 1..1125: mol_type = other DNA

SEQ ID NO: 147253 - DNA, 1137 bp, synthetic construct
  misc_feature 1..1137: note = Description of Artificial Sequence: Synthetic coding sequence
  source 1..1137: mol_type = other DNA
atggacctgggcaagcccatgaagtctgtgctggtggtggccctgctggtgatcttccaggtgtgcctgtgccaggatgaggtgacagatgactacatcggggacaacaccaccgtggactacaccctgtttgagagcctgtgcagcaagaaggatgtgaggaacttcaaggcctggttcctgcccatcatgtacagcatcatctgctttgtgggcctgctgggcaatggcctggtggtgctgacctacatctacttcaagaggctgaagaccatgacagacacctacctgctgaacctggccgtggccgacatcctcttcctgctgaccctgcccttctgggcctacagcgctgccaagtcctgggtgtttggagtgcacttctgcaagctgatctttgccatctacaagatgtccttcttcagcggcatgctgctgctgctgtgcatcagcattgacagatatgtggccatcgtgcaggccgtgtctgcccaccgccaccgggcccgggtgctgctgatcagcaagctgagctgtgtgggcatctggatcctggccaccgtgctgagcatccctgagctgctgtacagcgacctgcagaggagcagcagcgagcaggccatgcgctgcagcctcatcacagagcacgtggaggccttcatcaccatccaggtggcccagatggtgattggcttcctggtgcccctgctggccatgtccttctgctacctggtgatcatccgcaccctgctgcaggccaggaactttgagaggaacaaggccatcaaggtgatcatcgctgtggtggtggtgttcatcgtgttccagctgccctacaacggggtggtgctggcccagacagtggccaacttcaacatcaccagcagcacctgtgagctgagcaagcagctgaacatcgcctatgatgtgacctacagcctggcctgtgtgcgctgctgcgtgaaccccttcctgtatgccttcatcggcgtgaagttcagaaatgacctcttcaagctgttcaaggacctgggctgcctgagccaggagcagctgcggcagtggagcagctgccgccacatccgccgcagctccatgtctgtggaggccgagaccaccaccaccttcagcccctag

SEQ ID NO: 147254 - DNA, 1068 bp, synthetic construct
  misc_feature 1..1068: note = Description of Artificial Sequence: Synthetic coding sequence
  source 1..1068: mol_type = other DNA
atggactacaccctggacctgtctgtgaccaccgtgacagactactactacccagacatcttcagcagcccctgtgatgctgagctgatccagaccaacgggaagctgctgctggccgtgttctactgcctgctgtttgtgttcagcctgctgggcaacagcctggtgatcctggtgctggtggtgtgcaagaagctgcggagcatcacagatgtgtacctgctgaacctggccctgagtgacctgctgtttgtgttctccttccccttccagacctactacctgctggaccagtgggtgtttggaacagtgatgtgcaaggtggtgtctggcttctactacatcggcttctacagctccatgttcttcatcaccctgatgtctgtggaccgctacctggccgtggtgcatgctgtgtatgccctgaaggtgaggaccatccgcatgggcaccaccctgtgcctggccgtgtggctgacagccatcatggccaccatccccctgctggtgttctaccaggtggcctctgaagatggagtgctgcagtgctacagcttctacaaccagcagaccctgaagtggaagatcttcaccaacttcaagatgaacatcctgggcctgctgatccccttcaccatcttcatgttctgctacatcaagatcctgcaccagctgaagcgctgccagaaccacaacaagaccaaggccatccggctggtgctgattgtggtgattgccagcctgctcttctgggtgcccttcaacgtggtgctcttcctgaccagcctgcacagcatgcacatcctggatggctgcagcatcagccagcagctgacctacgccacccacgtgacagagatcatctccttcacccactgctgcgtgaaccctgtgatctatgcctttgtgggggagaagttcaagaagcacctgtctgagatcttccagaagagctgcagccagatcttcaactacctgggccggcagatgccccgggagagctgtgagaagagcagcagctgccagcagcacagcagccgcagcagctctgtggactacatcctgtag

SEQ ID NO: 147255 - DNA, 819 bp, synthetic construct
  misc_feature 1..819: note = Description of Artificial Sequence: Synthetic coding sequence
  source 1..819: mol_type = other DNA
atgaggaacctcttccggcagatgacctactacctgctggaccagtgggtgtttggcaccgtgatgtgcaaggtggtgtctggcttctactacatcggcttctacagctccatgttcttcatcaccctgatgtctgtggaccgctacctggccgtggtgcatgctgtgtatgccctgaaggtgaggaccatccgcatgggcaccaccctgtgcctggccgtgtggctgacagccatcatggccaccatccccctgctggtgttctaccaggtggcctctgaagatggagtgctgcagtgctacagcttctacaaccagcagaccctgaagtggaagatcttcaccaacttcaagatgaacatcctgggcctgctgatccccttcaccatcttcatgttctgctacatcaagatcctgcaccagctgaagcgctgccagaaccacaacaagaccaaggccatccggctggtgctgattgtggtgattgccagcctgctcttctgggtgcccttcaacgtggtgctcttcctgaccagcctgcacagcatgcacatcctggatggctgcagcatcagccagcagctgacctacgccacccacgtgacagagatcatctccttcacccactgctgcgtgaaccctgtgatctatgcctttgtgggggagaagttcaagaagcacctgtctgagatcttccagaagagctgcagccagatcttcaactacctgggccggcagatgccccgggagagctgtgagaagagcagcagctgccagcagcacagcagccgcagcagctctgtggactacatcctgtag

SEQ ID NO: 147256 - DNA, 1074 bp, synthetic construct
  misc_feature 1..1074: note = Description of Artificial Sequence: Synthetic coding sequence
  source 1..1074: mol_type = other DNA
atggctgatgattatggcagcgagagcaccagctccatggaggactatgtgaacttcaacttcacagacttctactgtgagaagaacaacgtgcggcagtttgccagccacttcctgccccccctgtactggctggtgttcatcgtgggcgccctgggcaacagcctggtgatcctggtgtactggtactgcaccagggtgaagaccatgacagacatgttcctgctgaacctggccatcgctgacctgctcttcctggtgaccctgcccttctgggccatcgctgctgctgaccagtggaagttccagaccttcatgtgcaaggtggtgaacagcatgtacaagatgaacttctacagctgtgtgctgctgatcatgtgcatctctgtggaccgctacatcgccatcgcccaggccatgagggcccacacctggagggagaagaggctgctgtacagcaagatggtgtgcttcaccatctgggtgctggccgccgccctgtgcatccctgagatcctgtacagccagatcaaggaggagagcggcatcgccatctgcaccatggtgtaccccagtgatgagagcaccaagctgaagtctgctgtgctgaccctgaaggtgatcctgggcttcttcctgccctttgtggtgatggcctgctgctacaccatcatcatccacaccctcatccaggccaagaagagcagcaagcacaaggccctgaaggtgaccatcaccgtgctgactgtgtttgtgctgagccagttcccctacaactgcatcctgctggtgcagaccattgatgcctatgccatgttcatcagcaactgtgctgtgtccaccaacatcgacatctgcttccaggtgacccagaccatcgccttcttccacagctgcctgaaccctgtgctgtatgtgtttgtgggggagcgcttcagaagagacctggtgaagaccctgaagaacctgggctgcatcagccaggcccagtgggtgtccttcacccggcgggagggcagcctgaagctgagctccatgctgctggagaccaccagcggggccctgagcctgtag

SEQ ID NO: 147257 - DNA, 1110 bp, synthetic construct
  misc_feature 1..1110: note = Description of Artificial Sequence: Synthetic coding sequence
  source 1..1110: mol_type = other DNA
atgacccccacagacttcaccagccccatccccaacatggctgatgattatggcagcgagagcaccagctccatggaggactatgtgaacttcaacttcacagacttctactgtgagaagaacaacgtgcggcagtttgccagccacttcctgccccccctgtactggctggtgttcatcgtgggcgccctgggcaacagcctggtgatcctggtgtactggtactgcaccagggtgaagaccatgacagacatgttcctgctgaacctggccatcgctgacctgctcttcctggtgaccctgcccttctgggccatcgctgctgctgaccagtggaagttccagaccttcatgtgcaaggtggtgaacagcatgtacaagatgaacttctacagctgtgtgctgctgatcatgtgcatctctgtggaccgctacatcgccatcgcccaggccatgagggcccacacctggagggagaagaggctgctgtacagcaagatggtgtgcttcaccatctgggtgctggccgccgccctgtgcatccctgagatcctgtacagccagatcaaggaggagagcggcatcgccatctgcaccatggtgtaccccagtgatgagagcaccaagctgaagtctgctgtgctgaccctgaaggtgatcctgggcttcttcctgccctttgtggtgatggcctgctgctacaccatcatcatccacaccctcatccaggccaagaagagcagcaagcacaaggccctgaaggtgaccatcaccgtgctgactgtgtttgtgctgagccagttcccctacaactgcatcctgctggtgcagaccattgatgcctatgccatgttcatcagcaactgtgctgtgtccaccaacatcgacatctgcttccaggtgacccagaccatcgccttcttccacagctgcctgaaccctgtgctgtatgtgtttgtgggggagcgcttcagaagagacctggtgaagaccctgaagaacctgggctgcatcagccaggcccagtgggtgtccttcacccggcgggagggcagcctgaagctgagctccatgctgctggagaccaccagcggggccctgagcctgtag

SEQ ID NO: 147258 - DNA, 1074 bp, synthetic construct; identical to SEQ ID NO: 147256
  misc_feature 1..1074: note = Description of Artificial Sequence: Synthetic coding sequence
  source 1..1074: mol_type = other DNA

SEQ ID NO: 147259 - DNA, 1053 bp, synthetic construct
  misc_feature 1..1053: note = Description of Artificial Sequence: Synthetic coding sequence
  source 1..1053: mol_type = other DNA
atggccctggagcagaaccagagcacagactactactatgaagaaaatgagatgaatggcacctatgactacagccagtatgagctgatctgcatcaaggaggatgtgcgggagtttgccaaggtgttcctgcctgtgttcctgaccatcgtgtttgtgattggcctggccggcaacagcatggtggtggccatctatgcctactacaagaagcagaggaccaagacagatgtgtacatcctgaacctggccgtggccgacctgctgctgctcttcaccctgcccttctgggccgtgaatgctgtgcacggctgggtgctgggcaagatcatgtgcaagatcaccagcgccctgtacaccctgaactttgtgtctggcatgcagttcctggcctgcatcagcattgaccgctacgtggccgtgaccaaggtgcccagccagagcggcgtgggcaagccctgctggatcatctgcttctgtgtgtggatggccgccatcctgctgagcatcccccagctggtgttctacacagtgaatgacaatgcccgctgcatccccatcttcccccgctacctgggcacctccatgaaggccctgatccagatgctggagatctgcattggatttgtggtgcccttcctgatcatgggcgtgtgctacttcatcacagcccggaccctgatgaagatgcccaacatcaagatcagccggcccctgaaggtgctgctgactgtggtgattgtgttcatcgtgacccagctgccctacaacatcgtgaagttctgccgggccatcgacatcatctacagcctcatcaccagctgcaacatgagcaagaggatggacatcgccatccaggtgacagagagcatcgccctcttccacagctgcctgaaccccatcctgtatgtgttcatgggcgccagcttcaagaactacgtgatgaaggtggccaagaagtatggctcctggaggcggcagaggcagagcgtggaggagttcccctttgacagcgagggccccacagagcccaccagcaccttcagcatctag

SEQ ID NO: 147260 - DNA, 825 bp, synthetic construct
  misc_feature 1..825: note = Description of Artificial Sequence: Synthetic coding sequence
  source 1..825: mol_type = other DNA
atggccctggagcagaaccagagcacagactactactatgaagaaaatgagatgaatggcacctatgactacagccagtatgagctgatctgcatcaaggaggatgtgcgggagtttgccaaggtgttcctgcctgtgttcctgaccatcgtgtttgtgattggcctggccggcaacagcatggtggtggccatctatgcctactacaagaagcagaggaccaagacagatgtgtacatcctgaacctggccgtggccgacctgctgctgctcttcaccctgcccttctgggccgtgaatgctgtgcacggctgggtgctgggcaagatcatgtgcaagatcaccagcgccctgtacaccctgaactttgtgtctggcatgcagttcctggcctgcatcagcattgaccgctacgtggccgtgaccaaggtgcccagccagagcggcgtgggcaagccctgctggatcatctgcttctgtgtgtggatggccgccatcctgctgagcatcccccagctggtgttctacacagtgaatgacaatgcccgctgcatccccatcttcccccgctacctgggcacctccatgaaggccctgatccagatgctggagatctgcattggatttgtggtgcccttcctgatcatgggcgtgtgctacttcatcacagcccggaccctgatgaagatgcccaacatcaagatcagccggcccctgaaggtgctgctgactgtggtgattgtgttcatcgtgacccagctgccctttgcctggatccacatgaatgatgccttccccagcaacaagaccagcgccctcttctag

SEQ ID NO: 147261 - DNA, 1071 bp, synthetic construct
  misc_feature 1..1071: note = Description of Artificial Sequence: Synthetic coding sequence
  source 1..1071: mol_type = other DNA
atgatctacacccgcttcctgaagggcagcctgaagatggccaactacaccctggccccagaagatgaatatgatgtgctgattgaaggagagctggagagtgatgaagctgagcagtgtgacaagtatgatgcccaggccctgagcgcccagctggtgcccagcctgtgcagcgctgtgtttgtgattggagtgctggacaacctgctggtggtgctgatcctggtgaagtacaagggcctgaagagggtggagaacatctacctgctgaacctggccgtgagcaacctgtgcttcctgctgaccctgcccttctgggcccatgctggaggagaccccatgtgcaagatcctgattggcctgtactttgtgggcctgtacagcgagaccttcttcaactgcctgctgactgtgcagcgctacctggtgttcctgcacaagggcaacttcttcagcgccaggagaagagtgccctgtggcatcatcacctctgtgctggcctgggtgacagccatcctggccaccctgcctgagtttgtggtgtacaagccccagatggaggaccagaagtacaagtgtgccttcagcaggacccccttcctgcctgcagatgagaccttctggaagcacttcctgaccctgaagatgaacatctctgtgctggtgctgcccctcttcatcttcaccttcctgtatgtgcagatgaggaagaccctgcgcttccgggagcagcgctacagcctcttcaagctggtgtttgccatcatggtggtgttcctgctgatgtgggccccctacaacatcgccttcttcctgagcaccttcaaggagcacttcagcctgagtgactgcaagagcagctacaacctggacaagtctgtgcacatcaccaagctgattgccaccacccactgctgcatcaaccccctgctgtatgccttcctggatggcaccttcagcaagtacctgtgccgctgcttccacctgcggagcaacacccccctgcagccccggggccagagcgcccagggcaccagccgggaggagccagaccacagcacagaggtgtag

SEQ ID NO: 147262 - DNA, 1035 bp, synthetic construct
  misc_feature 1..1035: note = Description of Artificial Sequence: Synthetic coding sequence
  source 1..1035: mol_type = other DNA
atggccaactacaccctggccccagaagatgaatatgatgtgctgattgaaggagagctggagagtgatgaagctgagcagtgtgacaagtatgatgcccaggccctgagcgcccagctggtgcccagcctgtgcagcgctgtgtttgtgattggagtgctggacaacctgctggtggtgctgatcctggtgaagtacaagggcctgaagagggtggagaacatctacctgctgaacctggccgtgagcaacctgtgcttcctgctgaccctgcccttctgggcccatgctggaggagaccccatgtgcaagatcctgattggcctgtactttgtgggcctgtacagcgagaccttcttcaactgcctgctgactgtgcagcgctacctggtgttcctgcacaagggcaacttcttcagcgccaggagaagagtgccctgtggcatcatcacctctgtgctggcctgggtgacagccatcctggccaccctgcctgagtttgtggtgtacaagccccagatggaggaccagaagtacaagtgtgccttcagcaggacccccttcctgcctgcagatgagaccttctggaagcacttcctgaccctgaagatgaacatctctgtgctggtgctgcccctcttcatcttcaccttcctgtatgtgcagatgaggaagaccctgcgcttccgggagcagcgctacagcctcttcaagctggtgtttgccatcatggtggtgttcctgctgatgtgggccccctacaacatcgccttcttcctgagcaccttcaaggagcacttcagcctgagtgactgcaagagcagctacaacctggacaagtctgtgcacatcaccaagctgattgccaccacccactgctgcatcaaccccctgctgtatgccttcctggatggcaccttcagcaagtacctgtgccgctgcttccacctgcggagcaacacccccctgcagccccggggccagagcgcccagggcaccagccgggaggagccagaccacagcacagaggtgtag

SEQ ID NO: 147263 - DNA, 1035 bp, synthetic construct; identical to SEQ ID NO: 147262
  misc_feature 1..1035: note = Description of Artificial Sequence: Synthetic coding sequence
  source 1..1035: mol_type = other DNA

SEQ ID NO: 147264 - DNA, 1035 bp, synthetic construct; identical to SEQ ID NO: 147262
  misc_feature 1..1035: note = Description of Artificial Sequence: Synthetic coding sequence
  source 1..1035: mol_type = other DNA

SEQ ID NO: 147265 - DNA, 654 bp, synthetic construct
  misc_feature 1..654: note = Description of Artificial Sequence: Synthetic coding sequence
  source 1..654: mol_type = other DNA
atggccaactacaccctggccccagaagatgaatatgatgtgctgattgaaggagagctggagagtgatgaagctgagcagtgtgacaagtatgatgcccaggccctgagcgcccagctggtgcccagcctgtgcagcgctgtgtttgtgattggagtgctggacaacctgctggtggtgctgatcctggtgaagtacaagggcctgaagagggtggagaacatctacctgctgaacctggccgtgagcaacctgtgcttcctgctgaccctgcccttctgggcccatgctggaggagaccccatgtgcaagatcctgattggcctgtactttgtgggcctgtacagcgagaccttcttcaactgcctgctgactgtgcagcgctacctggtgttcctgcacaagggcaacttcttcagcgccaggagaagagtgccctgtggcatcatcacctctgtgctggcctgggtgacagccatcctggccaccctgcctgagtttgtggtgtacaagccccagatggaggaccagaagtacaagtgtgccttcagcaggacccccttcctgcctgcagatgagaccttctggaagcacttcctgaccctgaagatgaacatctctgtgctggtgctgcccctcttcatcttcacctag

SEQ ID NO: 147266 - DNA, 1194 bp, synthetic construct
  misc_feature 1..1194: note = Description of Artificial Sequence: Synthetic coding sequence
  source 1..1194: mol_type = other DNA
atggcccccatcagcctgtcctggctgctgcggctggccaccttctgccacctgactgtgctgctggccggccagcaccacggcgtgaccaagtgcaacatcacctgcagcaagatgaccagcaagatccctgtggccctgctgatccactaccagcagaaccaggccagctgtgggaagagggccatcatcctggagacccggcagcacaggctcttctgtgccgaccccaaggagcagtgggtgaaggatgccatgcagcacctggaccggcaggccgccgccctgaccagaaatggaggcacctttgagaagcagattggagaggtgaagcccaggaccaccccagctgctgggggcatggatgagagcgtggtgctggagcctgaggccaccggggagagcagcagcctggagcccacccccagcagccaggaggcccagagggccctgggcaccagccctgagctgcccactggagtgacaggcagcagcggcacccggctgccccccacccccaaggcccaggacggcggccctgtgggcacagagctgttccgggtgccccctgtgtccacagctgccacctggcagagcagcgccccccaccagcccggccccagcctgtgggccgaggccaagaccagcgaggcccccagcacccaggaccccagcacccaggccagcacagccagcagccctgcccctgaggagaatgcccccagcgagggccagagggtgtggggccagggccagagccccaggcctgagaacagcctggagcgggaggagatgggccctgtgcctgcccacacagatgccttccaggactggggccctggctccatggcccacgtgtctgtggtgcctgtgtcctctgagggcacccccagccgggagcctgtggccagcggctcctggacccccaaggccgaggagcccatccacgccaccatggacccccagaggctgggcgtgctgatcacccctgtgcctgatgcccaggccgccacccggcggcaggccgtgggcctgctggccttcctgggcctgctcttctgcctgggcgtggccatgttcacctaccagagcctgcagggctgccccaggaagatggccggggagatggccgagggcctgcgctacatccccaggagctgtggcagcaacagctatgtgctggtgcctgtgtag

SEQ ID NO: 147267 - DNA, 1164 bp, synthetic construct
  misc_feature 1..1164: note = Description of Artificial Sequence: Synthetic coding sequence
  source 1..1164: mol_type = other DNA
atgagggagcccctggaggccttcaagctggccgacctggacttcaggaagagcagcctggccagcggctggaggatggccagcggggccttcaccatggaccagtttcctgagagcgtgacagagaactttgaatatgatgacctggccgaggcctgctacatcggggacatcgtggtgtttggaacagtgttcctgagcatcttctacagcgtcatctttgccatcggcctggtgggcaacctgctggtggtgtttgccctgaccaacagcaagaagcccaagtctgtgacagacatctacctgctgaacctggccctgagtgacctgctgtttgtggccaccctgcccttctggacccactacctgatcaatgagaagggcctgcacaatgccatgtgcaagttcaccacagccttcttcttcatcggcttcttcggcagcatcttcttcatcaccgtcatcagcattgaccgctacctggccatcgtgctggccgccaacagcatgaacaacagaacagtgcagcacggcgtgaccatcagcctgggcgtgtgggccgccgccatcctggtggccgccccccagttcatgttcaccaagcagaaggaaaatgaatgtctgggggactacccagaggtgctgcaggagatctggcctgtgctgagaaatgtggagaccaacttcctgggcttcctgctgcccctgctgatcatgagctactgctacttccgcatcatccagaccctcttcagctgcaagaaccacaagaaggccaaggccatcaagctgatcctgctggtggtgattgtgttcttcctgttctggaccccctacaacgtgatgatcttcctggagaccctgaagctgtatgacttcttccccagctgtgacatgaggaaggacctgcggctggccctgtctgtgacagagaccgtggccttcagccactgctgcctgaaccccctcatctatgcctttgctggggagaagttccgccgctacctgtaccacctgtatggcaagtgcctggccgtgctgtgtggccgctctgtgcacgtggacttcagcagcagcgagagccagaggagccgccacggctctgtgctgagcagcaacttcacctaccacaccagtgatggagatgccctgctgctgctgtag

SEQ ID NO: 147268 - DNA, 1068 bp, synthetic construct
  misc_feature 1..1068: note = Description of Artificial Sequence: Synthetic coding sequence
  source 1..1068: mol_type = other DNA
atggaccagtttcctgagagcgtgacagagaactttgaatatgatgacctggccgaggcctgctacatcggggacatcgtggtgtttggaacagtgttcctgagcatcttctacagcgtcatctttgccatcggcctggtgggcaacctgctggtggtgtttgccctgaccaacagcaagaagcccaagtctgtgacagacatctacctgctgaacctggccctgagtgacctgctgtttgtggccaccctgcccttctggacccactacctgatcaatgagaagggcctgcacaatgccatgtgcaagttcaccacagccttcttcttcatcggcttcttcggcagcatcttcttcatcaccgtcatcagcattgaccgctacctggccatcgtgctggccgccaacagcatgaacaacagaacagtgcagcacggcgtgaccatcagcctgggcgtgtgggccgccgccatcctggtggccgccccccagttcatgttcaccaagcagaaggaaaatgaatgtctgggggactacccagaggtgctgcaggagatctggcctgtgctgagaaatgtggagaccaacttcctgggcttcctgctgcccctgctgatcatgagctactgctacttccgcatcatccagaccctcttcagctgcaagaaccacaagaaggccaaggccatcaagctgatcctgctggtggtgattgtgttcttcctgttctggaccccctacaacgtgatgatcttcctggagaccctgaagctgtatgacttcttccccagctgtgacatgaggaaggacctgcggctggccctgtctgtgacagagaccgtggccttcagccactgctgcctgaaccccctcatctatgcctttgctggggagaagttccgccgctacctgtaccacctgtatggcaagtgcctggccgtgctgtgtggccgctctgtgcacgtggacttcagcagcagcgagagccagaggagccgccacggctctgtgctgagcagcaacttcacctaccacaccagtgatggagatgccctgctgctgctgtag

SEQ ID NO: 147269 - DNA, 321 bp, synthetic construct
  misc_feature 1..321: note = Description of Artificial Sequence: Synthetic coding sequence
  source 1..321: mol_type = other DNA
atggaccagtttcctgagagcgtgacagagaactttgaatatgatgacctggccgaggcctgctacatcggggacatcgtggtgtttggaacagtgttcctgagcatcttctacagcgtcatctttgccatcggcctggtgggcaacctgctggtggtgtttgccctgaccaacagcaagaagcccaagtctgtgacagacatctacctgctgaacctggccctgagtgacctgctgtttgtggccaccctgcccttctggacccactacctgatcaatgagaagggcctgcacaatgccatgtgcaagttcaccacctag

SEQ ID NO: 147270 - DNA, 501 bp, synthetic construct
  misc_feature 1..501: note = Description of Artificial Sequence: Synthetic coding sequence
  source 1..501: mol_type = other DNA
atggaccagtttcctgagagcgtgacagagaactttgaatatgatgacctggccgaggcctgctacatcggggacatcgtggtgtttggaacagtgttcctgagcatcttctacagcgtcatctttgccatcggcctggtgggcaacctgctggtggtgtttgccctgaccaacagcaagaagcccaagtctgtgacagacatctacctgctgaacctggccctgagtgacctgctgtttgtggccaccctgcccttctggacccactacctgatcaatgagaagggcctgcacaatgccatgtgcaagttcaccacagccttcttcttcatcggcttcttcggcagcatcttcttcatcaccgtcatcagcattgaccgctacctggccatcgtgctggccgccaacagcatgaacaacagaacagtgcagcacggcgtgaccatcagcctgggcgtgtgggccgccgccatcctggtggccgccccccagttcatgtag

SEQ ID NO: 147271 - DNA, 1092 bp, synthetic construct
  misc_feature 1..1092: note = Description of Artificial Sequence: Synthetic coding sequence
  source 1..1092: mol_type = other DNA
atggccagcggcaaggccttcaccatggaccagtttcctgagagcgtgacagagaactttgaatatgatgacctggccgaggcctgctacatcggggacatcgtggtgtttggaacagtgttcctgagcatcttctacagcgtcatctttgccatcggcctggtgggcaacctgctggtggtgtttgccctgaccaacagcaagaagcccaagtctgtgacagacatctacctgctgaacctggccctgagtgacctgctgtttgtggccaccctgcccttctggacccactacctgatcaatgagaagggcctgcacaatgccatgtgcaagttcaccacagccttcttcttcatcggcttcttcggcagcatcttcttcatcaccgtcatcagcattgaccgctacctggccatcgtgctggccgccaacagcatgaacaacagaacagtgcagcacggcgtgaccatcagcctgggcgtgtgggccgccgccatcctggtggccgccccccagttcatgttcaccaagcagaaggaaaatgaatgtctgggggactacccagaggtgctgcaggagatctggcctgtgctgagaaatgtggagaccaacttcctgggcttcctgctgcccctgctgatcatgagctactgctacttccgcatcatccagaccctcttcagctgcaagaaccacaagaaggccaaggccatcaagctgatcctgctggtggtgattgtgttcttcctgttctggaccccctacaacgtgatgatcttcctggagaccctgaagctgtatgacttcttccccagctgtgacatgaggaaggacctgcggctggccctgtctgtgacagagaccgtggccttcagccactgctgcctgaaccccctcatctatgcctttgctggggagaagttccgccgctacctgtaccacctgtatggcaagtgcctggccgtgctgtgtggccgctctgtgcacgtggacttcagcagcagcgagagccagaggagccgccacggctctgtgctgagcagcaacttcacctaccacaccagtgatggagatgccctgctgctgctgtag

SEQ ID NO: 147272 - DNA, 1068 bp, synthetic construct; identical to SEQ ID NO: 147268
  misc_feature 1..1068: note = Description of Artificial Sequence: Synthetic coding sequence
  source 1..1068: mol_type = other DNA

SEQ ID NO: 147273 - DNA, 1068 bp, synthetic construct; identical to SEQ ID NO: 147268
  misc_feature 1..1068: note = Description of Artificial Sequence: Synthetic coding sequence
  source 1..1068: mol_type = other DNA

SEQ ID NO: 147274 - DNA, 324 bp, synthetic construct
  misc_feature 1..324: note = Description of Artificial Sequence: Synthetic coding sequence
  source 1..324: mol_type = other DNA
atggcccgggccgccctgtctgctgcccccagcaacccccggctgctgcgggtggccctgctgctgctgctgctggtggccgccggccggcgggctgctggggcctctgtggccacagagctgcgctgccagtgcctgcagaccctgcagggcatccaccccaagaacatccagagcgtgaatgtgaagagccctggcccccactgtgcccagacagaggtgattgccaccctgaagaatggaaggaaggcctgcctgaacccagccagccccatcgtgaagaagatcatcgagaagatgctgaacagcgacaagagcaactag

SEQ ID NO: 147275 - DNA, 285 bp, synthetic construct
  misc_feature 1..285: note = Description of Artificial Sequence: Synthetic coding sequence
  source 1..285: mol_type = other DNA
atgtctgtgaagggcatggccatcgccctggccgtcatcctgtgtgccaccgtggtgcagggcttccccatgttcaagaggggccgctgcctgtgcatcggccctggggtgaaggctgtgaaggtggccgacatcgagaaggccagcatcatgtaccccagcaacaactgtgacaagattgaggtgatcatcaccctgaaggagaacaagggccagcgctgcctgaaccccaagagcaagcaggcccggctcatcatcaagaaggtggagaggaagaacttctag

SEQ ID NO: 147276 - DNA, 285 bp, synthetic construct; identical to SEQ ID NO: 147275
  misc_feature 1..285: note = Description of Artificial Sequence: Synthetic coding sequence
  source 1..285: mol_type = other DNA

SEQ ID NO: 147277 - DNA, 336 bp, synthetic construct
  misc_feature 1..336: note = Description of Artificial Sequence: Synthetic coding sequence
  source 1..336: mol_type = other DNA
atgagcctgctgccccggcgggcccctcctgtgtccatgaggctgctggccgccgccctgctgctgctgctgctggccctgtacacagcccgggtggatggcagcaagtgcaagtgcagcaggaagggccccaagatccgctacagtgatgtgaagaagctggagatgaagcccaagtacccccactgtgaggagaagatggtgatcatcaccaccaagtctgtgagccgctaccggggccaggagcactgcctgcaccccaagctgcagagcaccaagcgcttcatcaagtggtacaatgcctggaatgagaagagaagagtgtatgaggagtag

SEQ ID NO: 147278 - DNA, 300 bp, synthetic construct
  misc_feature 1..300: note = Description of Artificial Sequence: Synthetic coding sequence
  source 1..300: mol_type = other DNA
atgaggctgctggccgccgccctgctgctgctgctgctggccctgtacacagcccgggtggatggcagcaagtgcaagtgcagcaggaagggccccaagatccgctacagtgatgtgaagaagctggagatgaagcccaagtacccccactgtgaggagaagatggtgatcatcaccaccaagtctgtgagccgctaccggggccaggagcactgcctgcaccccaagctgcagagcaccaagcgcttcatcaagtggtacaatgcctggaatgagaagagaagagtgtatgaggagtag

SEQ ID NO: 147279 - DNA, 822 bp, synthetic construct
  misc_feature 1..822: note = Description of Artificial Sequence: Synthetic coding sequence
  source 1..822: mol_type = other DNA
atgagcggcagccagagcgaggtggcccccagcccccagagccccaggagccctgagatgggccgggacctgcggcccggcagccgggtgctgctgctgctgctgctgctgctgctggtgtacctgacccagcctggaaatggaaatgaaggctctgtgacaggcagctgctactgcggcaagaggatcagcagtgacagcccccccagcgtgcagttcatgaaccggctgaggaagcacctgcgggcctaccaccgctgcctgtactacacccgcttccagctgctgtcctggagcgtgtgtggcggcaacaaggacccctgggtgcaggagctgatgagctgcctggacctgaaggaatgtggccacgcctacagcggcatcgtggcccaccagaagcacctgctgcccaccagcccccccatcagccaggccagcgagggcgccagcagtgacatccacaccccagcccagatgctgctgagcaccctgcagagcacccagaggcccaccctgcctgtgggcagcctgagcagtgacaaggagctgacccggcccaatgagaccaccatccacacagctggccacagcctggccgccggccctgaggccggggagaaccagaagcagcctgagaagaatgccggccccacagcccggaccagcgccaccgtgcctgtgctgtgcctgctggccatcatcttcatcctgacagctgccctgtcctatgtgctgtgcaagagaagaagaggccagagcccccagagcagcccagacctgcctgtgcactacatccctgtggccccagacagcaacacctag

SEQ ID NO: 147280 - DNA, 822 bp, synthetic construct; identical to SEQ ID NO: 147279
  misc_feature 1..822: note = Description of Artificial Sequence: Synthetic coding sequence
  source 1..822: mol_type = other DNA

SEQ ID NO: 147281 - DNA, 360 bp, synthetic construct
  misc_feature 1..360: note = Description of Artificial Sequence: Synthetic coding sequence
  source 1..360: mol_type = other DNA
atgaaggtgctgatcagcagcctgctgctgctgctgcccctgatgctgatgtccatggtgagcagcagcctgaaccctggggtggcccggggccaccgggaccggggccaggccagccgccgctggctgcaggagggcggccaggagtgtgagtgcaaggactggttcctgcgggcccccaggaggaagttcatgacagtgtctggcctgcccaagaagcagtgcccctgtgaccacttcaagggaaatgtgaagaagaccaggcaccagaggcaccacaggaagcccaacaagcacagccgggcctgccagcagttcctgaagcagtgccagctgcggagctttgccctgcccctgtag

SEQ ID NO: 147282 - DNA, 360 bp, synthetic construct; identical to SEQ ID NO: 147281
  misc_feature 1..360: note = Description of Artificial Sequence: Synthetic coding sequence
  source 1..360: mol_type = other DNA

SEQ ID NO: 147283 - DNA, 324 bp, synthetic construct
  misc_feature 1..324: note = Description of Artificial Sequence: Synthetic coding sequence
  source 1..324: mol_type = other DNA
atggcccgggccaccctgtctgctgcccccagcaacccccggctgctgcgggtggccctgctgctgctgctgctggtggccgccagccggcgggctgctggggcccccctggccacagagctgcgctgccagtgcctgcagaccctgcagggcatccacctgaagaacatccagagcgtgaaggtgaagagccctggcccccactgtgcccagacagaggtgattgccaccctgaagaatggccagaaggcctgcctgaacccagccagccccatggtgaagaagatcatcgagaagatgctgaagaatggcaagagcaactag

SEQ ID NO: 147284 - DNA, 324 bp, synthetic construct
  misc_feature 1..324: note = Description of Artificial Sequence: Synthetic coding sequence
  source 1..324: mol_type = other DNA
atggcccacgccaccctgtctgctgcccccagcaacccccggctgctgcgggtggccctgctgctgctgctgctggtggccgccagccggcgggctgctggggcctctgtggtgacagagctgcgctgccagtgcctgcagaccctgcagggcatccacctgaagaacatccagagcgtgaatgtgcgcagccctggcccccactgtgcccagacagaggtgattgccaccctgaagaatggcaagaaggcctgcctgaacccagccagccccatggtgcagaagatcatcgagaagatcctgaacaagggcagcaccaactag

SEQ ID NO: 147285 - DNA, 345 bp, synthetic construct
  misc_feature 1..345: note = Description of Artificial Sequence: Synthetic coding sequence
  source 1..345: mol_type = other DNA
atgagcctgctgagcagccgggccgcccgggtgcccggccccagcagcagcctgtgtgccctgctggtgctgctgctgctgctgacccagcccggccccatcgccagcgctggccctgctgctgctgtgctgcgggagctgcgctgtgtgtgcctgcagaccacccagggcgtgcaccccaagatgatcagcaacctgcaggtgtttgccatcggcccccagtgcagcaaggtggaggtggtggccagcctgaagaatggcaaggagatctgcctggaccctgaggcccccttcctgaagaaggtgatccagaagatcctggatggcggcaacaaggaaaattag

SEQ ID NO: 147286 - DNA, 1053 bp, synthetic construct
  misc_feature 1..1053: note = Description of Artificial Sequence: Synthetic coding sequence
  source 1..1053: mol_type = other DNA
atgagcaacatcacagacccccagatgtgggactttgatgacctgaacttcaccggcatgcccccagcagatgaggactacagcccctgcatgctggagacagagaccctgaacaagtatgtggtgatcatcgcctatgccctggtgttcctgctgagcctgctgggcaacagcctggtgatgctggtgatcctgtacagccgggtgggccgctctgtgacagatgtgtacctgctgaacctggccctggccgacctgctgtttgccctgaccctgcccatctgggccgccagcaaggtgaatggctggatcttcggcaccttcctgtgcaaggtggtgtccctgctgaaggaggtgaacttctacagcggcatcctgctgctggcctgcatctctgtggaccgctacctggccatcgtgcacgccaccaggaccctgacccagaagaggcacctggtgaagtttgtgtgcctgggctgctggggcctgtccatgaacctgagcctgcccttcttcctgttccggcaggcctaccaccccaacaacagcagccctgtgtgctatgaggtgctgggcaatgacacagccaagtggaggatggtgctgcgcatcctgccccacaccttcggcttcatcgtgcccctgtttgtgatgctgttctgctacggcttcaccctgcggaccctcttcaaggcccacatgggccagaagcaccgggccatgagggtcatctttgctgtggtgctgatcttcctgctgtgctggctgccctacaacctggtgctgctggccgacaccctgatgaggacccaggtgatccaggagagctgtgaaagaagaaacaacatcggccgggccctggatgccacagagatcctgggcttcctgcacagctgcctgaaccccatcatctatgccttcatcggccagaacttccgccacggcttcctgaagatcctggccatgcacggcctggtgtccaaggagttcctggcccggcaccgggtgaccagctacaccagcagctctgtgaatgtgagcagcaacctgtag

SEQ ID NO: 147287 - DNA, 885 bp, synthetic construct
  misc_feature 1..885: note = Description of Artificial Sequence: Synthetic coding sequence
  source 1..885: mol_type = other DNA
atgagcaacatcacagacccccagatgtgggactttgatgacctgaacttcaccggcatgcccccagcagatgaggactacagcccctgcatgctggagacagagaccctgaacaagtatgtggtgatcatcgcctatgccctggtgttcctgctgagcctgctgggcaacagcctggtgatgctggtgatcctgtacagccgggtgggccgctctgtgacagatgtgtacctgctgaacctggccatcgtgcacgccaccaggaccctgacccagaagaggcacctggtgaagtttgtgtgcctgggctgctggggcctgtccatgaacctgagcctgcccttcttcctgttccggcaggcctaccaccccaacaacagcagccctgtgtgctatgaggtgctgggcaatgacacagccaagtggaggatggtgctgcgcatcctgccccacaccttcggcttcatcgtgcccctgtttgtgatgctgttctgctacggcttcaccctgcggaccctcttcaaggcccacatgggccagaagcaccgggccatgagggtcatctttgctgtggtgctgatcttcctgctgtgctggctgccctacaacctggtgctgctggccgacaccctgatgaggacccaggtgatccaggagagctgtgaaagaagaaacaacatcggccgggccctggatgccacagagatcctgggcttcctgcacagctgcctgaaccccatcatctatgccttcatcggccagaacttccgccacggcttcctgaagatcctggccatgcacggcctggtgtccaaggagttcctggcccggcaccgggtgaccagctacaccagcagctctgtgaatgtgagcagcaacctgtag

SEQ ID NO: 147288 - DNA, 804 bp, synthetic construct
  misc_feature 1..804: note = Description of Artificial Sequence: Synthetic coding sequence
  source 1..804: mol_type = other DNA
atggtgctggaggtgtctgaccaccaggtgctgaatgatgctgaggtggccgccctgctggagaacttcagcagcagctatgactatggagaaaatgaaagtgacagctgctgcaccagccccccctgcccccaggacttcagcctgaactttgaccgggccttcctgcctgccctgtacagcctgctcttcctgctgggcctgctgggcaatggagctgtggccgctgtgctgctgagcagaagaacagccctgagcagcacagacaccttcctgctgcacctggccgtggccgacaccctgctggtgctgaccctgcccctgtgggccgtggatgctgctgtgcagtgggtgtttggaagtggcctgtgcaaggtggccggggccctcttcaacatcaacttctacgccggggccctgctgctggcctgcatcagctttgaccgctacctgaacatcgtgcacgccacccagctgtacagaagaggccccccagcccgggtgaccctgacctgcctggccgtgtggggcctgtgcctgctgtttgccctgcctgacttcatcttcctgagcgcccaccatgatgagcggctgaatgccacccactgccagtacaacttcccccagggcagcagcagcggcagcggctgcggctgctgcagctgtgcctgggccgcccccacccgggagggcagccggggcagccaccggctgcctgctggcatccaccctggcctgcggccccagaggcctcccacccgggcctgtgaggccggcatccgggcccccctgagccccacctag

SEQ ID NO: 147289 - DNA, 1248 bp, synthetic construct
  misc_feature 1..1248: note = Description of Artificial Sequence: Synthetic coding sequence
  source 1..1248: mol_type = other DNA
atggagctgaggaaatatggccctggccgcctggccggcaccgtcatcggcggggccgcccagagcaagagccagaccaagagtgacagcatcaccaaggagttcctgcccggcctgtacacagcccccagcagccccttcccccccagccaggtgtctgaccaccaggtgctgaatgatgctgaggtggccgccctgctggagaacttcagcagcagctatgactatggagaaaatgaaagtgacagctgctgcaccagccccccctgcccccaggacttcagcctgaactttgaccgggccttcctgcctgccctgtacagcctgctcttcctgctgggcctgctgggcaatggagctgtggccgctgtgctgctgagcagaagaacagccctgagcagcacagacaccttcctgctgcacctggccgtggccgacaccctgctggtgctgaccctgcccctgtgggccgtggatgctgctgtgcagtgggtgtttggcagcggcctgtgcaaggtggccggggccctcttcaacatcaacttctacgccggggccctgctgctggcctgcatcagctttgaccgctacctgaacatcgtgcacgccacccagctgtaccgccggggccccccagcccgggtgaccctgacctgcctggccgtgtggggcctgtgcctgctgtttgccctgcctgacttcatcttcctgagcgcccaccatgatgagcggctgaatgccacccactgccagtacaacttcccccaggtgggccgcacagccctgcgggtgctgcagctggtggccggcttcctgctgcccctgctggtgatggcctactgctacgcccacatcctggccgtgctgctggtgtcccggggccagaggcggctgcgggccatgaggctggtggtggtggtggtggtggcctttgccctgtgctggaccccctaccacctggtggtgctggtggacatcctgatggacctgggcgccctggccaggaactgtggccgggagagccgggtggatgtggccaagtctgtgaccagcggcctgggctacatgcactgctgcctgaaccccctgctgtatgcctttgtgggcgtgaagttccgggagaggatgtggatgctgctgctgcggctgggctgccccaaccagaggggcctgcagaggcagcccagcagcagcagaagagacagctcctggagcgagaccagcgaggccagctacagcggcctgtag

SEQ ID NO: 147290 - DNA, 1107 bp, synthetic construct
  misc_feature 1..1107: note = Description of Artificial Sequence: Synthetic coding sequence
  source 1..1107: mol_type = other DNA
atggtgctggaggtgtctgaccaccaggtgctgaatgatgctgaggtggccgccctgctggagaacttcagcagcagctatgactatggagaaaatgaaagtgacagctgctgcaccagccccccctgcccccaggacttcagcctgaactttgaccgggccttcctgcctgccctgtacagcctgctcttcctgctgggcctgctgggcaatggagctgtggccgctgtgctgctgagcagaagaacagccctgagcagcacagacaccttcctgctgcacctggccgtggccgacaccctgctggtgctgaccctgcccctgtgggccgtggatgctgctgtgcagtgggtgtttggaagtggcctgtgcaaggtggccggggccctcttcaacatcaacttctacgccggggccctgctgctggcctgcatcagctttgaccgctacctgaacatcgtgcacgccacccagctgtacagaagaggccccccagcccgggtgaccctgacctgcctggccgtgtggggcctgtgcctgctgtttgccctgcctgacttcatcttcctgagcgcccaccatgatgagcggctgaatgccacccactgccagtacaacttcccccaggtgggccgcacagccctgcgggtgctgcagctggtggccggcttcctgctgcccctgctggtgatggcctactgctacgcccacatcctggccgtgctgctggtgtcccggggccagaggcggctgcgggccatgaggctggtggtggtggtggtggtggcctttgccctgtgctggaccccctaccacctggtggtgctggtggacatcctgatggacctgggcgccctggccaggaactgtggccgggagagccgggtggatgtggccaagtctgtgaccagcggcctgggctacatgcactgctgcctgaaccccctgctgtatgcctttgtgggcgtgaagttccgggagaggatgtggatgctgctgctgcggctgggctgccccaaccagaggggcctgcagaggcagcccagcagcagccggcgggacagctcctggagcgagaccagcgaggccagctacagcggcctgtag

SEQ ID NO: 147291 - DNA, 1119 bp, synthetic construct
  misc_feature 1..1119: note = Description of Artificial Sequence: Synthetic coding sequence
  source 1..1119: mol_type = other DNA
atgaactaccccctgaccctggagatggacctggagaacctggaggacctcttctgggagctggaccggctggacaactacaatgacaccagcctggtggagaaccacctgtgcccagccacagagggccccctgatggccagcttcaaggctgtgtttgtgcctgtggcctacagcctcatcttcctgctgggcgtgattggaaatgtgctggtgctggtgatcctggagcggcaccggcagaccaggagcagcacagagaccttcctgttccacctggccgtggccgacctgctgctggtgttcatcctgccctttgctgtggccgagggctctgtgggctgggtgctgggcaccttcctgtgcaagacagtcatcgccctgcacaaggtgaacttctactgcagcagcctgctgctggcctgcatcgctgtggaccgctacctggccatcgtgcatgctgtgcacgcctaccgccaccggcggctgctgagcatccacatcacctgtggcaccatctggctggtgggcttcctgctggccctgcctgagatcctgtttgccaaggtgtcccagggccaccacaacaacagcctgccccgctgcaccttcagccaggagaaccaggccgagacccacgcctggttcaccagccgcttcctgtaccacgtggccggcttcctgctgcccatgctggtgatgggctggtgctacgtgggcgtggtgcaccggctgcggcaggcccagaggcggccccagaggcagaaggctgtgcgggtggccatcctggtgaccagcatcttcttcctgtgctggagcccctaccacatcgtcatcttcctggacaccctggcccggctgaaggctgtggacaacacctgcaagctgaatggcagcctgcctgtggccatcaccatgtgtgagttcctgggcctggcccactgctgcctgaaccccatgctgtacacctttgctggggtgaagttcagaagtgacctgagccggctgctgaccaagctgggctgcaccggccctgccagcctgtgccagctgttccccagctggaggaggagcagcctgtctgagagtgaaaatgccaccagcctgaccaccttctag

SEQ ID NO: 147292 - DNA, 1029 bp, synthetic construct
  misc_feature 1..1029: note = Description of Artificial Sequence: Synthetic coding sequence
  source 1..1029: mol_type = other DNA
atggccgagcatgactaccacgaggactatggcttcagcagcttcaatgacagcagccaggaggagcaccaggacttcctgcagttcagcaaggtgttcctgccctgcatgtacctggtggtgtttgtgtgtggcctggtgggcaacagcctggtgctggtgatcagcatcttctaccacaagctgcagagcctgacagatgtgttcctggtgaacctgcccctggccgacctggtgtttgtgtgcaccctgcccttctgggcctatgccggcatccacgagtgggtgtttggccaggtgatgtgcaagagcctgctgggcatctacaccatcaacttctacacctccatgctgatcctgacctgcatcaccgtggaccgcttcatcgtggtggtgaaggccaccaaggcctacaaccagcaggccaagaggatgacctggggcaaggtgaccagcctgctgatctgggtgatcagcctgctggtgtccctgccccagatcatctatggaaatgtgttcaacctggacaagctgatctgtggctaccatgatgaggccatcagcacagtggtgctggccacccagatgaccctgggcttcttcctgcccctgctgaccatgattgtgtgctacagcgtcatcatcaagaccctgctgcatgctgggggcttccagaagcacaggagcctgaagatcatcttcctggtgatggctgtgttcctgctgacccagatgcccttcaacctgatgaagttcatccgcagcacccactgggagtactatgccatgaccagcttccactacaccatcatggtgacagaggccatcgcctacctgcgggcctgcctgaaccctgtgctgtatgcctttgtgtccctgaagttcaggaagaacttctggaagctggtgaaggacatcggctgcctgccctacctgggcgtgagccaccagtggaagagcagcgaggacaacagcaagaccttcagcgccagccacaacgtggaggccacctccatgttccagctgtag

SEQ ID NO: 147293 - DNA, 1029 bp, synthetic construct; identical to SEQ ID NO: 147292
  misc_feature 1..1029: note = Description of Artificial Sequence: Synthetic coding sequence
  source 1..1029: mol_type = other DNA

SEQ ID NO: 147294 - DNA, 1029 bp, synthetic construct; identical to SEQ ID NO: 147292
  misc_feature 1..1029: note = Description of Artificial Sequence: Synthetic coding sequence
  source 1..1029: mol_type = other DNA

SEQ ID NO: 147295 - DNA, 1029 bp, synthetic construct; identical to SEQ ID NO: 147292
  misc_feature 1..1029: note = Description of Artificial Sequence: Synthetic coding sequence
  source 1..1029: mol_type = other DNA

SEQ ID NO: 147296 - DNA, 1089 bp, synthetic construct
  misc_feature 1..1089: note = Description of Artificial Sequence: Synthetic coding sequence
  source 1..1089: mol_type = other DNA
atggacctgcacctgtttgactacagcgagcccggcaacttcagtgacatctcctggccctgcaacagcagtgactgcatcgtggtggacacagtgatgtgccccaacatgcccaacaagtctgtgctgctgtacaccctgtccttcatctacatcttcatctttgtgattggcatgattgccaacagcgtggtggtgtgggtgaacatccaggccaagaccaccggctatgacacccactgctacatcctgaacctggccatcgctgacctgtgggtggtgctgaccatccctgtgtgggtggtgtccctggtgcagcacaaccagtggcccatgggagagctgacctgcaaggtgacccacctgatcttcagcatcaacctgtttggcagcatcttcttcctgacctgcatgtctgtggaccgctacctgagcatcacctacttcaccaacacccccagcagcaggaagaagatggtgagaagagtggtgtgcatcctggtgtggctgctggccttctgtgtgtccctgcctgacacctactacctgaagacagtgaccagcgccagcaacaatgagacctactgccgctccttctacccagagcacagcatcaaggagtggctgattggcatggagctggtgtctgtggtgctgggctttgctgtgcccttcagcatcatcgctgtgttctacttcctgctggcccgggccatcagcgccagcagtgaccaggagaagcacagcagcaggaagatcatcttctcctatgtggtggtgttcctggtgtgctggctgccctaccacgtggccgtgctgctggacatcttcagcatcctgcactacatccccttcacctgccgcctggagcacgccctcttcaccgccctgcacgtgacccagtgcctgagcctggtgcactgctgcgtgaaccctgtgctgtacagcttcatcaacagaaactaccgctatgagctgatgaaggccttcatcttcaagtacagcgccaagacaggcctgaccaagctgattgatgccagccgggtgtctgaaacagagtacagcgccctggagcagagcaccaagtag

SEQ ID NO: 147297 - DNA, 636 bp, synthetic construct
  misc_feature 1..636: note = Description of Artificial Sequence: Synthetic coding sequence
  source 1..636: mol_type = other DNA
atggacctgcacctgtttgactacagcgagcccggcaacttcagtgacatctcctggccctgcaacagcagtgactgcatcgtggtggacacagtgatgtgccccaacatgcccaacaagtctgtgctgctgtacaccctgtccttcatctacatcttcatctttgtgattggcatgattgccaacagcgtggtggtgtgggtgaacatccaggccaagaccaccggctatgacacccactgctacatcctgaacctggccatcgctgacctgtgggtggtgctgaccatccctgtgtgggtggtgtccctggtgcagcacaaccagtggcccatgggagagctgacctgcaaggtgacccacctgatcttcagcatcaacctgtttggcagcatcttcttcctgacctgcatgtctgtggaccgctacctgagcatcacctacttcaccaacacccccagcagcaggaagaagatggtgagaagagtggtgtgcatcctggtgtggctgctggccttctgtgtgtccctgcctgacacctactacctgaagacagtgaccagcgccagcaacaatgagacctactgccgctccttctacccagagcacagcatcaaggagtggctgattggatag

SEQ ID NO: 147298 - DNA, 1155 bp, synthetic construct
  misc_feature 1..1155: note = Description of Artificial Sequence: Synthetic coding sequence
  source 1..1155: mol_type = other DNA
atggccgccacagccagcccccagcccctggccacagaagatgctgacagcgagaacagcagcttctactactatgactacctggatgaggtggccttcatgctgtgcaggaaggatgctgtggtgtcctttgggaaggtgttcctgcccgtcttctacagcctcatctttgtgctgggcctgagcggcaacctgctgctgctgatggtgctgctgcgctacgtgcccaggaggaggatggtggagatctacctgctgaacctggccatcagcaacctgctcttcctggtgaccctgcccttctggggcatctctgtggcctggcactgggtgtttggcagcttcctgtgcaagatggtgtccaccctgtacaccatcaacttctacagcggcatcttcttcatcagctgcatgagcctggacaagtacctggagatcgtgcacgcccagccctaccaccggctgcggacccgggccaagagcctgctgctggccaccatcgtgtgggccgtgtccctggccgtgtccatcccagacatggtgtttgtgcagacccatgagaaccccaagggcgtgtggaactgccacgccgactttggaggccacggcaccatctggaagctgttcctgcgcttccagcagaacctgctgggcttcctgctgcccctgctggccatgatcttcttctacagcagaattggctgtgtgctggtgcggctgcggcctgctggccagggccgggccctgaagattgctgctgccctggtggtggccttctttgtgctgtggttcccctacaacctgaccctcttcctgcacaccctgctggacctgcaggtgtttggaaactgtgaggtgtcccagcacctggactatgccctgcaggtgacagagagcatcgccttcctgcactgctgcttcagccccatcctgtatgccttcagcagccaccgcttccggcagtacctgaaggccttcctggccgctgtgctgggctggcacctggcccctggaacagcccaggccagcctgagcagctgcagcgagagcagcatcctgacagcccaggaggagatgacaggcatgaatgacctgggggagcggcagagcgagaactaccccaacaaggaggatgtgggcaacaagagcgcctag

SEQ ID NO: 147299 - DNA, 1155 bp, synthetic construct; identical to SEQ ID NO: 147298
  misc_feature 1..1155: note = Description of Artificial Sequence: Synthetic coding sequence
  source 1..1155: mol_type = other DNA

SEQ ID NO: 147300 - DNA, 1155 bp, synthetic construct; identical to SEQ ID NO: 147298
  misc_feature 1..1155: note = Description of Artificial Sequence: Synthetic coding sequence
  source 1..1155: mol_type = other DNA

SEQ ID NO: 147301 - DNA, 1122 bp, synthetic construct
  misc_feature 1..1122: note = Description of Artificial Sequence: Synthetic coding sequence
  source 1..1122: mol_type = other DNA
atgaggatggaggatgaggactacaacaccagcatctcctatggagatgagtacccagactacctggacagcatcgtggtgctggaggacctgagccccctggaggcccgggtgacccgcatcttcctggtggtggtgtacagcatcgtgtgcttcctgggcatcctgggcaatggcctggtgatcatcatcgccaccttcaagatgaagaagacagtgaacatggtgtggttcctgaacctggccgtggccgacttcctgttcaacgtgttcctgcccatccacatcacctatgctgccatggactaccactgggtgtttggaacagccatgtgcaagatcagcaacttcctgctgatccacaacatgttcaccagcgtcttcctgctgaccatcatcagcagtgaccgctgcatctctgtgctgctgcctgtgtggagccagaaccacaggtctgtgcggctggcctacatggcctgcatggtgatctgggtgctggccttcttcctgagcagccccagcctggtgttccgggacacagccaacctgcacggcaagatcagctgcttcaacaacttcagcctgagcaccccaggcagcagctcctggcccacccacagccagatggaccctgtgggctacagccgccacatggtggtgacagtgacccgcttcctgtgtggcttcctggtgcctgtgctgatcatcacagcctgctacctgaccatcgtgtgcaagctgcagaggaaccggctggccaagaccaagaagcccttcaagatcatcgtgaccatcatcatcaccttcttcctgtgctggtgcccctaccacaccctgaacctgctggagctgcaccacacagccatgcctggcagcgtcttcagcctgggcctgcccctggccacagccctggccatcgccaacagctgcatgaaccccatcctgtatgtgttcatgggccaggacttcaagaagttcaaggtggccctcttcagccggctggtgaatgccctgtctgaggacaccggccacagcagctaccccagccacaggagcttcaccaagatgagctccatgaatgaaagaacctccatgaatgaaagagagaccggcatgctgtag

SEQ ID NO: 147302 - DNA, 1116 bp, synthetic construct
  misc_feature 1..1116: note = Description of Artificial Sequence: Synthetic coding sequence
  source 1..1116: mol_type = other DNA
atggaggatgaggactacaacaccagcatctcctatggagatgagtacccagactacctggacagcatcgtggtgctggaggacctgagccccctggaggcccgggtgacccgcatcttcctggtggtggtgtacagcatcgtgtgcttcctgggcatcctgggcaatggcctggtgatcatcatcgccaccttcaagatgaagaagacagtgaacatggtgtggttcctgaacctggccgtggccgacttcctgttcaacgtgttcctgcccatccacatcacctatgctgccatggactaccactgggtgtttggaacagccatgtgcaagatcagcaacttcctgctgatccacaacatgttcaccagcgtcttcctgctgaccatcatcagcagtgaccgctgcatctctgtgctgctgcctgtgtggagccagaaccacaggtctgtgcggctggcctacatggcctgcatggtgatctgggtgctggccttcttcctgagcagccccagcctggtgttccgggacacagccaacctgcacggcaagatcagctgcttcaacaacttcagcctgagcaccccaggcagcagctcctggcccacccacagccagatggaccctgtgggctacagccgccacatggtggtgacagtgacccgcttcctgtgtggcttcctggtgcctgtgctgatcatcacagcctgctacctgaccatcgtgtgcaagctgcagaggaaccggctggccaagaccaagaagcccttcaagatcatcgtgaccatcatcatcaccttcttcctgtgctggtgcccctaccacaccctgaacctgctggagctgcaccacacagccatgcctggcagcgtcttcagcctgggcctgcccctggccacagccctggccatcgccaacagctgcatgaaccccatcctgtatgtgttcatgggccaggacttcaagaagttcaaggtggccctcttcagccggctggtgaatgccctgtctgaggacaccggccacagcagctaccccagccacaggagcttcaccaagatgagctccatgaatgaaagaacctccatgaatgaaagagagaccggcatgctgtag

SEQ ID NO: 147303 - DNA, 1122 bp, synthetic construct; identical to SEQ ID NO: 147301
  misc_feature 1..1122: note = Description of Artificial Sequence: Synthetic coding sequence
  source 1..1122: mol_type = other DNA

SEQ ID NO: 147304 - DNA, 432 bp, synthetic construct
  misc_feature 1..432: note = Description of Artificial Sequence: Synthetic coding sequence
  source 1..432: mol_type = other DNA
atgaggatggaggatgaggactacaacaccagcatctcctatggagatgagtacccagactacctggacagcatcgtggtgctggaggacctgagccccctggaggcccgggtgacccgcatcttcctggtggtggtgtacagcatcgtgtgcttcctgggcatcctgggcaatggcctggtgatcatcatcgccaccttcaagatgaagaagacagtgaacatggtgtggttcctgaacctggccgtggccgacttcctgttcaacgtgttcctgcccatccacatcacctatgctgccatggactaccactgggtgtttggaacagccatgtgcaagatcagcaacttcctgctgatccacaacatgttcaccagcgtcttcctgctgaccatcatcagcagtgaccgctgcatctctgtgctgctgtag

SEQ ID NO: 147305 - DNA, 1122 bp, synthetic construct; identical to SEQ ID NO: 147301
  misc_feature 1..1122: note = Description of Artificial Sequence: Synthetic coding sequence
  source 1..1122: mol_type = other DNA

SEQ ID NO: 147306 - DNA, 444 bp, synthetic construct
  misc_feature 1..444: note = Description of Artificial Sequence: Synthetic coding sequence
  source 1..444: mol_type = other DNA
atgaggatggaggatgaggactacaacaccagcatctcctatggagatgagtacccagactacctggacagcatcgtggtgctggaggacctgagccccctggaggcccgggtgacccgcatcttcctggtggtggtgtacagcatcgtgtgcttcctgggcatcctgggcaatggcctggtgatcatcatcgccaccttcaagatgaagaagacagtgaacatggtgtggttcctgaacctggccgtggccgacttcctgttcaacgtgttcctgcccatccacatcacctatgctgccatggactaccactgggtgtttggaacagccatgtgcaagatcagcaacttcctgctgatccacaacatgttcaccagcgtcttcctgctgaccatcatcagcagtgaccgctgcatctctgtgctgctgcctgtgtggagctag

SEQ ID NO: 147307 - DNA, 1116 bp, synthetic construct; identical to SEQ ID NO: 147302
  misc_feature 1..1116: note = Description of Artificial Sequence: Synthetic coding sequence
  source 1..1116: mol_type = other DNA

SEQ ID NO: 147308 - DNA, 1005 bp, synthetic construct
  misc_feature 1..1005: note = Description of Artificial Sequence: Synthetic coding sequence
  source 1..1005: mol_type = other DNA
atgcccagcaaggagagctggagcggcaggaagaccaacagagctgctgtgcacaagagcaagcaggagggccggcagcaggacctgctgattgctgccctgggcatgaagctgggcagccccaagagctctgtgaccatctggcagcccctgaagctgtttgcctacagccagctgaccagcctggtgcggcgggccaccctgaaggaaaatgagcagatccccaagtatgagaagatccacaacttcaaggtgcacaccttccggggcccccactggtgtgagtactgtgccaacttcatgtggggcctgattgcccagggcgtgaagtgtgccgactgtggcctgaatgtgcacaagcagtgcagcaagatggtgcccaatgactgcaagccagacctgaagcacgtgaagaaggtgtacagctgtgacctgaccaccctggtgaaggcccacaccaccaagaggcccatggtggtggacatgtgcatccgggagattgagagccggggcctgaacagcgagggcctgtacagagtgtctggcttcagtgacctgattgaagatgtgaagatggcctttgacagagatggagagaaggctgacatctctgtgaacatgtatgaggacatcaacatcatcactggagccctgaagctgtacttccgggacctgcccatccccctcatcacctatgatgcctaccccaagttcattgaaagtgccaagatcatggaccctgatgagcagctggagaccctgcacgaggccctgaagctgctgcccccagcccactgtgagaccctgcgctacctgatggcccacctgaagagggtgaccctgcacgagaaggagaacctgatgaatgctgagaacctgggcatcgtgtttggccccaccctgatgaggagccctgagctggatgccatggccgccctgaatgacatccgctaccagaggctggtggtggagctgctgatcaagaatgaagacatcctcttctag

SEQ ID NO: 147309 - DNA, 1302 bp, synthetic construct
  misc_feature 1..1302: note = Description of Artificial Sequence: Synthetic coding sequence
  source 1..1302: mol_type = other DNA
atggccctgaccctgtttgacacagatgagtacagacctcctgtgtggaagagctacctgtaccagctgcagcaggaggccccccacccccggcgcatcacctgcacctgtgaggtggagaaccggcccaagtactacggccgggagttccacggcatgatcagccgggaggccgctgaccagctgctgattgtggccgagggcagctacctgatccgggagagccagaggcagcccggcacctacaccctggccctgcgcttcggcagccagaccaggaacttccggctgtactatgatggcaagcactttgtgggggagaagagatttgagagcatccatgacctggtgacagatggcctcatcaccctgtacatcgagaccaaggctgctgagtacatcgccaagatgaccatcaaccccatctatgaacatgtgggctacaccaccctgaaccgggagcccgcctacaagaagcacatgcctgtgctgaaggagacccatgatgagcgggacagcacaggccaggatggagtgtctgagaagagggtgcacaccttccggggcccccactggtgtgagtactgtgccaacttcatgtggggcctcatcgcccagggcgtgaagtgtgccgactgtggcctgaatgtgcacaagcagtgcagcaagatggtgcccaatgactgcaagccagacctgaagcacgtgaagaaggtgtacagctgtgacctgaccaccctggtgaaggcccacaccaccaagaggcccatggtggtggacatgtgcatccgggagattgagagccggggcctgaacagcgagggcctgtacagagtgtctggcttcagtgacctgattgaagatgtgaagatggcctttgacagagatggagagaaggctgacatctctgtgaacatgtatgaggacatcaacatcatcaccggggccctgaagctgtacttccgggacctgcccatccccctcatcacctatgatgcctaccccaagttcatcgagagcgccaagatcatggaccctgatgagcagctggagaccctgcacgaggccctgaagctgctgcccccagcccactgtgagaccctgcgctacctgatggcccacctgaagagggtgaccctgcacgagaaggagaacctgatgaatgctgagaacctgggcatcgtgtttggccccaccctgatgaggagccctgagctggatgccatggccgccctgaatgacatccgctaccagaggctggtggtggagctgctgatcaagaatgaagacatcctcttctag

SEQ ID NO: 147310 - DNA, 1380 bp, synthetic construct
  misc_feature 1..1380: note = Description of Artificial Sequence: Synthetic coding sequence
  source 1..1380: mol_type = other DNA
atggccctgaccctgtttgacacagatgagtacagacctcctgtgtggaagagctacctgtaccagctgcagcaggaggccccccacccccggcgcatcacctgcacctgtgaggtggagaaccggcccaagtactacggccgggagttccacggcatgatcagccgggaggccgctgaccagctgctgattgtggccgagggcagctacctgatccgggagagccagaggcagcccggcacctacaccctggccctgcgcttcggcagccagaccaggaacttccggctgtactatgatggcaagcactttgtgggggagaagagatttgagagcatccatgacctggtgacagatggcctcatcaccctgtacatcgagaccaaggctgctgagtacatcgccaagatgaccatcaaccccatctatgaacatgtgggctacaccaccctgaaccgggagcccgcctacaagaagcacatgcctgtgctgaaggagacccatgatgagcgggacagcacaggccaggatggagtgtctgagaagaggctgaccagcctggtgagaagagccaccctgaaggaaaatgagcagatccccaagtatgagaagatccacaacttcaaggtgcacaccttccggggcccccactggtgtgagtactgtgccaacttcatgtggggcctcatcgcccagggcgtgaagtgtgccgactgtggcctgaatgtgcacaagcagtgcagcaagatggtgcccaatgactgcaagccagacctgaagcacgtgaagaaggtgtacagctgtgacctgaccaccctggtgaaggcccacaccaccaagaggcccatggtggtggacatgtgcatccgggagattgagagccggggcctgaacagcgagggcctgtacagagtgtctggcttcagtgacctgattgaagatgtgaagatggcctttgacagagatggagagaaggctgacatctctgtgaacatgtatgaggacatcaacatcatcaccggggccctgaagctgtacttccgggacctgcccatccccctcatcacctatgatgcctaccccaagttcatcgagagcgccaagatcatggaccctgatgagcagctggagaccctgcacgaggccctgaagctgctgcccccagcccactgtgagaccctgcgctacctgatggcccacctgaagagggtgaccctgcacgagaaggagaacctgatgaatgctgagaacctgggcatcgtgtttggccccaccctgatgaggagccctgagctggatgccatggccgccctgaatgacatccgctaccagaggctggtggtggagctgctgatcaagaatgaagacatcctcttctag

SEQ ID NO: 147311 - DNA, 1167 bp, synthetic construct
  misc_feature 1..1167: note = Description of Artificial Sequence: Synthetic coding sequence
  source 1..1167: mol_type = other DNA
atgacagcctctgtgctgctgcacccccgctggattgagcccaccgtgatgttcctgtatgacaatggaggcggcctggtggctgatgagctgaacaagaacatggagggcgctgctgctgctgctgctgctgctgctgctgctgctgctgctggagctgggggcggcggcttcccccaccctgctgctgctgctgctgggggcaacttctctgtggccgctgctgctgctgctgctgctgctgctgctgccaaccagtgcaggaacctgatggcccacccagcccccctggcccctggagctgccagcgcctacagcagcgcccctggagaggcccctccttctgctgctgctgctgctgctgctgctgctgctgctgctgctgctgctgctgctgccagcagcagcggcggccctggccctgctggccctgctggagctgaggccgccaagcagtgcagcccctgcagcgctgctgcccagagcagcagcggccctgctgccctgccctacggctacttcggcagcggctactacccctgtgccaggatgggcccccaccccaatgccatcaagagctgtgcccagcctgccagcgctgctgctgctgctgcctttgctgacaagtacatggacacagctggccctgctgctgaggagttcagcagccgggccaaggagtttgccttctaccaccagggctacgccgccggcccctaccaccaccaccagcccatgcctggctacctggacatgcctgtggtgcccggcctgggcggccctggagagagcagacatgagcccctgggcctgcccatggagagctaccagccctgggccctgcccaacggctggaatggccagatgtactgccccaaggagcaggcccagcccccccacctgtggaagagcaccctgcctgatgtggtgagccaccccagtgatgccagcagctaccgccggggcaggaagaagagggtgccctacaccaaggtgcagctgaaggagctggagcgggagtatgccaccaacaagttcatcaccaaggacaagagaagacgcatcagcgccaccaccaacctgtctgagcggcaggtgaccatctggttccagaacagaagagtgaaggagaagaaggtgatcaacaagctgaagaccaccagctag

SEQ ID NO: 147312 - DNA, 999 bp, synthetic construct
  misc_feature 1..999: note = Description of Artificial Sequence: Synthetic coding sequence
  source 1..999: mol_type = other DNA
atgttttctgaggagctgtggctggagaatgagaagaagtgtgctgtggtgaggaagagcaagcagggcaggaagaggcaggagctgctggccgtggccttcggcgtgaaggtgggcgtgaagggcggcttcctgtggccacccctgaagctgtttgcctgcagccagatcagcagcctggtgcggcgggccgccctgacccacaatgacaaccacttcaactatgagaagacccacaacttcaaggtgcacaccttccggggcccccactggtgtgagtactgtgccaacttcatgtggggcctgattgcccagggcgtgcgctgcagcgactgtggcctgaatgtgcacaagcagtgcagcaagcacgtgcccaatgactgccagcctgacctgaagaggatcaagaaggtgtactgctgtgacctgaccaccctggtgaaggcccacaacacccagaggcccatggtggtggacatctgcatccgggagattgaggcccggggcctgaagtctgagggcctgtacagagtgtctggcttcacagagcacattgaagatgtgaagatggcctttgacagagatggagagaaggctgacatcagcgccaacgtgtacccagacatcaacatcatcactggagccctgaagctgtacttccgggacctgcccatccctgtgatcacctatgacacctacagcaagttcattgatgctgccaagatcagcaatgctgatgagcggctggaggccgtgcatgaggtgctgatgctgctgcccccagcccactatgagaccctgcgctacctgatgatccacctgaagaaggtgaccatgaatgagaaggacaacttcatgaatgctgagaacctgggcatcgtgtttggccccaccctgatgaggcctcctgaggacagcaccctgaccaccctgcatgacatgagataccagaagctgattgtgcagatcctgattgaaaatgaagatgtgctcttctag

SEQ ID NO: 147313 - DNA, 525 bp, synthetic construct
  misc_feature 1..525: note = Description of Artificial Sequence: Synthetic coding sequence
  source 1..525: mol_type = other DNA
atggccgccagcagcaacagcagcctgagcggcagctctgtgtcctctgtgtacagcgagcccaggagcccccgggagctgcccaagtatgcagaggagtaccagccccccatctggaagagctacctgtaccagctgcagcaggaggccccccggcccaagaggatcatctgcccccgggaggtggagaaccggcccaagtactacggccgggagttccacggcatcatcagccgggagcaggctgatgagctgctgggcggcgtggagggcgcctacatcctgcgggagagccagaggcagcccggctgctacaccctggccctgcgctttggaaaccagaccctgaactaccgcctcttccatgatggcaagcactttgtgggggagaagagatttgagagcatccatgacctggtgacagatggcctcatcaccctgtacatcgagaccaaggctgctgagtacatcagcaagatgaccaccaaccccatctatgagcacatcggctacgccaccctgtag

SEQ ID NO: 147314 - DNA, 825 bp, synthetic construct
  misc_feature 1..825: note = Description of Artificial Sequence: Synthetic coding sequence
  source 1..825: mol_type = other DNA
atgttttctgaggagctgtggctggagaatgagaagaagtgtgctgtggtgaggaagagcaagcagggcaggaagaggcaggagctgctggccgtggccttcggcgtgaaggtgggcgtgaagggcggcttcctgtggccacccctgaagctgtttgcctgcagccagatcagcagcctggtgcggcgggccgccctgacccacaatgacaaccacttcaactatgagaagacccacaacttcaaggtgcacaccttccggggcccccactggtgtgagtactgtgccaacttcatgtggggcctgattgcccagggcgtgcgctgcagcggcctgaagtctgagggcctgtacagagtgtctggcttcacagagcacattgaagatgtgaagatggcctttgacagagatggagagaaggctgacatcagcgccaacgtgtacccagacatcaacatcatcactggagccctgaagctgtacttccgggacctgcccatccctgtgatcacctatgacacctacagcaagttcattgatgctgccaagatcagcaatgctgatgagcggctggaggccgtgcatgaggtgctgatgctgctgcccccagcccactatgagaccctgcgctacctgatgatccacctgaagaaggtgaccatgaatgagaaggacaacttcatgaatgctgagaacctgggcatcgtgtttggccccaccctgatgaggcctcctgaggacagcaccctgaccaccctgcatgacatgagataccagaagctgattgtgcagatcctgattgaaaatgaagatgtgctcttctag

SEQ ID NO: 147315 - DNA, 864 bp, synthetic construct
  misc_feature 1..864: note = Description of Artificial Sequence: Synthetic coding sequence
  source 1..864: mol_type = other DNA
atgttttctgaggagctgtggctggagaatgagaagaagtgtgctgtggtgaggaagagcaagcagggcaggaagaggcaggagctgctggccgtggccttcggcgtgaaggtgcacaccttccggggcccccactggtgtgagtactgtgccaacttcatgtggggcctcatcgcccagggcgtgcgctgcagcgactgtggcctgaatgtgcacaagcagtgcagcaagcacgtgcccaatgactgccagcctgacctgaagaggatcaagaaggtgtactgctgtgacctgaccaccctggtgaaggcccacaacacccagaggcccatggtggtggacatctgcatccgggagattgaggcccggggcctgaagtctgagggcctgtacagagtgtctggcttcacagagcacattgaagatgtgaagatggcctttgacagagatggagagaaggctgacatcagcgccaacgtgtacccagacatcaacatcatcaccggggccctgaagctgtacttccgggacctgcccatccctgtgatcacctatgacacctacagcaagttcattgatgctgccaagatcagcaatgctgatgagcggctggaggccgtgcatgaggtgctgatgctgctgcccccagcccactatgagaccctgcgctacctgatgatccacctgaagaaggtgaccatgaatgagaaggacaacttcatgaatgctgagaacctgggcatcgtgtttggccccaccctgatgaggcccccagaggacagcaccctgaccaccctgcatgacatgagataccagaagctgattgtgcagatcctgattgaaaatgaagatgtgctcttctag

SEQ ID NO: 147316 - DNA, 579 bp, synthetic construct
  misc_feature 1..579: note = Description of Artificial Sequence: Synthetic coding sequence
  source 1..579: mol_type = other DNA
atggccgccagcagcaacagcagcctgagcggcagctctgtgtccagtgatgctgaggagtaccagccccccatctggaagagctacctgtaccagctgcagcaggaggccccccggcccaagaggatcatctgcccccgggaggtggagaaccggcccaagtactacggccgggagttccacggcatcatcagccgggagcaggctgatgagctgctgggcggcgtggagggcgcctacatcctgcgggagagccagaggcagcccggctgctacaccctggccctgaggaaccccaccaagatcagcaatgctgatgagcggctggaggccgtgcatgaggtgctgatgctgctgcccccagcccactatgagaccctgcgctacctgatgatccacctgaagaaggtgaccatgaatgagaaggacaacttcatgaatgctgagaacctgggcatcgtgtttggccccaccctgatgaggcctcctgaggacagcaccctgaccaccctgcatgacatgagataccagaagctgattgtgcagatcctgattgaaaatgaagatgtgctcttctag

SEQ ID NO: 147317 - DNA, 861 bp, synthetic construct
  misc_feature 1..861: note = Description of Artificial Sequence: Synthetic coding sequence
  source 1..861: mol_type = other DNA
atgttttctgaggagctgtggctggagaatgagaagaagtgtgctgtggtgaggaagagcaagcagggcaggaagaggcaggagctgctggccgtggccttcggcgtgaaggtgggcgtgaagggcggcttcctgtggccacccctgaagctgtttgcctgcagccagatcagcagcctggtgcggcgggccgccctgacccacaatgacaaccacttcaactatgagaagacccacaacttcaaggtgcacaccttccggggcccccactggtgtgagtactgtgccaacttcatgtggggcctgattgcccagggcgtgcgctgcagcgactgtggcctgaatgtgcacaagcagtgcagcaagcacgtgcccaatgactgccagcctgacctgaagaggatcaagaaggtgtactgctgtgacctgaccaccctggtgaaggcccacaacacccagaggcccatggtggtggacatctgcatccgggagattgaggcccggggcctgaagtctgagggcctgtacagagtgtctggcttcacagagcacattgaagatgtgaagatggcctttgaccgggagatcagcaatgctgatgagcggctggaggccgtgcatgaggtgctgatgctgctgcccccagcccactatgagaccctgcgctacctgatgatccacctgaagaaggtgaccatgaatgagaaggacaacttcatgaatgctgagaacctgggcatcgtgtttggccccaccctgatgaggcctcctgaggacagcaccctgaccaccctgcatgacatgagataccagaagctgattgtgcagatcctgattgaaaatgaagatgtgctcttctag

SEQ ID NO: 147318 - DNA, 1446 bp, synthetic construct
  misc_feature 1..1446: note = Description of Artificial Sequence: Synthetic coding sequence
  source 1..1446: mol_type = other DNA
atggccgccagcagcaacagcagcctgagcggcagctctgtgtcctctgtgtacagcgagcccaggagcccccgggagctgcccaagtatgcagaggagtaccagccccccatctggaagagctacctgtaccagctgcagcaggaggccccccggcccaagaggatcatctgcccccgggaggtggagaaccggcccaagtactacggccgggagttccacggcatcatcagccgggagcaggctgatgagctgctgggcggcgtggagggcgcctacatcctgcgggagagccagaggcagcccggctgctacaccctggccctgcgctttggaaaccagaccctgaactaccgcctcttccatgatggcaagcactttgtgggggagaagagatttgagagcatccatgacctggtgacagatggcctcatcaccctgtacatcgagaccaaggctgctgagtacatcagcaagatgaccaccaaccccatctatgagcacatcggctacgccaccctgctgcgggagaaggtgtcccggcggctgagccgcagcaagaatgagcccaggaagaccaacgtgacccatgaggagcacacagctgtggagaagatcagcagcctggtgagaagagctgccctgacccacaatgacaaccacttcaactatgagaagacccacaacttcaaggtgcacaccttccggggcccccactggtgtgagtactgtgccaacttcatgtggggcctcatcgcccagggcgtgcgctgcagcgactgtggcctgaatgtgcacaagcagtgcagcaagcacgtgcccaatgactgccagcctgacctgaagaggatcaagaaggtgtactgctgtgacctgaccaccctggtgaaggcccacaacacccagaggcccatggtggtggacatctgcatccgggagattgaggcccggggcctgaagtctgagggcctgtacagagtgtctggcttcacagagcacattgaagatgtgaagatggcctttgacagagatggagagaaggctgacatcagcgccaacgtgtacccagacatcaacatcatcaccggggccctgaagctgtacttccgggacctgcccatccctgtgatcacctatgacacctacagcaagttcattgatgctgccaagatcagcaatgctgatgagcggctggaggccgtgcatgaggtgctgatgctgctgcccccagcccactatgagaccctgcgctacctgatgatccacctgaagaaggtgaccatgaatgagaaggacaacttcatgaatgctgagaacctgggcatcgtgtttggccccaccctgatgaggcccccagaggacagcaccctgaccaccctgcatgacatgagataccagaagctgattgtgcagatcctgattgaaaatgaagatgtgctcttctag

SEQ ID NO: 147319 - DNA, 975 bp, synthetic construct
  misc_feature 1..975: note = Description of Artificial Sequence: Synthetic coding sequence
  source 1..975: mol_type = other DNA
atggccgccagcagcaacagcagcctgagcggcagctctgtgtccagtgatgctgaggagtaccagccccccatctggaagagctacctgtaccagctgcagcaggaggccccccggcccaagaggatcatctgcccccgggagatcagcagcctggtgcggcgggccgccctgacccacaatgacaaccacttcaactatgagaagacccacaacttcaaggtgcacaccttccggggcccccactggtgtgagtactgtgccaacttcatgtggggcctgattgcccagggcgtgcgctgcagcgactgtggcctgaatgtgcacaagcagtgcagcaagcacgtgcccaatgactgccagcctgacctgaagaggatcaagaaggtgtactgctgtgacctgaccaccctggtgaaggcccacaacacccagaggcccatggtggtggacatctgcatccgggagattgaggcccggggcctgaagtctgagggcctgtacagagtgtctggcttcacagagcacattgaagatgtgaagatggcctttgacagagatggagagaaggctgacatcagcgccaacgtgtacccagacatcaacatcatcactggagccctgaagctgtacttccgggacctgcccatccctgtgatcacctatgacacctacagcaagttcattgatgctgccaagatcagcaatgctgatgagcggctggaggccgtgcatgaggtgctgatgctgctgcccccagcccactatgagaccctgcgctacctgatgatccacctgaagaaggtgaccatgaatgagaaggacaacttcatgaatgctgagaacctgggcatcgtgtttggccccaccctgatgaggcctcctgaggacagcaccctgaccaccctgcatgacatgagataccagaagctgattgtgcagatcctgattgaaaatgaagatgtgctcttctag

SEQ ID NO: 147320 - DNA, 1632 bp, synthetic construct
  misc_feature 1..1632: note = Description of Artificial Sequence: Synthetic coding sequence
  source 1..1632: mol_type = other DNA
atgacccagacccaccgggccaagagcgccagcagctgccccaacctgctggtgcctgagacctggccccaccaggtgtctgccagccatgctggccgcagcaagcagccccagggcggcatcctgaagatcaatgaggagcacagaagaggagccatccaggacctgctggccagccctggcttcaccttcggcaagagggtggtgtttgacagccactgcctgaagaggcagcacacctttgctgatggcctgcacagcagctgcaccagcaatgctgaggagtaccagccccccatctggaagagctacctgtaccagctgcagcaggaggccccccggcccaagaggatcatctgcccccgggaggtggagaaccggcccaagtactacggccgggagttccacggcatcatcagccgggagcaggctgatgagctgctgggcggcgtggagggcgcctacatcctgcgggagagccagaggcagcccggctgctacaccctggccctgcgctttggaaaccagaccctgaactaccgcctcttccatgatggcaagcactttgtgggggagaagagatttgagagcatccatgacctggtgacagatggcctcatcaccctgtacatcgagaccaaggctgctgagtacatcagcaagatgaccaccaaccccatctatgagcacatcggctacgccaccctgctgcgggagaaggtgtcccggcggctgagccgcagcaagaatgagcccaggaagaccaacgtgacccatgaggagcacacagctgtggagaagatcagcagcctggtgagaagagctgccctgacccacaatgacaaccacttcaactatgagaagacccacaacttcaaggtgcacaccttccggggcccccactggtgtgagtactgtgccaacttcatgtggggcctcatcgcccagggcgtgcgctgcagcgactgtggcctgaatgtgcacaagcagtgcagcaagcacgtgcccaatgactgccagcctgacctgaagaggatcaagaaggtgtactgctgtgacctgaccaccctggtgaaggcccacaacacccagaggcccatggtggtggacatctgcatccgggagattgaggcccggggcctgaagtctgagggcctgtacagagtgtctggcttcacagagcacattgaagatgtgaagatggcctttgacagagatggagagaaggctgacatcagcgccaacgtgtacccagacatcaacatcatcaccggggccctgaagctgtacttccgggacctgcccatccctgtgatcacctatgacacctacagcaagttcattgatgctgccaagatcagcaatgctgatgagcggctggaggccgtgcatgaggtgctgatgctgctgcccccagcccactatgagaccctgcgctacctgatgatccacctgaagaaggtgaccatgaatgagaaggacaacttcatgaatgctgagaacctgggcatcgtgtttggccccaccctgatgaggcccccagaggacagcaccctgaccaccctgcatgacatgagataccagaagctgattgtgcagatcctgattgaaaatgaagatgtgctcttctag

SEQ ID NO: 147321 - DNA, 1362 bp, synthetic construct
  misc_feature 1..1362: note = Description of Artificial Sequence: Synthetic coding sequence
  source 1..1362: mol_type = other DNA
atggatgctgaggagtaccagccccccatctggaagagctacctgtaccagctgcagcaggaggccccccggcccaagaggatcatctgcccccgggaggtggagaaccggcccaagtactacggccgggagttccacggcatcatcagccgggagcaggctgatgagctgctgggcggcgtggagggcgcctacatcctgcgggagagccagaggcagcccggctgctacaccctggccctgcgctttggaaaccagaccctgaactaccgcctcttccatgatggcaagcactttgtgggggagaagagatttgagagcatccatgacctggtgacagatggcctcatcaccctgtacatcgagaccaaggctgctgagtacatcagcaagatgaccaccaaccccatctatgagcacatcggctacgccaccctgctgcgggagaaggtgtcccggcggctgagccgcagcaagaatgagcccaggaagaccaacgtgacccatgaggagcacacagctgtggagaagatcagcagcctggtgagaagagctgccctgacccacaatgacaaccacttcaactatgagaagacccacaacttcaaggtgcacaccttccggggcccccactggtgtgagtactgtgccaacttcatgtggggcctcatcgcccagggcgtgcgctgcagcgactgtggcctgaatgtgcacaagcagtgcagcaagcacgtgcccaatgactgccagcctgacctgaagaggatcaagaaggtgtactgctgtgacctgaccaccctggtgaaggcccacaacacccagaggcccatggtggtggacatctgcatccgggagattgaggcccggggcctgaagtctgagggcctgtacagagtgtctggcttcacagagcacattgaagatgtgaagatggcctttgacagagatggagagaaggctgacatcagcgccaacgtgtacccagacatcaacatcatcaccggggccctgaagctgtacttccgggacctgcccatccctgtgatcacctatgacacctacagcaagttcattgatgctgccaagatcagcaatgctgatgagcggctggaggccgtgcatgaggtgctgatgctgctgcccccagcccactatgagaccctgcgctacctgatgatccacctgaagaaggtgaccatgaatgagaaggacaacttcatgaatgctgagaacctgggcatcgtgtttggccccaccctgatgaggcccccagaggacagcaccctgaccaccctgcatgacatgagataccagaagctgattgtgcagatcctgattgaaaatgaagatgtgctcttctag

SEQ ID NO: 147322 - DNA, 1152 bp, synthetic construct
  misc_feature 1..1152: note = Description of Artificial Sequence: Synthetic coding sequence
  source 1..1152: mol_type = other DNA
atgggcgtgaaggccagccagacaggctttgtggtgctggtgctgctgcagtgctgcagcgcctacaagctggtgtgctactacacctcctggagccagtaccgggagggagatggcagctgcttcccagatgccctggaccgcttcctgtgcacccacatcatctacagctttgccaacatcagcaatgaccacatcgacacctgggagtggaatgatgtgaccctgtatggcatgctgaacaccctgaagaacagaaaccccaacctgaagaccctgctgtctgtgggcggctggaactttggcagccagcgcttcagcaagatcgccagcaacacccagagcaggaggaccttcatcaagtctgtgccccccttcctgcggacccacggctttgatggcctggacctggcctggctgtacccaggccggcgggacaagcagcacttcaccaccctcatcaaggagatgaaggccgagttcatcaaggaggcccagcccgggaagaagcagctgctgctgtctgctgccctgtctgctgggaaggtgaccatcgacagcagctatgacatcgccaagatcagccagcacctggacttcatcagcatcatgacctatgacttccatggagcctggaggggcaccaccggccaccacagccccctcttccggggccaggaggatgccagcccagaccgcttcagcaacacagattatgctgtgggctacatgctgcggctgggcgccccagccagcaagctggtgatgggcatccccaccttcggccgctccttcaccctggccagcagcgagaccggggtgggcgcccccatcagcggccctggcatccctggccgcttcaccaaggaggccggcaccctggcctactatgagatctgtgacttcctgcggggggccaccgtgcaccgcatcctgggccagcaggtgccctatgccaccaagggcaaccagtgggtgggctatgatgaccaggagagcgtgaagagcaaggtgcagtacctgaaggaccggcagctggccggggccatggtgtgggccctggacctggatgacttccagggcagcttctgtggccaggacctgcgcttccccctgaccaatgccatcaaggatgccctggccgccacctag

SEQ ID NO: 147323 - DNA, 459 bp, synthetic construct
  misc_feature 1..459: note = Description of Artificial Sequence: Synthetic coding sequence
  source 1..459: mol_type = other DNA
tgactgctgctgtctgctgccctgtctgctgggaaggtgaccatcgacagcagctatgacatcgccaagatcagccagcacctggacttcatcagcatcatgacctatgacttccatggagcctggaggggcaccaccggccaccacagccccctcttccggggccaggaggatgccagcccagaccgcttcagcaacaccatctgtgacttcctgcggggggccaccgtgcaccgcatcctgggccagcaggtgccctatgccaccaagggcaaccagtgggtgggctatgatgaccaggagagcgtgaagagcaaggtgcagtacctgaaggaccggcagctggccggggccatggtgtgggccctggacctggatgacttccagggcagcttctgtggccaggacctgcgcttccccctgaccaatgccatcaaggatgccctggccgccacctag

SEQ ID NO: 147324 - DNA, 306 bp, synthetic construct
  misc_feature 1..306: note = Description of Artificial Sequence: Synthetic coding sequence
  source 1..306: mol_type = other DNA
atggtgtccaccccagagaaccggcagaccttcatcaccagcgtcatcaagttcctgcggcagtatgaatttgatggcctggactttgactgggagtacccaggcagccggggcagccccccccaggacaagcacctgttcaccgtgctggtgcagatgaggaagctgaagtaccgggaggacctgagcaacctgcccaagatcacccagctggtgggcatcatcaccagcagcgctgtgtggccccagagccccctgctgctgagcatcaccctgggctgccccctgctgctgagaaatgcctag

SEQ ID NO: 147325 - DNA, 1431 bp, synthetic construct
  misc_feature 1..1431: note = Description of Artificial Sequence: Synthetic coding sequence
  source 1..1431: mol_type = other DNA
atgaccaagctgatcctgctgaccggcctggtgctgatcctgaacctgcagctgggcagcgcctaccagctgacctgctacttcaccaactgggcccagtaccggcccggcctgggccgcttcatgccagacaacatcgacccctgcctgtgcacccacctgatctatgcctttgctggccggcagaacaatgagatcaccaccatcgagtggaatgatgtgaccctgtaccaggccttcaacggcctgaagaacaagaacagccagctgaagaccctgctggccatcggcggctggaactttggaacagcccccttcaccgccatggtgtccaccccagagaaccggcagaccttcatcaccagcgtcatcaagttcctgcggcagtatgaatttgatggcctggactttgactgggagtacccaggcagccggggcagccccccccaggacaagcacctgttcaccgtgctggtgcaggagatgagggaggcctttgagcaggaggccaagcagatcaacaagccccggctgatggtgacagctgctgtggccgccggcatcagcaacatccagagcggctatgagatcccccagctgagccagtacctggactacatccacgtgatgacctatgacctgcacggctcctgggagggctacaccggggagaacagccccctgtacaagtaccccacagacaccggcagcaatgcctacctgaatgtggactatgtgatgaactactggaaggacaatggagccccagctgagaagctgattgtgggcttccccacctacggccacaacttcatcctgagcaaccccagcaacacaggaattggagcccccaccagcggggccggccctgctggcccctatgccaaggagagcggcatctgggcctactatgagatctgcaccttcctgaagaatggagccacccagggctgggatgccccccaggaggtgccctatgcctaccagggcaatgtgtgggtgggctatgacaacatcaagagctttgacatcaaggcccagtggctgaagcacaacaagtttggaggagccatggtgtgggccatcgacctggatgacttcaccggcaccttctgcaaccagggcaagttccccctcatcagcaccctgaagaaggccctgggcctgcagagcgccagctgcacagccccagcccagcccatcgagcccatcacagctgcccccagcggcagcggaaatggaagtggcagcagcagcagcggcggcagcagcggcggcagcggcttctgtgctgtgcgggccaacggcctgtaccctgtggccaacaacagaaatgccttctggcactgtgtgaatggagtgacctaccagcagaactgccaggccggcctggtgtttgacaccagctgtgactgctgcaactgggcctag

SEQ ID NO: 147326 - DNA, 948 bp, synthetic construct
  misc_feature 1..948: note = Description of Artificial Sequence: Synthetic coding sequence
  source 1..948: mol_type = other DNA
atgagggaggcctttgagcaggaggccaagcagatcaacaagccccggctgatggtgacagctgctgtggccgccggcatcagcaacatccagagcggctatgagatcccccagctgagccagtacctggactacatccacgtgatgacctatgacctgcacggctcctgggagggctacacaggagagaacagccccctgtacaagtaccccacagacaccggcagcaatgcctacctgaatgtggactatgtgatgaactactggaaggacaacggggccccagctgagaagctgattgtgggcttccccacctacggccacaacttcatcctgagcaaccccagcaacacaggcatcggggcccccaccagcggggccggccctgctggcccctatgccaaggagagcggcatctgggcctactatgagatctgcaccttcctgaagaatggagccacccagggctgggatgccccccaggaggtgccctatgcctaccagggcaatgtgtgggtgggctatgacaacatcaagagctttgacatcaaggcccagtggctgaagcacaacaagtttggaggagccatggtgtgggccatcgacctggatgacttcaccggcaccttctgcaaccagggcaagttccccctcatcagcaccctgaagaaggccctgggcctgcagagcgccagctgcacagccccagcccagcccatcgagcccatcacagctgcccccagcggcagcggaaatggcagcggcagcagcagcagcggcggcagcagcggcggcagcggcttctgtgctgtgcgggccaacggcctgtaccctgtggccaacaacagaaatgccttctggcactgtgtgaatggagtgacctaccagcagaactgccaggccggcctggtgtttgacaccagctgtgactgctgcaactgggcctag

SEQ ID NO: 147327 - DNA, 1431 bp, synthetic construct; identical to SEQ ID NO: 147325
  misc_feature 1..1431: note = Description of Artificial Sequence: Synthetic coding sequence
  source 1..1431: mol_type = other DNA

SEQ ID NO: 147328 - DNA, 1263 bp, synthetic construct
  misc_feature 1..1263: note = Description of Artificial Sequence: Synthetic coding sequence
  source 1..1263: mol_type = other DNA
gagaccagcagctctgtgcatgagcaggtggccgacagcggggcccaggccgtggccttccagagcggcggggagagcagcatcgtgtggaacagccagctgaagaccctgctggccatcggcggctggaactttggaacagcccccttcaccgccatggtgtccaccccagagaaccggcagaccttcatcaccagcgtcatcaagttcctgcggcagtatgaatttgatggcctggactttgactgggagtacccaggcagccggggcagccccccccaggacaagcacctgttcaccgtgctggtgcaggagatgagggaggcctttgagcaggaggccaagcagatcaacaagccccggctgatggtgacagctgctgtggccgccggcatcagcaacatccagagcggctatgagatcccccagctgagccagtacctggactacatccacgtgatgacctatgacctgcacggctcctgggagggctacaccggggagaacagccccctgtacaagtaccccacagacaccggcagcaatgcctacctgaatgtggactatgtgatgaactactggaaggacaatggagccccagctgagaagctgattgtgggcttccccacctacggccacaacttcatcctgagcaaccccagcaacacaggaattggagcccccaccagcggggccggccctgctggcccctatgccaaggagagcggcatctgggcctactatgagatctgcaccttcctgaagaatggagccacccagggctgggatgccccccaggaggtgccctatgcctaccagggcaatgtgtgggtgggctatgacaacatcaagagctttgacatcaaggcccagtggctgaagcacaacaagtttggaggagccatggtgtgggccatcgacctggatgacttcaccggcaccttctgcaaccagggcaagttccccctcatcagcaccctgaagaaggccctgggcctgcagagcgccagctgcacagccccagcccagcccatcgagcccatcacagctgcccccagcggcagcggaaatggaagtggcagcagcagcagcggcggcagcagcggcggcagcggcttctgtgctgtgcgggccaacggcctgtaccctgtggccaacaacagaaatgccttctggcactgtgtgaatggagtgacctaccagcagaactgccaggccggcctggtgtttgacaccagctgtgactgctgcaactgggcctag

SEQ ID NO: 147329 - DNA, 1107 bp, synthetic construct
  misc_feature 1..1107: note = Description of Artificial Sequence: Synthetic coding sequence
  source 1..1107: mol_type = other DNA
atggtgtccaccccagagaaccggcagaccttcatcaccagcgtcatcaagttcctgcggcagtatgaatttgatggcctggactttgactgggagtacccaggcagccggggcagccccccccaggacaagcacctgttcaccgtgctggtgcaggagatgagggaggcctttgagcaggaggccaagcagatcaacaagccccggctgatggtgacagctgctgtggccgccggcatcagcaacatccagagcggctatgagatcccccagctgagccagtacctggactacatccacgtgatgacctatgacctgcacggctcctgggagggctacaccggggagaacagccccctgtacaagtaccccacagacaccggcagcaatgcctacctgaatgtggactatgtgatgaactactggaaggacaatggagccccagctgagaagctgattgtgggcttccccacctacggccacaacttcatcctgagcaaccccagcaacacaggaattggagcccccaccagcggggccggccctgctggcccctatgccaaggagagcggcatctgggcctactatgagatctgcaccttcctgaagaatggagccacccagggctgggatgccccccaggaggtgccctatgcctaccagggcaatgtgtgggtgggctatgacaacatcaagagctttgacatcaaggcccagtggctgaagcacaacaagtttggaggagccatggtgtgggccatcgacctggatgacttcaccggcaccttctgcaaccagggcaagttccccctcatcagcaccctgaagaaggccctgggcctgcagagcgccagctgcacagccccagcccagcccatcgagcccatcacagctgcccccagcggcagcggaaatggaagtggcagcagcagcagcggcggcagcagcggcggcagcggcttctgtgctgtgcgggccaacggcctgtaccctgtggccaacaacagaaatgccttctggcactgtgtgaatggagtgacctaccagcagaactgccaggccggcctggtgtttgacaccagctgtgactgctgcaactgggcctag

SEQ ID NO: 147330 - DNA, 948 bp, synthetic construct; identical to SEQ ID NO: 147326
  misc_feature 1..948: note = Description of Artificial Sequence: Synthetic coding sequence
  source 1..948: mol_type = other DNA

SEQ ID NO: 147331 - DNA, 948 bp, synthetic construct; identical to SEQ ID NO: 147326
  misc_feature 1..948: note = Description of Artificial Sequence: Synthetic coding sequence
  source 1..948: mol_type = other DNA

SEQ ID NO: 147332 - DNA, 864 bp, synthetic construct
  misc_feature 1..864: note = Description of Artificial Sequence: Synthetic coding sequence
  source 1..864: mol_type = other DNA
atgagggaggcctttgagcaggaggccaagcagatcaacaagccccggctgatggtgacagctgctgtggccgccggcatcagcaacatccagagcggctatgagatcccccagctgagccagtacctggactacatccacgtgatgacctatgacctgcacggctcctgggagggctacacaggagagaacagccccctgtacaagtaccccacagacaccggcagcaatgcctacctgaatgtggactatgtgatgaactactggaaggacaacggggccccagctgagaagctgattgtgggcttccccacctacggccacaacttcatcctgagcaaccccagcaacacaggcatcggggcccccaccagcggggccggccctgctggcccctatgccaaggagagcggcatctgggcctactatgagatctgcaccttcctgaagaatggagccacccagggctgggatgccccccaggaggtgccctatgcctaccagggcaatgtgtgggtgggctatgacaacatcaagagctttgacatcaaggcccagtggctgaagcacaacaagtttggaggagccatggtgtgggccatcgacctggatgacttcaccggcaccttctgcaaccagggcaagttccccctcatcagcaccctgaagaaggccctgggcctgcagagcgccagctgcacagccccagcccagcccatcgagcccatcacagctgcccccagcggcagcggaaatggcagcggcagcagcagcagcggcggcagcagcggcggcagcggcttctgtgctgtgcgggccaacggcctgtaccctgtggccaacaacagaaatgccttctggtag

SEQ ID NO: 147333 - DNA, 1158 bp, synthetic construct
  misc_feature 1..1158: note = Description of Artificial Sequence: Synthetic coding sequence
  source 1..1158: mol_type = other DNA
atgagccggccccagctgcggcgctggaggctggtgagcagccccccatctggagtgcccggcctggccctgctggccctgctggccctgctggccctgcggctggccgccggcacagactgcccctgcccagagcctgagctgtgccggcccatccgccaccacccagactttgaggtgtttgtgtttgatgtgggccagaagacctggaagagctatgactggagccagatcaccaccgtggccaccttcggcaagtatgattctgagctgatgtgctacgcccacagcaagggggcccgggtggtgctgaagggagatgtgtccctgaaggacatcatcgaccctgccttccgggcctcctggatcgcccagaagctgaacctggccaagacccagtacatggatggcatcaacatcgacatcgagcaggaggtgaactgcctgagcccagaatatgatgccctgacagccctggtgaaggagaccacagacagcttccaccgggagattgagggcagccaggtgacctttgatgtggcctggagccccaagaacatcgaccggcgctgctacaactacacaggaattgctgatgcctgtgacttcctgtttgtgatgtcctatgatgagcagagccagatctggagcgagtgcatcgccgccgccaatgccccctacaaccagaccctgaccggctacaatgactacatcaagatgagcatcaaccccaagaagctggtgatgggcgtgccctggtacggctatgactacacctgcctgaacctgtctgaagatcatgtgtgcaccatcgccaaggtgcccttccggggggccccctgcagtgatgctgctggccggcaggtgccctacaagaccatcatgaagcagatcaacagcagcatcagcggcaacctgtgggacaaggaccagagggccccctactacaactacaaggaccctgctggccacttccaccaggtgtggtatgacaacccccagagcatcagcctgaaggccacctacatccagaactaccgcctgcggggcatcggcatgtggaatgccaactgcctggactacagcggagatgctgtggccaagcagcagacagaggagatgtgggaggtgctgaagcccaagctgctgcagaggtag

SEQ ID NO: 147334 - DNA, 2967 bp, synthetic construct
  misc_feature 1..2967: note = Description of Artificial Sequence: Synthetic coding sequence
  source 1..2967: mol_type = other DNA
atggagcagagccgcagccagcagaggggcggggagcagagctggtggggcagtgacccccagtaccagtacatgccctttgagcactgcaccagctatggcctgcccagtgaaaatggaggcctgcagcaccggctgaggaaggatgctggccccaggcacaacgtgcaccccacccagatctacggccaccacaaggagcagttcagtgaccgggagcaggacatcggcatgcccaagaagacaggcagcagcagcacagtggacagcaaggatgaggaccactacagcaagtgccaggactgcatccaccggctgggccaggtggtgcggaggaagctgggggaggatggcatcttcctggtgctgctgggcctgctgatggccctggtgtcctggagcatggactatgtgtctgccaagagcctgcaggcctacaagtggagctatgcccagatgcagcccagcctgcccctgcagttcctggtgtgggtgaccttccccctggtgctgatcctcttcagcgccctcttctgccacctgatcagcccccaggccgtgggcagcggcatccctgagatgaagaccatcctgcggggcgtggtgctgaaggagtacctgaccatgaaggcctttgtggccaaggtggtggccctgacagctggcctgggcagcggcatccctgtgggcaaggagggcccctttgtgcacatcgccagcatctgtgccgctgtgctgagcaagttcatgtctgtgttctgtggggtgtatgagcagccctactactacagcgacatcctgactgtgggctgtgctgtgggcgtgggctgctgcttcggcacccccctgggcggcgtgctcttcagcattgaggtgaccagcacctactttgctgtgaggaactactggaggggcttctttgctgccaccttcagcgcctttgtgttccgggtgctggccgtgtggaacaaggatgctgtgaccatcacagccctcttccgcaccaacttcaggatggacttcccctttgacctgaaggagctgcctgcctttgctgccatcggcatctgctgcggcctgctgggcgctgtgtttgtgtacctgcaccggcaggtgatgctgggcgtgaggaagcacaaggccctgagccagttcctggccaagcaccggctgctgtacccaggcatcgtgacctttgtgattgccagcttcaccttccccccaggcatgggccagttcatggccggggagctgatgccccgggaggccatcagcaccctgtttgacaacaacacctgggtgaagcatgctggggaccctgagagcctgggccagagcgctgtgtggatccacccccgggtgaatgtggtgatcatcatcttcctgttctttgtgatgaagttctggatgagcatcgtggccaccaccatgcccatcccctgtggcggcttcatgcctgtgtttgtgctgggcgccgccttcggccgcctggtgggggagatcatggccatgctgttcccagatggcatcctgtttgatgacatcatctacaagatcctgcccggcggctatgctgtgattggagctgctgccctgactggagctgtgagccacacagtgtccacagctgtgatctgctttgagctgaccggccagatcgcccacatcctgcccatgatggtggccgtcatcctggccaacatggtggcccagagcctgcagcccagcctgtatgacagcatcatccaggtgaagaagctgccctacctgcctgacctgggctggaaccagctgagcaagtacaccatctttgtggaggacatcatggtgagagatgtgaagtttgtgtctgccagctacacctacggggagctgcggaccctgctgcagaccaccaccgtgaagaccctgcccctggtggacagcaaggacagcatgatcctgctgggctctgtggagaggtctgagctgcaggccctgctgcagaggcacctgtgcccagagcggcggctgcgggccgcccaggagatggccaggaagctgtctgagctgccctatgatggcaaggcccggctggccggggagggcctgcccggggcccctcctggccggcctgagagctttgcctttgtggatgaagatgaagatgaggacctgagcggcaagtctgagctgccccccagcctggccctgcaccccagcaccacagcccccctgagccctgaggagcccaacggccccctgcccggccacaagcagcagcctgaggcccctgagcctgctggccagaggcccagcatcttccagagcctgctgcactgcctgctgggccgggcccggcccaccaagaagaagaccacccaggacagcacagacctggtggacaacatgagccctgaggagattgaggcctgggagcaggagcagctgagccagcctgtgtgctttgacagctgctgcatcgaccagagccccttccagctggtggagcagaccaccctgcacaagacccacaccctcttcagcctgctgggcctgcacctggcctacgtgacctccatgggcaagctgcggggcgtgctggccctggaggagctgcagaaggccatcgagggccacaccaagagcggcgtgcagctgcggccccccctggccagcttcaggaacaccaccagcaccaggaagagcactggagccccacccagcagcgctgagaactggaacctgcctgaagatagacctggggccactggaactggagatgtgattgctgccagccctgagacccctgtgcccagccccagccctgagccccccctgagcctggcccctgggaaggtggagggggagctggaggagctggagctggtggagagccctggcctggaggaggagctggccgacatcctgcagggccccagcctgcggagcacagatgaagaagatgaagatgagctgatcctgtag

SEQ ID NO: 147335 - DNA, 2697 bp, synthetic construct
  misc_feature 1..2697: note = Description of Artificial Sequence: Synthetic coding sequence
  source 1..2697: mol_type = other DNA
atggctgctgctgctgctgaggagggcatggagccccgggccctgcagtatgagcagaccctgatgtatggccgctacacccaggacctgggcgcctttgccaaggaggaggccgcccgcatccggctgggcggccctgagccctggaagggcccccccagcagcagagctgcccctgagctgctggagtatggccgcagccgctgtgcccgctgccgggtgtgcagcgtgcgctgccacaagttcctggtgtcccgggtgggggaggactggatcttcctggtgctgctgggcctgctgatggccctggtgtcctgggtgatggactatgccatcgccgcctgcctgcaggcccagcagtggatgagccggggcctgaacaccagcatcctgctgcagtacctggcctgggtgacctaccctgtggtgctgatcaccttctctgctggcttcacccagatcctggccccccaggccgtgggcagcggcatccctgagatgaagaccatcctgcggggcgtggtgctgaaggagtacctgaccctgaagaccttcatcgccaaggtgattggcctgacctgtgccctgggcagcggcatgcccctgggcaaggagggcccctttgtgcacatcgcctccatgtgtgccgccctgctgagcaagttcctgagcctgtttggaggcatctatgaaaatgaaagcaggaacacagagatgctggccgccgcctgtgctgtgggcgtgggctgctgctttgctgcccccatcggcggcgtgctcttcagcattgaggtgaccagcaccttctttgctgtgaggaactactggaggggcttctttgctgccaccttcagcgccttcatcttccgggtgctggccgtgtggaacagagatgaggagaccatcacagccctcttcaagacccgcttccggctggacttcccctttgacctgcaggagctgcctgcctttgctgtgattggaattgccagcggctttggaggagccctgtttgtgtacctgaacaggaagatcgtgcaggtgatgaggaagcagaagaccatcaaccgcttcctgatgaggaagaggctgctcttccctgccctggtgaccctgctgatcagcaccctgaccttccccccaggcttcggccagttcatggccggccagctgagccagaaggagaccctggtgaccctgtttgacaacagaacctgggtgcggcagggcctggtggaggagctggagccccccagcaccagccaggcctggaaccccccccgggccaacgtgttcctgaccctggtgatcttcatcctgatgaagttctggatgtctgccctggccaccaccatccctgtgccctgtggggccttcatgcctgtgtttgtgattggagctgccttcggccgcctggtgggggagagcatggccgcctggttcccagatggcatccacacagacagcagcacctaccgcatcgtgcctgggggctatgctgtggtgggcgctgctgccctggccggggctgtgacccacacagtgtccacagctgtgattgtgtttgagctgaccggccagatcgcccacatcctgcctgtgatgattgctgtgatcctggccaatgctgtggcccagagcctgcagcccagcctgtatgacagcatcatccgcatcaagaagctgccctacctgcctgagctgggctggggccgccaccagcagtacagagtgcgggtggaggacatcatggtgagagatgtgccccacgtggccctgagctgcaccttccgggacctgcggctggccctgcacaggaccaagggccgcatgctggccctggtggagagccctgagagcatgatcctgctgggcagcattgaaagaagccaggtggtggccctgctgggcgcccagctgagccctgcccggcggcggcagcacatgcaggagcggcgggccacccagaccagccccctgagtgaccaggagggcccccccaccccagaggcctctgtgtgcttccaggtgaacacagaggacagcgccttccctgctgcccggggggagacccacaagcccctgaagccagccctgaagaggggccccagcgtgaccaggaacctgggggagagccccaccggcagcgctgagagcgctggcatcgccctgcggagcctcttctgtggcagccccccacctgaggccgccagcgagaagctggagagctgtgagaagaggaagctgaagagggtgcgcatcagcctggccagtgatgctgacctggagggggagatgagccctgaggagatcctggagtgggaggagcagcagctggatgagcctgtgaacttcagtgactgcaagattgatcctgcccccttccagctggtggagaggaccagcctgcacaagacccacaccatcttcagcctgctgggcgtggaccacgcctacgtgaccagcatcggccgcctgattggaattgtgaccctgaaggagctgaggaaggccatcgagggctctgtgacagcccagggcgtgaaggtgcggccccccctggccagcttccgggacagcgccaccagcagcagtgacacagagaccacagaggtgcacgccctgtggggcccccacagccgccacggcctgccccgggagggcagccccagcgacagtgatgacaagtgccagtag

SEQ ID NO: 147336 - DNA, 381 bp, synthetic construct
  misc_feature 1..381: note = Description of Artificial Sequence: Synthetic coding sequence
  source 1..381: mol_type = other DNA
atgaggaagaggctgctcttccctgccctggtgaccctgctgatcagcaccctgaccttccccccaggcttcggccagttcatggccggccagctgagccagaaggagaccctggtgaccctgtttgacaacagaacctgggtgcggcagggcctggtggaggagctggagccccccagcaccagccaggcctggaaccccccccgggccaacgtgttcctgaccctggtgatcttcatcctgatgaagcacctgggcgtgtggtgggtgaaggcctggctgcccggcagccagatggagttcatcagaacagctgcccccaccggcctgtgcctgggcgccaccctgtggagcggccagctgcgctggcaggagaggtag

SEQ ID NO: 147337 - DNA, 2601 bp, synthetic construct
  misc_feature 1..2601: note = Description of Artificial Sequence: Synthetic coding sequence
  source 1..2601: mol_type = other DNA
atggagagcgagcagctgttccaccggggctactacagaaattcctacaacagcatcaccagcgccagcagtgatgaggagctgctggatggagctggggtcatcatggacttccagaccagtgaagatgacaacctgctggatggagacacagctgtgggcacccactacaccatgaccaatggaggcagcatcaacagcagcacccacctgctggacctgctggatgagcccatccctggggtgggcacctatgatgacttccacaccatcgactgggtgcgggagaagtgcaaggaccgggagcggcaccggcgcatcaacagcaagaagaaggagagcgcctgggagatgaccaagagcctgtatgatgcctggagcggctggctggtggtgaccctgaccggcctggccagcggggccctggccggcctgattgatattgctgctgactggatgacagacctgaaggagggcatctgcctgagcgccctgtggtacaaccacgagcagtgctgctggggcagcaatgagaccacctttgaggagcgggacaagtgcccccagtggaagacctgggccgagctgatcatcggccaggccgagggccctggcagctacatcatgaactacatcatgtacatcttctgggccctgagctttgccttcctggccgtgtccctggtgaaggtgtttgccccctatgcctgtggcagcggcatccctgagatcaagaccatcctgagcggcttcatcatccggggctacctgggcaagtggaccctgatgatcaagaccatcaccctggtgctggccgtggccagcggcctgagcctgggcaaggagggccccctggtgcacgtggcctgctgctgcggcaacatcttctcctacctgttccccaagtacagcaccaatgaggccaagaagcgggaggtgctgtctgctgccagcgctgctggggtgtctgtggccttcggggcccccatcggcggcgtgctcttcagcctggaggaggtgtcctactacttccccctgaagaccctgtggaggagcttctttgctgccctggtggccgcctttgtgctgcggagcatcaacccctttggaaacagccggctggtgctcttctacgtggagtaccacaccccctggtacctgtttgagctgttccccttcatcctgctgggcgtgtttggaggcctgtggggcgccttcttcatccgggccaacatcgcctggtgcagaagaaggaagagcaccaagtttgggaagtaccctgtgctggaggtgatcatcgtggccgccatcacagctgtgattgccttccccaacccctacacccggctgaacaccagcgagctgatcaaggagctgttcacagactgtggccccctggagagcagcagcctgtgtgactacagaaatgacatgaatgccagcaagatcgtggatgacatcccagacaggcctgctggcatcggcgtgtacagcgccatctggcagctgtgcctggccctgatcttcaagatcatcatgaccgtcttcaccttcggcatcaaggtgcccagcggcctcttcatccccagcatggccatcggggccatcgccggccgcatcgtgggcattgctgtggagcagctggcctactaccaccacgactggttcatcttcaaggagtggtgtgaggtgggcgctgactgcatcaccccaggcctgtatgccatggtgggcgccgccgcctgcctgggcggcgtgaccaggatgacagtgtccctggtggtgattgtgtttgagctgactggaggcctggagtacatcgtgcccctgatggctgctgtgatgaccagcaagtgggtgggagatgccttcggccgggagggcatctatgaggcccacatccggctgaatggctaccccttcctggatgccaaggaggagttcacccacaccaccctggccgcagatgtgatgaggcccaggagaaatgacccccccctggccgtgctgacccaggacaacatgacagtggatgacatcgagaacatgatcaatgagaccagctacaacggcttccctgtgatcatgagcaaggagagccagaggctggtgggctttgccctgcggcgggacctgaccatcgccatcgagagcgccaggaagaagcaggagggcatcgtgggcagcagccgggtgtgctttgcccagcacacccccagcctgcctgctgagagcccccggcccctgaagctgcggagcatcctggacatgagccccttcaccgtgacagaccacacccccatggagatcgtggtggacatcttcaggaagctgggcctgcggcagtgcctggtgacccacaacggcatcgtgctgggcatcatcaccaagaagaacatcctggagcacctggagcagctgaagcagcacgtggagcccctggccccaccctggcactacaacaagaagcgctaccccccagcctacggcccagatggcaagccccggccccgcttcaacaacgtgcagctgaacctgacagatgaggagcgggaggagacagaggaggaggtgtacctgctgaacagcaccaccctgtag

SEQ ID NO: 147338 - DNA, 2376 bp, synthetic construct
  misc_feature 1..2376: note = Description of Artificial Sequence: Synthetic coding sequence
  source 1..2376: mol_type = other DNA
atggagagcgagcagctgttccaccggggctactacagaaattcctacaacagcatcaccagcgccagcagtgatgaggagctgctggatggagctggggtcatcatggacttccagaccagtgaagatgacaacctgctggatggagacacagctgtgggcacccactacaccatgaccaatggaggcagcatcaacagcagcacccacctgctggacctgctggatgagcccatccctggggtgggcacctatgatgacttccacaccatcgactgggtgcgggagaagtgcaaggaccgggagcggcaccggcgcatcaacagcaagaagaaggagagcgcctgggagatgaccaagagcctgtatgatgcctggagcggctggctggtggtgaccctgaccggcctggccagcggggccctggccggcctgattgatattgctgctgactggatgacagacctgaaggagggcatctgcctgagcgccctgtggtacaaccacgagcagtgctgctggggcagcaatgagaccacctttgaggagcgggacaagtgcccccagtggaagacctgggccgagctgatcatcggccaggccgagggccctggcagctacatcatgaactacatcatgtacatcttctgggccctgagctttgccttcctggccgtgtccctggtgaaggtgtttgccccctatgcctgtggcagcggcatccctgagatcaagaccatcctgagcggcttcatcatccggggctacctgggcaagtggaccctgatgatcaagaccatcaccctggtgctggccgtggccagcggcctgagcctgggcaaggagggccccctggtgcacgtggcctgctgctgcggcaacatcttctcctacctgttccccaagtacagcaccaatgaggccaagaagcgggaggtgtcctactacttccccctgaagaccctgtggaggagcttctttgctgccctggtggccgcctttgtgctgcggagcatcaaccccttcggcaacagccggctggtgctcttctacgtggagtaccacaccccctggtacctgtttgagctgttccccttcatcctgctgggcgtgtttggaggcctgtggggcgccttcttcatccgggccaacatcgcctggtgcagaagaaggaagagcaccaagtttgggaagtaccctgtgctggaggtgatcatcgtggccgccatcacagctgtgattgccttccccaacccctacacccggctgaacaccagcgagctgatcaaggagctgttcacagactgtggccccctggagagcagcagcctgtgtgactacagaaatgacatgaatgccagcaagatcgtggatgacatcccagacaggcctgctggcattggagtgtacagcgccatctggcagctgtgcctggccctgatcttcaagatcatcatgacagtgttcaccttcggcatcaaggtgcccagcggcctcttcatccccagcatggccatcggggccatcgccggcagaattgtgggcattgctgtggagcagctggcctactaccaccacgactggttcatcttcaaggagtggtgtgaggtgggcgctgactgcatcaccccaggcctgtatgccatggtgggcgctgctgcctgcctgggcggcgtgaccaggatgacagtgtccctggtggtgattgtgtttgagctgaccggcggcctggagtacatcgtgcccctgatggctgctgtgatgaccagcaagtgggtgggagatgccttcggccgggagggcatctatgaggcccacatccggctgaatggctaccccttcctggatgccaaggaggagttcacccacaccaccctggccgcagatgtgatgaggcccaggagaaatgacccccccctggccgtgctgacccaggacaacatgacagtggatgacatcgagaacatgatcaatgagaccagctacaacggcttccctgtgatcatgagcaaggagagccagaggctggtgggctttgccctgcggcgggacctgaccatcgccattgaaagtgccaggaagaagcaggagggcatcgtgggcagcagccgggtgtgctttgcccagcacacccccagcctgcctgctgagagcccccggcccctgaagctgcggagcatcctggacatgagccccttcaccgtgacagaccacacccccatggagatcgtggtggacatcttcaggaagctgggcctgcggcagtgcctggtgacccacaacggccgcctgctgggcatcatcaccaagaaggacatcctgcggcacatggcccagacagccaaccaggaccctgccagcatcatgttcaactag

SEQ ID NO: 147339 - DNA, 2406 bp, synthetic construct
  misc_feature 1..2406: note = Description of Artificial Sequence: Synthetic coding sequence
  source 1..2406: mol_type = other DNA
atggtgaccctgcagctgggggagagccactacgtggtgcaggccggcctgcagctgctgggcagcagcaaccccccagccctggccagccaggtggccgagatcaccggcacccactacaccatgaccaacggcggcagcatcaacagcagcacccacctgctggacctgctggatgagcccatccctggggtgggcacctatgatgacttccacaccatcgactgggtgcgggagaagtgcaaggaccgggagcggcaccggcgcatcaacagcaagaagaaggagagcgcctgggagatgaccaagagcctgtatgatgcctggagcggctggctggtggtgaccctgaccggcctggccagcggggccctggccggcctgattgatattgctgctgactggatgacagacctgaaggagggcatctgcctgagcgccctgtggtacaaccacgagcagtgctgctggggcagcaatgagaccacctttgaggagcgggacaagtgcccccagtggaagacctgggccgagctgatcatcggccaggccgagggccctggcagctacatcatgaactacatcatgtacatcttctgggccctgagctttgccttcctggccgtgtccctggtgaaggtgtttgccccctatgcctgtggcagcggcatccctgagatcaagaccatcctgagcggcttcatcatccggggctacctgggcaagtggaccctgatgatcaagaccatcaccctggtgctggccgtggccagcggcctgagcctgggcaaggagggccccctggtgcacgtggcctgctgctgcggcaacatcttctcctacctgttccccaagtacagcaccaatgaggccaagaagcgggaggtgctgtctgctgccagcgctgctggggtgtctgtggcctttggagcccccatcggcggcgtgctcttcagcctggaggaggtgtcctactacttccccctgaagaccctgtggaggagcttctttgctgccctggtggccgcctttgtgctgcggagcatcaaccccttcggcaacagccggctggtgctcttctacgtggagtaccacaccccctggtacctgtttgagctgttccccttcatcctgctgggcgtgtttggaggcctgtggggcgccttcttcatccgggccaacatcgcctggtgcagaagaaggaagagcaccaagtttgggaagtaccctgtgctggaggtgatcatcgtggccgccatcacagctgtgattgccttccccaacccctacacccggctgaacaccagcgagctgatcaaggagctgttcacagactgtggccccctggagagcagcagcctgtgtgactacagaaatgacatgaatgccagcaagatcgtggatgacatcccagacaggcctgctggcattggagtgtacagcgccatctggcagctgtgcctggccctgatcttcaagatcatcatgacagtgttcaccttcggcatcaaggtgcccagcggcctcttcatccccagcatggccatcggggccatcgccggcagaattgtgggcattgctgtggagcagctggcctactaccaccacgactggttcatcttcaaggagtggtgtgaggtgggcgctgactgcatcaccccaggcctgtatgccatggtgggcgctgctgcctgcctgggcggcgtgaccaggatgacagtgtccctggtggtgattgtgtttgagctgaccggcggcctggagtacatcgtgcccctgatggctgctgtgatgaccagcaagtgggtgggagatgccttcggccgggagggcatctatgaggcccacatccggctgaatggctaccccttcctggatgccaaggaggagttcacccacaccaccctggccgcagatgtgatgaggcccaggagaaatgacccccccctggccgtgctgacccaggacaacatgacagtggatgacatcgagaacatgatcaatgagaccagctacaacggcttccctgtgatcatgagcaaggagagccagaggctggtgggctttgccctgcggcgggacctgaccatcgccattgaaagtgccaggaagaagcaggagggcatcgtgggcagcagccgggtgtgctttgcccagcacacccccagcctgcctgctgagagcccccggcccctgaagctgcggagcatcctggacatgagccccttcaccgtgacagaccacacccccatggagatcgtggtggacatcttcaggaagctgggcctgcggcagtgcctggtgacccacaacggccgcctgctgggcatcatcaccaagaaggacatcctgcggcacatggcccagacagccaaccaggaccctgccagcatcatgttcaactag

SEQ ID NO: 147340 - DNA, 522 bp, synthetic construct
  misc_feature 1..522: note = Description of Artificial Sequence: Synthetic coding sequence
  source 1..522: mol_type = other DNA
atggagagcgagcagctgttccaccggggctactacagaaattcctacaacagcatcaccagcgccagcagtgatgaggagctgctggatggagctggggtcatcatggacttccagaccagtgaagatgacaacctgctggatggagacacagctgtgggcacccactacaccatgaccaatggaggcagcatcaacagcagcacccacctgctggacctgctggatgagcccatccctggggtgggcacctatgatgacttccacaccatcgactgggtgcgggagaagtgcaaggaccgggagcggcaccggcgcatcaacagcaagaagaaggagagcgcctgggagatgaccaagagcctgtatgatgcctggagcggctggctggtggtgaccctgaccggcctggccagcggggccctggccggcctgattgatattgctgctgactggatgacagacctgaaggagggcatctgcctgagcgccctgtggtacaaccacgagcagtgctgctag

SEQ ID NO: 147341 - DNA, 420 bp, synthetic construct
  misc_feature 1..420: note = Description of Artificial Sequence: Synthetic coding sequence
  source 1..420: mol_type = other DNA
atggagagcgagcagctgttccaccggggctactacagaaattcctacaacagcatcaccagcgccagcagtgatgaggagctgctggatggagctggggtcatcatggacttccagaccagtgaagatgacaacctgctggatggagacacagctgtgggcacccactacaccatgaccaatggaggcagcatcaacagcagcacccacctgctggacctgctggatgagcccatccctggggtgggcacctatgatgacttccacaccatcgactgggtgcgggagaagtgcaaggaccgggagcggcaccggcgcatcaacagcaagaagaaggagagcgcctgggagatgaccaagagcctgtatgatgcctggagcggctggctggtggtgaccctgaccggcctggccagctag

SEQ ID NO: 147342 - DNA, 2457 bp, synthetic construct
  misc_feature 1..2457: note = Description of Artificial Sequence: Synthetic coding sequence
  source 1..2457: mol_type = other DNA
atggagagcgagcagctgttccaccggggctactacagaaattcctacaacagcatcaccagcgccagcagtgatgaggagctgctggatggagctggggtcatcatggacttccagaccagtgaagatgacaacctgctggatggagacacagctgtgggcacccactacaccatgaccaatggaggcagcatcaacagcagcacccacctgctggacctgctggatgagcccatccctggggtgggcacctatgatgacttccacaccatcgactgggtgcgggagaagtgcaaggaccgggagcggcaccggcgcatcaacagcaagaagaaggagagcgcctgggagatgaccaagagcctgtatgatgcctggagcggctggctggtggtgaccctgaccggcctggccagcggggccctggccggcctgattgatattgctgctgactggatgacagacctgaaggagggcatctgcctgagcgccctgtggtacaaccacgagcagtgctgctggggcagcaatgagaccacctttgaggagcgggacaagtgcccccagtggaagacctgggccgagctgatcatcggccaggccgagggccctggcagctacatcatgaactacatcatgtacatcttctgggccctgagctttgccttcctggccgtgtccctggtgaaggtgtttgccccctatgcctgtggcagcggcatccctgagatcaagaccatcctgagcggcttcatcatccggggctacctgggcaagtggaccctgatgatcaagaccatcaccctggtgctggccgtggccagcggcctgagcctgggcaaggagggccccctggtgcacgtggcctgctgctgcggcaacatcttctcctacctgttccccaagtacagcaccaatgaggccaagaagcgggaggtgctgtctgctgccagcgctgctggggtgtctgtggccttcggggcccccatcggcggcgtgctcttcagcctggaggaggtgtcctactacttccccctgaagaccctgtggaggagcttctttgctgccctggtggccgcctttgtgctgcggagcatcaacccctttggaaacagccggctggtgctcttctacgtggagtaccacaccccctggtacctgtttgagctgttccccttcatcctgctgggcgtgtttggaggcctgtggggcgccttcttcatccgggccaacatcgcctggtgcagaagaaggaagagcaccaagtttgggaagtaccctgtgctggaggtgatcatcgtggccgccatcacagctgtgattgccttccccaacccctacacccggctgaacaccagcgagctgatcaaggagctgttcacagactgtggccccctggagagcagcagcctgtgtgactacagaaatgacatgaatgccagcaagatcgtggatgacatcccagacaggcctgctggcatcggcgtgtacagcgccatctggcagctgtgcctggccctgatcttcaagatcatcatgaccgtcttcaccttcggcatcaaggtgcccagcggcctcttcatccccagcatggccatcggggccatcgccggccgcatcgtgggcattgctgtggagcagctggcctactaccaccacgactggttcatcttcaaggagtggtgtgaggtgggcgctgactgcatcaccccaggcctgtatgccatggtgggcgccgccgcctgcctgggcggcgtgaccaggatgacagtgtccctggtggtgattgtgtttgagctgactggaggcctggagtacatcgtgcccctgatggctgctgtgatgaccagcaagtgggtgggagatgccttcggccgggagggcatctatgaggcccacatccggctgaatggctaccccttcctggatgccaaggaggagttcacccacaccaccctggccgcagatgtgatgaggcccaggagaaatgacccccccctggccgtgctgacccaggacaacatgacagtggatgacatcgagaacatgatcaatgagaccagctacaacggcttccctgtgatcatgagcaaggagagccagaggctggtgggctttgccctgcggcgggacctgaccatcgccatcgagagcgccaggaagaagcaggagggcatcgtgggcagcagccgggtgtgctttgcccagcacacccccagcctgcctgctgagagcccccggcccctgaagctgcggagcatcctggacatgagccccttcaccgtgacagaccacacccccatggagatcgtggtggacatcttcaggaagctgggcctgcggcagtgcctggtgacccacaacggccgcctgctgggcatcatcaccaagaaggacatcctgcggcacatggcccagacagccaaccaggaccctgccagcatcatgttcaactag

SEQ ID NO: 147343 - DNA, 576 bp, synthetic construct
  misc_feature 1..576: note = Description of Artificial Sequence: Synthetic coding sequence
  source 1..576: mol_type = other DNA
atggagagcgagcagctgttccaccggggctactacagaaattcctacaacagcatcaccagcgccagcagtgatgaggagctgctggatggagctggggtcatcatggacttccagaccagtgaagatgacaacctgctggatggagacacagctgtgggcacccactacaccatgaccaatggaggcagcatcaacagcagcacccacctgctggacctgctggatgagcccatccctggggtgggcacctatgatgacttccacaccatcgactgggtgcgggagaagtgcaaggaccgggagcggcaccggcgcatcaacagcaagaagaaggagagcgcctgggagatgaccaagagcctgtatgatgcctggagcggctggctggtggtgaccctgaccggcctggccagcggggccctggccggcctgattgatattgctgctgactggatgacagacctgaaggagggcatctgcctgagcgccctgtggtacaaccacgagcagtgctgctggggcagcaatgagaccacctttgagaagaagaagaagaagaagaagaaggcctag

SEQ ID NO: 147344 - DNA, 2190 bp, synthetic construct
  misc_feature 1..2190: note = Description of Artificial Sequence: Synthetic coding sequence
  source 1..2190: mol_type = other DNA
atggtgaatgctggggccatgagcggcagcggcaacctgatggacttcctggatgagcccttcccagatgtgggcacctatgaggacttccacaccatcgactggctgcgggagaagagccgggacacagacagacacaggaagatcaccagcaagagcaaggagagcatctgggagttcatcaagagcctgctggatgcctggagcggctgggtggtgatgctgctgattggcctgctggccggcaccctggccggggtcatcgacctggccgtggactggatgacagacctgaaggagggcgtgtgcctgagcgccttctggtacagccatgagcagtgctgctggaccagcaatgagaccacctttgaggaccgggacaagtgccccctgtggcagaagtggagcgagctgctggtgaaccagagcgagggcgccagcgcctacatcctgaactacctgatgtacatcctgtgggccctgctgtttgccttcctggccgtgtccctggtgcgggtgtttgccccctatgcctgtggcagcggcatccctgagatcaagaccatcctgagcggcttcatcatccggggctacctgggcaagtggaccctgctgatcaagacagtgaccctggtgctggtggtgagcagcggcctgagcctgggcaaggagggccccctggtgcacgtggcctgctgctgcggcaacttcttcagcagcctcttcagcaagtacagcaagaatgaaggcaagaggcgggaggtgctgtctgctgctgctgctgctggggtgtctgtggccttcggggcccccatcggcggcgtgctcttcagcctggaggaggtgtcctactacttccccctgaagaccctgtggaggagcttctttgctgccctggtggccgccttcaccctgcggagcatcaacccctttggaaacagccggctggtgctcttctacgtggagtaccacaccccctggaggaggaagaccacccggctgggcaagtaccctgtgctggaggtgattgtggtgacagccatcacagccatcatcgcctaccccaacccctacacccggcagagcaccagcgagctgatcagcgagctgttcaatgactgtggggccctggagagcagccagctgtgtgactacatcaatgaccccaacatgaccaggcctgtggatgacatcccagacaggcctgctggggtgggcgtgtacacagccatgtggcagctggccctggccctgatcttcaagatcgtggtgaccatcttcaccttcggcatgaagatccccagcggcctcttcatccccagcatggctgtgggcgccatcgccggccgcatggtgggcatcggcgtggagcagctggcctaccaccaccacgactggatcatcttcaggaactggtgcaggcctggagctgactgtgtgaccccaggcctgtatgccatggtgggcgctgctgcctgcctgggcggcgtgaccaggatgacagtgtccctggtggtgatcatgtttgagctgaccggcggcctggagtacatcgtgcccctgatggctgctgctgtgaccagcaagtgggtggctgatgccttcggcaaggagggcatctatgaggcccacatccacctgaatggctaccccttcctggatgtgaaggatgagttcacccacaggaccctggccacagatgtgatgaggccccggcggggggagccccccctgtctgtgctgacccaggacagcatgacagtggaggatgtggagaccctcatcaaggagacagactacaacggcttccctgtggtggtgtcccgggacagcgagcggctgattggatttgcccagaggcgggagctgatcctggccatcaagaatgcccggcagaggcaggagggcatcgtgagcaacagcatcatgtacttcacagaggagcccccagagctgcctgccaacagcccccaccccctgaagctgcggcgcatcctgaacctgagccccttcaccgtgacagaccacacccccatggagaccgtggtggacatcttcaggaagctgggcctgcggcagtgcctggtgaccaggagcggccgcctgctgggcatcatcaccaagaaggatgtgctgcggcacatggcccagatggccaaccaggaccctgagagcatcatgttcaactag

SEQ ID NO: 147345 - DNA, 2283 bp, synthetic construct
  misc_feature 1..2283: note = Description of Artificial Sequence: Synthetic coding sequence
  source 1..2283: mol_type = other DNA
atggtgaatgctggggccatgagcggcagcggcaacctgatggacttcctggatgagcccttcccagatgtgggcacctatgaggacttccacaccatcgactggctgcgggagaagagccgggacacagacagacacaggaagatcaccagcaagagcaaggagagcatctgggagttcatcaagagcctgctggatgcctggagcggctgggtggtgatgctgctgattggcctgctggccggcaccctggccggggtcatcgacctggccgtggactggatgacagacctgaaggagggcgtgtgcctgagcgccttctggtacagccatgagcagtgctgctggaccagcaatgagaccacctttgaggaccgggacaagtgccccctgtggcagaagtggagcgagctgctggtgaaccagagcgagggcgccagcgcctacatcctgaactacctgatgtacatcctgtgggccctgctgtttgccttcctggccgtgtccctggtgcgggtgtttgccccctatgcctgtggcagcggcatccctgagatcaagaccatcctgagcggcttcatcatccggggctacctgggcaagtggaccctgctgatcaagacagtgaccctggtgctggtggtgagcagcggcctgagcctgggcaaggagggccccctggtgcacgtggcctgctgctgcggcaacttcttcagcagcctcttcagcaagtacagcaagaatgaaggcaagaggcgggaggtgctgtctgctgctgctgctgctggggtgtctgtggccttcggggcccccatcggcggcgtgctcttcagcctggaggaggtgtcctactacttccccctgaagaccctgtggaggagcttctttgctgccctggtggccgccttcaccctgcggagcatcaacccctttggaaacagccggctggtgctcttctacgtggagtaccacaccccctggtacatggccgagctgttccccttcatcctgctgggcgtgtttggaggcctgtggggcaccctcttcatccgctgcaacatcgcctggtgcagaagaaggaagaccacccggctgggcaagtaccctgtgctggaggtgattgtggtgacagccatcacagccatcatcgcctaccccaacccctacacccggcagagcaccagcgagctgatcagcgagctgttcaatgactgtggggccctggagagcagccagctgtgtgactacatcaatgaccccaacatgaccaggcctgtggatgacatcccagacaggcctgctggggtgggcgtgtacacagccatgtggcagctggccctggccctgatcttcaagatcgtggtgaccatcttcaccttcggcatgaagatccccagcggcctcttcatccccagcatggctgtgggcgccatcgccggccgcatggtgggcattggagtggagcagctggcctaccaccaccacgactggatcatcttcaggaactggtgcaggcctggagctgactgtgtgaccccaggcctgtatgccatggtgggcgccgccgcctgcctgggcggcgtgaccaggatgacagtgtccctggtggtgatcatgtttgagctgactggaggcctggagtacatcgtgcccctgatggctgctgctgtgaccagcaagtgggtggctgatgccttcggcaaggagggcatctatgaggcccacatccacctgaatggctaccccttcctggatgtgaaggatgagttcacccacaggaccctggccacagatgtgatgaggcccaggagaggagagccccccctgtctgtgctgacccaggacagcatgacagtggaggatgtggagaccctcatcaaggagacagactacaacggcttccctgtggtggtgtcccgggacagcgagcggctcatcggctttgcccagaggcgggagctgatcctggccatcaagaatgcccggcagaggcaggagggcatcgtgagcaacagcatcatgtacttcacagaggagcccccagagctgcctgccaacagcccccaccccctgaagctgcggcgcatcctgaacctgagccccttcaccgtgacagaccacacccccatggagaccgtggtggacatcttcaggaagctgggcctgcggcagtgcctggtgaccaggagcggccgcctgctgggcatcatcaccaagaaggatgtgctgcggcacatggcccagatggccaaccaggaccctgagagcatcatgttcaactag

SEQ ID NO: 147346 - DNA, 2001 bp, synthetic construct
  misc_feature 1..2001: note = Description of Artificial Sequence: Synthetic coding sequence
  source 1..2001: mol_type = other DNA
atgacagacctgaaggagggcgtgtgcctgagcgccttctggtacagccatgagcagtgctgctggaccagcaatgagaccacctttgaggaccgggacaagtgccccctgtggcagaagtggagcgagctgctggtgaaccagagcgagggcgccagcgcctacatcctgaactacctgatgtacatcctgtgggccctgctgtttgccttcctggccgtgtccctggtgcgggtgtttgccccctatgcctgtggcagcggcatccctgagatcaagaccatcctgagcggcttcatcatccggggctacctgggcaagtggaccctgctgatcaagacagtgaccctggtgctggtggtgagcagcggcctgagcctgggcaaggagggccccctggtgcacgtggcctgctgctgcggcaacttcttcagcagcctcttcagcaagtacagcaagaatgaaggcaagaggcgggaggtgctgtctgctgctgctgctgctggggtgtctgtggccttcggggcccccatcggcggcgtgctcttcagcctggaggaggtgtcctactacttccccctgaagaccctgtggaggagcttctttgctgccctggtggccgccttcaccctgcggagcatcaacccctttggaaacagccggctggtgctcttctacgtggagtaccacaccccctggtacatggccgagctgttccccttcatcctgctgggcgtgtttggaggcctgtggggcaccctcttcatccgctgcaacatcgcctggtgcagaagaaggaagaccacccggctgggcaagtaccctgtgctggaggtgattgtggtgacagccatcacagccatcatcgcctaccccaacccctacacccggcagagcaccagcgagctgatcagcgagctgttcaatgactgtggggccctggagagcagccagctgtgtgactacatcaatgaccccaacatgaccaggcctgtggatgacatcccagacaggcctgctggggtgggcgtgtacacagccatgtggcagctggccctggccctgatcttcaagatcgtggtgaccatcttcaccttcggcatgaagatccccagcggcctcttcatccccagcatggctgtgggcgccatcgccggccgcatggtgggcattggagtggagcagctggcctaccaccaccacgactggatcatcttcaggaactggtgcaggcctggagctgactgtgtgaccccaggcctgtatgccatggtgggcgccgccgcctgcctgggcggcgtgaccaggatgacagtgtccctggtggtgatcatgtttgagctgactggaggcctggagtacatcgtgcccctgatggctgctgctgtgaccagcaagtgggtggctgatgccttcggcaaggagggcatctatgaggcccacatccacctgaatggctaccccttcctggatgtgaaggatgagttcacccacaggaccctggccacagatgtgatgaggcccaggagaggagagccccccctgtctgtgctgacccaggacagcatgacagtggaggatgtggagaccctcatcaaggagacagactacaacggcttccctgtggtggtgtcccgggacagcgagcggctcatcggctttgcccagaggcgggagctgatcctggccatcaagaatgcccggcagaggcaggagggcatcgtgagcaacagcatcatgtacttcacagaggagcccccagagctgcctgccaacagcccccaccccctgaagctgcggcgcatcctgaacctgagccccttcaccgtgacagaccacacccccatggagaccgtggtggacatcttcaggaagctgggcctgcggcagtgcctggtgaccaggagcggccgcctgctgggcatcatcaccaagaaggatgtgctgcggcacatggcccagatggccaaccaggaccctgagagcatcatgttcaactag

SEQ ID NO: 147347 - DNA, 459 bp, synthetic construct
  misc_feature 1..459: note = Description of Artificial Sequence: Synthetic coding sequence
  source 1..459: mol_type = other DNA
atggtgaatgctggggccatgagcggcagcggcaacctgatggacttcctggatgagcccttcccagatgtgggcacctatgaggacttccacaccatcgactggctgcgggagaagagccgggacacagacagacacaggaagatcaccagcaagagcaaggagagcatctgggagttcatcaagagcctgctggatgcctggagcggctgggtggtgatgctgctgattggcctgctggccggcaccctggccggggtcatcgacctggccgtggactggatgacagacctgaaggagggcgtgtgcctgagcgccttctggtacagccatgagcagtgctgctggaccagcaatgagaccacctttgaggaccgggacaagtgccccctgtggcagaagtggagcgagctgctggtgaaccagagcgaggtgctgtctgctgctgctgctgcctag

SEQ ID NO: 147348 - DNA, 2241 bp, synthetic construct
  misc_feature 1..2241: note = Description of Artificial Sequence: Synthetic coding sequence
  source 1..2241: mol_type = other DNA
atggacttcctggaggagcccatccctggggtgggcacctatgatgacttcaacaccatcgactgggtgcgggagaagagccgggaccgggacagacaccgggagatcaccaacaagagcaaggagagcacctgggccctgatccacagcgtgtctgatgccttcagcggctggctgctgatgctgctgattggcctgctgagcggcagcctggccggcctgattgacatcagcgcccactggatgacagacctgaaggagggcatctgcacaggaggcttctggttcaaccacgagcactgctgctggaacagcgagcacgtgacctttgaggagcgggacaagtgcccagagtggaacagctggagccagctgatcatcagcacagatgagggcgcctttgcctacatcgtgaactacttcatgtatgtgctgtgggccctgctgtttgccttcctggccgtgtccctggtgaaggtgtttgccccctatgcctgtggcagcggcatccctgagatcaagaccatcctgagcggcttcatcatccggggctacctgggcaagtggaccctggtgatcaagaccatcaccctggtgctggccgtgagcagcggcctgagcctgggcaaggagggccccctggtgcacgtggcctgctgctgcggcaacatcctgtgccactgcttcaacaagtacaggaagaatgaggccaagagaagagaggtgctgtctgctgctgctgctgctggggtgtctgtggcctttggagcccccatcggcggcgtgctcttcagcctggaggaggtgtcctactacttccccctgaagaccctgtggaggagcttctttgctgccctggtggccgccttcaccctgcggagcatcaaccccttcggcaacagccggctggtgctcttctacgtggagttccacaccccctggcacctgtttgagctggtgcccttcatcctgctgggcatctttggaggcctgtggggcgccctcttcatccgcaccaacatcgcctggtgcaggaagaggaagaccacccagctgggcaagtaccctgtgattgaggtgctggtggtgacagccatcacagccatcctggccttccccaatgagtacaccaggatgagcaccagcgagctgatcagcgagctgttcaatgactgtggcctgctggacagcagcaagctgtgtgactatgagaaccgcttcaacaccagcaaaggaggagagctgcctgacaggcctgctggggtgggcgtgtacagcgccatgtggcagctggccctgaccctcatcctgaagatcgtcatcaccatcttcaccttcggcatgaagatccccagcggcctcttcatccccagcatggctgtgggcgccatcgccggccgcctgctgggcgtgggcatggagcagctggcctactaccaccaggagtggacagtgttcaacagctggtgcagccagggcgctgactgcatcaccccaggcctgtatgccatggtgggcgccgccgcctgcctgggcggcgtgaccaggatgacagtgtccctggtggtgatcatgtttgagctgactggaggcctggagtacatcgtgcccctgatggctgctgccatgaccagcaagtgggtggctgatgccctgggccgggagggcatctatgatgcccacatccggctgaatggctaccccttcctggaggccaaggaggagtttgcccacaagaccctggccatggatgtgatgaagcccaggagaaatgaccccctgctgactgtgctgacccaggacagcatgacagtggaggatgtggagaccatcatcagcgagaccacctacagcggcttccctgtggtggtgtcccgggagagccagaggctggtgggctttgtgctgcggcgggacctgatcatcagcattgaaaatgccaggaagaagcaggatggagtggtgtccaccagcatcatctacttcacagagcacagcccccccctgcccccctacaccccacccaccctgaagctgaggaacatcctggacctgagccccttcaccgtgacagacctgacccccatggagatcgtggtggacatcttcaggaagctgggcctgcggcagtgcctggtgacccacaacggccgcctgctgggcatcatcaccaagaaggatgtgctgaagcacatcgcccagatggccaaccaggaccctgacagcatcctcttcaactag

SEQ ID NO: 147349 - DNA, 2451 bp, synthetic construct
  misc_feature 1..2451: note = Description of Artificial Sequence: Synthetic coding sequence
  source 1..2451: mol_type = other DNA
atggccatgtggcagggcgccatggacaacagaggcttccagcagggcagcttcagcagcttccagaacagcagcagtgatgaggacctgatggacatcccagccacagccatggacttctccatgagagatgatgtgccccccctggaccgggaggtgggggaggacaagagctacaacggcggcggcatcggcagcagcaaccgcatcatggacttcctggaggagcccatccctggggtgggcacctatgatgacttcaacaccatcgactgggtgcgggagaagagccgggaccgggacagacaccgggagatcaccaacaagagcaaggagagcacctgggccctgatccacagcgtgtctgatgccttcagcggctggctgctgatgctgctgattggcctgctgagcggcagcctggccggcctgattgacatcagcgcccactggatgacagacctgaaggagggcatctgcacaggaggcttctggttcaaccacgagcactgctgctggaacagcgagcacgtgacctttgaggagcgggacaagtgcccagagtggaacagctggagccagctgatcatcagcacagatgagggcgcctttgcctacatcgtgaactacttcatgtatgtgctgtgggccctgctgtttgccttcctggccgtgtccctggtgaaggtgtttgccccctatgcctgtggcagcggcatccctgagatcaagaccatcctgagcggcttcatcatccggggctacctgggcaagtggaccctggtgatcaagaccatcaccctggtgctggccgtgagcagcggcctgagcctgggcaaggagggccccctggtgcacgtggcctgctgctgcggcaacatcctgtgccactgcttcaacaagtacaggaagaatgaggccaagagaagagaggtgctgtctgctgctgctgctgctggggtgtctgtggcctttggagcccccatcggcggcgtgctcttcagcctggaggaggtgtcctactacttccccctgaagaccctgtggaggagcttctttgctgccctggtggccgccttcaccctgcggagcatcaaccccttcggcaacagccggctggtgctcttctacgtggagttccacaccccctggcacctgtttgagctggtgcccttcatcctgctgggcatctttggaggcctgtggggcgccctcttcatccgcaccaacatcgcctggtgcaggaagaggaagaccacccagctgggcaagtaccctgtgattgaggtgctggtggtgacagccatcacagccatcctggccttccccaatgagtacaccaggatgagcaccagcgagctgatcagcgagctgttcaatgactgtggcctgctggacagcagcaagctgtgtgactatgagaaccgcttcaacaccagcaaaggaggagagctgcctgacaggcctgctggggtgggcgtgtacagcgccatgtggcagctggccctgaccctcatcctgaagatcgtcatcaccatcttcaccttcggcatgaagatccccagcggcctcttcatccccagcatggctgtgggcgccatcgccggccgcctgctgggcgtgggcatggagcagctggcctactaccaccaggagtggacagtgttcaacagctggtgcagccagggcgctgactgcatcaccccaggcctgtatgccatggtgggcgccgccgcctgcctgggcggcgtgaccaggatgacagtgtccctggtggtgatcatgtttgagctgactggaggcctggagtacatcgtgcccctgatggctgctgccatgaccagcaagtgggtggctgatgccctgggccgggagggcatctatgatgcccacatccggctgaatggctaccccttcctggaggccaaggaggagtttgcccacaagaccctggccatggatgtgatgaagcccaggagaaatgaccccctgctgactgtgctgacccaggacagcatgacagtggaggatgtggagaccatcatcagcgagaccacctacagcggcttccctgtggtggtgtcccgggagagccagaggctggtgggctttgtgctgcggcgggacctgatcatcagcattgaaaatgccaggaagaagcaggatggagtggtgtccaccagcatcatctacttcacagagcacagcccccccctgcccccctacaccccacccaccctgaagctgaggaacatcctggacctgagccccttcaccgtgacagacctgacccccatggagatcgtggtggacatcttcaggaagctgggcctgcggcagtgcctggtgacccacaacggccgcctgctgggcatcatcaccaagaaggatgtgctgaagcacatcgcccagatggccaaccaggaccctgacagcatcctcttcaactag

SEQ ID NO: 147350 - DNA, 2451 bp, synthetic construct; identical to SEQ ID NO: 147349
  misc_feature 1..2451: note = Description of Artificial Sequence: Synthetic coding sequence
  source 1..2451: mol_type = other DNA

SEQ ID NO: 147351 - DNA, 2241 bp, synthetic construct; identical to SEQ ID NO: 147348
  misc_feature 1..2241: note = Description of Artificial Sequence: Synthetic coding sequence
  source 1..2241: mol_type = other DNA

SEQ ID NO: 147352 - DNA, 1947 bp, synthetic construct
  misc_feature 1..1947: note = Description of Artificial Sequence: Synthetic coding sequence
  source 1..1947: mol_type = other DNA
atgaacatcgtggccggcaccctgtccatgagccccctgaagagggacaagtgcccagagtggaacagctggagccagctgatcatcagcacagatgagggcgcctttgcctacatcgtgaactacttcatgtatgtgctgtgggccctgctgtttgccttcctggccgtgtccctggtgaaggtgtttgccccctatgcctgtggcagcggcatccctgagatcaagaccatcctgagcggcttcatcatccggggctacctgggcaagtggaccctggtgatcaagaccatcaccctggtgctggccgtgagcagcggcctgagcctgggcaaggagggccccctggtgcacgtggcctgctgctgcggcaacatcctgtgccactgcttcaacaagtacaggaagaatgaggccaagagaagagaggtgctgtctgctgctgctgctgctggggtgtctgtggcctttggagcccccatcggcggcgtgctcttcagcctggaggaggtgtcctactacttccccctgaagaccctgtggaggagcttctttgctgccctggtggccgccttcaccctgcggagcatcaaccccttcggcaacagccggctggtgctcttctacgtggagttccacaccccctggcacctgtttgagctggtgcccttcatcctgctgggcatctttggaggcctgtggggcgccctcttcatccgcaccaacatcgcctggtgcaggaagaggaagaccacccagctgggcaagtaccctgtgattgaggtgctggtggtgacagccatcacagccatcctggccttccccaatgagtacaccaggatgagcaccagcgagctgatcagcgagctgttcaatgactgtggcctgctggacagcagcaagctgtgtgactatgagaaccgcttcaacaccagcaaaggaggagagctgcctgacaggcctgctggggtgggcgtgtacagcgccatgtggcagctggccctgaccctcatcctgaagatcgtcatcaccatcttcaccttcggcatgaagatccccagcggcctcttcatccccagcatggctgtgggcgccatcgccggccgcctgctgggcgtgggcatggagcagctggcctactaccaccaggagtggacagtgttcaacagctggtgcagccagggcgctgactgcatcaccccaggcctgtatgccatggtgggcgccgccgcctgcctgggcggcgtgaccaggatgacagtgtccctggtggtgatcatgtttgagctgactggaggcctggagtacatcgtgcccctgatggctgctgccatgaccagcaagtgggtggctgatgccctgggccgggagggcatctatgatgcccacatccggctgaatggctaccccttcctggaggccaaggaggagtttgcccacaagaccctggccatggatgtgatgaagcccaggagaaatgaccccctgctgactgtgctgacccaggacagcatgacagtggaggatgtggagaccatcatcagcgagaccacctacagcggcttccctgtggtggtgtcccgggagagccagaggctggtgggctttgtgctgcggcgggacctgatcatcagcattgaaaatgccaggaagaagcaggatggagtggtgtccaccagcatcatctacttcacagagcacagcccccccctgcccccctacaccccacccaccctgaagctgaggaacatcctggacctgagccccttcaccgtgacagacctgacccccatggagatcgtggtggacatcttcaggaagctgggcctgcggcagtgcctggtgacccacaacggccgcctgctgggcatcatcaccaagaaggatgtgctgaagcacatcgcccagatggccaaccaggaccctgacagcatcctcttcaactag

SEQ ID NO: 147353 - DNA, 1062 bp, synthetic construct
  misc_feature 1..1062: note = Description of Artificial Sequence: Synthetic coding sequence
  source 1..1062: mol_type = other DNA
atggccggctgccggggcagcctgtgctgctgctgccgctggtgctgctgctgcggggagcgggagaccaggaccccagaggagctgaccatcctgggggagacccaggaggaggaggatgagatcctgcccaggaaggactatgagagcctggactatgaccgctgcatcaatgacccctacctggaggtgctggagaccatggacaacaagaagggccgccgctatgaggccgtgaagtggatggtggtgtttgccatcggcgtgtgcaccggcctggtgggcctgtttgtggacttctttgtgcggctcttcacccagctgaagtttggagtggtgcagacctctgtggaggagtgcagccagaagggctgcctggccctgagcctgctggagctgctgggcttcaacctgacctttgtgttcctggccagcctgctggtgctgattgagcctgtggccgccggcagcggcatccctgaggtgaagtgctacctgaatggagtgaaggtgcccggcatcgtgcggctgcggaccctgctgtgcaaggtgctgggcgtgctcttctctgtggccggcggcctgtttgtggagaaggagggccccatgatccacagcggctctgtggtgggcgccggcctgccccagttccagagcatcagcctgaggaagatccagttcaacttcccctacttcagaagtgaccgggacaagagggactttgtgtctgctggagctgctgctggggtggccgccgccttcggggcccccatcggcggcaccctcttcagcctggaggagggcagcagcttctggaaccagggcctgacctggaaggtgctcttctgcagcatgtctgccaccttcaccctgaacttcttccgcagcggcatccagtttggctcctggggcagcttccagctgcccggcctgctgaactttggagagttcaagagcctgcgggagcccccctgtgtgtctggcaaccaccggggcggcgtgtgtggcctggatggagtgcggaggatgcccacagatgtgctgtttgagagcaacagatag

SEQ ID NO: 147354 - DNA, 2610 bp, synthetic construct
  misc_feature 1..2610: note = Description of Artificial Sequence: Synthetic coding sequence
  source 1..2610: mol_type = other DNA
atggccggctgccggggcagcctgtgctgctgctgccgctggtgctgctgctgcggggagcgggagaccaggaccccagaggagctgaccatcctgggggagacccaggaggaggaggatgagatcctgcccaggaaggactatgagagcctggactatgaccgctgcatcaatgacccctacctggaggtgctggagaccatggacaacaagaagggccgccgctatgaggccgtgaagtggatggtggtgtttgccatcggcgtgtgcaccggcctggtgggcctgtttgtggacttctttgtgcggctcttcacccagctgaagtttggagtggtgcagacctctgtggaggagtgcagccagaagggctgcctggccctgagcctgctggagctgctgggcttcaacctgacctttgtgttcctggccagcctgctggtgctgattgagcctgtggccgccggcagcggcatccctgaggtgaagtgctacctgaatggagtgaaggtgcccggcatcgtgcggctgcggaccctgctgtgcaaggtgctgggcgtgctcttctctgtggccggcggcctgtttgtggagaaggagggccccatgatccacagcggctctgtggtgggcgccggcctgccccagttccagagcatcagcctgaggaagatccagttcaacttcccctacttcagaagtgaccgggacaagagggactttgtgtctgctggagctgctgctggggtggccgccgccttcggggcccccatcggcggcaccctcttcagcctggaggagggcagcagcttctggaaccagggcctgacctggaaggtgctcttctgcagcatgtctgccaccttcaccctgaacttcttccgcagcggcatccagtttggctcctggggcagcttccagctgcccggcctgctgaactttggagagttcaagtgcagcgacagcgacaagaagtgccacctgtggacagccatggacctgggcttctttgtggtgatgggcgtgattggaggcctgctgggcgccaccttcaactgcctgaacaagaggctggccaagtacaggatgagaaatgtgcaccccaagcccaagctggtgcgggtgctggagagcctgctggtgtccctggtgaccaccgtggtggtgtttgtggcctccatggtgctgggggagtgccggcagatgagcagcagcagccagattggaaatgacagcttccagctgcaggtgacagaagatgtgaacagcagcatcaagaccttcttctgccccaatgacacctacaatgacatggccaccctcttcttcaacccccaggagagcgccatcctgcagctgttccaccaggacggcaccttcagccctgtgaccctggccctcttctttgtgctgtacttcctgctggcctgctggacctacggcatctctgtgcccagcggcctgtttgtgcccagcctgctgtgtggggccgccttcggccgcctggtggccaacgtgctgaagagctacatcggcctgggccacatctacagcggcacctttgccctgattggagctgctgccttcctgggcggcgtggtgaggatgaccatcagcctgaccgtcatcctgattgagagcaccaatgagatcacctacggcctgcccatcatggtgaccctgatggtggccaagtggacaggagacttcttcaacaagggcatctatgacatccacgtgggcctgcggggcgtgcccctgctggagtgggagacagaggtggagatggacaagctgcgggccagtgacatcatggagcccaacctgacctacgtgtacccccacacccgcatccagagcctggtgtccatcctgcggaccaccgtgcaccacgccttccctgtggtgacagagaacagaggaaatgagaaggagttcatgaagggcaaccagctgatcagcaacaacatcaagttcaagaagagcagcatcctgacccgggccggggagcagaggaagaggagccagagcatgaagagctaccccagcagcgagctgaggaacatgtgtgatgagcacatcgccagcgaggagcctgctgagaaggaggacctgctgcagcagatgctggagcggcgctacaccccctaccccaacctgtacccagaccagagccccagcgaggactggaccatggaggagcgcttccggcccctgaccttccacggcctcatcctgcggagccagctggtgaccctgctggtgcggggcgtgtgctacagcgagagccagagcagcgccagccagccccggctgtcctatgcagagatggccgaggactacccccgctacccagacatccatgacctggacctgaccctgctgaaccccaggatgattgtggatgtgaccccctacatgaaccccagccccttcaccgtgagccccaacacccacgtgtcccaggtgttcaacctcttccgcaccatgggcctgcggcacctgcctgtggtgaatgctgtgggggagatcgtgggcatcatcaccaggcacaacctgacctatgagttcctgcaggcccggctgcggcagcactaccagaccatctag

SEQ ID NO: 147355 - DNA, 2544 bp, synthetic construct
  misc_feature 1..2544: note = Description of Artificial Sequence: Synthetic coding sequence
  source 1..2544: mol_type = other DNA
atggccggctgccggggcagcctgtgctgctgctgccgctggtgctgctgctgcggggagcgggagaccaggaccccagaggagctgaccatcctgggggagacccaggaggaggaggatgagatcctgcccaggaaggactatgagaagggccgccgctatgaggccgtgaagtggatggtggtgtttgccatcggcgtgtgcaccggcctggtgggcctgtttgtggacttctttgtgcggctcttcacccagctgaagtttggagtggtgcagacctctgtggaggagtgcagccagaagggctgcctggccctgagcctgctggagctgctgggcttcaacctgacctttgtgttcctggccagcctgctggtgctgattgagcctgtggccgccggcagcggcatccctgaggtgaagtgctacctgaatggagtgaaggtgcccggcatcgtgcggctgcggaccctgctgtgcaaggtgctgggcgtgctcttctctgtggccggcggcctgtttgtggagaaggagggccccatgatccacagcggctctgtggtgggcgccggcctgccccagttccagagcatcagcctgaggaagatccagttcaacttcccctacttcagaagtgaccgggacaagagggactttgtgtctgctggagctgctgctggggtggccgccgccttcggggcccccatcggcggcaccctcttcagcctggaggagggcagcagcttctggaaccagggcctgacctggaaggtgctcttctgcagcatgtctgccaccttcaccctgaacttcttccgcagcggcatccagtttggctcctggggcagcttccagctgcccggcctgctgaactttggagagttcaagtgcagcgacagcgacaagaagtgccacctgtggacagccatggacctgggcttctttgtggtgatgggcgtgattggaggcctgctgggcgccaccttcaactgcctgaacaagaggctggccaagtacaggatgagaaatgtgcaccccaagcccaagctggtgcgggtgctggagagcctgctggtgtccctggtgaccaccgtggtggtgtttgtggcctccatggtgctgggggagtgccggcagatgagcagcagcagccagattggaaatgacagcttccagctgcaggtgacagaagatgtgaacagcagcatcaagaccttcttctgccccaatgacacctacaatgacatggccaccctcttcttcaacccccaggagagcgccatcctgcagctgttccaccaggacggcaccttcagccctgtgaccctggccctcttctttgtgctgtacttcctgctggcctgctggacctacggcatctctgtgcccagcggcctgtttgtgcccagcctgctgtgtggggccgccttcggccgcctggtggccaacgtgctgaagagctacatcggcctgggccacatctacagcggcacctttgccctgattggagctgctgccttcctgggcggcgtggtgaggatgaccatcagcctgaccgtcatcctgattgagagcaccaatgagatcacctacggcctgcccatcatggtgaccctgatggtggccaagtggacaggagacttcttcaacaagggcatctatgacatccacgtgggcctgcggggcgtgcccctgctggagtgggagacagaggtggagatggacaagctgcgggccagtgacatcatggagcccaacctgacctacgtgtacccccacacccgcatccagagcctggtgtccatcctgcggaccaccgtgcaccacgccttccctgtggtgacagagaacagaggaaatgagaaggagttcatgaagggcaaccagctgatcagcaacaacatcaagttcaagaagagcagcatcctgacccgggccggggagcagaggaagaggagccagagcatgaagagctaccccagcagcgagctgaggaacatgtgtgatgagcacatcgccagcgaggagcctgctgagaaggaggacctgctgcagcagatgctggagcggcgctacaccccctaccccaacctgtacccagaccagagccccagcgaggactggaccatggaggagcgcttccggcccctgaccttccacggcctcatcctgcggagccagctggtgaccctgctggtgcggggcgtgtgctacagcgagagccagagcagcgccagccagccccggctgtcctatgcagagatggccgaggactacccccgctacccagacatccatgacctggacctgaccctgctgaaccccaggatgattgtggatgtgaccccctacatgaaccccagccccttcaccgtgagccccaacacccacgtgtcccaggtgttcaacctcttccgcaccatgggcctgcggcacctgcctgtggtgaatgctgtgggggagatcgtgggcatcatcaccaggcacaacctgacctatgagttcctgcaggcccggctgcggcagcactaccagaccatctag

SEQ ID NO: 147356 - DNA, 963 bp, synthetic construct
  misc_feature 1..963: note = Description of Artificial Sequence: Synthetic coding sequence
  source 1..963: mol_type = other DNA
atggccggctgccggggcagcctgtgctgctgctgccgctggtgctgctgctgcggggagcgggagaccaggaccccagaggagctgaccatcctgggggagacccaggaggaggaggatgagatcctgcccaggaaggactatgagagcctggactatgaccgctgcatcaatgacccctacctggaggtgctggagaccatggacaacaagaagggccgccgctatgaggccgtgaagtggatggtggtgtttgccatcggcgtgtgcaccggcctggtgggcctgtttgtggacttctttgtgcggctcttcacccagctgaagtttggagtggtgcagacctctgtggaggagtgcagccagaagggctgcctggccctgagcctgctggagctgctgggcttcaacctgacctttgtgttcctggccagcctgctggtgctgattgagcctgtggccgccggcagcggcatccctgaggtgaagtgctacctgaatggagtgaaggtgcccggcatcgtgcggctgcggaccctgctgtgcaaggtgctgggcgtgctcttctctgtggccggcggcctgtttgtggagaaggagggccccatgatccacagcggctctgtggtgggcgccggcctgccccagttccagagcatcagcctgaggaagatccagttcaacttcccctacttcagaagtgacagatatggcaagaggcaggagcggctgtgcatcagccgcagcggctgctggagctgctgcagcttccggggggccaacagaggctacctggtgcagagccggggcggctttgtgctgctggagccccgggcccacgtggagagcgccctgctcttccacgtgtgccacctgcacccccagctgctgcccttctgggacagcgtgtggaagctgggcttcctgcctgccccctggattgctgagctgtggagggtgtag

SEQ ID NO: 147357 - DNA, 927 bp, synthetic construct
  misc_feature 1..927: note = Description of Artificial Sequence: Synthetic coding sequence
  source 1..927: mol_type = other DNA
atggccggctgccggggcagcctgtgctgctgctgccgctggtgctgctgctgcggggagcgggagaccaggaccccagaggagctgaccatcctgggggagacccaggaggaggaggatgagatcctgcccaggaaggactatgagagcctggactatgaccgctgcatcaatgacccctacctggaggtgctggagaccatggacaacaagaagggccgccgctatgaggccgtgaagtggatggtggtgtttgccatcggcgtgtgcaccggcctggtgggcctgtttgtggacttctttgtgcggctcttcacccagctgaagtttggagtggtgcagacctctgtggaggagtgcagccagaagggctgcctggccctgagcctgctggagctgctgggcttcaacctgacctttgtgttcctggccagcctgctggtgctgattgagcctgtggccgccggcagcggcatccctgaggtgaagtgctacctgaatggagtgaaggtgcccggcatcgtgcggctgcggaccctgctgtgcaaggtgctgggcgtgctcttctctgtggccggcggcctgtttgtggagaaggagggccccatgatccacagcggctctgtggtgggcgccggcctgccccagttccagagcatcagcctgaggaagatccagttcaacttcccctacttcagaagtgacagaagtggctgctggagctgctgcagcttccggggggccaacagaggctacctggtgcagagccggggcggctttgtgctgctggagccccgggcccacgtggagagcgccctgctcttccacgtgtgccacctgcacccccagctgctgcccttctgggacagcgtgtggaagctgggcttcctgcctgccccctggattgctgagctgtggagggtgtag

SEQ ID NO: 147358 - DNA, 1062 bp, synthetic construct; identical to SEQ ID NO: 147353
  misc_feature 1..1062: note = Description of Artificial Sequence: Synthetic coding sequence
  source 1..1062: mol_type = other DNA

SEQ ID NO: 147359 - DNA, 2862 bp, synthetic construct
  misc_feature 1..2862: note = Description of Artificial Sequence: Synthetic coding sequence
  source 1..2862: mol_type = other DNA
atggccggctgccggggcagcctgtgctgctgctgccgctggtgctgctgctgcggggagcgggagaccaggaccccagaggagctgaccatcctgggggagacccaggaggaggaggatgagatcctgcccaggaaggactatgagagcctggactatgaccgctgcatcaatgacccctacctggaggtgctggagaccatggacaacaagaagggccgccgctatgaggccgtgaagtggatggtggtgtttgccatcggcgtgtgcaccggcctggtgggcctgtttgtggacttctttgtgcggctcttcacccagctgaagtttggagtggtgcagacctctgtggaggagtgcagccagaagggctgcctggccctgagcctgctggagctgctgggcttcaacctgacctttgtgttcctggccagcctgctggtgctgattgagcctgtggccgccggcagcggcatccctgaggtgaagtgctacctgaatggagtgaaggtgcccggcatcgtgcggctgcggaccctgctgtgcaaggtgctgggcgtgctcttctctgtggccggcggcctgtttgtggagaaggagggccccatgatccacagcggctctgtggtgggcgccggcctgccccagttccagagcatcagcctgaggaagatccagttcaacttcccctacttcagaagtgaccgggacaagagggactttgtgtctgctggagctgctgctggggtggccgccgccttcggggcccccatcggcggcaccctcttcagcctggaggagggcagcagcttctggaaccagggcctgacctggaaggtgctcttctgcagcatgtctgccaccttcaccctgaacttcttccgcagcggcatccagtttggctcctggggcagcttccagctgcccggcctgctgaactttggagagttcaagtgcagcgacagcgacaagaagtgccacctgtggacagccatggacctgggcttctttgtggtgatgggcgtgattggaggcctgctgggcgccaccttcaactgcctgaacaagaggctggccaagtacaggatgagaaatgtgcaccccaagcccaagctggtgcgggtgctggagagcctgctggtgtccctggtgaccaccgtggtggtgtttgtggcctccatggtgctgggggagtgccggcagatgagcagcagcagccagattggaaatgacagcttccagctgcaggtgacagaagatgtgaacagcagcatcaagaccttcttctgccccaatgacacctacaatgacatggccaccctcttcttcaacccccaggagagcgccatcctgcagctgttccaccaggacggcaccttcagccctgtgaccctggccctcttctttgtgctgtacttcctgctggcctgctggacctacggcatctctgtgcccagcggcctgtttgtgcccagcctgctgtgtggggccgccttcggccgcctggtggccaacgtgctgaagagctacatcggcctgggccacatctacagcggcacctttgccctgattggagctgctgccttcctgggcggcgtggtgaggatgaccatcagcctgaccgtcatcctgattgagagcaccaatgagatcacctacggcctgcccatcatggtgaccctgatggtggccaagtggacaggagacttcttcaacaagggcatctatgacatccacgtgggcctgcggggcgtgcccctgctggagtgggagacagaggtggagatggacaagctgcgggccagtgacatcatggagcccaacctgacctacgtgtacccccacacccgcatccagagcctggtgtccatcctgcggaccaccgtgcaccacgccttccctgtggtgacagagaacagaggaaatgagaaggagttcatgaagggcaaccagctgatcagcaacaacatcaagttcaagaagagcagcatcctgacccgggccggggagcagaggaagaggagccagagcatgaagagctaccccagcagcgagctgaggaacatgtgtgatgagcacatcgccagcgaggagcctgctgagaaggaggacctgctgcagcagatgctggagcggcgctacaccccctaccccaacctgtacccagaccagagccccagcgaggactggaccatggaggagcgcttccggcccctgaccttccacggcctcatcctgcggagccagctggtgaccctgctggtgcggggcgtgtgctacagcgagagccagagcagcgccagccagccccggctgtcctatgcagagatggccgaggactacccccgctacccagacatccatgacctggacctgaccctgctgaaccccaggatgattgtggatgtgaccccctacatgaaccccagccccttcaccgtgagccccaacacccacgtgtcccaggtgttcaacctcttccgcaccatgggcctgcggcacctgcctgtggtgaatgctgtgggggaggtgtctgaggccccagccctgcccccacccctgcgggaggaccccctggcccgctgctgcctgtgcacccaggccagccaccagaagagaagacaccccaccaggagaggagaatgtggccccaccctggccctgaacccagcccggctgccctgcacccgggaccccttcccctgcctgcctgcagatggcacctctgtgcccctggccgtgctgagcagccagagccgggccagcacccggctgtgcctgcccccagagatgctgctcttcaccccctaccactggtgcagcctggtgctgcacctgcggcgggacctgcgcatcagatag

SEQ ID NO: 147360 - DNA, 369 bp, synthetic construct
  misc_feature 1..369: note = Description of Artificial Sequence: Synthetic coding sequence
  source 1..369: mol_type = other DNA
atggccggctgccggggcagcctgtgctgctgctgccgctggtgctgctgctgcggggagcgggagaccaggaccccagaggagctgaccatcctgggggagacccaggaggaggaggatgagatcctgcccaggaaggactatgagagcctggactatgaccgctgcatcaatgacccctacctggaggtgctggagaccatggacaacaagaagggccgccgctatgaggccgtgaagtggatggtggtgtttgccatcggcgtgtgcaccggcctggtgggcctgtttgtggacttctttgtgcggctcttcacccagctgaagtttggagtggtgcagacctacaagttccagatgaagatgtag

SEQ ID NO: 147361 - DNA, 2277 bp, synthetic construct
  misc_feature 1..2277: note = Description of Artificial Sequence: Synthetic coding sequence
  source 1..2277: mol_type = other DNA
agccccaggtctgccctcttccgggtgggccacatgagctctgtggagctggatgatgagctgctggaccctgacatggaccccccccaccccttccccaaggagatcccccacaatgagaagctgctgagcctgaagtatgagagcctggactatgacaacagcgagaaccagctgttcctggaggaggagcggcgcatcaaccacacagccttcagaacagtggagatcaagcgctgggtgatctgtgccctgattggcatcctgaccggcctggtggcctgcttcattgatattgtggtggagaacctggccggcctgaagtacagagtcatcaagggcaacatcgacaagttcacagagaagggcggcctgtccttcagcctgctgctgtgggccaccctgaatgctgcctttgtgctggtgggcagcgtcatcgtggccttcatcgagcctgtggccgccggcagcggcatcccccagatcaagtgcttcctgaatggagtgaagatcccccacgtggtgcggctgaagaccctggtgatcaaggtgtctggagtcatcctgtctgtggtgggcggcctggccgtgggcaaggagggccccatgatccacagcggctctgtgattgctgctggcatcagccagggccgcagcaccagcctgaagagggacttcaagatctttgagtacttcagaagagacacagagaagagggactttgtgtctgctggagctgctgctggggtgtctgctgccttcggggcccctgtgggcggcgtgctcttcagcctggaggagggcgccagcttctggaaccagttcctgacctggaggatcttctttgcctccatgatcagcaccttcaccctgaactttgtgctgagcatctaccacggcaacatgtgggacctgagcagccctggcctcatcaactttggccgctttgacagcgagaagatggcctacaccatccacgagatccctgtgttcatcgccatgggcgtggtgggcggcgtgctgggcgctgtgttcaatgccctgaactactggctgaccatgttccgcatccgctacatccaccggccctgcctgcaggtgattgaggccgtgctggtggccgctgtgacagccaccgtggcctttgtgctgatctacagcagccgggactgccagcccctgcagggcggctccatgagctaccccctgcagctgttctgtgctgatggagagtacaacagcatggctgctgccttcttcaacaccccagagaagtctgtggtgtccctcttccatgaccccccaggcagctacaaccccctgaccctgggcctcttcaccctggtgtacttcttcctggcctgctggacctacggcctgactgtgtctgctggggtcttcatccccagcctgctgattggagctgcctggggccgcctgtttggcatcagcctgagctacctgactggagctgccatctgggccgaccccgggaagtatgccctgatgggcgccgccgcccagctgggcggcatcgtgaggatgaccctgagcctgaccgtcatcatgatggaggccaccagcaatgtgacctacggcttccccatcatgctggtgctgatgacagccaagatcgtgggagatgtgttcatcgagggcctgtatgacatgcacatccagctgcagagcgtgcccttcctgcactgggaggcccctgtgaccagccacagcctgacagcccgggaggtgatgagcacccctgtgacctgcctgcggcggcgggagaaggtgggcgtcatcgtggatgtgctgagtgacacagccagcaaccacaacggcttccctgtggtggagcacgcagatgacacccagcctgcccggctgcagggcctcatcctgcggagccagctgattgtgctgctgaagcacaaggtgtttgtggagaggagcaacctgggcctggtgcagaggcggctgcggctgaaggacttcagagatgcctacccccgcttcccccccatccagagcatccacgtgtcccaggatgaaagagaatgtaccatggacctgtctgagttcatgaaccccagcccctacacagtgccccaggaggccagcctgcccagggtcttcaagctgttccgggccctgggcctgcggcacctggtggtggtggacaacagaaaccaggtggtgggcctggtgaccaggaaggacctggcccgctaccgcctgggcaagaggggcctggaggagctgagcctggcccagacctag

SEQ ID NO: 147362 - DNA, 2418 bp, synthetic construct
  misc_feature 1..2418: note = Description of Artificial Sequence: Synthetic coding sequence
  source 1..2418: mol_type = other DNA
atggccaacgtgtccaagaaggtgtcctggagcggccgggacagagatgatgaggaggccgcccccctgctgcggaggacagcccggcctgggggcggcacccccctgctgaatggagctggccctggggccgcccggcagagccccaggtctgccctcttccgggtgggccacatgagctctgtggagctggatgatgagctgctggaccctgacatggaccccccccaccccttccccaaggagatcccccacaatgagaagctgctgagcctgaagtatgagagcctggactatgacaacagcgagaaccagctgttcctggaggaggagcggcgcatcaaccacacagccttcagaacagtggagatcaagcgctgggtgatctgtgccctgattggcatcctgaccggcctggtggcctgcttcatcgacatcgtggtggagaacctggccggcctgaagtacagagtcatcaagggcaacatcgacaagttcacagagaagggcggcctgtccttcagcctgctgctgtgggccaccctgaatgctgcctttgtgctggtgggctctgtgattgtggccttcatcgagcctgtggccgccggcagcggcatcccccagatcaagtgcttcctgaatggagtgaagatcccccacgtggtgcggctgaagaccctggtgatcaaggtgtctggagtcatcctgtctgtggtgggcggcctggccgtgggcaaggagggccccatgatccacagcggctctgtgattgctgctggcatcagccagggccgcagcaccagcctgaagagggacttcaagatctttgagtacttccggcgggacacagagaagagggactttgtgtctgctggagctgctgctggggtgtctgctgcctttggagcccctgtgggcggcgtgctcttcagcctggaggagggcgccagcttctggaaccagttcctgacctggaggatcttctttgcctccatgatcagcaccttcaccctgaactttgtgctgagcatctaccacggcaacatgtgggacctgagcagccctggcctcatcaactttggccgctttgattctgagaagatggcctacaccatccacgagatccctgtgttcatcgccatgggcgtggtgggcggcgtgctgggcgctgtgttcaatgccctgaactactggctgaccatgttccgcatccgctacatccaccggccctgcctgcaggtgattgaagctgtgctggtggccgctgtgacagccaccgtggcctttgtgctgatctacagcagccgggactgccagcccctgcagggcggctccatgagctaccccctgcagctgttctgtgctgatggagagtacaacagcatggccgccgccttcttcaacaccccagagaagtctgtggtgtccctcttccatgaccccccaggcagctacaaccccctgaccctgggcctcttcaccctggtgtacttcttcctggcctgctggacctacggcctgactgtgtctgctggggtcttcatccccagcctgctgattggagctgcctggggccgcctgtttggcatcagcctgagctacctgaccggggccgccatctgggccgaccccgggaagtatgccctgatgggcgctgctgcccagctgggcggcatcgtgaggatgaccctgagcctgaccgtcatcatgatggaggccaccagcaatgtgacctacggcttccccatcatgctggtgctgatgacagccaagatcgtgggagatgtgttcatcgagggcctgtatgacatgcacatccagctgcagagcgtgcccttcctgcactgggaggcccctgtgaccagccacagcctgacagcccgggaggtgatgagcacccctgtgacctgcctgcggcggcgggagaaggtgggcgtgattgtggatgtgctgagtgacacagccagcaaccacaacggcttccctgtggtggagcacgcagatgacacccagcctgcccggctgcagggcctcatcctgcggagccagctgattgtgctgctgaagcacaaggtgtttgtggagaggagcaacctgggcctggtgcagaggcggctgcggctgaaggacttcagagatgcctacccccgcttcccccccatccagagcatccacgtgtcccaggatgagcgggagtgcaccatggacctgtctgagttcatgaaccccagcccctacacagtgccccaggaggccagcctgcccagggtcttcaagctgttccgggccctgggcctgcggcacctggtggtggtggacaacagaaaccaggtggtgggcctggtgaccaggaaggacctggcccgctaccgcctgggcaagaggggcctggaggagctgagcctggcccagacctag

SEQ ID NO: 147363 - DNA, 2244 bp, synthetic construct
  misc_feature 1..2244: note = Description of Artificial Sequence: Synthetic coding sequence
  source 1..2244: mol_type = other DNA
atgagctctgtggagctggatgatgagctgctggaccctgacatggaccccccccaccccttccccaaggagatcccccacaatgagaagctgctgagcctgaagtatgagagcctggactatgacaacagcgagaaccagctgttcctggaggaggagcggcgcatcaaccacacagccttcagaacagtggagatcaagcgctgggtgatctgtgccctgattggcatcctgaccggcctggtggcctgcttcatcgacatcgtggtggagaacctggccggcctgaagtacagagtcatcaagggcaacatcgacaagttcacagagaagggcggcctgtccttcagcctgctgctgtgggccaccctgaatgctgcctttgtgctggtgggctctgtgattgtggccttcatcgagcctgtggccgccggcagcggcatcccccagatcaagtgcttcctgaatggagtgaagatcccccacgtggtgcggctgaagaccctggtgatcaaggtgtctggagtcatcctgtctgtggtgggcggcctggccgtgggcaaggagggccccatgatccacagcggctctgtgattgctgctggcatcagccagggccgcagcaccagcctgaagagggacttcaagatctttgagtacttccggcgggacacagagaagagggactttgtgtctgctggagctgctgctggggtgtctgctgcctttggagcccctgtgggcggcgtgctcttcagcctggaggagggcgccagcttctggaaccagttcctgacctggaggatcttctttgcctccatgatcagcaccttcaccctgaactttgtgctgagcatctaccacggcaacatgtgggacctgagcagccctggcctcatcaactttggccgctttgattctgagaagatggcctacaccatccacgagatccctgtgttcatcgccatgggcgtggtgggcggcgtgctgggcgctgtgttcaatgccctgaactactggctgaccatgttccgcatccgctacatccaccggccctgcctgcaggtgattgaagctgtgctggtggccgctgtgacagccaccgtggcctttgtgctgatctacagcagccgggactgccagcccctgcagggcggctccatgagctaccccctgcagctgttctgtgctgatggagagtacaacagcatggccgccgccttcttcaacaccccagagaagtctgtggtgtccctcttccatgaccccccaggcagctacaaccccctgaccctgggcctcttcaccctggtgtacttcttcctggcctgctggacctacggcctgactgtgtctgctggggtcttcatccccagcctgctgattggagctgcctggggccgcctgtttggcatcagcctgagctacctgaccggggccgccatctgggccgaccccgggaagtatgccctgatgggcgctgctgcccagctgggcggcatcgtgaggatgaccctgagcctgaccgtcatcatgatggaggccaccagcaatgtgacctacggcttccccatcatgctggtgctgatgacagccaagatcgtgggagatgtgttcatcgagggcctgtatgacatgcacatccagctgcagagcgtgcccttcctgcactgggaggcccctgtgaccagccacagcctgacagcccgggaggtgatgagcacccctgtgacctgcctgcggcggcgggagaaggtgggcgtgattgtggatgtgctgagtgacacagccagcaaccacaacggcttccctgtggtggagcacgcagatgacacccagcctgcccggctgcagggcctcatcctgcggagccagctgattgtgctgctgaagcacaaggtgtttgtggagaggagcaacctgggcctggtgcagaggcggctgcggctgaaggacttcagagatgcctacccccgcttcccccccatccagagcatccacgtgtcccaggatgagcgggagtgcaccatggacctgtctgagttcatgaaccccagcccctacacagtgccccaggaggccagcctgcccagggtcttcaagctgttccgggccctgggcctgcggcacctggtggtggtggacaacagaaaccaggtggtgggcctggtgaccaggaaggacctggcccgctaccgcctgggcaagaggggcctggaggagctgagcctggcccagacctag

SEQ ID NO: 147364 - DNA, 2346 bp, synthetic construct
  misc_feature 1..2346: note = Description of Artificial Sequence: Synthetic coding sequence
  source 1..2346: mol_type = other DNA
atggccaacgtgtccaagaaggtgtcctggagcggccgggacagagatgatgaggaggccgcccccctgctgcggaggacagcccggcctgggggcggcacccccctgctgaatggagctggccctggggccgcccggcaggacatggaccccccccaccccttccccaaggagatcccccacaatgagaagctgctgagcctgaagtatgagagcctggactatgacaacagcgagaaccagctgttcctggaggaggagcggcgcatcaaccacacagccttcagaacagtggagatcaagcgctgggtgatctgtgccctgattggcatcctgaccggcctggtggcctgcttcatcgacatcgtggtggagaacctggccggcctgaagtacagagtcatcaagggcaacatcgacaagttcacagagaagggcggcctgtccttcagcctgctgctgtgggccaccctgaatgctgcctttgtgctggtgggctctgtgattgtggccttcatcgagcctgtggccgccggcagcggcatcccccagatcaagtgcttcctgaatggagtgaagatcccccacgtggtgcggctgaagaccctggtgatcaaggtgtctggagtcatcctgtctgtggtgggcggcctggccgtgggcaaggagggccccatgatccacagcggctctgtgattgctgctggcatcagccagggccgcagcaccagcctgaagagggacttcaagatctttgagtacttccggcgggacacagagaagagggactttgtgtctgctggagctgctgctggggtgtctgctgcctttggagcccctgtgggcggcgtgctcttcagcctggaggagggcgccagcttctggaaccagttcctgacctggaggatcttctttgcctccatgatcagcaccttcaccctgaactttgtgctgagcatctaccacggcaacatgtgggacctgagcagccctggcctcatcaactttggccgctttgattctgagaagatggcctacaccatccacgagatccctgtgttcatcgccatgggcgtggtgggcggcgtgctgggcgctgtgttcaatgccctgaactactggctgaccatgttccgcatccgctacatccaccggccctgcctgcaggtgattgaagctgtgctggtggccgctgtgacagccaccgtggcctttgtgctgatctacagcagccgggactgccagcccctgcagggcggctccatgagctaccccctgcagctgttctgtgctgatggagagtacaacagcatggccgccgccttcttcaacaccccagagaagtctgtggtgtccctcttccatgaccccccaggcagctacaaccccctgaccctgggcctcttcaccctggtgtacttcttcctggcctgctggacctacggcctgactgtgtctgctggggtcttcatccccagcctgctgattggagctgcctggggccgcctgtttggcatcagcctgagctacctgaccggggccgccatctgggccgaccccgggaagtatgccctgatgggcgctgctgcccagctgggcggcatcgtgaggatgaccctgagcctgaccgtcatcatgatggaggccaccagcaatgtgacctacggcttccccatcatgctggtgctgatgacagccaagatcgtgggagatgtgttcatcgagggcctgtatgacatgcacatccagctgcagagcgtgcccttcctgcactgggaggcccctgtgaccagccacagcctgacagcccgggaggtgatgagcacccctgtgacctgcctgcggcggcgggagaaggtgggcgtgattgtggatgtgctgagtgacacagccagcaaccacaacggcttccctgtggtggagcacgcagatgacacccagcctgcccggctgcagggcctcatcctgcggagccagctgattgtgctgctgaagcacaaggtgtttgtggagaggagcaacctgggcctggtgcagaggcggctgcggctgaaggacttcagagatgcctacccccgcttcccccccatccagagcatccacgtgtcccaggatgagcgggagtgcaccatggacctgtctgagttcatgaaccccagcccctacacagtgccccaggaggccagcctgcccagggtcttcaagctgttccgggccctgggcctgcggcacctggtggtggtggacaacagaaaccaggtggtgggcctggtgaccaggaaggacctggcccgctaccgcctgggcaagaggggcctggaggagctgagcctggcccagacctag

SEQ ID NO: 147365 - DNA, 1545 bp, synthetic construct
  misc_feature 1..1545: note = Description of Artificial Sequence: Synthetic coding sequence
  source 1..1545: mol_type = other DNA
atggtgctggacctggacctcttccgggtggacaagggcggggaccctgccctgatccgggagacccaggagaagcgcttcaaggaccccggcctggtggaccagctggtgaaggctgacagcgagtggaggcgctgccgcttccgggctgacaacctgaacaagctgaagaacctgtgcagcaagaccatcggggagaagatgaagaagaaggagcctgtgggagatgatgaatctgtgcctgaaaatgtgctgagctttgatgacctgacagcagatgccctggccaacctgaaggtgtcccagatcaagaaggtgcggctgctgattgatgaggccatcctgaagtgtgatgctgagcgcatcaagctggaggccgagagatttgagaacctgcgggagatcggcaacctgctgcaccccagcgtgcccatcagcaatgatgaagatgtggacaacaaggtggagcgcatctggggagactgcaccgtgaggaagaagtacagccacgtggacctggtggtgatggtggatggctttgaaggagagaagggagctgtggtggccggcagccggggctacttcctgaagggcgtgctggtgttcctggagcaggccctgatccagtatgccctgcggaccctgggcagccggggctacatccccatctacacccccttcttcatgaggaaggaggtgatgcaggaggtggcccagctgagccagtttgatgaggagctgtacaaggtgattggaaaaggaagtgagaagagtgatgacaacagctatgatgagaagtacctgattgccaccagcgagcagcccatcgccgccctgcacagagatgagtggctgcggcctgaggacctgcccatcaagtatgccggcctgagcacctgcttccggcaggaggtgggcagccacggccgggacacccggggcatcttccgggtgcaccagtttgagaagattgagcagtttgtgtacagcagcccccatgacaacaagtcctgggagatgtttgaggagatgatcaccacagctgaggagttctaccagagcctgggcatcccctaccacatcgtgaacatcgtgtctggcagcctgaaccacgccgccagcaagaagctggacctggaggcctggttccctggcagcggggccttccgggagctggtgtcctgcagcaactgcacagactaccaggcccggcggctgcgcatccgctatggccagaccaagaagatgatggacaaggtggagtttgtgcacatgctgaatgccaccatgtgtgccaccaccaggaccatctgtgccatcctggagaactaccagacagagaagggcatcaccgtgcctgagaagctgaaggagttcatgcctcctggcctgcaggagctgatcccctttgtgaagccagcccccatcgagcaggagcccagcaagaagcagaagaagcagcacgagggcagcaagaagaaggccgccgccagagatgtgaccctggagaaccggctgcagaacatggaggtgacagatgcctag

SEQ ID NO: 147366 - DNA, 2745 bp, synthetic construct
  misc_feature 1..2745: note = Description of Artificial Sequence: Synthetic coding sequence
  source 1..2745: mol_type = other DNA
atgggccccttcaagagctctgtgttcatcctgatcctgcacctgctggagggcgccctgagcaacagcctcatccagctgaacaacaacggctatgagggcatcgtggtggccatcgaccccaacgtgcctgaagatgagaccctcatccagcagatcaaggacatggtgacccaggccagcctgtacctgctggaggccaccgggaagcgcttctacttcaagaatgtggccatcctgatccctgagacctggaagaccaaggctgactatgtgcggcccaagctggagacctacaagaatgctgatgtgctggtggccgagagcaccccacctggaaatgatgagccctacacagagcagatgggcaactgtggggagaagggggagcgcatccacctgaccccagacttcatcgccggcaagaagctggccgagtatggcccccagggccgggcctttgtgcatgagtgggcccacctgcgctggggcgtgtttgatgagtacaacaatgatgagaagttctacctgagcaatggccgcatccaggccgtgcgctgcagcgctggcatcaccggcaccaacgtggtgaagaagtgccagggcggcagctgctacaccaagcgctgcaccttcaacaaggtgacaggcctgtatgagaagggctgtgaatttgtgctgcagagccggcagacagagaaggccagcatcatgtttgcccagcacgtggacagcatcgtggagttctgcacagagcagaaccacaacaaggaggcccccaacaagcagaaccagaagtgcaacctgcggagcacctgggaggtgatccgggacagcgaggacttcaagaagaccacccccatgaccacccagccccccaaccccaccttcagcctgctgcagatcggccagagaattgtgtgcctggtgctggacaagagcggctccatggccactggaaaccggctgaaccggctgaaccaggccggccagctgttcctgctgcagacagtggagctgggctcctgggtgggcatggtgacctttgattctgctgcccacgtgcagaatgaactcatccagatcaacagcggcagtgaccgggacaccctggccaagaggctgcctgctgctgccagcggcggcaccagcatctgcagcggcctgcggagcgccttcaccgtcatcaggaagaagtaccccacagatggcagcgagatcgtgctgctgacagatggagaggacaacaccatcagcggctgcttcaatgaggtgaagcagagcggggccatcatccacacagtggccctgggccccagcgctgcccaggagctggaggagctgagcaagatgactggaggcctgcagacctacgccagtgaccaggtgcagaacaacggcctgattgatgccttcggggccctgagcagtggaaatggagctgtgtcccagaggagcatccagctggagagcaagggcctgaccctgcagaacagccagtggatgaatggaacagtgattgtggacagcacagtgggcaaggacaccctcttcctgatcacctggaccatgcagcccccccagatcctgctgtgggaccccagcggccagaagcagggcggctttgtggtggacaagaacaccaagatggcctacctgcagatccctggcatcgccaaggtgggcacctggaagtacagcctgcaggccagcagccagaccctgaccctgactgtgaccagccgggccagcaatgccaccctgccccccatcaccgtgaccagcaagaccaacaaggacaccagcaagttccccagccccctggtggtgtatgccaacatccggcagggcgccagccccatcctgcgggcctctgtgacagccctgattgagagcgtgaatggcaagacagtgaccctggagctgctggacaatggagctggagcagatgccaccaaggatgatggagtgtacagccgctacttcaccacctatgacaccaacggccgctacagcgtgaaggtgcgggccctgggcggcgtgaatgctgcccggcggcgggtcatcccccagcagagcggggccctgtacatccctggctggattgaaaatgatgagatccagtggaacccccccaggcctgagatcaacaaggatgatgtgcagcacaagcaggtgtgcttcagcaggaccagcagcggcggcagctttgtggccagtgatgtgcccaatgcccccatcccagacctcttccccccaggccagatcacagacctgaaggccgagatccacggcggcagcctcatcaacctgacctggacagcccctggagatgattatgaccacggcacagcccacaagtacatcatccgcatcagcaccagcatcctggacctgcgggacaagttcaatgaaagcctgcaggtgaacaccacagccctgatccccaaggaggccaacagcgaggaggtgttcctgttcaagccagagaacatcacctttgaaaatggaacagacctcttcatcgccatccaggccgtggacaaggtggacctgaagtctgagatcagcaacatcgcccgggtgtccctcttcatccccccccagaccccacctgagacccccagcccagatgagaccagcgccccctgccccaacatccacatcaacagcaccatccctggcatccacatcctgaagatcatgtggaagtggattggagagctgcagctgagcatcgcctag

SEQ ID NO: 147367 - DNA, 987 bp, synthetic construct
  misc_feature 1..987: note = Description of Artificial Sequence: Synthetic coding sequence
  source 1..987: mol_type = other DNA
atgaccacccagccccccaaccccaccttcagcctgctgcagatcggccagagaattgtgtgcctggtgctggacaagagcggctccatggccaccggcaaccggctgaaccggctgaaccaggccggccagctgttcctgctgcagacagtggagctgggctcctgggtgggcatggtgacctttgacagcgctgcccacgtgcagaatgagctgatccagatcaacagcggcagtgaccgggacaccctggccaagaggctgcctgctgctgccagcggcggcaccagcatctgcagcggcctgcggagcgccttcaccgtcatcaggaagaagtaccccacagatggcagcgagatcgtgctgctgacagatggagaggacaacaccatcagcggctgcttcaatgaggtgaagcagagcggggccatcatccacacagtggccctgggccccagcgctgcccaggagctggaggagctgagcaagatgactggaggcctgcagacctacgccagtgaccaggtgcagaacaacggcctgattgatgcctttggagccctgagcagtggaaatggagctgtgtcccagaggagcatccagctggagagcaagggcctgaccctgcagaacagccagtggatgaatggcaccgtcatcgtggacagcacagtgggcaaggacaccctcttcctgatcacctggaccatgcagcccccccagatcctgctgtgggaccccagcggccagaagcagggcggctttgtggtggacaagaacaccaagatggcctacctgcagatccctggcatcgccaaggtgggcacctggaagtacagcctgcaggccagcagccagaccctgaccctgactgtgaccagccgggccagcaatgccaccctgccccccatcaccgtgaccagcaagaccaacaaggacaccagcaacctgcccaacagccagggccagtgccacagcccagactag

SEQ ID NO: 147368 - DNA, 2064 bp, synthetic construct
  misc_feature 1..2064: note = Description of Artificial Sequence: Synthetic coding sequence
  source 1..2064: mol_type = other DNA
atggaggagctggtgggcctgcgggagggcttcagcggggaccctgtgaccctgcaggagctgtggggcccctgcccccacatcagaagagccatccagggcggcctggagtggctgaagcagaaggtgttccggctgggggaggactggtacttcctgatgaccctgggcgtgctgatggccctggtgtcctatgccatgaactttgccatcggctgtgtggtgcgggcccaccagtggctgtaccgggagattggagacagccacctgctgcgctacctgtcctggacagtgtaccctgtggccctggtgtccttcagcagcggcttcagccagagcatcacccccagcagcggcggcagcggcatccctgagctgaagaccatgctggccggggtcatcctggaggactacctggacatcaagaactttggagccaaggtggtgggcctgagctgcaccctggccaccggcagcaccctcttcctgggcaaggtgggcccctttgtgcacctgtctgtgatgattgctgcctacctgggccgggtgaggaccaccaccatcggggagcctgagaacaagagcaagcagaatgagatgctggtggccgctgctgctgtgggcgtggccaccgtgtttgctgcccccttcagcggcgtgctcttcagcattgaggtgatgagcagccacttctctgtgcgggactactggaggggcttctttgctgccacctgtggggccttcatcttccggctgctggccgtgttcaacagcgagcaggagaccatcaccagcctgtacaagaccagcttccgggtggatgtgccctttgacctgcctgagatcttcttctttgtggccctgggcggcatctgtggggtgctgagctgtgcctacctgttctgccagaggaccttcctgtccttcatcaagaccaaccgctacagcagcaagctgctggccaccagcaagcctgtgtacagcgccctggccaccctgctgctggccagcatcacctacccacctggggtgggccacttcctggccagccggctgtccatgaagcagcacctggacagcctgtttgacaaccacagctgggccctgatgacccagaacagcagccccccctggccagaggagctggacccccagcacctgtggtgggagtggtaccacccccgcttcaccatcttcggcaccctggccttcttcctggtgatgaagttctggatgctgatcctggccaccaccatccccatgcctgctggctacttcatgcccatcttcatcctgggcgccgccatcggccgcctgctgggggaggccctggccgtggccttccctgagggcatcgtgactggaggagtgaccaaccccatcatgcctgggggctacgccctggccggggccgccgccttctctggagctgtgacccacaccatcagcacagccctgctggcctttgagctgaccggccagatcgtgcacgccctgcctgtgctgatggctgtgctggccgccaatgccatcgcccagagctgccagcccagcttctatgatggcaccatcatcgtgaagaagctgccctacctgccccgcatcctgggcaggaacatcggcagccaccacgtgcgggtggagcacttcatgaaccacagcatcaccaccctggccaaggacacccccctggaggaggtggtgaaggtggtgaccagcacagatgtgacagagtaccccctggtggagagcacagagagccagatcctggtgggcatcgtgcagagggcccagctggtgcaggccctgcaggccgagccccccagccgggcccctggccaccagcagtgcctgcaggacatcctggcccggggctgccccacagagcctgtgaccctgaccctcttcagcgagaccaccctgcaccaggcccagaacctcttcaagctgctgaacctgcagagcctgtttgtgaccagccggggccgggctgtgggctgtgtgtcctgggtggagatgaagaaggccatcagcaacctgaccaaccccccagcccccaagtag

SEQ ID NO: 147369 - DNA, 2061 bp, synthetic construct
  misc_feature 1..2061: note = Description of Artificial Sequence: Synthetic coding sequence
  source 1..2061: mol_type = other DNA
atggaggagctggtgggcctgcgggagggcttcagcggggaccctgtgaccctgcaggagctgtggggcccctgcccccacatcagaagagccatccagggcggcctggagtggctgaagcagaaggtgttccggctgggggaggactggtacttcctgatgaccctgggcgtgctgatggccctggtgtcctatgccatgaactttgccatcggctgtgtggtgcgggcccaccagtggctgtaccgggagattggagacagccacctgctgcgctacctgtcctggacagtgtaccctgtggccctggtgtccttcagcagcggcttcagccagagcatcacccccagcagcggcggcagcggcatccctgagctgaagaccatgctggccggggtcatcctggaggactacctggacatcaagaactttggagccaaggtggtgggcctgagctgcaccctggccaccggcagcaccctcttcctgggcaaggtgggcccctttgtgcacctgtctgtgatgattgctgcctacctgggccgggtgaggaccaccaccatcggggagcctgagaacaagagcaagcagaatgagatgctggtggccgctgctgctgtgggcgtggccaccgtgtttgctgcccccttcagcggcgtgctcttcagcattgaggtgatgagcagccacttctctgtgcgggactactggaggggcttctttgctgccacctgtggggccttcatcttccggctgctggccgtgttcaacagcgagcaggagaccatcaccagcctgtacaagaccagcttccgggtggatgtgccctttgacctgcctgagatcttcttctttgtggccctgggcggcatctgtggggtgctgagctgtgcctacctgttctgccagaggaccttcctgtccttcatcaagaccaaccgctacagcagcaagctgctggccaccagcaagcctgtgtacagcgccctggccaccctgctgctggccagcatcacctacccacctggggtgggccacttcctggccagccggctgtccatgaagcagcacctggacagcctgtttgacaaccacagctgggccctgatgacccagaacagcagccccccctggccagaggagctggacccccagcacctgtggtgggagtggtaccacccccgcttcaccatcttcggcaccctggccttcttcctggtgatgaagttctggatgctgatcctggccaccaccatccccatgcctgctggctacttcatgcccatcttcatcctgggcgccgccatcggccgcctgctgggggaggccctggccgtggccttccctgagggcatcgtgactggaggagtgaccaaccccatcatgcctgggggctacgccctggccggggccgccgccttctctggagctgtgacccacaccatcagcacagccctgctggcctttgagctgaccggccagatcgtgcacgccctgcctgtgctgatggctgtgctggccgccaatgccatcgcccagagctgccagcccagcttctatgatggcaccatcatcgtgaagaagctgccctacctgccccgcatcctgggcaggaacatcggcagccaccacgtgcgggtggagcacttcatgaaccacagcatcaccaccctggccaaggacacccccctggaggaggtggtgaaggtggtgaccagcacagatgtgacagagtaccccctggtggagagcacagagagccagatcctggtgggcatcgtgcagagggcccagctggtgcaggccctgcaggccgagccccccagccgggcccctggccaccagtgcctgcaggacatcctggcccggggctgccccacagagcctgtgaccctgaccctcttcagcgagaccaccctgcaccaggcccagaacctcttcaagctgctgaacctgcagagcctgtttgtgaccagccggggccgggctgtgggctgtgtgtcctgggtggagatgaagaaggccatcagcaacctgaccaaccccccagcccccaagtag

SEQ ID NO: 147370 - DNA, 2061 bp, synthetic construct; identical to SEQ ID NO: 147369
  misc_feature 1..2061: note = Description of Artificial Sequence: Synthetic coding sequence
  source 1..2061: mol_type = other DNA

SEQ ID NO: 147371 - DNA, 1935 bp, synthetic construct
  misc_feature 1..1935: note = Description of Artificial Sequence: Synthetic coding sequence
  source 1..1935: mol_type = other DNA
atggaggagctggtgggcctgcgggagggcttcagcggggaccctgtgaccctgcaggagctgtggggcccctgcccccacatcagaagagccatccagggcggcctggagtggctgaagcagaaggtgttccggctgggggaggactggtacttcctgatgaccctgggcgtgctgatggccctggtgtcctatgccatgaactttgccatcggctgtgtggtgcggggcagcggcatccctgagctgaagaccatgctggccggggtcatcctggaggactacctggacatcaagaactttggagccaaggtggtgggcctgagctgcaccctggccaccggcagcaccctcttcctgggcaaggtgggcccctttgtgcacctgtctgtgatgattgctgcctacctgggccgggtgaggaccaccaccatcggggagcctgagaacaagagcaagcagaatgagatgctggtggccgctgctgctgtgggcgtggccaccgtgtttgctgcccccttctctggagtgctcttcagcattgaggtgatgagcagccacttctctgtgcgggactactggaggggcttctttgctgccacctgtggggccttcatcttccggctgctggccgtgttcaacagcgagcaggagaccatcaccagcctgtacaagaccagcttccgggtggatgtgccctttgacctgcctgagatcttcttctttgtggccctgggcggcatctgtggggtgctgagctgtgcctacctgttctgccagaggaccttcctgtccttcatcaagaccaaccgctacagcagcaagctgctggccaccagcaagcctgtgtacagcgccctggccaccctgctgctggccagcatcacctacccacctggggtgggccacttcctggccagccggctgtccatgaagcagcacctggacagcctgtttgacaaccacagctgggccctgatgacccagaacagcagccccccctggccagaggagctggacccccagcacctgtggtgggagtggtaccacccccgcttcaccatcttcggcaccctggccttcttcctggtgatgaagttctggatgctgatcctggccaccaccatccccatgcctgctggctacttcatgcccatcttcatcctgggcgccgccatcggccgcctgctgggggaggccctggccgtggccttccctgagggcatcgtgactggaggagtgaccaaccccatcatgcctgggggctacgccctggccggggctgctgccttcagcggggctgtgacccacaccatcagcacagccctgctggcctttgagctgaccggccagatcgtgcacgccctgcctgtgctgatggctgtgctggccgccaatgccatcgcccagagctgccagcccagcttctatgatggcaccatcatcgtgaagaagctgccctacctgccccgcatcctgggcagaaatattggcagccaccacgtgcgggtggagcacttcatgaaccacagcatcaccaccctggccaaggacacccccctggaggaggtggtgaaggtggtgaccagcacagatgtgacagagtaccccctggtggagagcacagagagccagatcctggtgggcatcgtgcagagggcccagctggtgcaggccctgcaggccgagccccccagccgggcccctggccaccagcagtgcctgcaggacatcctggcccggggctgccccacagagcctgtgaccctgaccctcttcagcgagaccaccctgcaccaggcccagaacctcttcaagctgctgaacctgcagagcctgtttgtgaccagccggggccgggctgtgggctgtgtgtcctgggtggagatgaagaaggccatcagcaacctgaccaaccccccagcccccaagtag

SEQ ID NO: 147372 - DNA, 1389 bp, synthetic construct
  misc_feature 1..1389: note = Description of Artificial Sequence: Synthetic coding sequence
  source 1..1389: mol_type = other DNA
atggaggagtttgtgggcctgcgggagggcagcagcggcaaccctgtgaccctgcaggagctgtggggcccctgcccccgcatcagaagaggcatccggggcggcctggagtggctgaagcagaagctgttccggctgggggaggactggtacttcctgatgaccctgggcgtgctgatggccctggtgtcctgtgccatggacctggccgtggagagcgtggtgcgggcccaccagtggctgtaccgggagattggagacagccacctgctgcgctacctgtcctggacagtgtaccctgtggccctggtgtccttcagcagcggcttcagccagagcatcacccccagcagcggcggcagcggcatccctgaggtgaagaccatgctggccggcgtggtgctggaggactacctggacatcaagaactttggagccaaggtggtgggcctgagctgcaccctggcctgtggcagcaccctcttcctgggcaaggtgggcccctttgtgcacctgtctgtgatgatggccgcctacctgggccgggtgaggaccaccaccatcggggagcctgagaacaagagcaagcctgtgtacagcgccctggccaccctggtgctggccagcatcacctacccaccttctgctggccgcttcctggccagccggctgtccatgaagcagcacctggacagcctgtttgacaaccacagctgggccctgatgacccagaacagcagccccccctggccagaggagctggacccccagcacctgtggtgggagtggtaccacccccgcttcaccatcttcggcaccctggccttcttcctggtgatgaagttctggatgctgatcctggccaccaccatccccatgcctgctggctacttcatgcccatctttgtgtatggagctgccatcggccgcctgtttggagagaccctgtccttcatcttccctgagggcatcgtggccggcggcatcaccaaccccatcatgcctgggggctacgccctggccggggccgccgccttctctggagctgtgacccacaccatcagcacagccctgctggcctttgaggtgacaggccagatcgtgcacgccctgcctgtgctgatggctgtgctggccgccaatgccatcgcccagagctgccagcccagcttctatgatggcaccgtgattgtgaagaagctgccctacctgccccgcatcctgggcaggaacatcggcagccaccgggtgcgggtggagcacttcatgaaccacagcatcaccaccctggccatcaccctgatgaatgatgaaattggagtgcactgccaccagggccaggcccagatgcccagcggcgtggtgtggttccctgtgcggggcagctag

SEQ ID NO: 147373 - DNA, 1554 bp, synthetic construct
  misc_feature 1..1554: note = Description of Artificial Sequence: Synthetic coding sequence
  source 1..1554: mol_type = other DNA
atgccctgcccccccctgctgtctgtgcctgtgcgggccgccggggagcaggaccgctgggtgcgggaggaggtgacctggggcggcggccccaccgtgactggaggctggggctggagggcccacctgcggtctgtgagccccccaggagtgctcttcagcattgaggtgatgagcagccacttctctgtgtgggactactggaggggcttctttgctgccacctgtggggccttcatgttccggctgctggccgtgttcaacagcgagcaggagaccatcaccagcctgtacaagaccagcttccgggtggatgtgccctttgacctgcctgagatcttcttctttgtggccctgggcggcctgtgtggcatcctgggcagcgcctacctgttctgccagaggatcttcttcggcttcatccggaacaaccgcttcagcagcaagctgctggccaccagcaagcctgtgtacagcgccctggccaccctggtgctggccagcatcacctacccacccagcgctggccgcttcctggccagccggctgtccatgaagcagcacctggacagcctgtttgacaaccacagctgggccctgatgacccagaacagcagccccccctggccagaggagctggacccccagcacctgtggtgggagtggtaccacccccgcttcaccatcttcggcaccctggccttcttcctggtgatgaagttctggatgctgatcctggccaccaccatccccatgcctgctggctacttcatgcccatctttgtgtatggagctgccatcggccgcctgtttggagagaccctgtccttcatcttccctgagggcatcgtggccggcggcatcaccaaccccatcatgcctgggggctacgccctggccggggctgctgccttcagcggggctgtgacccacaccatcagcacagccctgctggcctttgaggtgacaggccagatcgtgcacgccctgcctgtgctgatggctgtgctggccgccaatgccatcgcccagagctgccagcccagcttctatgatggcaccgtcatcgtgaagaagctgccctacctgccccgcatcctgggcagaaatattggcagccaccgggtgcgggtggagcacttcatgaaccacagcatcaccaccctggccaaggacatgcccctggaggaggtggtgaaggtggtgaccagcacagatgtggccaagtaccccctggtggagagcacagagagccagatcctggtgggcatcgtgcggcgggcccagctggtgcaggccctgaaggccgagccccccagctgggcccctggccaccagtgcctgcaggacatcctggccgccggctgccccacagagcctgtgaccctgaagctgagccctgagaccagcctgcacgaggcccacaacctgtttgagctgctgaacctgcacagcctgtttgtgaccagccggggccgggctgtgggctgtgtgtcctgggtggagatgaagaaggccatcagcaacctgaccaaccccccagcccccaagtag

SEQ ID NO: 147374 - DNA, 468 bp, synthetic construct
  misc_feature 1..468: note = Description of Artificial Sequence: Synthetic coding sequence
  source 1..468: mol_type = other DNA
atggctgtgctggccgccaatgccatcgcccagagctgccagcccagcttctatgatggcaccgtgattgtgaagaagctgccctacctgccccgcatcctgggcaggaacatcggcagccaccgggtgcgggtggagcacttcatgaaccacagcatcaccaccctggccaaggacatgcccctggaggaggtggtgaaggtggtgaccagcacagatgtggccaagtaccccctggtggagagcacagagagccagatcctggtgggcatcgtgagaagagcccagctggtgcaggccctgaaggccgagcccccatcctgggcccctggccaccagtgcctgcaggacatcctggccgccggctgccccacagagcctgtgaccctgaagctgagccctgagaccagcctgcacgaggcccagatgcccagcggcgtggtgtggttccctgtgcggggcagctag

SEQ ID NO: 147375 - DNA, 2064 bp, synthetic construct
  misc_feature 1..2064: note = Description of Artificial Sequence: Synthetic coding sequence
  source 1..2064: mol_type = other DNA
atggaggagtttgtgggcctgcgggagggcagcagcggcaaccctgtgaccctgcaggagctgtggggcccctgcccccgcatcagaagaggcatccggggcggcctggagtggctgaagcagaagctgttccggctgggggaggactggtacttcctgatgaccctgggcgtgctgatggccctggtgtcctgtgccatggacctggccgtggagagcgtggtgcgggcccaccagtggctgtaccgggagattggagacagccacctgctgcgctacctgtcctggacagtgtaccctgtggccctggtgtccttcagcagcggcttcagccagagcatcacccccagcagcggcggcagcggcatccctgaggtgaagaccatgctggccggcgtggtgctggaggactacctggacatcaagaactttggagccaaggtggtgggcctgagctgcaccctggcctgtggcagcaccctcttcctgggcaaggtgggcccctttgtgcacctgtctgtgatgatggccgcctacctgggccgggtgaggaccaccaccatcggggagcctgagaacaagagcaagcagaatgagatgctggtggccgctgctgctgtgggcgtggccaccgtgtttgctgcccccttcagcggcgtgctcttcagcattgaggtgatgagcagccacttctctgtgtgggactactggaggggcttctttgctgccacctgtggggccttcatgttccggctgctggccgtgttcaacagcgagcaggagaccatcaccagcctgtacaagaccagcttccgggtggatgtgccctttgacctgcctgagatcttcttctttgtggccctgggcggcctgtgtggcatcctgggcagcgcctacctgttctgccagaggatcttcttcggcttcatccggaacaaccgcttcagcagcaagctgctggccaccagcaagcctgtgtacagcgccctggccaccctggtgctggccagcatcacctacccaccttctgctggccgcttcctggccagccggctgtccatgaagcagcacctggacagcctgtttgacaaccacagctgggccctgatgacccagaacagcagccccccctggccagaggagctggacccccagcacctgtggtgggagtggtaccacccccgcttcaccatcttcggcaccctggccttcttcctggtgatgaagttctggatgctgatcctggccaccaccatccccatgcctgctggctacttcatgcccatctttgtgtatggagctgccatcggccgcctgtttggagagaccctgtccttcatcttccctgagggcatcgtggccggcggcatcaccaaccccatcatgcctgggggctacgccctggccggggccgccgccttctctggagctgtgacccacaccatcagcacagccctgctggcctttgaggtgacaggccagatcgtgcacgccctgcctgtgctgatggctgtgctggccgccaatgccatcgcccagagctgccagcccagcttctatgatggcaccgtgattgtgaagaagctgccctacctgccccgcatcctgggcaggaacatcggcagccaccgggtgcgggtggagcacttcatgaaccacagcatcaccaccctggccaaggacatgcccctggaggaggtggtgaaggtggtgaccagcacagatgtggccaagtaccccctggtggagagcacagagagccagatcctggtgggcatcgtgagaagagcccagctggtgcaggccctgaaggccgagcccccatcctgggcccctggccaccagcagtgcctgcaggacatcctggccgccggctgccccacagagcctgtgaccctgaagctgagccctgagaccagcctgcacgaggcccacaacctgtttgagctgctgaacctgcacagcctgtttgtgaccagccggggccgggctgtgggctgtgtgtcctgggtggagatgaagaaggccatcagcaacctgaccaaccccccagcccccaagtag

SEQ ID NO: 147376 - DNA, 441 bp, synthetic construct
  misc_feature 1..441: note = Description of Artificial Sequence: Synthetic coding sequence
  source 1..441: mol_type = other DNA
gcccagagctgccagcccagcttctatgatggcaccgtcatcgtgaagaagctgccctacctgccccgcatcctgggcagaaatattggcagccaccgggtgcgggtggagcacttcatgaaccacagcatcaccaccctggccaaggacatgcccctggaggaggtggtgaaggtggtgaccagcacagatgtggccaagtaccccctggtggagagcacagagagccagatcctggtgggcatcgtgcggcgggcccagctggtgcaggccctgaaggccgagccccccagctgggcccctggccaccagtgcctgcaggacatcctggccgccggctgccccacagagcctgtgaccctgaagctgagccctgagaccagcctgcacgaggcccagatgcccagcggcgtggtgtggttccctgtgcggggcagctag

SEQ ID NO: 147377 - DNA, 2646 bp, synthetic construct
  misc_feature 1..2646: note = Description of Artificial Sequence: Synthetic coding sequence
  source 1..2646: mol_type = other DNA
atggctgctgctgctgctgaggagggcatggagccccgggccctgcagtatgagcagaccctgatgtatggccgctacacccaggacctgggcgcctttgccaaggaggaggccgcccgcatccggctgggcggccctgagccctggaagggcccccccagcagcagagctgcccctgagctgctggagtatggccgcagccgctgtgcccgctgccgggtgtgcagcgtgcgctgccacaagttcctggtgtcccgggtgggggaggactggatcttcctggtgctgctgggcctgctgatggccctggtgtcctgggtgatggactatgccatcgccgcctgcctgcaggcccagcagtggatgagccggggcctgaacaccagcatcctgctgcagtacctggcctgggtgacctaccctgtggtgctgatcaccttctctgctggcttcacccagatcctggccccccaggccgtgggcagcggcatccctgagatgaagaccatcctgcggggcgtggtgctgaaggagtacctgaccctgaagaccttcatcgccaaggtgattggcctgacctgtgccctgggcagcggcatgcccctgggcaaggagggcccctttgtgcacatcgcctccatgtgtgccgccctgctgagcaagttcctgagcctgtttggaggcatctatgaaaatgaaagcaggaacacagagatgctggccgccgcctgtgctgtgggcgtgggctgctgctttgctgcccccatcggcggcgtgctcttcagcattgaggtgaccagcaccttctttgctgtgaggaactactggaggggcttctttgctgccaccttcagcgccttcatcttccgggtgctggccgtgtggaacagagatgaggagaccatcacagccctcttcaagacccgcttccggctggacttcccctttgacctgcaggagctgcctgcctttgctgtgattggaattgccagcggctttggaggagccctgtttgtgtacctgaacaggaagatcgtgcaggtgatgaggaagcagaagaccatcaaccgcttcctgatgaggaagaggctgctcttccctgccctggtgaccctgctgatcagcaccctgaccttccccccaggcttcggccagttcatggccggccagctgagccagaaggagaccctggtgaccctgtttgacaacagaacctgggtgcggcagggcctggtggaggagctggagccccccagcaccagccaggcctggaaccccccccgggccaacgtgttcctgaccctggtgatcttcatcctgatgaagttctggatgtctgccctggccaccaccatccctgtgccctgtggggccttcatgcctgtgtttgtgattgatggcatccacacagacagcagcacctacagaattgtgcctgggggctatgctgtggtgggcgccgccgccctggccggggctgtgacccacacagtgtccacagctgtgattgtgtttgagctgaccggccagatcgcccacatcctgcctgtgatgattgctgtgatcctggccaatgctgtggcccagagcctgcagcccagcctgtatgacagcatcatccgcatcaagaagctgccctacctgcctgagctgggctggggccgccaccagcagtacagagtgcgggtggaggacatcatggtgagagatgtgccccacgtggccctgagctgcaccttccgggacctgcggctggccctgcacaggaccaagggccgcatgctggccctggtggagagccctgagagcatgatcctgctgggcagcattgaaagaagccaggtggtggccctgctgggcgcccagctgagccctgcccggcggcggcagcacatgcaggagcggcgggccacccagaccagccccctgagtgaccaggagggcccccccaccccagaggcctctgtgtgcttccaggtgaacacagaagattctgccttccctgctgcccggggggagacccacaagcccctgaagccagccctgaagaggggccccagcgtgaccaggaacctgggggagagccccactggatctgctgagagcgctggcatcgccctgcggagcctcttctgtggcagccccccacctgaggccgccagcgagaagctggagagctgtgagaagaggaagctgaagagggtgcgcatcagcctggccagtgatgctgacctggagggggagatgagccctgaggagatcctggagtgggaggagcagcagctggatgagcctgtgaacttcagtgactgcaagattgatcctgcccccttccagctggtggagaggaccagcctgcacaagacccacaccatcttcagcctgctgggcgtggaccacgcctacgtgaccagcatcggccgcctcatcggcatcgtgaccctgaaggagctgaggaaggccatcgagggctctgtgacagcccagggcgtgaaggtgcggccccccctggccagcttccgggacagcgccaccagcagcagtgacacagagaccacagaggtgcacgccctgtggggcccccacagcagacatggcctgccccgggagggcagccccagcgacagtgatgacaagtgccagtag

SEQ ID NO: 147378 - DNA, 2565 bp, synthetic construct
  misc_feature 1..2565: note = Description of Artificial Sequence: Synthetic coding sequence
  source 1..2565: mol_type = other DNA
atggctgctgctgctgctgaggagggcatggagccccgggccctgcagtatgagcagaccctgatgtatggccgctacacccaggacctgggcgcctttgccaaggaggaggccgcccgcatccggctgggcggccctgagccctggaagggcccccccagcagcagagctgcccctgagctgctggagtatggccgcagccgctgtgcccgctgccgggcccagcagtggatgagccggggcctgaacaccagcatcctgctgcagtacctggcctgggtgacctaccctgtggtgctgatcaccttctctgctggcttcacccagatcctggccccccaggccgtgggcagcggcatccctgagatgaagaccatcctgcggggcgtggtgctgaaggagtacctgaccctgaagaccttcatcgccaaggtgattggcctgacctgtgccctgggcagcggcatgcccctgggcaaggagggcccctttgtgcacatcgcctccatgtgtgccgccctgctgagcaagttcctgagcctgtttggaggcatctatgaaaatgaaagcaggaacacagagatgctggccgccgcctgtgctgtgggcgtgggctgctgctttgctgcccccatcggcggcgtgctcttcagcattgaggtgaccagcaccttctttgctgtgaggaactactggaggggcttctttgctgccaccttcagcgccttcatcttccgggtgctggccgtgtggaacagagatgaggagaccatcacagccctcttcaagacccgcttccggctggacttcccctttgacctgcaggagctgcctgcctttgctgtgattggaattgccagcggctttggaggagccctgtttgtgtacctgaacaggaagatcgtgcaggtgatgaggaagcagaagaccatcaaccgcttcctgatgaggaagaggctgctcttccctgccctggtgaccctgctgatcagcaccctgaccttccccccaggcttcggccagttcatggccggccagctgagccagaaggagaccctggtgaccctgtttgacaacagaacctgggtgcggcagggcctggtggaggagctggagccccccagcaccagccaggcctggaaccccccccgggccaacgtgttcctgaccctggtgatcttcatcctgatgaagttctggatgtctgccctggccaccaccatccctgtgccctgtggggccttcatgcctgtgtttgtgattggagctgccttcggccgcctggtgggggagagcatggccgcctggttcccagatggcatccacacagacagcagcacctaccgcatcgtgcctgggggctatgctgtggtgggcgctgctgccctggccggggctgtgacccacacagtgtccacagctgtgattgtgtttgagctgaccggccagatcgcccacatcctgcctgtgatgattgctgtgatcctggccaatgctgtggcccagagcctgcagcccagcctgtatgacagcatcatccgcatcaagaagctgccctacctgcctgagctgggctggggccgccaccagcagtacagagtgcgggtggaggacatcatggtgagagatgtgccccacgtggccctgagctgcaccttccgggacctgcggctggccctgcacaggaccaagggccgcatgctggccctggtggagagccctgagagcatgatcctgctgggcagcattgaaagaagccaggtggtggccctgctgggcgcccagctgagccctgcccggcggcggcagcacatgcaggagcggcgggccacccagaccagccccctgagtgaccaggagggcccccccaccccagaggcctctgtgtgcttccaggtgaacacagaggacagcgccttccctgctgcccggggggagacccacaagcccctgaagccagccctgaagaggggccccagcgtgaccaggaacctgggggagagccccaccggcagcgctgagagcgctggcatcgccctgcggagcctcttctgtggcagccccccacctgaggccgccagcgagaagctggagagctgtgagaagaggaagctgaagagggtgcgcatcagcctggccagtgatgctgacctggagggggagatgagccctgaggagatcctggagtgggaggagcagcagctggatgagcctgtgaacttcagtgactgcaagattgatcctgcccccttccagctggtggagaggaccagcctgcacaagacccacaccatcttcagcctgctgggcgtggaccacgcctacgtgaccagcatcggccgcctgattggaattgtgaccctgaaggagctgaggaaggccatcgagggctctgtgacagcccagggcgtgaaggtgcggccccccctggccagcttccgggacagcgccaccagcagcagtgacacagagaccacagaggtgcacgccctgtggggcccccacagccgccacggcctgccccgggagggcagccccagcgacagtgatgacaagtgccagtag

SEQ ID NO: 147379 - DNA, 2610 bp, synthetic construct
  misc_feature 1..2610: note = Description of Artificial Sequence: Synthetic coding sequence
  source 1..2610: mol_type = other DNA
atggctgctgctgctgctgaggagggcatggagccccgggccctgcagtatgagcagaccctgatgtatggccgctacacccaggacctgggcgcctttgccaaggaggaggccgcccgcatccggctgggcggccctgagccctggaagggcccccccagcagcagagctgcccctgagctgctggagtatggccgcagccgctgtgcccgctgccgggtgtgcagcgtgcgctgccacaagttcctggtgtcccgggtgggggaggactggatcttcctggtgctgctgggcctgctgatggccctggtgtcctgggtgatggactatgccatcgccgcctgcctgcaggcccagcagtggatgagccggggcctgaacaccagcatcctgctgcagtacctggcctgggtgacctaccctgtggtgctgatcaccttctctgctggcttcacccagatcctggccccccaggccgtgggcagcggcatccctgagatgaagaccatcctgcggggcgtggtgctgaaggagtacctgaccctgaagaccttcatcgccaaggtgattggcctgacctgtgccctgggcagcggcatgcccctgggcaaggagggcccctttgtgcacatcgcctccatgtgtgccgccctgctgagcaagttcctgagcctgtttggaggcatctatgaaaatgaaagcaggaacacagagatgctggccgccgcctgtgctgtgggcgtgggctgctgctttgctgcccccatcggcggcgtgctcttcagcattgaggtgaccagcaccttctttgctgtgaggaactactggaggggcttctttgctgccaccttcagcgccttcatcttccgggtgctggccgtgtggaacagagatgaggagaccatcacagccctcttcaagacccgcttccggctggacttcccctttgacctgcaggagctgcctgcctttgctgtgattggaattgccagcggctttggaggagccctgtttgtgtacctgaacaggaagatcgtgcaggtgatgaggaagcagaagaccatcaaccgcttcctgatgaggaagaggctgctcttccctgccctggtgaccctgctgatcagcaccctgaccttccccccaggcttcggccagttcatggccggccagctgagccagaaggagaccctggtgaccctgtttgacaacagaacctgggtgcggcagggcctggtggaggagctggagccccccagcaccagccaggcctggaaccccccccgggccaacgtgttcctgaccctggtgatcttcatcctgatgaagttctggatgtctgccctggccaccaccatccctgtgccctgtggggccttcatgcctgtgtttgtgattggagctgccttcggccgcctggtgggggagagcatggccgcctggttcccagatggcatccacacagacagcagcacctaccgcatcgtgcctgggggctatgctgtggtgggcgctgctgccctggccggggctgtgacccacacagtgtccacagctgtgattgtgtttgagctgaccggccagatcgcccacatcctgcctgtgatgattgctgtgatcctggccaatgctgtggcccagagcctgcagcccagcctgtatgacagcatcatccgcatcaagaagctgccctacctgcctgagctgggctggggccgccaccagcagtacagagtgcgggtggaggacatcatggtgagagatgtgccccacgtggccctgagctgcaccttccgggacctgcggctggccctgcacaggaccaagggccgcatgctggccctggtggagagccctgagagcatgatcctgctgggcagcattgaaagaagccaggtggtggccctgctgggcgcccagctgagccctgcccggcggcggcagcacatgcaggagcggcgggccacccagaccagccccctgagtgaccaggagggcccccccaccccagaggcctctgtgtgcttccaggtgaacacagaggacagcgccttccctgctgcccggggggagacccacaagcccctgaagccagccctgaagaggggccccagcgtgaccaggaacctgggggagagccccaccggcagcgctgagagcgctggcatcgccctgcggagcctcttctgtggcagccccccacctgaggccgccagcgagaagctggagagctgtgagaagaggaagctgaagagggtgcgcatcagcctggccagtgatgctgacctggagggggagatgagccctgaggagatcctggagtgggaggagcagcagctggatgagcctgtgaacttcagtgactgcaagattgatcctgcccccttccagctggtggagaggaccagcctgcacaagctgaggaaggccatcgagggctctgtgacagcccagggcgtgaaggtgcggccccccctggccagcttccgggacagcgccaccagcagcagtgacacagagaccacagaggtgcacgccctgtggggcccccacagcagacatggcctgccccgggagggcagccccagcgacagtgatgacaagtgccagtag

SEQ ID NO: 147380 - DNA, 714 bp, synthetic construct
  misc_feature 1..714: note = Description of Artificial Sequence: Synthetic coding sequence
  source 1..714: mol_type = other DNA
atgtccttcctgaagagcttccccccacctggccctgctgagggcctgctgcggcagcagcctgacacagaagctgtgctgaatggcaagggcctgggcaccggcaccctgtacatcgccgagagccggctgtcctggctggatggcagcggcctgggcttcagcctggagtaccccaccatcagcctgcacgccctgagccgggacagaagtgactgcctgggggagcacctgtatgtgatggtgaatgccaagtttgaggaggagagcaaggagcctgtggctgatgaggaggaggaggacagtgatgatgatgtggagcccatcacagagttccgctttgtgcccagcgacaagagcgccctggaggccatgttcaccgccatgtgtgagtgccaggccctgcacccagaccctgaagatgaggacagtgatgattatgatggagaggagtatgatgtggaggcccacgagcagggccagggcgacatccccaccttctacacctatgaggagggcctgagccacctgacagctgagggccaggccaccctggagcggctggagggcatgctgagccagagcgtgagcagccagtacaacatggccggcgtgaggacagaggacagcatccgggactatgaagatggcatggaggtggacaccacccccaccgtggccggccagtttgaagatgctgatgtggaccactag

SEQ ID NO: 147381 - DNA, 714 bp, synthetic construct; identical to SEQ ID NO: 147380
  misc_feature 1..714: note = Description of Artificial Sequence: Synthetic coding sequence
  source 1..714: mol_type = other DNA

SEQ ID NO: 147382 - DNA, 504 bp, synthetic construct
  misc_feature 1..504: note = Description of Artificial Sequence: Synthetic coding sequence
  source 1..504: mol_type = other DNA
atggtgctgctgctgaagggcgtgcccttcaccctgaccaccgtggacacccggcgcagcccagatgtgctgaaggactttgcccctggcagccagctgcccatcctgctgtatgacagtgatgccaagacagacaccctgcagatcgaggacttcctggaggagaccctgggccccccagacttccccagcctggccccccgctaccgggagagcaacacagctggaaatgatgtgttccacaagttcagcgccttcatcaagaaccctgtgcctgcccaggatgaggccctgtaccagcagctgctgcgggccctggcccggctggacagctacctgcgggcccccctggagcacgagctggccggggagccccagctgcgggagagcagaagacgcttcctggatggagaccggctgaccctggccgactgcagcctgctgcccaagctgcacatcgtggacacagtgtgtgcccacttccggcaggcccccatcccctag

SEQ ID NO: 147383 - DNA, 711 bp, synthetic construct
  misc_feature 1..711: note = Description of Artificial Sequence: Synthetic coding sequence
  source 1..711: mol_type = other DNA
atggccgagaccaagctgcagctgtttgtgaaggcctctgaagatggagagagcgtgggccactgccccagctgccagaggctcttcatggtgctgctgctgaagggcgtgcccttcaccctgaccaccgtggacaccaggaggagcccagatgtgctgaaggactttgcccctggcagccagctgcccatcctgctgtatgacagtgatgccaagacagacaccctgcagatcgaggacttcctggaggagaccctgggccccccagacttccccagcctggccccccgctaccgggagagcaacacagctggaaatgatgtgttccacaagttcagcgccttcatcaagaaccctgtgcctgcccaggatgaggccctgtaccagcagctgctgcgggccctggcccggctggacagctacctgcgggcccccctggagcacgagctggccggggagccccagctgcgggagagcagaagacgcttcctggatggagaccggctgaccctggccgactgcagcctgctgcccaagctgcacatcgtggacacagtgtgtgcccacttccggcaggcccccatcccagctgagctgcggggcgtgcggcgctacctggacagcgccatgcaggagaaggagttcaagtacacctgcccccacagcgctgagatcctggccgcctacagacctgctgtgcaccccaggtag

SEQ ID NO: 147384 - DNA, 348 bp, synthetic construct
  misc_feature 1..348: note = Description of Artificial Sequence: Synthetic coding sequence
  source 1..348: mol_type = other DNA
atgaacagcggcgtgtgcctgtgtgtgctgatggctgtgctggccgccggggccctgacccagcctgtgcccccagctgaccctgctggcagcggcctgcagagagctgaggaggccccccggcggcagctgcgggtgtcccagaggacagatggagagagccgggcccacctgggcgccctgctggcccgctacatccagcaggccaggaaggcccccagcggccgcatgagcatcgtgaagaacctgcagaacctggaccccagccaccgcatcagtgaccgggactacatgggctggatggactttggaagaagatctgctgaggagtatgagtaccccagctag

SEQ ID NO: 147385 - DNA, 348 bp, synthetic construct; identical to SEQ ID NO: 147384
  misc_feature 1..348: note = Description of Artificial Sequence: Synthetic coding sequence
  source 1..348: mol_type = other DNA

SEQ ID NO: 147386 - DNA, 348 bp, synthetic construct; identical to SEQ ID NO: 147384
  misc_feature 1..348: note = Description of Artificial Sequence: Synthetic coding sequence
  source 1..348: mol_type = other DNA

SEQ ID NO: 147387 - DNA, 1287 bp, synthetic construct
  misc_feature 1..1287: note = Description of Artificial Sequence: Synthetic coding sequence
  source 1..1287: mol_type = other DNA
atggatgtggtggacagcctgctggtgaatggcagcaacatcaccccaccctgtgagctgggcctggagaatgagaccctcttctgcctggaccagccccggcccagcaaggagtggcagcctgctgtgcagatcctgctgtacagcctcatcttcctgctgtctgtgctgggcaacaccctggtgatcaccgtgctgatccggaacaagaggatgaggacagtgaccaacatcttcctgctgagcctggccgtgtctgacctgatgctgtgcctcttctgcatgcccttcaacctgatccccaacctgctgaaggacttcatctttggatctgctgtgtgcaagaccaccacctacttcatgggcacctctgtgtctgtgtccaccttcaacctggtggccatcagcctggagcgctacggggccatctgcaagcccctgcagagccgggtgtggcagaccaagagccacgccctgaaggtgattgctgccacctggtgcctgtccttcaccatcatgaccccctaccccatctacagcaacctggtgcccttcaccaagaacaacaaccagacagccaacatgtgccgcttcctgctgcccaatgatgtgatgcagcagagctggcacaccttcctgctgctgatcctcttcctgatccctggcatcgtgatgatggtggcctacggcctcatcagcctggagctgtaccagggcatcaagtttgaggccagccagaagaagagcgccaaggagaggaagcccagcaccaccagcagcggcaagtatgaggacagtgatggctgctacctgcagaagacccggccccccaggaagctggagctgcggcagctgagcacaggcagcagcagccgggccaaccgcatccgcagcaacagcagcgctgccaacctgatggccaagaagagggtcatccgcatgctgattgtcatcgtggtgctcttcttcctgtgctggatgcccatcttcagcgccaatgcctggagggcctatgacacagccagcgctgagcggcggctgagcggcacccccatctccttcatcctgctgctgagctacaccagcagctgtgtgaaccccatcatctactgcttcatgaacaagcgcttccggctgggcttcatggccaccttcccctgctgccccaaccctggccccccaggggcccggggggaggtgggggaggaggaggagggcggcaccactggagccagcctgagccgcttctcctacagccacatgtctgcctctgtgcccccccagtag

SEQ ID NO: 147388 - DNA, 1344 bp, synthetic construct
  misc_feature 1..1344: note = Description of Artificial Sequence: Synthetic coding sequence
  source 1..1344: mol_type = other DNA
atggagctgctgaagctgaacagatctgtgcagggcactggacctggccctggggccagcctgtgcaggcctggggcccccctgctgaacagcagctctgtgggcaacctgagctgtgagcccccacgcatcagaggagctggcacccgggagctggagctggccatccgcatcaccctgtatgctgtgatcttcctgatgtctgtgggcggcaacatgctgatcatcgtggtgctgggcctgagccggcggctgaggacagtgaccaatgccttcctgctgagcctggccgtgtctgacctgctgctggccgtggcctgcatgcccttcaccctgctgcccaacctgatgggcaccttcatcttcggcaccgtcatctgcaaggctgtgtcctacctgatgggcgtgtctgtgtctgtgtccaccctgagcctggtggccatcgccctggagcgctacagcgccatctgccggcccctgcaggcccgggtgtggcagaccaggagccatgctgcccgggtgattgtggccacctggctgctgagcggcctgctgatggtgccctaccctgtgtacacagtggtgcagcctgtgggcccccgggtgctgcagtgtgtgcaccgctggcccagcgcccgggtgcggcagacctggagcgtgctgctgctgctgctgctcttcttcatccctggggtggtgatggctgtggcctacggcctcatcagccgggagctgtacctgggcctgcgctttgatggagacagcgacagcgacagccagagccgggtgaggaaccagggcggcctgcccggggctgtgcaccagaatggccgctgcaggcctgagactggagctgtgggggaggacagtgatggctgctacgtgcagctgcccaggagcaggcctgccctggagctgacagccctgacagcccctggccctggcagcggcagccggcccacccaggccaagctgctggccaagaagagggtggtgaggatgctgctggtgattgtggtgctcttcttcctgtgctggctgcctgtgtacagcgccaacacctggagggcctttgatggccctggggcccaccgggccctgagcggggcccccatctccttcatccacctgctgtcctatgccagcgcctgtgtgaaccccctggtgtactgcttcatgcaccggcgcttccggcaggcctgcctggagacctgtgcccgctgctgcccccggcccccccgggcccggccccgggccctgcctgatgaagatcctcccacccccagcatcgccagcctgagccggctgagctacaccaccatcagcaccctgggccctggatag

SEQ ID NO: 147389 - DNA, 1551 bp, synthetic construct
  misc_feature 1..1551: note = Description of Artificial Sequence: Synthetic coding sequence
  source 1..1551: mol_type = other DNA
atggagctgctgaagctgaacagatctgtgcagggcactggacctggccctggggccagcctgtgcaggcctggggcccccctgctgaacagcagctctgtgggcaacctgagctgtgagcccccacgcatcagaggagctggcacccgggagctggagctggccatccgcatcaccctgtatgctgtgatcttcctgatgtctgtgggcggcaacatgctgatcatcgtggtgctgggcctgagccggcggctgaggacagtgaccaatgccttcctgctgagcctggccgtgtctgacctgctgctggccgtggcctgcatgcccttcaccctgctgcccaacctgatgggcaccttcatcttcggcaccgtcatctgcaaggctgtgtcctacctgatgggcgtgtctgtgtctgtgtccaccctgagcctggtggccatcgccctggagcgctacagcgccatctgccggcccctgcaggcccgggtgtggcagaccaggagccatgctgcccgggtgattgtggccacctggctgctgagcggcctgctgatggtgccctaccctgtgtacacagtggtgcagcctgtgggcccccgggtgctgcagtgtgtgcaccgctggcccagcgcccgggtgcggcagacctggagcgtgctgctgctgctgctgctcttcttcatccctggggtggtgatggctgtggcctacggcctcatcagccgggagctgtacctgggcctgcgctttgatggagacagcgacagcgacagccagagccgggtgaggaaccagggcggcctgcccggcggggccggcccccgggagcagaacctgggggaggccgagctgtggagggccactggacctgctggggtgggcggcacagagatgaaggtgcgggtgcggaggaagctggagatggagctgtcctgggagaggagaagtggaggagactgggccggggactggggagacagccccttcagcctgacagcccaccccctgtgcagcggggctgtgcaccagaatggccgctgcaggcctgagaccggggctgtgggagaagattctgatggctgctacgtgcagctgcccaggagcaggcctgccctggagctgacagccctgacagcccctggccctggcagcggcagccggcccacccaggccaagctgctggccaagaagagggtggtgaggatgctgctggtgattgtggtgctcttcttcctgtgctggctgcctgtgtacagcgccaacacctggagggcctttgatggccctggggcccaccgggccctgagcggggcccccatctccttcatccacctgctgtcctatgccagcgcctgtgtgaaccccctggtgtactgcttcatgcaccggcgcttccggcaggcctgcctggagacctgtgcccgctgctgccccaggcctccccgggcccggccccgggccctgcctgatgaggacccccccacccccagcatcgccagcctgagccggctgagctacaccaccatcagcaccctgggccctggatag

SEQ ID NO: 147390 - DNA, 819 bp, synthetic construct
  misc_feature 1..819: note = Description of Artificial Sequence: Synthetic coding sequence
  source 1..819: mol_type = other DNA
atgagctgccacaactgcagcgacccccaggtgctgtgcagcagcggccagctgttcctgcagcccctgtgggaccacctgcgctcctgggaggccctgctgcagagccccttcttccctgtgatcttcagcatcaccacctacgtgggcttctgcctgccctttgtggtgctggacatcctgtgctcctgggtgcctgccctgcggcgctacaagatccacccagacttcagccccagcgcccagcagctgctgccctgcctgggccagaccctgtaccagcacgtgatgtttgtgtttcctgtgaccctgctgcactgggcccggagccctgccctgctgccccatgaggcccctgagctgctgctgctgctgcaccacatcctcttctgcctgctgctgtttgacatggagttctttgtgtggcacctgctgcaccacaaggtgccctggctgtaccgcaccttccacaaggtgcaccaccagaacagcagcagctttgccctggccacccagtacatgtctgtgtgggagctgttcagcctgggcttctttgacatgatgaatgtgaccctgctgggctgccaccccctgaccaccctgaccttccacgtggtgaacatctggctgtctgtggaggaccacagcggctacaacttcccctggagcacccaccggctggtgcccttcggctggtatggaggagtggtgcaccacgacctgcaccacagccacttcaactgcaactttgccccctacttcacccactgggacaagatcctgggcaccctgaggacagcctctgtgcctgccaggtag

SEQ ID NO: 147391 - DNA, 1482 bp, synthetic construct
  misc_feature 1..1482: note = Description of Artificial Sequence: Synthetic coding sequence
  source 1..1482: mol_type = other DNA
atgctggccgccaccgtgctgaccctggccctgctgggcaatgcccacgcctgcagcaagggcaccagccatgaggccggcatcgtgtgccgcatcaccaagccagccctgctggtgctgaaccacgagacagccaaggtgatccagacagccttccagagggccagctacccagacatcactggagagaaggccatgatgctgctgggccaggtgaagtatggcctgcacaacatccagatcagccacctgagcatcgccagcagccaggtggagctggtggaggccaagagcattgatgtgtccatccagaatgtgtctgtggtgttcaagggcaccctgaagtatggctacaccacagcctggtggctgggcatcgaccagagcattgactttgaaattgacagcgccatcgacctgcagatcaacacccagctgacctgtgacagcggccgggtgaggacagatgccccagactgctacctgtccttccacaagctgctgctgcacctgcagggcgagcgggagcccggctggatcaagcagctgttcaccaacttcatctccttcaccctgaagctggtgctgaagggccagatctgcaaggagatcaacgtcatcagcaacatcatggctgactttgtgcagaccagggctgccagcatcctgagtgatggagacatcggcgtggacatcagcctgactggagaccccgtcatcacagccagctacctggagagccaccacaagggccacttcatctacaagaatgtgtctgaggacctgcccctgcccaccttcagccccaccctgctgggggacagcaggatgctgtacttctggttcagcgagagggtcttccacagcctggccaaggtggccttccaggacggccgcctgatgctgagcctgatgggagatgagttcaaggctgtgctggagacctggggcttcaacaccaaccaggagatcttccaggaggtggtgggcggcttccccagccaggcccaggtgacagtgcactgcctgaagatgcccaagatcagctgccagaacaagggcgtggtggtgaacagctctgtgatggtgaagttcctgttccccaggccagaccagcagcacagcgtggcctacacctttgaggaggacatcgtgaccaccgtgcaggccagctacagcaagaagaagctgttcctgagcctgctggacttccagatcacccccaagacagtgagcaacctgacagagagcagcagcgagagcgtgcagagcttcctgcagagcatgatcacagctgtgggcatccctgaggtgatgagccggctggaggtggtgttcaccgccctgatgaacagcaaaggagtgtccctgtttgacatcatcaaccctgagatcatcaccagagatggcttcctgctgctgcagatggactttggcttccctgagcacctgctggtggacttcctgcagagcctgtcctag

SEQ ID NO: 147392 - DNA, 1302 bp, synthetic construct
  misc_feature 1..1302: note = Description of Artificial Sequence: Synthetic coding sequence
  source 1..1302: mol_type = other DNA
atgctggccgccaccgtgctgaccctggccctgctgggcaatgcccacgcctgcagcaagggcaccagccatgaggccggcatcgtgtgccgcatcaccaagccagccctgctggtgctgaaccacgagacagccaaggtgatccagacagccttccagagggccagctacccagacatcactggagagaaggccatgatgctgctgggccaggtgaagtatggcctgcacaacatccagatcagccacctgagcatcgccagcagccaggtggagctggtggaggccaagagcattgatgtgtccatccagaatgtgtctgtggtgttcaagggcaccctgaagtatggctacaccacagcctggtggctgggcatcgaccagagcattgactttgaaattgacagcgccatcgacctgcagatcaacacccagctgacctgtgacagcggccgggtgaggacagatgccccagactgctacctgtccttccacaagctgctgctgcacctgcagggcgagcgggagcccggctggatcaagcagctgttcaccaacttcatctccttcaccctgaagctggtgctgaagggccagatctgcaaggagatcaacgtcatcagcaacatcatggctgactttgtgcagaccagggctgccagcatcctgagtgatggagacatcggcgtggacatcagcctgactggagaccccgtcatcacagccagctacctggagagccaccacaaggctgtgctggagacctggggcttcaacaccaaccaggagatcttccaggaggtggtgggcggcttccccagccaggcccaggtgacagtgcactgcctgaagatgcccaagatcagctgccagaacaagggcgtggtggtgaacagctctgtgatggtgaagttcctgttccccaggccagaccagcagcacagcgtggcctacacctttgaggaggacatcgtgaccaccgtgcaggccagctacagcaagaagaagctgttcctgagcctgctggacttccagatcacccccaagacagtgagcaacctgacagagagcagcagcgagagcgtgcagagcttcctgcagagcatgatcacagctgtgggcatccctgaggtgatgagccggctggaggtggtgttcaccgccctgatgaacagcaaaggagtgtccctgtttgacatcatcaaccctgagatcatcaccagagatggcttcctgctgctgcagatggactttggcttccctgagcacctgctggtggacttcctgcagagcctgtcctag

SEQ ID NO: 147393 - DNA, 1374 bp, synthetic construct
  misc_feature 1..1374: note = Description of Artificial Sequence: Synthetic coding sequence
  source 1..1374: mol_type = other DNA
atgaagaccaagttctgcacaggaggagaggccgagcccagccccctgggcctgctgctgagctgtggcagcggcagcgctgccccagcccctggggtgggccagcagagagatgctgccagtgacctggagagcaagcagctgggcggccagcagccccccctggccctgcccccacctccacccctgcccctgcccctgcccctgccccagcccccaccaccccagcccccagcagatgagcagcctgagcccaggaccaggagaagagcctacctgtggtgcaaggagttcctgcccggggcctggaggggcctgcgggaggatgagttccacatcagcgtcatccggggcggcctgagcaacatgctgttccagtgcagcctgcctgacaccacagccaccctgggagatgagcccaggaaggtgctgctgcggctgtatggagccatcctgcagatgaggagctgcaacaaggagggcagcgagcaggcccagaaggaaaatgagttccagggcgctgaggccatggtgctggagagcgtgatgtttgccatcctggccgagaggagcctgggccccaagctgtatggcatcttcccccagggccgcctggagcagttcatccccagccggcggctggacacagaggagctgagcctgcctgacatctctgctgagattgctgagaagatggccaccttccacggcatgaagatgcccttcaacaaggagcccaagtggctgtttggcaccatggagaagtacctgaaggaggtgctgcgcatcaagttcacagaggagagccgcatcaagaagctgcacaagctgctgagctacaacctgcccctggagctggagaacctgcggagcctgctggagagcacccccagccctgtggtgttctgccacaatgactgccaggagggcaacatcctgctgctggagggcagagaaaattctgagaagcagaagctgatgctgattgactttgagtacagcagctacaactaccggggctttgatattggcaaccacttctgtgagtggatgtatgactacagctatgagaagtaccccttcttccgggccaacatcaggaagtaccccaccaagaagcagcagctgcacttcatcagcagctacctgcctgccttccagaatgactttgagaacctgagcacagaggagaagagcatcatcaaggaggagatgctgctggaggtgaacagatttgccctggccagccacttcctgtggggcctgtggagcatcgtgcaggccaagatcagcagcattgaatttggctacatggactatgcccaggccaggtttgatgcctacttccaccagaagaggaagctgggcgtgtag

SEQ ID NO: 147394 - DNA, 1320 bp, synthetic construct
  misc_feature 1..1320: note = Description of Artificial Sequence: Synthetic coding sequence
  source 1..1320: mol_type = other DNA
atgaagaccaagttctgcacaggaggagaggccgagcccagccccctgggcctgctgctgagctgtggcagcggcagcgctgccccagcccctggggtgggccagcagagagatgctgccagtgacctggagagcaagcagctgggcggccagcagccccccctggccctgcccccacctccacccctgcccctgcccctgcccctgccccagcccccaccaccccagcccccagcagatgagcagcctgagcccaggaccaggagaagagcctacctgtggtgcaaggagttcctgcccggggcctggaggggcctgcgggaggatgagttccacatcagcgtcatccggggcggcctgagcaacatgctgttccagtgcagcctgcctgacaccacagccaccctgggagatgagcccaggaaggtgctgctgcggctgtatggagccatcctgcagatgggcgctgaggccatggtgctggagagcgtgatgtttgccatcctggccgagaggagcctgggccccaagctgtatggcatcttcccccagggccgcctggagcagttcatccccagccggcggctggacacagaggagctgagcctgcctgacatctctgctgagattgctgagaagatggccaccttccacggcatgaagatgcccttcaacaaggagcccaagtggctgtttggcaccatggagaagtacctgaaggaggtgctgcgcatcaagttcacagaggagagccgcatcaagaagctgcacaagctgctgagctacaacctgcccctggagctggagaacctgcggagcctgctggagagcacccccagccctgtggtgttctgccacaatgactgccaggagggcaacatcctgctgctggagggcagagaaaattctgagaagcagaagctgatgctgattgactttgagtacagcagctacaactaccggggctttgatattggcaaccacttctgtgagtggatgtatgactacagctatgagaagtaccccttcttccgggccaacatcaggaagtaccccaccaagaagcagcagctgcacttcatcagcagctacctgcctgccttccagaatgactttgagaacctgagcacagaggagaagagcatcatcaaggaggagatgctgctggaggtgaacagatttgccctggccagccacttcctgtggggcctgtggagcatcgtgcaggccaagatcagcagcattgaatttggctacatggactatgcccaggccaggtttgatgcctacttccaccagaagaggaagctgggcgtgtag

SEQ ID NO: 147395 - DNA, 1188 bp, synthetic construct
  misc_feature 1..1188: note = Description of Artificial Sequence: Synthetic coding sequence
  source 1..1188: mol_type = other DNA
atggctgctgaggccacagctgtggccggcagcggggctgtgggcggctgcctggccaaggatggcctgcagcagagcaaatgtcctgacaccacccccaagagaagaagagccagcagcctgagcagagatgctgagcggcgggcctaccagtggtgccgggagtacctgggcggggcctggaggagagtgcagcctgaggagctgcgggtgtaccctgtgtctgggggcctgagcaacctgctcttccgctgcagcctgcctgaccacctgcccagcgtgggggaggagccccgggaggtgctgctgcggctgtatggagccatcctgcagggcgtggacagcctggtgctggagagcgtgatgtttgccatcctggccgagaggagcctgggcccccagctgtatggagtcttccctgagggccgcctggagcagtacatccccagccggcccctgaagacccaggagctgcgggagcctgtgctgtctgctgccatcgccaccaagatggcccagttccacggcatggagatgcccttcaccaaggagccccactggctgtttggcaccatggagcgctacctgaagcagatccaggacctgcccccaacaggcctgcctgagatgaacctgctggagatgtacagcctgaaggatgagatgggcaacctgaggaagctgctggagagcacccccagccctgtggtgttctgccacaatgacatccaggagggcaacatcctgctgctgtctgagccagaaaatgctgacagcctgatgctggtggactttgagtacagcagctacaactaccggggctttgatattggcaaccacttctgtgagtgggtgtatgactacacccatgaggagtggcccttctacaaggcccggcccacagactaccccacccaggagcagcagctgcacttcatccgccactacctggccgaggccaagaagggggagaccctgagccaggaggagcagaggaagctggaggaggacctgctggtggaggtgagccgctatgccctggccagccacttcttctggggcctgtggagcatcctgcaggcctccatgagcaccatcgagtttggctacctggactatgcccagagccgcttccagttctacttccagcagaagggccagctgacctctgtgcacagcagcagctag

SEQ ID NO: 147396 - DNA, 2247 bp, synthetic construct
  misc_feature 1..2247: note = Description of Artificial Sequence: Synthetic coding sequence
  source 1..2247: mol_type = other DNA
atgggcctgaggacagccaagaagaggggcctgggcggcggcggcaagtggaagcgggaggagggcggcggcacccggggccggcgggaggtgcggcctgcctgcttcctgcagagcggcggccgcggggaccctggagatgtgggcggccctgctggcaaccctggctgcagcccccaccccagggctgccacccggcccccacccctgcctgcccacaccccagcccacaccccagagtggtgtggggccgccagcgctgaggccgctgagcccaggagagctggcccccacctgtgcatcccagcccctggcctgaccaagacccccatcctggagaaggtgcccaggaagatggccgccaagacccccagcagcgaggagagcggcctgcccaagctgcctgtgccccccctgcagcagaccctggccacctacctgcagtgcatgaggcacctggtgtctgaggagcagttcaggaagagccaggccatcgtgcagcagtttggagcccctgggggcctgggggagaccctgcagcagaagctgctggagcggcaggagaagacagccaactgggtgtctgagtactggctgaatgacatgtacctgaacaaccggctggccctgcctgtgaacagcagccctgctgtgatctttgcccggcagcacttccctggaacagatgaccagctgcgctttgctgccagcctcatcagcggcgtgctgagctacaaggccctgctggacagccacagcatccccacagactgtgccaagggccagctgagcggccagcccctgtgcatgaagcagtactacggcctcttcagcagctaccgcctgcccggccacacccaggacaccctggtggcccagaacagcagcatcatgcctgagcctgagcacgtgattgtggcctgctgcaaccagttctttgtgctggatgtggtgatcaacttccggcggctgtctgagggggacctcttcacccagctgaggaagatcgtgaagatggccagcaatgaagatgagcggctgccccccatcggcctgctgaccagtgatggccgctctgagtgggccgaggccaggacagtgctggtgaaggacagcaccaacagagacagcctggacatgattgagcgctgcatctgcctggtgtgcctggatgcccctggaggagtggagctgagtgacacccaccgggccctgcagctgctgcatggaggcggctacagcaagaatggagccaaccgctggtatgacaagagcctgcagtttgtggtgggcagagatggcacctgtggggtggtgtgtgagcacagcccctttgatggcatcgtgctggtgcagtgcacagagcacctgctgaagcacgtgacccagagcagcaggaagctgatccgggctgacagcgtgtctgagctgcctgccccccggcggctgcgctggaagtgcagccctgagatccagggccacctggccagcagcgctgagaagctgcagagaattgtgaagaacctggacttcatcgtgtacaagtttgacaactacggcaagaccttcatcaagaagcagaagtgcagcccagatgccttcatccaggtggccctgcagctggccttctaccgcctgcaccggcggctggtgcccacctatgagagcgccagcatccgccgcttccaggagggccgggtggacaacatccgcagcgccaccccagaggccctggcctttgtgcgggctgtgacagaccacaaggctgctgtgcctgccagcgagaagctgctgctgctgaaggatgccatccgggcccagacagcctacacagtgatggccatcaccggcatggccatcgacaaccacctgctggccctgcgggagctggcccgggccatgtgcaaggagctgcctgagatgttcatggatgagacctacctgatgagcaacagatttgtgctgagcaccagccaggtgcccaccaccacagagatgttctgctgctacggccctgtggtgcccaacggctacggggcctgctacaacccccagcctgagaccatcctcttctgcatcagcagcttccacagctgcaaggagaccagcagcagcaagtttgccaaggctgtggaggagagcctgattgacatgagggacctgtgcagcctgctgcccccaacagagagcaagcccctggccaccaaggagaaggccacccggcccagccagggccaccagccctag

SEQ ID NO: 147397 - DNA, 1893 bp, synthetic construct
  misc_feature 1..1893: note = Description of Artificial Sequence: Synthetic coding sequence
  source 1..1893: mol_type = other DNA
atggccgccaagacccccagcagcgaggagagcggcctgcccaagctgcctgtgccccccctgcagcagaccctggccacctacctgcagtgcatgaggcacctggtgtctgaggagcagttcaggaagagccaggccatcgtgcagcagtttggagcccctgggggcctgggggagaccctgcagcagaagctgctggagcggcaggagaagacagccaactgggtgtctgagtactggctgaatgacatgtacctgaacaaccggctggccctgcctgtgaacagcagccctgctgtgatctttgcccggcagcacttccctggaacagatgaccagctgcgctttgctgccagcctcatcagcggcgtgctgagctacaaggccctgctggacagccacagcatccccacagactgtgccaagggccagctgagcggccagcccctgtgcatgaagcagtactacggcctcttcagcagctaccgcctgcccggccacacccaggacaccctggtggcccagaacagcagcatcatgcctgagcctgagcacgtgattgtggcctgctgcaaccagttctttgtgctggatgtggtgatcaacttccggcggctgtctgagggggacctcttcacccagctgaggaagatcgtgaagatggccagcaatgaagatgagcggctgccccccatcggcctgctgaccagtgatggccgctctgagtgggccgaggccaggacagtgctggtgaaggacagcaccaacagagacagcctggacatgattgagcgctgcatctgcctggtgtgcctggatgcccctggaggagtggagctgagtgacacccaccgggccctgcagctgctgcatggaggcggctacagcaagaatggagccaaccgctggtatgacaagagcctgcagtttgtggtgggcagagatggcacctgtggggtggtgtgtgagcacagcccctttgatggcatcgtgctggtgcagtgcacagagcacctgctgaagcacgtgacccagagcagcaggaagctgatccgggctgacagcgtgtctgagctgcctgccccccggcggctgcgctggaagtgcagccctgagatccagggccacctggccagcagcgctgagaagctgcagagaattgtgaagaacctggacttcatcgtgtacaagtttgacaactacggcaagaccttcatcaagaagcagaagtgcagcccagatgccttcatccaggtggccctgcagctggccttctaccgcctgcaccggcggctggtgcccacctatgagagcgccagcatccgccgcttccaggagggccgggtggacaacatccgcagcgccaccccagaggccctggcctttgtgcgggctgtgacagaccacaaggctgctgtgcctgccagcgagaagctgctgctgctgaaggatgccatccgggcccagacagcctacacagtgatggccatcaccggcatggccatcgacaaccacctgctggccctgcgggagctggcccgggccatgtgcaaggagctgcctgagatgttcatggatgagacctacctgatgagcaacagatttgtgctgagcaccagccaggtgcccaccaccacagagatgttctgctgctacggccctgtggtgcccaacggctacggggcctgctacaacccccagcctgagaccatcctcttctgcatcagcagcttccacagctgcaaggagaccagcagcagcaagtttgccaaggctgtggaggagagcctgattgacatgagggacctgtgcagcctgctgcccccaacagagagcaagcccctggccaccaaggagaaggccacccggcccagccagggccaccagccctag

SEQ ID NO: 147398 - DNA, 1893 bp, synthetic construct; identical to SEQ ID NO: 147397
  misc_feature 1..1893: note = Description of Artificial Sequence: Synthetic coding sequence
  source 1..1893: mol_type = other DNA

SEQ ID NO: 147399 - DNA, 1893 bp, synthetic construct; identical to SEQ ID NO: 147397
  misc_feature 1..1893: note = Description of Artificial Sequence: Synthetic coding sequence
  source 1..1893: mol_type = other DNA

SEQ ID NO: 147400 - DNA, 2001 bp, synthetic construct
  misc_feature 1..2001: note = Description of Artificial Sequence: Synthetic coding sequence
  source 1..2001: mol_type = other DNA
atgtggccagagtgcagagatgaggccctgagcacagtgggcccccacctgtgcatcccagcccctggcctgaccaagacccccatcctggagaaggtgcccaggaagatggccgccaagacccccagcagcgaggagagcggcctgcccaagctgcctgtgccccccctgcagcagaccctggccacctacctgcagtgcatgaggcacctggtgtctgaggagcagttcaggaagagccaggccatcgtgcagcagtttggagcccctgggggcctgggggagaccctgcagcagaagctgctggagcggcaggagaagacagccaactgggtgtctgagtactggctgaatgacatgtacctgaacaaccggctggccctgcctgtgaacagcagccctgctgtgatctttgcccggcagcacttccctggaacagatgaccagctgcgctttgctgccagcctcatcagcggcgtgctgagctacaaggccctgctggacagccacagcatccccacagactgtgccaagggccagctgagcggccagcccctgtgcatgaagcagtactacggcctcttcagcagctaccgcctgcccggccacacccaggacaccctggtggcccagaacagcagcatcatgcctgagcctgagcacgtgattgtggcctgctgcaaccagttctttgtgctggatgtggtgatcaacttccggcggctgtctgagggggacctcttcacccagctgaggaagatcgtgaagatggccagcaatgaagatgagcggctgccccccatcggcctgctgaccagtgatggccgctctgagtgggccgaggccaggacagtgctggtgaaggacagcaccaacagagacagcctggacatgattgagcgctgcatctgcctggtgtgcctggatgcccctggaggagtggagctgagtgacacccaccgggccctgcagctgctgcatggaggcggctacagcaagaatggagccaaccgctggtatgacaagagcctgcagtttgtggtgggcagagatggcacctgtggggtggtgtgtgagcacagcccctttgatggcatcgtgctggtgcagtgcacagagcacctgctgaagcacgtgacccagagcagcaggaagctgatccgggctgacagcgtgtctgagctgcctgccccccggcggctgcgctggaagtgcagccctgagatccagggccacctggccagcagcgctgagaagctgcagagaattgtgaagaacctggacttcatcgtgtacaagtttgacaactacggcaagaccttcatcaagaagcagaagtgcagcccagatgccttcatccaggtggccctgcagctggccttctaccgcctgcaccggcggctggtgcccacctatgagagcgccagcatccgccgcttccaggagggccgggtggacaacatccgcagcgccaccccagaggccctggcctttgtgcgggctgtgacagaccacaaggctgctgtgcctgccagcgagaagctgctgctgctgaaggatgccatccgggcccagacagcctacacagtgatggccatcaccggcatggccatcgacaaccacctgctggccctgcgggagctggcccgggccatgtgcaaggagctgcctgagatgttcatggatgagacctacctgatgagcaacagatttgtgctgagcaccagccaggtgcccaccaccacagagatgttctgctgctacggccctgtggtgcccaacggctacggggcctgctacaacccccagcctgagaccatcctcttctgcatcagcagcttccacagctgcaaggagaccagcagcagcaagtttgccaaggctgtggaggagagcctgattgacatgagggacctgtgcagcctgctgcccccaacagagagcaagcccctggccaccaaggagaaggccacccggcccagccagggccaccagccctag

SEQ ID NO: 147401 - DNA, 1638 bp, synthetic construct
  misc_feature 1..1638: note = Description of Artificial Sequence: Synthetic coding sequence
  source 1..1638: mol_type = other DNA
atggccgccaagacccccagcagcgaggagagcggcctgcccaagctgcctgtgccccccctgcagcagaccctggccacctacctgcagtgcatgaggcacctggtgtctgaggagcagttcaggaagagccaggccatcgtgcagcagtttggagcccctgggggcctgggggagaccctgcagcagaagctgctggagcggcaggagaagacagccaactgggtgtctgagtactggctgaatgacatgtacctgaacaaccggctggccctgcctgtgaacagcagccctgctgtgatctttgcccggcagcacttccctggaacagatgaccagctgcgctttgctgccagcctcatcagcggcgtgctgagctacaaggccctgctggacagccacagcatccccacagactgtgccaagggccagctgagcggccagcccctgtgcatgaagcagtactacggcctcttcagcagctaccgcctgcccggccacacccaggacaccctggtggcccagaacagcagcatcatgcctgagcctgagcacgtgattgtggcctgctgcaaccagttctttgtgctggatgtggtgatcaacttccggcggctgtctgagggggacctcttcacccagctgaggaagatcgtgaagatggccagcaatgaagatgagcggctgccccccatcggcctgctgaccagtgatggccgctctgagtgggccgaggccaggacagtgctggtgaaggacagcaccaacagagacagcctggacatgattgagcgctgcatctgcctggtgtgcctggatgcccctggaggagtggagctgagtgacacccaccgggccctgcagctgctgcatggaggcggctacagcaagaatggagccaaccgctggtatgacaagagcctgcagtttgtggtgggcagagatggcacctgtggggtggtgtgtgagcacagcccctttgatggcatcgtgctggtgcagtgcacagagcacctgctgaagcacgtgacccagagcagcaggaagctgatccgggctgacagcgtgtctgagctgcctgccccccggcggctgcgctggaagtgcagccctgagatccagggccacctggccagcagcgctgagaagctgcagagaattgtgaagaacctggacttcatcgtgtacaagtttgacaactacggcaagaccttcatcaagaagcagaagtgcagcccagatgccttcatccaggtggccctgcagctggccttctaccgcctgcaccggcggctggtgcccacctatgagagcgccagcatccgccgcttccaggagggccgggtggacaacatccgcagcgccaccccagaggccctggcctttgtgcgggctgtgacagaccacaaggctgctgtgcctgccagcgagaagctgctgctgctgaaggatgccatccgggcccagacagcctacacagtgatggccatcaccggcatggccatcgacaaccacctgctggccctgcgggagctggcccgggccatgtgcaaggagctgcctgagatgttcatggatgagacctacctgatgagcaacagatttgtgctgagcaccagccagctgtgctggccctag

SEQ ID NO: 147402 - DNA, 1383 bp, synthetic construct
  misc_feature 1..1383: note = Description of Artificial Sequence: Synthetic coding sequence
  source 1..1383: mol_type = other DNA
atgaacaccagcgcccccccagctgtgagccccaacatcaccgtgctggcccctgggaagggcccctggcaggtggccttcatcggcatcaccaccggcctgctgagcctggccaccgtgactggaaacctgctggtgctgatctccttcaaggtgaacacagagctgaagacagtgaacaactacttcctgctgagcctggcctgtgccgacctgatcatcggcaccttctccatgaacctgtacaccacctacctgctgatgggccactgggccctgggcaccctggcctgtgacctgtggctggccctggactatgtggccagcaatgcctctgtgatgaacctgctgctgatcagctttgaccgctacttctctgtgacccggcccctgagctaccgggccaagaggaccccccggcgggccgccctgatgattggcctggcctggctggtgtcctttgtgctgtgggccccagccatcctcttctggcagtacctggtgggggagaggacagtgctggccggccagtgctacatccagttcctgagccagcccatcatcaccttcggcacagccatggccgccttctacctgcctgtgacagtgatgtgcaccctgtactggaggatctaccgggagacagagaacagagcccgggagctggccgccctgcagggcagcgagaccccaggaaaaggaggcggcagcagcagcagcagcgagaggagccagcccggggctgagggcagccctgagaccccacctggccgctgctgccgctgctgccgggccccccggctgctgcaggcctacagctggaaggaggaggaggaggaggatgagggctccatggagagcctgaccagcagcgagggggaggagcccggcagcgaggtggtgatcaagatgcccatggtggaccctgaggcccaggcccccaccaagcagccccccaggagcagccccaacacagtgaagaggcccaccaagaagggccgggacagagctgggaagggccagaagccccggggcaaggagcagctggccaagaggaagaccttcagcctggtgaaggagaagaaggccgcccggaccctgagcgccatcctgctggccttcatcctgacctggaccccctacaacatcatggtgctggtgtccaccttctgcaaggactgtgtgcctgagaccctgtgggagctgggctactggctgtgctacgtgaacagcaccatcaaccccatgtgctacgccctgtgcaacaaggccttccgggacaccttccggctgctgctgctgtgccgctgggacaagaggcgctggaggaagatccccaagaggcctggctctgtgcacaggacccccagccggcagtgctag

SEQ ID NO: 147403 - DNA, 405 bp, synthetic construct
  misc_feature 1..405: note = Description of Artificial Sequence: Synthetic coding sequence
  source 1..405: mol_type = other DNA
atgaacaccagcgcccccccagctgtgagccccaacatcaccgtgctggcccctgggaagggcccctggcaggtggccttcatcggcatcaccaccggcctgctgagcctggccaccgtgactggaaacctgctggtgctgatctccttcaaggtgaacacagagctgaagacagtgaacaactacttcctgctgagcctggcctgtgccgacctgatcatcggcaccttctccatgaacctgtacaccacctacctgctgatgggccactgggccctgggcaccctggcctgtgacctgtggctggccctggactatgtggccagcaatgcctctgtgatgaacctgctgctgatcagctttgaccgctacttctctgtgacccggcccctgagctacagatag

SEQ ID NO: 147404 - DNA, 1365 bp, synthetic construct
  misc_feature 1..1365: note = Description of Artificial Sequence: Synthetic coding sequence
  source 1..1365: mol_type = other DNA
atgaacaccagcgcccccccagctgtgagccccaacatcaccgtgctggcccctgggaagggcccctggcaggtggccttcatcggcatcaccaccggcctgctgagcctggccaccgtgactggaaacctgctggtgctgatctccttcaaggtgaacacagagctgaagacagtgaacaactacttcctgctgagcctggcctgtgccgacctgatcatcggcaccttctccatgaacctgtacaccacctacctgctgatgggccactgggccctgggcaccctggcctgtgacctgtggctggccctggactatgtggccagcaatgcctctgtgatgaacctgctgctgatcagctttgaccgctacttctctgtgacccggcccctgagctaccgggccaagaggaccccccggcgggccgccctgatgattggcctggcctggctggtgtcctttgtgctgtgggccccagccatcctcttctggcagtacctggtgggggagaggacagtgctggccggccagtgctacatccagttcctgagccagcccatcatcaccttcggcacagccatggccgccttctacctgcctgtgacagtgatgtgcaccctgtactggaggatctaccgggagacagagaacagagcccgggagctggccgccctgcagggcagcgagaccccaggaaaaggaggcggcagcagcagcagcagcgagaggagccagcccggggctgagggcagccctgagaccccacctggccgctgctgccgctgctgccgggccccccggctgctgcaggcctacagctggaaggaggaggaggaggaggatgagggctccatggagagcctgaccagcagcgagggggaggagcccggcagcgaggtggtgatcaagatgcccatggtggaccctgaggcccaggcccccaccaagcagccccccaggagcagccccaacacagtgaagaggcccaccaagaagggccgggacagagctgggaagggccagaagccccggggcaaggagcagctggccaagaggaagaccttcagcctggtgaaggagaagaaggccgcccggaccctgagcgccatcctgctggccttcatcctgacctggaccccctacaacatcatggtgctggtgtccaccttctgcaaggactgtgtgcctgagaccctgtgggagctgggctactggctgtgctacgtgaacagcaccatcaaccccatgtgctacgccctgtgcaacaaggccttccgggacaccttccggctgctgctgctgtgccgctgggacaagaggcgctggaggaagatccccaagaggcctggctctgtgcacaggtag

SEQ ID NO: 147405 - DNA, 1401 bp, synthetic construct
  misc_feature 1..1401: note = Description of Artificial Sequence: Synthetic coding sequence
  source 1..1401: mol_type = other DNA
atgaacaacagcaccaacagcagcaacaacagcctggccctgaccagcccctacaagacctttgaggtggtgttcatcgtgctggtggccggcagcctgagcctggtgaccatcatcggcaacatcctggtgatggtgtccatcaaggtgaacagacacctgcagacagtgaacaactacttcctgttcagcctggcctgtgccgacctgatcatcggggtcttctccatgaacctgtacaccctgtacaccgtcatcggctactggcccctgggccctgtggtgtgtgacctgtggctggccctggactatgtggtgtccaatgcctctgtgatgaacctgctgatcatcagctttgaccgctacttctgtgtgaccaagcccctgacctaccctgtgaagaggaccaccaagatggccggcatgatgattgctgctgcctgggtgctgtccttcatcctgtgggccccagccatcctcttctggcagttcatcgtgggcgtgaggacagtggaggatggagagtgctacatccagttcttcagcaatgctgctgtgaccttcggcacagccatcgccgccttctacctgcccgtcatcatcatgacagtgctgtactggcacatcagccgggccagcaagagccgcatcaagaaggacaagaaggagcctgtggccaaccaggaccctgtgagccccagcctggtgcagggccgcatcgtgaagcccaacaacaacaacatgcccagcagtgatgatggcctggagcacaacaagatccagaatggcaaggccccccgggaccctgtgacagagaactgtgtgcagggcgaggagaaggagagcagcaatgacagcacctctgtgtctgctgtggccagcaacatgagagatgatgagatcacccaggatgaaaatacagtgtccaccagcctgggccacagcaaggatgagaacagcaagcagacctgcatcagaattggcaccaagacccccaagagtgacagctgcacccccaccaacaccaccgtggaggtggtgggcagcagcggccagaatggagatgagaagcagaacatcgtggccaggaagatcgtgaagatgaccaagcagcctgccaagaagaagcccccacccagccgggagaagaaggtgaccaggaccatcctggccatcctgctggccttcatcatcacctgggccccctacaacgtgatggtgctgatcaacaccttctgtgccccctgcatccccaacacagtgtggaccatcggctactggctgtgctacatcaacagcaccatcaacccagcctgctacgccctgtgcaatgccaccttcaagaagaccttcaagcacctgctgatgtgccactacaagaacatcggggccaccaggtag

SEQ ID NO: 147406 - DNA, 1401 bp, synthetic construct; identical to SEQ ID NO: 147405
  misc_feature 1..1401: note = Description of Artificial Sequence: Synthetic coding sequence
  source 1..1401: mol_type = other DNA

SEQ ID NO: 147407 - DNA, 1401 bp, synthetic construct; identical to SEQ ID NO: 147405
  misc_feature 1..1401: note = Description of Artificial Sequence: Synthetic coding sequence
  source 1..1401: mol_type = other DNA

SEQ ID NO: 147408 - DNA, 1401 bp, synthetic construct; identical to SEQ ID NO: 147405
  misc_feature 1..1401: note = Description of Artificial Sequence: Synthetic coding sequence
  source 1..1401: mol_type = other DNA

SEQ ID NO: 147409 - DNA, 1401 bp, synthetic construct; identical to SEQ ID NO: 147405
  misc_feature 1..1401: note = Description of Artificial Sequence: Synthetic coding sequence
  source 1..1401: mol_type = other DNA

SEQ ID NO: 147410 - DNA, 1401 bp, synthetic construct; identical to SEQ ID NO: 147405
  misc_feature 1..1401: note = Description of Artificial Sequence: Synthetic coding sequence
  source 1..1401: mol_type = other DNA

SEQ ID NO: 147411 - DNA, 1773 bp, synthetic construct
  misc_feature 1..1773: note = Description of Artificial Sequence: Synthetic coding sequence
  source 1..1773: mol_type = other DNA
atgaccctgcacaacaacagcaccaccagccccctcttccccaacatcagcagctcctggatccacagccccagtgatgctggcctgcccccaggcaccgtgacccacttcggcagctacaacgtgtccagagctgctggcaacttcagcagcccagatggcaccacagatgaccccctgggcggccacacagtgtggcaggtggtgttcatcgccttcctgaccggcatcctggccctggtgaccatcatcggcaacatcctggtgattgtgtccttcaaggtgaacaagcagctgaagacagtgaacaactacttcctgctgagcctggcctgtgccgacctgatcattggagtcatctccatgaacctcttcaccacctacatcatcatgaaccgctgggccctgggcaacctggcctgtgacctgtggctggccattgattatgtggccagcaatgcctctgtgatgaacctgctggtgatcagctttgaccgctacttcagcatcacccggcccctgacctaccgggccaagaggaccaccaagagagctggggtgatgattggcctggcctgggtgatcagctttgtgctgtgggccccagccatcctcttctggcagtactttgtgggcaagaggacagtgcccccaggagagtgcttcatccagttcctgtctgagcccaccatcacctttggaacagccatcgccgccttctacatgcctgtgaccatcatgaccatcctgtactggaggatctacaaggagacagagaagaggaccaaggagctggccggcctgcaggccagcggcacagaagctgagacagagaactttgtgcaccccaccggcagcagccgcagctgcagcagctatgagctgcagcagcagagcatgaagaggagcaacagaagaaaatatggccgctgccacttctggttcaccaccaagtcctggaagcccagcagcgagcagatggaccaggaccacagcagcagtgacagctggaacaacaatgatgctgctgccagcctggagaacagcgccagcagtgatgaagaagatattggcagcgagacccgggccatctacagcatcgtgctgaagctgcccggccacagcaccatcctgaacagcaccaagctgcccagcagtgacaacctgcaggtgcctgaggaggagctgggcatggtggacctggagaggaaggctgacaagctgcaggcccagaagtctgtggatgatggcggcagcttccccaagagcttcagcaagctgcccatccagctggagagcgctgtggacacagccaagaccagtgatgtgaacagctctgtgggcaagagcacagccaccctgcccctgtccttcaaggaggccaccctggccaagagatttgccctgaagaccaggagccagatcaccaagaggaagaggatgagcctggtgaaggagaagaaggccgcccagaccctgagcgccatcctgctggccttcatcatcacctggaccccctacaacatcatggtgctggtgaacaccttctgtgacagctgcatccccaagaccttctggaacctgggctactggctgtgctacatcaacagcacagtgaaccctgtgtgctacgccctgtgcaacaagaccttccgcaccaccttcaagatgctgctgctgtgccagtgtgacaagaagaagaggaggaagcagcagtaccagcagaggcagagcgtcatcttccacaagagggcccctgagcaggccctgtag

SEQ ID NO: 147412 - DNA, 333 bp, synthetic construct
  misc_feature 1..333: note = Description of Artificial Sequence: Synthetic coding sequence
  source 1..333: mol_type = other DNA
atgaccctgcacaacaacagcaccaccagccccctcttccccaacatcagcagctcctggatccacagccccagtgatgctggcctgcccccaggcaccgtgacccacttcggcagctacaacgtgtccagagctgctggcaacttcagcagcccagatggcaccacagatgaccccctgggcggccacacagtgtggcaggtggtgttcatcgccttcctgaccggcatcctggccctggtgaccatcatcggcaacatcctggtgattgtgtccttcaaggtgaacaagcagctgaagacagtgaacaactacttcctgctgagcctgtag

SEQ ID NO: 147413 - DNA, 1440 bp, synthetic construct
  misc_feature 1..1440: note = Description of Artificial Sequence: Synthetic coding sequence
  source 1..1440: mol_type = other DNA
atggccaacttcacccctgtgaatggcagcagcggcaaccagagcgtgcggctggtgaccagcagcagccacaacagatatgaaacagtggagatggtgttcatcgccaccgtgacaggcagcctgagcctggtgacagtggtgggcaacatcctggtgatgctgagcatcaaggtgaaccggcagctgcagacagtgaacaactacttcctgttcagcctggcctgtgccgacctgatcattggagccttctccatgaacctgtacacagtgtacatcatcaagggctactggcccctgggcgctgtggtgtgtgacctgtggctggccctggactatgtggtgtccaatgcctctgtgatgaacctgctgatcatcagctttgaccgctacttctgtgtgaccaagcccctgacctacccagcccggaggaccaccaagatggccggcctgatgattgctgctgcctgggtgctgagctttgtgctgtgggccccagccatcctcttctggcagtttgtggtgggcaagaggacagtgcctgacaaccagtgcttcatccagttcctgagcaacccagctgtgacctttggaacagccatcgccgccttctacctgcctgtggtgatcatgacagtgctgtacatccacatcagcctggccagccgcagccgggtgcacaagcacaggcctgagggccccaaggagaagaaggccaagaccctggccttcctgaagagccccctgatgaagcagagcgtgaagaagcccccacctggagaggccgcccgggaggagctgagaaatggcaagctggaggaggcccctcctccagccctgcccccaccacccaggcctgtggccgacaaggacaccagcaatgaaagcagcagcggcagcgccacccagaacaccaaggagaggcctgccacagagctgagcaccacagaggccaccaccccagccatgcctgccccacccctgcagccccgggccctgaacccagccagccgctggagcaagatccagatcgtgaccaagcagacaggaaatgaatgtgtgacagccattgaaattgtgcctgccaccccagctggcatgaggcctgctgccaacgtggccaggaagtttgccagcatcgccaggaaccaggtgaggaagaagaggcagatggccgcccgggagaggaaggtgaccaggaccatctttgccatcctgctggccttcatcctgacctggaccccctacaacgtgatggtgctggtgaacaccttctgccagagctgcatcccagacacagtgtggagcatcggctactggctgtgctacgtgaacagcaccatcaacccagcctgctacgccctgtgcaatgccaccttcaagaagaccttccgccacctgctgctgtgccagtacagaaatattggaacagccaggtag

SEQ ID NO: 147414 - DNA, 1599 bp, synthetic construct
  misc_feature 1..1599: note = Description of Artificial Sequence: Synthetic coding sequence
  source 1..1599: mol_type = other DNA
atggagggggacagctaccacaatgccaccaccgtgaatggcacccctgtgaaccaccagcccctggagcggcaccggctgtgggaggtgatcaccatcgctgctgtgacagctgtggtgtccctcatcaccatcgtgggcaatgtgctggtgatgatctccttcaaggtgaacagccagctgaagacagtgaacaactactacctgctgagcctggcctgtgccgacctgatcatcggcatcttctccatgaacctgtacaccacctacatcctgatgggccgctgggccctgggcagcctggcctgtgacctgtggctggccctggactatgtggccagcaatgcctctgtgatgaacctgctggtgatcagctttgaccgctacttcagcatcacccggcccctgacctaccgggccaagaggacccccaagagagctggcatcatgattggcctggcctggctgatctccttcatcctgtgggccccagccatcctgtgctggcagtacctggtgggcaagaggacagtgcccctggatgagtgccagatccagttcctgtctgagcccaccatcacctttggaacagccatcgccgccttctacatccctgtgtctgtgatgaccatcctgtactgccgcatctaccgggagacagagaagaggaccaaggacctggccgacctgcagggcagtgacagcgtgaccaaggccgagaagaggaagccagcccaccgggccctcttccgcagctgcctgcgctgcccccggcccaccctggcccagcgggagaggaaccaggcctcctggagcagcagcagaagaagcaccagcaccaccgggaagcccagccaggccaccggccccagcgccaactgggccaaggccgagcagctgaccacctgcagcagctaccccagcagtgaagatgaggacaagccagccacagatcctgtgctgcaggtggtgtacaagagccagggcaaggagagccctggagaggagttctctgctgaggagacagaggagacctttgtgaaggccgagacagagaagagtgactatgacacccccaactacctgctgagccctgctgctgcccaccggcccaagagccagaagtgtgtggcctacaagttccggctggtggtgaaggcagatggcaaccaggagaccaacaacggctgccacaaggtgaagatcatgccctgccccttccctgtggccaaggagcccagcaccaagggcctgaaccccaaccccagccaccagatgaccaagaggaagagggtggtgctggtgaaggagaggaaggccgcccagaccctgagcgccatcctgctggccttcatcatcacctggaccccctacaacatcatggtgctggtgtccaccttctgtgacaagtgtgtgcctgtgaccctgtggcacctgggctactggctgtgctacgtgaacagcacagtgaaccccatctgctacgccctgtgcaacagaaccttcaggaagaccttcaagatgctgctgctgtgccgctggaagaagaagaaggtggaggagaagctgtactggcagggcaacagcaagctgccctag

SEQ ID NO: 147415 - DNA, 1599 bp, synthetic construct; identical to SEQ ID NO: 147414
  misc_feature 1..1599: note = Description of Artificial Sequence: Synthetic coding sequence
  source 1..1599: mol_type = other DNA

SEQ ID NO: 147416 - DNA, 69 bp, synthetic construct
  misc_feature 1..69: note = Description of Artificial Sequence: Synthetic coding sequence
  source 1..69: mol_type = other DNA
atggagggggacagctaccacaatgccaccaccgtgaatggcacccctgtgaaccaccagcccctgtag

SEQ ID NO: 147417 - DNA, 1449 bp, synthetic construct
  misc_feature 1..1449: note = Description of Artificial Sequence: Synthetic coding sequence
  source 1..1449: mol_type = other DNA
atggagccctggcccctgctgctgctcttcagcctgtgcagcgctggcctggtgctgggcagcgagcacgagacccggctggtggccaagctgttcaaggactacagctctgtggtgcggcctgtggaggaccaccggcaggtggtggaggtgacagtgggcctgcagctgatccagctgatcaacgtggatgaggtgaaccagatcgtgaccaccaacgtgcggctgaagcagggcgacatggtggacctgccccggcccagctgtgtgaccctgggcgtgcccctcttcagccacctgcagaatgagcagtgggtggactacaacctgaagtggaacccagatgattatggaggagtgaagaagatccacatccccagcgagaagatctggaggccagacctggtgctgtacaacaatgctgatggagactttgccatcgtgaagttcaccaaggtgctgctgcagtacacaggccacatcacctggaccccaccagccatcttcaagagctactgtgagatcatcgtgacccacttcccctttgatgagcagaactgcagcatgaagctgggcacctggacctatgatggctctgtggtggccatcaaccctgagagtgaccagcctgacctgagcaacttcatggagagcggggagtgggtgatcaaggagagccggggctggaagcacagcgtgacctacagctgctgcccagacaccccctacctggacatcacctaccactttgtgatgcagaggctgcccctgtacttcatcgtgaatgtcatcatcccctgcctgctcttctccttcctgaccggcctggtgttctacctgcccacagacagcggggagaagatgaccctgagcatctctgtgctgctgagcctgactgtgttcctgctggtgattgtggagctgatccccagcaccagcagcgctgtgcccctgattggcaagtacatgctgttcaccatggtgtttgtgattgccagcatcatcatcaccgtgattgtcatcaacacccaccacaggagccccagcacccacgtgatgcccaactgggtgaggaaggtgttcatcgacaccatccccaacatcatgttcttcagcaccatgaagaggcccagccgggagaagcaggacaagaagatcttcacagaagatattgacatcagtgacatcagcggcaagccaggccccccacccatgggcttccacagccccctcatcaagcaccctgaggtgaagagcgccatcgagggcatcaagtacatcgccgagaccatgaagagtgaccaggagagcaacaatgctgctgctgagtggaagtatgtggccatggtgatggaccacatcctgctgggcgtcttcatgctggtgtgcatcatcggcaccctggccgtgtttgctggccgcctcatcgagctgaaccagcagggctag

SEQ ID NO: 147418 - DNA, 1374 bp, synthetic construct
  misc_feature 1..1374: note = Description of Artificial Sequence: Synthetic coding sequence
  source 1..1374: mol_type = other DNA
atggagccctggcccctgctgctgctcttcagcctgtgcagcgctggcctggtgctgggcagcgagcacgagacccggctggtggccaagctgttcaaggactacagctctgtggtgcggcctgtggaggaccaccggcaggtggtggaggtgacagtgggcctgcagctgatccagctgatcaacgtggatgaggtgaaccagatcgtgaccaccaacgtgcggctgaagcagcagtgggtggactacaacctgaagtggaacccagatgattatggaggagtgaagaagatccacatccccagcgagaagatctggaggccagacctggtgctgtacaacaatgctgatggagactttgccatcgtgaagttcaccaaggtgctgctgcagtacacaggccacatcacctggaccccaccagccatcttcaagagctactgtgagatcatcgtgacccacttcccctttgatgagcagaactgcagcatgaagctgggcacctggacctatgatggctctgtggtggccatcaaccctgagagtgaccagcctgacctgagcaacttcatggagagcggggagtgggtgatcaaggagagccggggctggaagcacagcgtgacctacagctgctgcccagacaccccctacctggacatcacctaccactttgtgatgcagaggctgcccctgtacttcatcgtgaatgtcatcatcccctgcctgctcttctccttcctgaccggcctggtgttctacctgcccacagattctggagagaagatgaccctgagcatctctgtgctgctgagcctgaccgtcttcctgctggtgattgtggagctgatccccagcaccagcagcgctgtgcccctcatcggcaagtacatgctgttcaccatggtgtttgtgattgccagcatcatcatcaccgtcatcgtcatcaacacccaccacaggagccccagcacccacgtgatgcccaactgggtgaggaaggtgttcatcgacaccatccccaacatcatgttcttcagcaccatgaagaggcccagccgggagaagcaggacaagaagatcttcacagaggacatcgacatcagtgacatcagcggcaagccaggccccccacccatgggcttccacagccccctcatcaagcaccctgaggtgaagagcgccatcgagggcatcaagtacatcgccgagaccatgaagagtgaccaggagagcaacaatgctgctgctgagtggaagtatgtggccatggtgatggaccacatcctgctgggcgtcttcatgctggtgtgcatcatcggcaccctggccgtgtttgctggccgcctgattgagctgaaccagcagggctag

SEQ ID NO: 147419 - DNA, 1353 bp, synthetic construct
  misc_feature 1..1353: note = Description of Artificial Sequence: Synthetic coding sequence
  source 1..1353: mol_type = other DNA
atgggcctgcggagccaccacctgagcctgggcctgctgctgctcttcctgctgcctgcagaatgtctgggcgctgagggccgcctggccctgaagctgttccgggacctgtttgccaactacaccagcgccctgcggcctgtggccgacacagaccagaccctgaatgtgaccctggaggtgaccctgagccagatcatcgacatggatgagaggaaccaggtgctgaccctgtacctgtggatccggcaggagtggacagatgcctacctgcgctgggaccccaatgcctacggcggcctggatgccatccgcatccccagcagcctggtgtggaggccagacatcgtgctgtacaacaaggcagatgcccagcccccaggcagcgccagcaccaacgtggtgctgcggcatgatggagctgtgcgctgggatgccccagccatcaccaggagcagctgccgggtggatgtggccgccttcccctttgatgcccagcactgcggcctgaccttcggctcctggacccatggaggccaccagctggatgtgcggcccagaggagctgctgccagcctggccgactttgtggagaatgtggagtggagggtgctgggcatgcctgccaggagaagagtgctgacctacggctgctgcagcgagccctacccagatgtgaccttcaccctgctgctgcggcggcgggctgctgcctacgtgtgcaacctgctgctgccctgtgtgctgatcagcctgctggcccccctggccttccacctgcctgctgacagcggggagaaggtgtccctgggcgtgacagtgctgctggccctgactgtgttccagctgctgctggccgagagcatgcccccagctgagagcgtgcccctcatcggcaagtactacatggccaccatgaccatggtgaccttcagcacagccctgaccatcctgatcatgaacctgcactactgcggccccagcgtgcggcctgtgcctgcctgggcccgggccctgctgctgggccacctggcccggggcctgtgtgtgcgggagcggggggagccctgtggccagagccggcccccagagctgagccccagcccccagagccctgagggcggggccggccccccagctggcccctgccacgagccccgctgcctgtgccggcaggaggccctgctgcaccacgtggccaccatcgccaacaccttccgcagccacagagctgcccagcgctgccacgaggactggaagaggctggcccgggtgatggaccgcttcttcctggccatcttcttctccatggccctggtgatgagcctgctggtgctggtgcaggccctgtag

SEQ ID NO: 147420 - DNA, 1590 bp, synthetic construct
  misc_feature 1..1590: note = Description of Artificial Sequence: Synthetic coding sequence
  source 1..1590: mol_type = other DNA
atgggccccagctgccctgtgttcctgtccttcaccaagctgagcctgtggtggctgctgctgaccccagctggaggagaggaggccaagaggcccccaccccgggcccctggggaccccctgagcagccccagccccacagccctgccccagggcggcagccacacagaaacagaagatagactcttcaagcacctgttccggggctacaaccgctgggcccggcctgtgcccaacaccagtgatgtggtgattgtgcgcttcggcctgagcatcgcccagctgattgatgtggatgagaagaaccagatgatgaccaccaacgtgtggctgaagcaggagtggagcgactacaagctgcgctggaaccccacagactttggaaacatcaccagcctgcgggtgcccagcgagatgatctggatcccagacatcgtgctgtacaacaatgctgatggagaatttgctgtgacccacatgaccaaggcccacctgttcagcacaggcaccgtgcactgggtgcccccagccatctacaagagcagctgcagcattgatgtgaccttcttcccctttgaccagcagaactgcaagatgaagtttggctcctggacctatgacaaggccaagattgacctggagcagatggagcagacagtggacctgaaggactactgggagagcggggagtgggccatcgtgaatgccaccggcacctacaacagcaagaagtatgactgctgtgccgagatctacccagatgtgacctacgcctttgtgatccggcggctgcccctcttctacaccatcaacctgatcatcccctgcctgctgatcagctgcctgactgtgctggtgttctacctgcccagcgactgtggggagaagatcaccctgtgcatctctgtgctgctgagcctgaccgtcttcctgctgctgatcacagagatcatccccagcaccagcctggtgatccccctcatcggggagtacctgctcttcaccatgatctttgtgaccctgagcatcgtcatcaccgtgtttgtgctgaatgtgcaccacaggagccccagcacccacaccatgccccactgggtgcggggggccctgctgggctgtgtgccccgctggctgctgatgaacagacctcctcctcctgtggagctgtgccaccccctgcggctgaagctgagccccagctaccactggctggagagcaatgtggatgctgaggagcgggaggtggtggtggaggaggaggaccgctgggcctgtgccggccacgtggcccccagcgtgggcaccctgtgcagccacggccacctgcacagcggggccagcggccccaaggccgaggccctgctgcaggagggggagctgctgctgagcccccacatgcagaaggccctggagggcgtgcactacatcgctgaccacctgcggagtgaagatgctgacagctctgtgaaggaggactggaagtatgtggccatggtgattgaccgcatcttcctgtggctgttcatcatcgtgtgcttcctgggcaccatcggcctcttcctgccccccttcctggccggcatgatctag

SEQ ID NO: 147421 - DNA, 1590 bp, synthetic construct; identical to SEQ ID NO: 147420
  misc_feature 1..1590: note = Description of Artificial Sequence: Synthetic coding sequence
  source 1..1590: mol_type = other DNA

SEQ ID NO: 147422 - DNA, 1518 bp, synthetic construct
  misc_feature 1..1518: note = Description of Artificial Sequence: Synthetic coding sequence
  source 1..1518: mol_type = other DNA
atgggcagcggccccctgagcctgcccctggccctgagccccccccggctgctgctgctgctgctgctgagcctgctgcctgtggcccgggccagcgaggccgagcaccggctgtttgagcggctgtttgaggactacaatgagatcatccggcctgtggccaacgtgtctgaccctgtgatcatccactttgaggtgtccatgagccagctggtgaaggtggatgaggtgaaccagatcatggagaccaacctgtggctgaagcagatctggaatgactacaagctgaagtggaaccccagcgactatggaggagctgagttcatgagggtgcctgcccagaagatctggaagccagacatcgtgctgtacaacaatgctgtgggggacttccaggtggatgacaagaccaaggccctgctgaagtacaccggggaggtgacctggatccccccagccatcttcaagagcagctgcaagattgatgtgacctacttcccctttgactaccagaactgcaccatgaagtttggctcctggagctatgacaaggccaagattgacctggtgctgattggcagctccatgaacctgaaggactactgggagagcggggagtgggccatcatcaaggcccctggctacaagcatgacatcaagtacaactgctgtgaggagatctacccagacatcacctacagcctgtacatccggcggctgcccctcttctacaccatcaacctgatcatcccctgcctgctgatctccttcctgactgtgctggtgttctacctgcccagcgactgtggggagaaggtgaccctgtgcatctctgtgctgctgagcctgaccgtcttcctgctggtgatcacagagaccatccccagcaccagcctggtgatccccctcatcggggagtacctgctcttcaccatgatctttgtgaccctgagcatcgtcatcaccgtgtttgtgctgaatgtgcactaccgcacccccaccacccacaccatgcccagctgggtgaagacagtgttcctgaacctgctgccccgggtgatgttcatgacccggcccaccagcaatgaaggaaatgcccagaagccccggcccctgtatggagctgagctgagcaacctgaactgcttcagcagagctgagagcaagggctgcaaggagggctacccctgccaggacggcatgtgtggctactgccaccaccggcgcatcaagatcagcaacttcagcgccaacctgaccaggagcagcagcagcgagagcgtggatgctgtgctgagcctgagcgccctgagccctgagatcaaggaggccatccagagcgtgaagtacatcgccgagaacatgaaggcccagaatgaggccaaggagatccaggatgactggaagtatgtggccatggtgattgaccgcatcttcctgtgggtgttcaccctggtgtgcatcctgggcacagctggcctcttcctgcagcccctgatggccagagaagatgcctag

SEQ ID NO: 147423 - DNA, 939 bp, synthetic construct
  misc_feature 1..939: note = Description of Artificial Sequence: Synthetic coding sequence
  source 1..939: mol_type = other DNA
accaaggccctgctgaagtacaccggggaggtgacctggatccccccagccatcttcaagagcagctgcaagattgatgtgacctacttcccctttgactaccagaactgcaccatgaagtttggctcctggagctatgacaaggccaagattgacctggtgctgattggcagctccatgaacctgaaggactactgggagagcggggagtgggccatcatcaaggcccctggctacaagcatgacatcaagtacaactgctgtgaggagatctacccagacatcacctacagcctgtacatccggcggctgcccctcttctacaccatcaacctgatcatcccctgcctgctgatctccttcctgactgtgctggtgttctacctgcccagcgactgtggggagaaggtgaccctgtgcatctctgtgctgctgagcctgaccgtcttcctgctggtgatcacagagaccatccccagcaccagcctggtgatccccctcatcggggagtacctgctcttcaccatgatctttgtgaccctgagcatcgtcatcaccgtgtttgtgctgaatgtgcactaccgcacccccaccacccacaccatgcccagctgggtgaagacagtgttcctgaacctgctgccccgggtgatgttcatgacccggcccaccagcaatgaaggaaatgcccagaagccccggcccctgtatggagccagccccaaggccgcccggcgggagatcaaggaggccatccagagcgtgaagtacatcgccgagaacatgaaggcccagaatgaggccaaggagatccaggatgactggaagtatgtggccatggtgattgaccgcatcttcctgtgggtgttcaccctggtgtgcatcctgggcacagctggcctcttcctgcagcccctgatggcccgggaggatgcctag

SEQ ID NO: 147424 - DNA, 1470 bp, synthetic construct
  misc_feature 1..1470: note = Description of Artificial Sequence: Synthetic coding sequence
  source 1..1470: mol_type = other DNA
atgggcagcggccccctgagcctgcccctggccctgagccccccccggctgctgctgctgctgctgctgagcctgctgcctgtggcccgggccagcgaggccgagcaccggctgtttgagcggctgtttgaggactacaatgagatcatccggcctgtggccaacgtgtctgaccctgtgatcatccactttgaggtgtccatgagccagctggtgaaggtggatgaggtgaaccagatcatggagaccaacctgtggctgaagcagatctggaatgactacaagctgaagtggaaccccagcgactatggaggagctgagttcatgagggtgcctgcccagaagatctggaagccagacatcgtgctgtacaacaatgctgtgggggacttccaggtggatgacaagaccaaggccctgctgaagtacaccggggaggtgacctggatccccccagccatcttcaagagcagctgcaagattgatgtgacctacttcccctttgactaccagaactgcaccatgaagtttggctcctggagctatgacaaggccaagattgacctggtgctgattggcagctccatgaacctgaaggactactgggagagcggggagtgggccatcatcaaggcccctggctacaagcatgacatcaagtacaactgctgtgaggagatctacccagacatcacctacagcctgtacatccggcggctgcccctcttctacaccatcaacctgatcatcccctgcctgctgatctccttcctgactgtgctggtgttctacctgcccagcgactgtggggagaaggtgaccctgtgcatctctgtgctgctgagcctgaccgtcttcctgctggtgatcacagagaccatccccagcaccagcctggtgatccccctcatcggggagtacctgctcttcaccatgatctttgtgaccctgagcatcgtcatcaccgtgtttgtgctgaatgtgcactaccgcacccccaccacccacaccatgcccagctgggtgaagacagtgttcctgaacctgctgccccgggtgatgttcatgacccggcccaccagcaatgaaggaaatgcccagaagccccggcccctgtatggagctgagctgagcaacctgaactgcttcagcagagctgagagcaagggctgcaaggagggctacccctgccaggacggcatgtgtggctactgccaccaccggcgcatcaagatcagcaacttcagcgccaacctgaccaggagcagcagcagcgagagcgtggatgctgtgctgagcctgagcgccctgagccctgagatcaaggaggccatccagagcgtgaagtacatcgccgagaacatgaaggcccagaatgaggccaaggaggagcagaaggcccaggagatccagcagctgaagaggaaggagaagagcacagagaccagtgaccaggagcccggcctgtag

SEQ ID NO: 147425 - DNA, 1518 bp, synthetic construct; identical to SEQ ID NO: 147422
  misc_feature 1..1518: note = Description of Artificial Sequence: Synthetic coding sequence
  source 1..1518: mol_type = other DNA

SEQ ID NO: 147426 - DNA, 1602 bp, synthetic construct
  misc_feature 1..1602: note = Description of Artificial Sequence: Synthetic coding sequence
  source 1..1602: mol_type = other DNA
gcccctgagcccggggaggccccccggctggaccgggcccaccctggctgtgcctgtgccgagctgagcctgctgtggctgtgctgctgcaccttcaccagcgcagatggagactttgctgtgacccacctgaccaaggcccacctgttccatgatggccgggtgcagtggaccccaccagccatctacaagagcagctgcagcattgatgtgaccttcttcccctttgaccagcagaactgcaccatgaagtttggctcctggacctatgacaaggccaagattgacctggtgaacatgcacagccgggtggaccagctggacttctgggagagcggggagtgggtgattgtggatgctgtgggcacctacaacaccaggaaatatgagtgctgtgccgagatctacccagacatcacctacgcctttgtgatccggcggctgcccctcttctacaccatcaacctgatcatcccctgcctgctgatcagctgcctgactgtgctggtgttctacctgcccagtgaatgtggggagaagatcaccctgtgcatctctgtgctgctgagcctgaccgtcttcctgctgctgatcacagagatcatccccagcaccagcctggtgatccccctcatcggggagtacctgctcttcaccatgatctttgtgaccctgagcatcgtcatcaccgtgtttgtgctgaatgtgcaccacaggagccccaggacccacaccatgcccacctgggtgagaagagtcttcctggacatcgtgccccggctgctgctgatgaagaggcccagcgtggtgaaggacaactgcagaagactcatcgagagcatgcacaagatggccagcgccccccgcttctggccagagcctgagggggagcccccagccaccagcggcacccagagcctgcacccccccagccccagcttctgtgtgcccctggatgtgcctgctgagcccggccccagctgcaagagccccagcgaccagctgcccccccagcagcccctggaggccgagaaggccagcccccaccccagccctggcccctgcaggcctcctcatggcacccaggcccctggcctggccaaggcccggagcctgtctgtgcagcacatgagcagccctggagaggccgtggagggcggcgtgcgctgccgcagccgcagcatccagtactgtgtgcccagagatgatgctgcccctgaggctgatggccaggccgccggggccctggccagcaggaacacccacagcgctgagctgcccccaccagaccagcccagcccctgcaagtgcacctgcaagaaggagcccagctctgtgagccccagcgccaccgtgaagaccaggagcaccaaggcccccccaccccacctgcccctgagccctgccctgaccagggctgtggagggcgtgcagtacatcgctgaccacctgaaggccgaggacacagacttctctgtgaaggaggactggaagtatgtggccatggtgattgaccgcatcttcctgtggatgttcatcatcgtgtgcctgctgggcaccgtgggcctcttcctgcccccctggctggccggcatgatctag

SEQ ID NO: 147427 - DNA, 1884 bp, synthetic construct
  misc_feature 1..1884: note = Description of Artificial Sequence: Synthetic coding sequence
  source 1..1884: mol_type = other DNA
atggagctgggcggccctggggccccccggctgctgccccccctgctgctgctgctgggcaccggcctgctgcgggccagcagccacgtggagacccgggcccacgccgaggagcggctgctgaagaagctgttcagcggctacaacaagtggagcaggcctgtggccaacatcagtgatgtggtgctggtgcgcttcggcctgagcatcgcccagctgattgatgtggatgagaagaaccagatgatgaccaccaacgtgtgggtgaagcaggagtggcatgactacaagctgcgctgggaccctgctgactatgaaaatgtgaccagcatccgcatccccagcgagctgatctggaggccagacatcgtgctgtacaacaatgctgatggagactttgctgtgacccacctgaccaaggcccacctgttccatgatggccgggtgcagtggaccccaccagccatctacaagagcagctgcagcattgatgtgaccttcttcccctttgaccagcagaactgcaccatgaagtttggctcctggacctatgacaaggccaagattgacctggtgaacatgcacagccgggtggaccagctggacttctgggagagcggggagtgggtgattgtggatgctgtgggcacctacaacaccaggaaatatgagtgctgtgccgagatctacccagacatcacctacgcctttgtgatccggcggctgcccctcttctacaccatcaacctgatcatcccctgcctgctgatcagctgcctgactgtgctggtgttctacctgcccagtgaatgtggggagaagatcaccctgtgcatctctgtgctgctgagcctgaccgtcttcctgctgctgatcacagagatcatccccagcaccagcctggtgatccccctcatcggggagtacctgctcttcaccatgatctttgtgaccctgagcatcgtcatcaccgtgtttgtgctgaatgtgcaccacaggagccccaggacccacaccatgcccacctgggtgagaagagtcttcctggacatcgtgccccggctgctgctgatgaagaggcccagcgtggtgaaggacaactgcagaagactcatcgagagcatgcacaagatggccagcgccccccgcttctggccagagcctgagggggagcccccagccaccagcggcacccagagcctgcacccccccagccccagcttctgtgtgcccctggatgtgcctgctgagcccggccccagctgcaagagccccagcgaccagctgcccccccagcagcccctggaggccgagaaggccagcccccaccccagccctggcccctgcaggcctcctcatggcacccaggcccctggcctggccaaggcccggagcctgtctgtgcagcacatgagcagccctggagaggccgtggagggcggcgtgcgctgccgcagccgcagcatccagtactgtgtgcccagagatgatgctgcccctgaggctgatggccaggccgccggggccctggccagcaggaacacccacagcgctgagctgcccccaccagaccagcccagcccctgcaagtgcacctgcaagaaggagcccagctctgtgagccccagcgccaccgtgaagaccaggagcaccaaggcccccccaccccacctgcccctgagccctgccctgaccagggctgtggagggcgtgcagtacatcgctgaccacctgaaggccgaggacacagacttctctgtgaaggaggactggaagtatgtggccatggtgattgaccgcatcttcctgtggatgttcatcatcgtgtgcctgctgggcaccgtgggcctcttcctgcccccctggctggccggcatgatctag

SEQ ID NO: 147428 - DNA, 1671 bp, synthetic construct
  misc_feature 1..1671: note = Description of Artificial Sequence: Synthetic coding sequence
  source 1..1671: mol_type = other DNA
atgaggatgagccccccatctgccagcccccccagcagcagcggcggccgcaccagcagcagcaccaccacagctggggagcccttctgggccggcgtgctgtttgccatccggccccaccctggcctgagcggcagaattgtgtggacagctggctgccctggagagggcgcagatggagactttgctgtgacccacctgaccaaggcccacctgttccatgatggccgggtgcagtggaccccaccagccatctacaagagcagctgcagcattgatgtgaccttcttcccctttgaccagcagaactgcaccatgaagtttggctcctggacctatgacaaggccaagattgacctggtgaacatgcacagccgggtggaccagctggacttctgggagagcggggagtgggtgattgtggatgctgtgggcacctacaacaccaggaaatatgagtgctgtgccgagatctacccagacatcacctacgccttcgtcatccggcggctgcccctcttctacaccatcaacctgatcatcccctgcctgctgatcagctgcctgactgtgctggtgttctacctgcccagtgaatgtggggagaagatcaccctgtgcatctctgtgctgctgagcctgactgtgttcctgctgctgatcacagagatcatccccagcaccagcctggtgatccccctgattggagagtacctgctcttcaccatgatctttgtgaccctgagcatcgtcatcaccgtgtttgtgctgaatgtgcaccacaggagccccaggacccacaccatgcccacctgggtgcggcgggtcttcctggacatcgtgccccggctgctgctgatgaagaggccttctgtggtgaaggacaactgccggcggctgattgaatccatgcacaagatggccagcgccccccgcttctggccagagcctgagggggagcccccagccaccagcggcacccagagcctgcacccccccagccccagcttctgtgtgcccctggatgtgcctgctgagcccggccccagctgcaagagccccagcgaccagctgcccccccagcagcccctggaggccgagaaggccagcccccaccccagccctggcccctgccggcccccccacggcacccaggcccctggcctggccaaggcccggagcctgtctgtgcagcacatgagcagccctggagaggccgtggagggcggcgtgcgctgccgcagccgcagcatccagtactgtgtgcccagagatgatgctgcccctgaggctgatggccaggccgccggggccctggccagcaggaacacccacagcgctgagctgcccccaccagaccagcccagcccctgcaagtgcacctgcaagaaggagcccagctctgtgagccccagcgccaccgtgaagaccaggagcaccaaggcccccccaccccacctgcccctgagccctgccctgaccagggctgtggagggcgtgcagtacatcgctgaccacctgaaggccgaggacacagacttctctgtgaaggaggactggaagtatgtggccatggtgattgaccgcatcttcctgtggatgttcatcatcgtgtgcctgctgggcaccgtgggcctcttcctgcccccctggctggccggcatgatctag

SEQ ID NO: 147429 - DNA, 1407 bp, synthetic construct
  misc_feature 1..1407: note = Description of Artificial Sequence: Synthetic coding sequence
  source 1..1407: mol_type = other DNA
atggccgcccggggcagcggcccccgggccctgcggctgctgctgctggtgcagctggtggccggccgctgtggcctggccggggccgccggcggggcccagaggggcctgtctgagcccagcagcatcgccaagcatgaggacagcctgctgaaggacctcttccaggactatgagcgctgggtgcggcctgtggagcacctgaatgacaagatcaagatcaagtttggcctggccatcagccagctggtggatgtggatgagaagaaccagctgatgaccaccaacgtgtggctgaagcaggagtggattgatgtgaagctgcgctggaacccagatgattatggaggcatcaaggtgatccgggtgcccagcgacagcgtgtggaccccagacatcgtgctgtttgacaatgctgatggccgctttgagggcaccagcaccaagacagtcatccgctacaatggaacagtgacctggaccccaccagccaactacaagagcagctgcaccattgatgtgaccttcttcccctttgacctgcagaactgcagcatgaagtttggctcctggacctatgatggcagccaggtggacatcatcctggaggaccaggatgtggacaagagggacttctttgacaatggagagtgggagatcgtgtctgccaccggcagcaaaggaaacagaacagacagctgctgctggtacccctacgtgacctacagctttgtgatcaagaggctgcccctcttctacaccctcttcctgatcatcccctgcatcggcctgtccttcctgactgtgctggtgttctacctgcccagcaatgaaggagagaagatctgcctgtgcacctctgtgctggtgtccctgactgtgttcctgctggtgattgaggagatcatccccagcagcagcaaggtgatccccctgattggagagtacctggtgttcaccatgatctttgtgaccctgagcatcatggtgacagtgtttgccatcaacatccaccacaggagcagcagcacccacaatgccatggcccccctggtgaggaagatcttcctgcacaccctgcccaagctgctgtgcatgaggagccacgtggaccgctacttcacccagaaggaggagacagagagcggcagcggccccaagagcagcaggaacaccctggaggccgccctggacagcatccgctacatcaccaggcacatcatgaaggaaaatgatgtgcgggaggtggtggaggactggaagttcatcgcccaggtgctggacaggatgttcctgtggaccttcctgtttgtgtccatcgtgggcagcctgggcctgtttgtgcctgtgatctacaagtgggccaacatcctgatccctgtgcacatcggaaatgccaacaagtag

SEQ ID NO: 147430 - DNA, 1485 bp, synthetic construct
  misc_feature 1..1485: note = Description of Artificial Sequence: Synthetic coding sequence
  source 1..1485: mol_type = other DNA
atgctgaccagcaagggccagggcttcctgcatggaggcctgtgcctgtggctgtgtgtgttcacccccttcttcaagggctgtgtgggctgtgccacagaggagcggctcttccacaagctgttcagccactacaaccagttcatccggcctgtggagaatgtgtctgaccctgtgacagtgcactttgaggtggccatcacccagctggccaacgtggatgaggtgaaccagatcatggagaccaacctgtggctgcggcacatctggaatgactacaagctgcgctgggaccccatggagtatgatggcatcgagaccctgcgggtgcctgctgacaagatctggaagccagacatcgtgctgtacaacaatgctgtgggggacttccaggtggagggcaagaccaaggccctgctgaagtacaacggcatgatcacctggaccccaccagccatcttcaagagcagctgccccatggacatcaccttcttcccctttgaccaccagaactgcagcctgaagtttggctcctggacctatgacaaggccgagattgacctgctgatcatcggcagcaaggtggacatgaatgacttctgggagaacagcgagtgggagatcattgatgccagcggctacaagcatgacatcaagtacaactgctgtgaggagatctacacagacatcacctacagcttctacatccggcggctgcccatgttctacaccatcaacctgatcatcccctgcctcttcatctccttcctgactgtgctggtgttctacctgcccagcgactgtggggagaaggtgaccctgtgcatctctgtgctgctgagcctgactgtgttcctgctggtgatcacagagaccatccccagcaccagcctggtggtgcccctggtgggggagtacctgctcttcaccatgatctttgtgaccctgagcatcgtggtgacagtgtttgtgctgaacatccactaccgcacccccaccacccacaccatgccccgctgggtgaagacagtgttcctgaagctgctgccccaggtgctgctgatgcgctggcccctggacaagacccggggcactggaagtgatgctgtgccccggggcctggcccggcggcctgccaagggcaagctggccagccacggggagcccaggcacctgaaggagtgcttccactgccacaagagcaatgagctggccaccagcaagaggcggctgagccaccagcccctgcagtgggtggtggagaacagcgagcacagccctgaggtggaggatgtgatcaacagcgtgcagttcatcgccgagaacatgaagagccacaatgagaccaaggaggtggaggatgactggaagtatgtggccatggtggtggacagagtcttcctgtgggtgttcatcatcgtgtgtgtgtttggaacagctggcctcttcctgcagcccctgctgggcaacacaggcaagagctag

SEQ ID NO: 147431 - DNA, 1440 bp, synthetic construct
  misc_feature 1..1440: note = Description of Artificial Sequence: Synthetic coding sequence
  source 1..1440: mol_type = other DNA
atgctgaccagcaagggccagggcttcctgcatggaggcctgtgcctgtggctgtgtgtgttcacccccttcttcaagggctgtgtgggctgtgccacagaggagcggctcttccacaagctgttcagccactacaaccagttcatccggcctgtggagaatgtgtctgaccctgtgacagtgcactttgaggtggccatcacccagctggccaacgtcatctggaatgactacaagctgcgctgggaccccatggagtatgatggcatcgagaccctgcgggtgcctgctgacaagatctggaagccagacatcgtgctgtacaacaatgctgtgggggacttccaggtggagggcaagaccaaggccctgctgaagtacaacggcatgatcacctggaccccaccagccatcttcaagagcagctgccccatggacatcaccttcttcccctttgaccaccagaactgcagcctgaagtttggctcctggacctatgacaaggccgagattgacctgctgatcatcggcagcaaggtggacatgaatgacttctgggagaacagcgagtgggagatcattgatgccagcggctacaagcatgacatcaagtacaactgctgtgaggagatctacacagacatcacctacagcttctacatccggcggctgcccatgttctacaccatcaacctgatcatcccctgcctcttcatctccttcctgactgtgctggtgttctacctgcccagcgactgtggggagaaggtgaccctgtgcatctctgtgctgctgagcctgaccgtcttcctgctggtgatcacagagaccatccccagcaccagcctggtggtgcccctggtgggggagtacctgctcttcaccatgatctttgtgaccctgagcatcgtggtgacagtgtttgtgctgaacatccactaccgcacccccaccacccacaccatgccccgctgggtgaagacagtgttcctgaagctgctgccccaggtgctgctgatgcgctggcccctggacaagacccggggcaccggcagtgatgctgtgccccggggcctggcccggcggcctgccaagggcaagctggccagccatggagagcccaggcacctgaaggagtgcttccactgccacaagagcaatgagctggccaccagcaagaggcggctgagccaccagcccctgcagtgggtggtggagaacagcgagcacagccctgaggtggaggatgtgatcaacagcgtgcagttcatcgccgagaacatgaagagccacaatgagaccaaggaggtggaggatgactggaagtatgtggccatggtggtggacagagtcttcctgtgggtgttcatcatcgtgtgtgtgtttggaacagctggcctcttcctgcagcccctgctgggcaacacaggcaagagctag

SEQ ID NO: 147432 - DNA, 1509 bp, synthetic construct
  misc_feature 1..1509: note = Description of Artificial Sequence: Synthetic coding sequence
  source 1..1509: mol_type = other DNA
atgcgctgcagccctggaggagtgtggctggccctggccgccagcctgctgcacgtgtccctgcagggcgagttccagaggaagctgtacaaggagctggtgaagaactacaaccccctggagaggcctgtggccaatgacagccagcccctgactgtgtacttcagcctgagcctgctgcagatcatggatgtggatgagaagaaccaggtgctgaccaccaacatctggctgcagatgtcctggacagaccactacctgcagtggaatgtgtctgagtacccaggagtgaagacagtgcgcttcccagatggccagatctggaagccagacatcctgctgtacaacagcgcagatgaaagatttgatgccaccttccacaccaacgtgctggtgaacagcagcggccactgccagtacctgcccccaggcatcttcaagagcagctgctacattgatgtgcgctggttcccctttgatgtgcagcactgcaagctgaagtttggctcctggagctatggaggctggagcctggacctgcagatgcaggaggccgacatcagcggctacatccccaatggagagtgggacctggtgggcatccctgggaagaggtctgagcgcttctatgagtgctgcaaggagccctacccagatgtgaccttcaccgtgaccatgagaagaaggaccctgtactacggcctgaacctgctgatcccctgtgtgctgatcagcgccctggccctgctggtgttcctgctgcctgctgacagcggggagaagatcagcctgggcatcaccgtgctgctgagcctgactgtgttcatgctgctggtggccgagatcatgcctgccaccagtgacagcgtgcccctgattgcccagtactttgccagcaccatgatcatcgtgggcctgtctgtggtggtgacagtgattgtgctgcagtaccaccaccacgaccctgatggcggcaagatgcccaagtggaccagggtcatcctgctgaactggtgtgcctggttcctgaggatgaagaggcctggagaggacaaggtgcggcctgcctgccagcacaagcagaggcgctgcagcctggcctctgtggagatgtctgctgtggcccctcctccagccagcaatggaaacctgctgtacatcggcttccggggcctggatggagtgcactgtgtgcccaccccagattctggagtggtgtgtggccgcatggcctgcagccccacccatgatgagcacctgctgcacggcggccagcccccagagggggaccctgacctggccaagatcctggaggaggtgcgctacatcgccaaccgcttccgctgccaggatgaaagtgaagctgtgtgcagcgagtggaagtttgctgcctgtgtggtggaccggctgtgcctgatggccttcagcgtcttcaccatcatctgcaccatcggcatcctgatgtctgcccccaactttgtggaggccgtgtccaaggactttgcctag

SEQ ID NO: 147433 - DNA, 210 bp, synthetic construct
  misc_feature 1..210: note = Description of Artificial Sequence: Synthetic coding sequence
  source 1..210: mol_type = other DNA
atgcagaagtactgcatctaccagcacttccagttccagctgctgatccagcacctgtggattgctgccaactgtgacatctgggccaaggtggcccgggtgattggcctgctggccagccacaagacagacctgcaggagaacacccctgtggtggaggccttccccaacagccccaggacccccaccctgcccggggtgctgacctag

SEQ ID NO: 147434 - DNA, 1239 bp, synthetic construct
  misc_feature 1..1239: note = Description of Artificial Sequence: Synthetic coding sequence
  source 1..1239: mol_type = other DNA
atgcagaagtactgcatctaccagcacttccagttccagctgctgatccagcacctgtggattgctgccaactgtgacattgctgatgaaagatttgatgccaccttccacaccaacgtgctggtgaacagcagcggccactgccagtacctgcccccaggcatcttcaagagcagctgctacattgatgtgcgctggttcccctttgatgtgcagcactgcaagctgaagtttggctcctggagctatggaggctggagcctggacctgcagatgcaggaggccgacatcagcggctacatccccaatggagagtgggacctggtgggcatccctgggaagaggtctgagcgcttctatgagtgctgcaaggagccctacccagatgtgaccttcaccgtgaccatgagaagaaggaccctgtactacggcctgaacctgctgatcccctgtgtgctgatcagcgccctggccctgctggtgttcctgctgcctgctgacagcggggagaagatcagcctgggcatcaccgtgctgctgagcctgactgtgttcatgctgctggtggccgagatcatgcctgccaccagtgacagcgtgcccctgattgcccagtactttgccagcaccatgatcatcgtgggcctgtctgtggtggtgacagtgattgtgctgcagtaccaccaccacgaccctgatggcggcaagatgcccaagtggaccagggtcatcctgctgaactggtgtgcctggttcctgaggatgaagaggcctggagaggacaaggtgcggcctgcctgccagcacaagcagaggcgctgcagcctggcctctgtggagatgtctgctgtggcccctcctccagccagcaatggaaacctgctgtacatcggcttccggggcctggatggagtgcactgtgtgcccaccccagattctggagtggtgtgtggccgcatggcctgcagccccacccatgatgagcacctgctgcacggcggccagcccccagagggggaccctgacctggccaagatcctggaggaggtgcgctacatcgccaaccgcttccgctgccaggatgaaagtgaagctgtgtgcagcgagtggaagtttgctgcctgtgtggtggaccggctgtgcctgatggccttcagcgtcttcaccatcatctgcaccatcggcatcctgatgtctgcccccaactttgtggaggccgtgtccaaggactttgcctag

SEQ ID NO: 147435 - DNA, 447 bp, synthetic construct
  misc_feature 1..447: note = Description of Artificial Sequence: Synthetic coding sequence
  source 1..447: mol_type = other DNA
atgcgctgcagccctggaggagtgtggctggccctggccgccagcctgctgcacgtgtccctgcagggcgagttccagaggaagctgtacaaggagctggtgaagaactacaaccccctggagaggcctgtggccaatgacagccagcccctgactgtgtacttcagcctgagcctgctgcagatcatggatgtggatgagaagaaccaggtgctgaccaccaacatctggctgcagatgtcctggacagaccactacctgcagtggaatgtgtctgagtacccaggagtgaagacagtgcgcttcccagatggccagatctggaagccagacatcctgctgtacaacagcagctatgaccagcagcaggaggtgctggcctacggcatgcactgctggagcccccagtttggccccaccagcagctccatgtttcctgtggtgtag

SEQ ID NO: 147436 - DNA, 600 bp, synthetic construct
  misc_feature 1..600: note = Description of Artificial Sequence: Synthetic coding sequence
  source 1..600: mol_type = other DNA
atgaccaacagcaggaagtgctggcccatgggctgcacagctggggcccacagcctggacccccacccccggctgtgcagcctgctgtgcattggagagttctgtggcagagatggctgcagcgcagatgaaagatttgatgccaccttccacaccaacgtgctggtgaacagcagcggccactgccagtacctgcccccaggcatcttcaagagcagctgctacattgatgtgcgctggttcccctttgatgtgcagcactgcaagctgaagtttggctcctggagctatggaggctggagcctggacctgcagatgcaggaggccgacatcagcggctacatccccaatggagagtgggacctggtgggcatccctgggaagaggtctgagcgcttctatgagtgctgcaaggagccctacccagatgtgaccttcaccgtgaccatgagaagaaggaccctgtactacggcctgaacctgctgatcccctgtgtgctgatcagcgccctggccctgctggtgttcctgctgcctgctgacagcggggagaagatcagcctgggcatcaccgtgctgctgagcctgactgtgttctag

SEQ ID NO: 147437 - DNA, 1596 bp, synthetic construct
  misc_feature 1..1596: note = Description of Artificial Sequence: Synthetic coding sequence
  source 1..1596: mol_type = other DNA
atgcgctgcagccctggaggagtgtggctggccctggccgccagcctgctgcacggcaaggccacagccagcccccccagcaccccaccctgggaccccggccacatccctggggcctctgtgcggcctgcccctggccctgtgtccctgcagggcgagttccagaggaagctgtacaaggagctggtgaagaactacaaccccctggagaggcctgtggccaatgacagccagcccctgactgtgtacttcagcctgagcctgctgcagatcatggatgtggatgagaagaaccaggtgctgaccaccaacatctggctgcagatgtcctggacagaccactacctgcagtggaatgtgtctgagtacccaggagtgaagacagtgcgcttcccagatggccagatctggaagccagacatcctgctgtacaacagcgcagatgaaagatttgatgccaccttccacaccaacgtgctggtgaacagcagcggccactgccagtacctgcccccaggcatcttcaagagcagctgctacattgatgtgcgctggttcccctttgatgtgcagcactgcaagctgaagtttggctcctggagctatggaggctggagcctggacctgcagatgcaggaggccgacatcagcggctacatccccaacggggagtgggacctggtgggcatccctgggaagaggtctgagcgcttctatgagtgctgcaaggagccctacccagatgtgaccttcaccgtgaccatgagaagaaggaccctgtactacggcctgaacctgctgatcccctgtgtgctgatcagcgccctggccctgctggtgttcctgctgcctgctgacagcggggagaagatcagcctgggcatcaccgtgctgctgagcctgaccgtcttcatgctgctggtggccgagatcatgcctgccaccagtgacagcgtgcccctcatcgcccagtactttgccagcaccatgatcatcgtgggcctgtctgtggtggtgaccgtcatcgtgctgcagtaccaccaccacgaccctgatggcggcaagatgcccaagtggaccagggtcatcctgctgaactggtgtgcctggttcctgaggatgaagaggcctggagaggacaaggtgcggcctgcctgccagcacaagcagaggcgctgcagcctggcctctgtggagatgtctgctgtggcccctcctccagccagcaatggaaacctgctgtacatcggcttccggggcctggatggagtgcactgtgtgcccaccccagacagcggcgtggtgtgtggccgcatggcctgcagccccacccatgatgagcacctgctgcatggaggccagcccccagagggggaccctgacctggccaagatcctggaggaggtgcgctacatcgccaaccgcttccgctgccaggatgagagcgaggccgtgtgcagcgagtggaagtttgctgcctgtgtggtggaccggctgtgcctgatggccttctctgtgttcaccatcatctgcaccatcggcatcctgatgtctgcccccaactttgtggaggccgtgtccaaggactttgcctag

SEQ ID NO: 147438 - DNA, 966 bp, synthetic construct
  misc_feature 1..966: note = Description of Artificial Sequence: Synthetic coding sequence
  source 1..966: mol_type = other DNA
atgcaggaggccgacatcagcggctacatccccaacggggagtgggacctggtgggcatccctgggaagaggtctgagcgcttctatgagtgctgcaaggagccctacccagatgtgaccttcaccgtgaccatgagaagaaggaccctgtactacggcctgaacctgctgatcccctgtgtgctgatcagcgccctggccctgctggtgttcctgctgcctgctgacagcggggagaagatcagcctgggcatcaccgtgctgctgagcctgaccgtcttcatgctgctggtggccgagatcatgcctgccaccagtgacagcgtgcccctcatcgcccagtactttgccagcaccatgatcatcgtgggcctgtctgtggtggtgaccgtcatcgtgctgcagtaccaccaccacgaccctgatggcggcaagatgcccaagtggaccagggtcatcctgctgaactggtgtgcctggttcctgaggatgaagaggcctggagaggacaaggtgcggcctgcctgccagcacaagcagaggcgctgcagcctggcctctgtggagatgtctgctgtggcccctcctccagccagcaatggaaacctgctgtacatcggcttccggggcctggatggagtgcactgtgtgcccaccccagacagcggcgtggtgtgtggccgcatggcctgcagccccacccatgatgagcacctgctgcatggaggccagcccccagagggggaccctgacctggccaagatcctggaggaggtgcgctacatcgccaaccgcttccgctgccaggatgagagcgaggccgtgtgcagcgagtggaagtttgctgcctgtgtggtggaccggctgtgcctgatggccttctctgtgttcaccatcatctgcaccatcggcatcctgatgtctgcccccaactttgtggaggccgtgtccaaggactttgcctag
